United States Patent Application Publication US 2024/0271161 A1 - sequence listing, part 4

SEQ ID NO: 37191 - protein, 509 aa, Escherichia coli
MRRAISYIRFSSERQLKGDSVRRQSKLVTDWLDKNPEFYLDSSLSFKDLGKSAFSGKHLKGGLGDFLTAIEKGLVKAGDTLLIESLDRLSRQDIDIASELLRRILRAGVDVVTLSDGEHYTRESLKDPLALIKSILIMQRAHEESLRKSERVQAAWNRKKELISEGIKVSRRCPAWLKLNDDRRTFTIIPDKVEVVKRAFDLRLQGLSFWAITRTLNDEGHLSLNQYTPKQKGWSDTAVKKLLRNRAVIGCFTPAGREEVQGYYPAIISESLFYRVQQLNTGQYGRASVSSNPLSVNLFRGIIKCSECGATIVLGGYALKRFGMYRCPNRSANRCSAKAISRKQTDATILYMLALCDRFETENTDIIDSLKLQREDLQRKISKMAELAIELDDMTIITEKLRDMKNALSKLNHDIEEETKRIKAITTGSLKDIDRTTKEGMIETQLLIKGVLKEIVIDAAKRRCKVTFHNGRAIDLSISENPSEDVTEAIQSLSEVTERGLIDVDEVII

SEQ ID NO: 37192 - DNA, 50 bp, Escherichia coli; identical to SEQ ID NO: 37172
  source 1..50: mol_type = genomic DNA

SEQ ID NO: 37193 - DNA, 40 bp, Escherichia coli; identical to SEQ ID NO: 5293
  source 1..40: mol_type = genomic DNA

SEQ ID NO: 37194 - DNA, 50 bp, Escherichia coli; identical to SEQ ID NO: 37174
  source 1..50: mol_type = genomic DNA

SEQ ID NO: 37195 - DNA, 40 bp, Escherichia coli; identical to SEQ ID NO: 37175
  source 1..40: mol_type = genomic DNA

SEQ ID NO: 37196 - protein, 509 aa, Escherichia coli
MRRAISYIRFSSERQLKGDSVRRQSKLVTDWHDKNPEFYLDSSLSFKDLGKSAFSGKHLKGGLGDFLTAIEKGLVKAGDTLLIESLDRLSRQDIDIASELLRRILRAGVDVVTLSDGEHYTRESLKDPLALIKSILIMQRAHEESLRKSERVQAAWNRKKELISEGIKVSRRCPAWLKLNDDRRTFTIIPDKVEVVKRAFDLRLQGLSFWAITRTLNDEGHLSLNQYTPKQKGWSDTAVKKLLRNRAVIGCFTPAGREEVQGYYPAIISESLFYRVQQLNTGQYGRASVSSNPLSVNLFRGIIKCSECGATIVLGGYALKRFGMYRCPNRSANRCSAKAISRKQTDATILYMLALCDRFETENTDIIDSLKLQREDLQRKISKMAELAIELDDMTIITEKLRDMKNALSKLNHDIEEETKRIKAITTGSLKDIDRTTKEGMIETQLLIKGVLKEIVIDAAKRRCKVTFHNGRIIDLSISENPSEDVTEAIQSLSEVTERGLIDVDEVII

SEQ ID NO: 37197 - DNA, 50 bp, Escherichia coli; identical to SEQ ID NO: 37172
  source 1..50: mol_type = genomic DNA

SEQ ID NO: 37198 - DNA, 40 bp, Escherichia coli; identical to SEQ ID NO: 5293
  source 1..40: mol_type = genomic DNA

SEQ ID NO: 37199 - DNA, 50 bp, Escherichia coli; identical to SEQ ID NO: 37174
  source 1..50: mol_type = genomic DNA

SEQ ID NO: 37200 - DNA, 40 bp, Escherichia coli; identical to SEQ ID NO: 37175
  source 1..40: mol_type = genomic DNA

SEQ ID NO: 37201 - protein, 569 aa, Listeria innocua; identical to SEQ ID NO: 17481

SEQ ID NO: 37202 - DNA, 50 bp, Listeria innocua
  source 1..50: mol_type = genomic DNA
attcttctatatatacatgccccattagccgcatgtgcatatagaaaacc

SEQ ID NO: 37203 - DNA, 40 bp, Listeria innocua
  source 1..40: mol_type = genomic DNA
agcagatttgtctgttacattagaagatgcgagtgatttt

SEQ ID NO: 37204 - DNA, 50 bp, Listeria innocua
  source 1..50: mol_type = genomic DNA
attcttctatatatacatgccccaaaagccgcatgtgcatatagaaaacc

SEQ ID NO: 37205 - DNA, 40 bp, Listeria innocua
  source 1..40: mol_type = genomic DNA
agcagaaatgtttgctaaaaaataagatgcaagtaatgat

SEQ ID NO: 37206 - protein, 562 aa, Roseomonas sp FDAARGOS 362
MNYHSAFNDGPRRRLTRDDLLGSVSISYLRFSSSGQDPKRGGSTIDRQVEVRDDLVDYFQLKLDRTLEDRALSASKGHHRKRGNLAVLLEASRRGDFLHTRTVLIIEAMDRLFREGIIDVMPILSEMIKMGLVIVTGDRTIWCEASINGSENHKLIAEINAAKLYAERLAEFARGAHKKRRSRIVAVAEDQSAAIPELNGRSPGWLIKRDKIGADGLWHDLHPEHSATLRCIFEMCAAGDPVKQIAATFNREGVPTMPWTSRVEGEWRAARVGAILRDRKTLGFYRPMQWQDGKRVYVGPEVKAYPQAIDAGLWLAAKNVLDGRTMLIGRKGVDVPMLFSRHAFCRTCGAAMRCETGGRPKQGVKPRNLVCARYLESRTCTDGQRYDLNHFEVPILYSIIELTGLVPKTITDEGRLVGDLAALQVEIERQKETLRDLAPSIRPSTAFLLDEATDRLEAMQKRANELELEIEAATAGNSSLKDTFEFLRSLVGPASRGDVEARERLRSLLIKIPYRITGTPTGGIAVEAGGQSRDALPEAMERDAIAMADEHHHGDADADELP

SEQ ID NO: 37207 - DNA, 50 bp, Roseomonas sp FDAARGOS 362
  source 1..50: mol_type = genomic DNA
tgtctacaatcgctatacctatacccgtataggatgatcgattggagtgt

SEQ ID NO: 37208 - DNA, 40 bp, Roseomonas sp FDAARGOS 362
  source 1..40: mol_type = genomic DNA
gcggaccgtgtcgccatggccgtagagcaggatggtcggc

SEQ ID NO: 37209 - DNA, 50 bp, Roseomonas sp FDAARGOS 362
  source 1..50: mol_type = genomic DNA
tgtctacaatcgctatacctatacgagtataggatgatcgattggagtgt

SEQ ID NO: 37210 - DNA, 40 bp, Roseomonas sp FDAARGOS 362
  source 1..40: mol_type = genomic DNA
gcgcaatgggtccccatgagaggagagcaggagggttgga

SEQ ID NO: 37211 - protein, 564 aa, Escherichia coli
MRSPRAYSYVRFSTPKQAQGDSYRRQLQQAREYCTVHNLVLDDKAIEDFGVSAFRGSNRTDGALGRFIDAVKSGEIERGSYLLVESVDRLSRQAIEEALTQFLEIVREGIVIVTLSDNQVFRSGEVDFTKLIVSIVYMARANDESEMKSRRSRAAWSNGRQQARDNNKVIANSRLPSWLTLAGEKIIPIPERVDIVNEMFQMARSGQGYQQIAKAFSENDYKTFGQGKVWRPAGIQSVIKSRAVIGEFQPHVIYEGKRVPDGEPILDYYPAIVSPAIFAEVQHIIDKRSSHSGSYRKGLYNNLFSGVIRCQCGELLRFHNKGSKGQIRNYLVCPMEGVTGCQLPYLLYNRIEPQLLQALSRLSNVMKQRQPQTGKVSVLKDDLAVLRNELEAEGKKRVKAAQSMLDFDDDAVFRTLFEESKNACHVLEDKISQIEGEIMSLELSTRTIGHLLRAEDLNSTEQRQQFNSQLKSAITIDFIYDNTGLVAVIKDLEGELMLEQAFGPKLMSSIVHDYEGHICVKTIADAPYVDPVWVAEERMEYEKGMLVEFDECGDFNIDNFNKNS

SEQ ID NO: 37212 - DNA, 50 bp, Escherichia coli
  source 1..50: mol_type = genomic DNA
tatggcctttatgataaaaactgctcgcatattttgggagaaaggccgta

SEQ ID NO: 37213 - DNA, 40 bp, Escherichia coli
  source 1..40: mol_type = genomic DNA
gcgagcctttttaatggtgtcacaatttttgatgccgtaa

SEQ ID NO: 37214 - DNA, 50 bp, Escherichia coli
  source 1..50: mol_type = genomic DNA
tatggcctttatgataaaaactgcaggcatattttgggagaaaggccgta

SEQ ID NO: 37215 - DNA, 40 bp, Escherichia coli
  source 1..40: mol_type = genomic DNA
gagagactcttaaatgataagacaattttatatgcagtta

SEQ ID NO: 37216 - protein, 585 aa, Escherichia coli
MIALVHLSFLSLLFASLIIQKGAVVRSAKAYSYVRFSTPKQAQGDSYRRQLQQARDYCTTHNLVLDDKTIEDFGVSAFRGSNRTDGALGRFIDAVKGGEIVRGSYLLVESVDRLSRQAIEEALTQFLEIVREGIVIVTLSDNQVFRSGEVDFTKLIVSIVYMARANDESEMKSRRSRAAWSNGRQQARDNNKVIANSRLPSWLKLEGDKIVPIPERVAIVNEMFQMARSGQGYQQIAKVFTENDYKTFGQGKVWRPAGIQSVIKSRTVIGEFQPHVIVEGKRVPEGEPILDYYPAIVPPSIFAEVQHIVDKRSNHSGSYRKGLYNNLFSGVIRCQCGELLRFHNKGSRGQVRNYLVCPMEGVTGCQLPYLLYNKIEPQLLQAISKLSVVMKQRIPQTEKTSLLKDELAVLRGQLEIETRKSKKAAQAMLELDDDAVFRSLYEECKANCQSLEEKILQIENEIVGLELSTRTLFQLLSPEDLSNTEQRQRFNSQLKLAVKIEFIYEHSGLVVVIKNLEDEPLLEQAFGHKLMNSIVHDFEGHVVVKTISDSPYIDPSWADEEREEYTKGISAEFDQCGDFNIDNFK

SEQ ID NO: 37217 - DNA, 50 bp, Escherichia coli
  source 1..50: mol_type = genomic DNA
taaggtccttatgataaaaactgctcgcatactttaggagaaaggccata

SEQ ID NO: 37218 - DNA, 40 bp, Escherichia coli; identical to SEQ ID NO: 37213
  source 1..40: mol_type = genomic DNA

SEQ ID NO: 37219 - DNA, 50 bp, Escherichia coli
  source 1..50: mol_type = genomic DNA
taaggtccttatgataaaaactgcaggcatactttaggagaaaggccata

SEQ ID NO: 37220 - DNA, 40 bp, Escherichia coli; identical to SEQ ID NO: 37215
  source 1..40: mol_type = genomic DNA

SEQ ID NO: 37221 - protein, 517 aa, Ruthenibacterium lactatiformans
MKAALYCRLSEEDRNKPAGTCDSGSIQNQKTMLLQYAMEQGWDVFDIYSDDDYAGADRRRPQFNRLLRDAQQHKFDIVLCKTQSRFTRELELVEKYIHGLFPAWGIRFVSIVDNADTASKGNKKSRQINGLVNEWYLEDMSDNIRSVLDSRRENGFHIGAFALYGYQKDPKQKGRLVIDEEAAAVVREVFTLFSQGYGKTAIARLLNDRGIPNPTEYKRRHGLRYRQPTKKNSTLWKYSAIADMLENEIYIGNMVQGKYGSVSYKTKQNRPRPREQWYRVEGTHEPIIERALWEKVQALREQRVRPFAEGTVGLFSQKARCMYCGYAMRSSKSRGKHYLKCPNRHVAKDACVGSFISVARLEEIVAAELNRMNAEYLDQDELARRLEYSGNLEQKKTRLAADVTACEKKLEECRRGLRGLYLDKVKGILSEGDYAELSKDLSAECDRLERSAAEGRKKVEELEAQAETDGGCRERAGRYMKSGRLSREIVEAMIDHIYVGKRIPGTKNVPVEIHWDF

SEQ ID NO: 37222 - DNA, 50 bp, Ruthenibacterium lactatiformans
  source 1..50: mol_type = genomic DNA
agctgttcttaccgcatcgcagcagatggcgcgaccggaaaagaacaaca

SEQ ID NO: 37223 - DNA, 40 bp, Ruthenibacterium lactatiformans
  source 1..40: mol_type = genomic DNA
gcacgaggacatggcagcagagcagaaagcccgcaccacc

SEQ ID NO: 37224 - DNA, 50 bp, Ruthenibacterium lactatiformans
  source 1..50: mol_type = genomic DNA
agctgttcttaccgcatcgcagcacctggcgcgaccggaaaagaacaaca

SEQ ID NO: 37225 - DNA, 40 bp, Ruthenibacterium lactatiformans
  source 1..40: mol_type = genomic DNA
gcaccaggaaatgacagcaccgcagcacgccacccccaaa

SEQ ID NO: 37226 - protein, 464 aa, Mycolicibacterium celeriflavum
MRVAVYLRQSQDRQGDQLGIDRQRQDCQRLITARGWSIAAEFVDNDVSATSRKPRPQFDAMMRRVDEGDFDVIVARHMDRLLRRVSELESVLERCERHKTYIVTAADSVDTSTDAGRLVARILSSVAQGEVERKGARQRSAVQQAAEQGRWVGGRRAFGYEPDGVTVRENEAALIRQGYAAVLAGDSLAEIARCWDAAGFITTQGGPWQRQAVKDVLTNPRNAGMRRHRPQEDRRAIRQNPELGITGRAKWPAIVDETTWRAAVRILCDPSRRRPNGAKRLLTGVAVCGVCEAPVHGGAAARPGTATYRCTSGRHVSRMADPVDEYVTEVTLDRLTQPDAAQLWTPELADAKALMAEADTLRRRRSDIDQDYADGILSPARFRAMNGRVASRLADVEAQIATAGQSSPLAIVAAENVRATWATLSNAQRRGIIASLMTPVLHLPGRGTRTFRPETVEIRWRVPV

SEQ ID NO: 37227 - DNA, 50 bp, Mycolicibacterium celeriflavum
  source 1..50: mol_type = genomic DNA
attgggcagtccatgcggtggcgtggaccacatgctagcatatgtcgcat

SEQ ID NO: 37228 - DNA, 40 bp, Mycolicibacterium celeriflavum
  source 1..40: mol_type = genomic DNA
cgcacactgcgcgtcgcgtggacgctcgccgacctcgccg

SEQ ID NO: 37229 - DNA, 50 bp, Mycolicibacterium celeriflavum; identical to SEQ ID NO: 37227
  source 1..50: mol_type = genomic DNA

SEQ ID NO: 37230 - DNA, 40 bp, Mycolicibacterium celeriflavum
  source 1..40: mol_type = genomic DNA
cgaactcagcgcagcgcgtggccgctggccgcccgcggcg

SEQ ID NO: 37231 - protein, 520 aa, Mycobacteroides chelonae
MMSIPLRALVGARVSVLTGPQKISHEAQIDSATRWAEANGCRVVGSFEDVGVSASVPPEQRPDLGPWLTPEREHEWDVIVWSKMDRAFRSTRHCVDFARWAEENQKVVVFADDGLKLDYRPGAAKGIDAMMAELFVYLGSFFAQLELNRFKSRATDSQRAIRPTTRWASGLPPLGYKVVDHPSGKGKGLAIDPDAANLVREMADKLVDGWSFVRITEWLNESGQLTSQGRSRQARGLGPKGAWTTTNVIEILTGYRALGIKTHKDQPVLDGNGEPIRLAPPLFTPERWDEIQRAAQQRKAKPRTPSDTSNPMLGVGYCGAPCSHKRAGSECPDDCQGICGSSLAQQFSKTRPRKSDGHVTHYRYYRCSRTPINCKTVFVVADILDELLSEQFLLERGDRKVTERLFIAGEDNSYELDSIKQRIELLREDRASGLFPSGEDELVYRNQIRQLLARRDELASVPVRQSRYENVELEKTYREVWPSATPEEKRTMLIDAEISIRLGESPGKSLRAELVIGTPY

SEQ ID NO: 37232 - DNA, 50 bp, Mycobacteroides chelonae
  source 1..50: mol_type = genomic DNA
ttctcataggtgtacttctcgatcaacacgaacatatactcttgagatca

SEQ ID NO: 37233 - DNA, 40 bp, Mycobacteroides chelonae
  source 1..40: mol_type = genomic DNA
atcgccatgctcctcgatcaacagatcccgatggaagtgg

SEQ ID NO: 37234 - DNA, 50 bp, Mycobacteroides chelonae
  source 1..50: mol_type = genomic DNA
ttctcataggtgtacttctcgatcctcacgaacatatactcttgagatca

SEQ ID NO: 37235 - DNA, 40 bp, Mycobacteroides chelonae
  source 1..40: mol_type = genomic DNA
atctccatcctttttgagcctcagagccccagggaagggg

SEQ ID NO: 37236 - protein, 589 aa, Bacteroides xylanisolvens
MCSDFIIFAPTNQRRSIMRKRIVGYARVSTEKQDLERQKILIREYCSNNNYDLVKIISEKVSGAKKDRESINELLAVTKDTADMVVVSELSRISREKECLTVLNTINDILENGLDVLFLDDTSKVYSAYTELNVIDIITLTVKAHSAAEERDKITARMRTGKITKLNINPYMYTGSLVPYGFKVIDNPDYKGQKCNIPARKLMVIDESKTKDVQFIYQLVLNGTTLRDAAEEVNKLGLRTQLNKPFCETSISKMIKNPIYNGRRRFKGLNLPLMDKIISDNDWNRAQICVSQNQLFKGKTTKNFNPLKGLVFCPCGYALMLHKMIRKDGSGYFVMTCCKKNDKEYRKKCRNSGIVSHVLLPTVWKCVKDTLLLSEYTTKTTSEVHRINGIIEGLEDRISGLIDEIDSHKKEMARLSKAITLVTVKGLITQYENEYVTEEAKVTEIEAKINNIRDEISNYKANITKINSITYNSQLTNLTDQEKANVYQKVLSKVVYYSIDYFRGFIVISYKNGLENIIAINKTTTGYISPLPSSFSFNAETRKIRVTIAKKQTSIKEFNLSDIENIEYSFKELEANFTPQQWDIQSQIL

SEQ ID NO: 37237 - DNA, 50 bp, Bacteroides xylanisolvens; identical to SEQ ID NO: 11347
  source 1..50: mol_type = genomic DNA

SEQ ID NO: 37238 - DNA, 40 bp, Bacteroides xylanisolvens
  source 1..40: mol_type = genomic DNA
tcaccaccacgcacttgctgacgcagaagcttgtgcacaa

SEQ ID NO: 37239 - DNA, 50 bp, Bacteroides xylanisolvens
  source 1..50: mol_type = genomic DNA
tcaagcacatctgataacattgctagcgcaaagtttccaaatgtgctctg

SEQ ID NO: 37240 - DNA, 40 bp, Bacteroides xylanisolvens
  source 1..40: mol_type = genomic DNA
tcccagcctcgcacctgctagagcagaagaatatgcacac

SEQ ID NO: 37241 - protein, 476 aa, Mycobacterium kansasii
MSTAFKQVRAACYCRISSDPKDKREGVDRQREDTTALCEVKGWTPAGFYIDNDRSASNGKHRPEWDRLLADVKAGKIDAIAAWDQDRGWRMMHELEELRKFFTELGRPIPLATTGQGDIDLYSPTGVLAAQIKTAVSEHEIAMMKVRQRRAARQKAESGRPQWRKAFGFLDTPDGPVPDPRTAPLVKQAYAALLAGASLKDIAKLFNDAGAHGLNGKPWSQSTVSLFLRAPRNAGLRSHNGQIICTGTWKPLVDEHTWRKTQYVLNAPGRAPGRKSVKRHLLTGVLQCGKPGCGGYLSGMQTADKRIVYACKSCRGVSIRAEFVEPLLYRMVSDRLAMDDAVDLLKAEIHDEAEAEAIRLQLETHYAELDNIGAERGEGLLTGKQAKIATDIVTAKIAALQARQQDQERLRVFEGLPLGRPEVDGAIMRLSPDRLRAVLDLLYTVTVHPCGKGGYLVDPETHRKIVNPERLQVEWC

SEQ ID NO: 37242 - DNA, 50 bp, Mycobacterium kansasii
  source 1..50: mol_type = genomic DNA
aaacgtcttttccgaagtagctgctgttagcggctgccgatagtacgctt

SEQ ID NO: 37243 - DNA, 40 bp, Mycobacterium kansasii
  source 1..40: mol_type = genomic DNA
gaacgttttcagcaaatgatgttttctacaaaggcatttc

SEQ ID NO: 37244 - DNA, 50 bp, Mycobacterium kansasii
  source 1..50: mol_type = genomic DNA
aaacgtcttttccgaagtagctgcaattagcggctgccgatagtacgctt

SEQ ID NO: 37245 - DNA, 40 bp, Mycobacterium kansasii
  source 1..40: mol_type = genomic DNA
cacacttctcagaaattgaaattttataaaaaggcatttt

SEQ ID NO: 37246 - protein, 534 aa, Pseudomonas fulva
MTSTNPLPRAFSEVFQQDEKINVYSYIRFSTKAQKLGFSEKRQIDQLNRFFEQYPQAVQVERYEDLGVSAFKGKNLKTGQLAKFVERMKAKEIFPNSLLLVESFDRISRMGGYDALELIISIIQADCAIYTLFDNRLYSRRKKDSGVDITLIQNILERASDESRSKSDRVTDAKARNLLRAEQGEIIAKRAPFWISYENGQFVLNEHAKAVRRATELCFDMGCLAIAKVLNAENHPKSYSVGIITKLLRQNALYGSYIATDLDKLGRRTLIKKEIKDYYPSVISEAEFHRIGAKLEQRQMPALAGRHAAEFRNILRGIVFCACGATLRTHSAKKSERQYHDLLCTASEHGKCTYSLTGKGLRYRYARIEEIFLAYQSQIPFHKIIAKGNDIKALEKEHEETTGLIIQQEKALSNAFAILQNASEIAQKYVLSNIEEVSHALDKLKEKERVIGLEIASLQIASKSAINVMEIYQLLLNEHGRMRVNNFLQGQGVKLVITPIQKKHYYMDIFVLGSHIDRVHVTPDGYTAGNKSIA

SEQ ID NO: 37247 - DNA, 50 bp, Pseudomonas fulva
  source 1..50: mol_type = genomic DNA
tttctacgaatttaccttgtcatagtgatgagcgcgaaatttagtagaaa

SEQ ID NO: 37248 - DNA, 40 bp, Pseudomonas fulva
  source 1..40: mol_type = genomic DNA
catctgctggcgggtgatggtggtgaccgactgtggcgtt

SEQ ID NO: 37249 - DNA, 50 bp, Pseudomonas fulva
  source 1..50: mol_type = genomic DNA
tttctacgaatttaccttgtcatacggatgagcgcgaaatttagtagaaa

SEQ ID NO: 37250 - DNA, 40 bp, Pseudomonas fulva
  source 1..40: mol_type = genomic DNA
ctcctgcagccgggtgatgcgggtgggcgacagcggagtg

SEQ ID NO: 37251 - protein, 505 aa, Mesorhizobium ciceri
MLHPRDLKGRTAISYARWSSGSQASGDSLRRQSENAESFCSTYGLTLDHRIVDNGVSAFKGSNLEARLGQFIADVKAGKISNDVVLILENLDRFTRINPVDAVPVLLELLKTGLTLVTLQDERVHTRTAYADNTMHLMMSLMAMQAAYEYSAKISQRVGAEWSNRAKRARQGRVKISKVPFWIDQQTQELNDRADDARLIFRLAQEGNGQWTITNYLNDAGIPSSRGGTWGKSMVQDVLKSKAAYGALVIKGEEVPNYYPPLITETAWLAIQHRQRQRYQNPQASGTTNLFPRLVRCAHCRSPMVVTSSKVRGKIWRYFACEGRSLKRTDCTAPNWRYDSFETEFLTRIGFLAAPIPAVDGSAPMDSAGELVDAIAALENQHSNILAGMAEAFDAASRRVLLDRAHAISTEIAVKKNELVRVRENAARYQEADPLTDIEADLEVIQRLAKEDRKEAQRLIANLVERIDLESDSHGPRAGKGLRRALVTSRRGWSHAMVFDDSAEP

SEQ ID NO: 37252 - DNA, 50 bp, Mesorhizobium ciceri
  source 1..50: mol_type = genomic DNA
attccgtagaatgaccggttcggcctgccttgacggtcattcaacagaac

SEQ ID NO: 37253 - DNA, 40 bp, Mesorhizobium ciceri
  source 1..40: mol_type = genomic DNA
gctggccggcggcctcgacctgccctacccgcctgagaat

SEQ ID NO: 37254 - DNA, 50 bp, Mesorhizobium ciceri
  source 1..50: mol_type = genomic DNA
attccgtagaatgaccggttcggcgggccttgacggtcattcaacagaac

SEQ ID NO: 37255 - DNA, 40 bp, Mesorhizobium ciceri
  source 1..40: mol_type = genomic DNA
gcagcccgtgggcctggacggtccctgcccgcctgggtac

SEQ ID NO: 37256 - protein, 509 aa, Corynebacterium minutissimum
MADKRAVFYLRISLDSRGDGLAIERQRDGCQKKAAALGLDVVGEYVDQSISASGDKDRPGYNAMEKAFEAGEFSTIVCYDIDRLSRRPGQLEQWLERAERGGLNIVTADNEVNLSTDYGRLFVRIKAALARQEVETMSRRRSYAQKQRARKGNPPSGVRPFGYDSERVIIEEEAALVRAMYAAFLKGHSLRDIARALDGDSDVDGLKKCPRPSHTITRERNEVRAREGRAALKVPEPYGWGPTTVRRILRNPIYAGMVTYRATGMSARRDGVTYSTRDSKTTDAIVRDDDGSPIRGKWDPIIAADDWWAVQAVLDDPRRLSSYTGSRERRRLGAGLFRCYDCDVPLKNHGPRYRCDKCGMVRQRGSVDDFVLDVISAYLSREDVLKGLRKAAASLSSDDGSNAAAGRVEALMRRLETFAADYADGVITGREYAAARDKVEAEIAAETKKAAATTTGRVLDAVIHPGADFKKADLLSKRAIIDAVCVVHLRRGEKGNNHFQPDSVIITWR

SEQ ID NO: 37257 - DNA, 50 bp, Corynebacterium minutissimum
  source 1..50: mol_type = genomic DNA
gtggttaaaaagtaaccgaacgtagtcgtctatggttaaaaagtaaccac

SEQ ID NO: 37258 - DNA, 40 bp, Corynebacterium minutissimum
  source 1..40: mol_type = genomic DNA
ggaatgggaagacaaggcagtcgtgttcggttcataccag

SEQ ID NO: 37259 - DNA, 50 bp, Corynebacterium minutissimum
  source 1..50: mol_type = genomic DNA
gtggttaaaaagtaaccgaacgtatccgtctatggttaaaaagtaaccac

SEQ ID NO: 37260 - DNA, 40 bp, Corynebacterium minutissimum
  source 1..40: mol_type = genomic DNA
ggaatggtgagagagggcatccctgtcttgttcatgcctg

SEQ ID NO: 37261 - protein, 618 aa, Buttiauxella noackiae
MKRILKMSKLAIPYRRYSSDMQTGNSSLERQQQMINQWLVSEEGKEYTTSIAYTYLDEGVSGYSGSHIEKGDFGRFLEDMRSGVFKRYDSPTLLIENVDRFGRQKATKTVGLLDEIVNDYGINIRFLNSTKTITSPIGDTELLIFVVESMRSHGESLRKSEMVGKAWDLKRGRILSEGKTLTRNVPWWVNPADRYDVTSDEFKRRQDLIREIFNLKKKGTSCGKIATLLNERGEIIPTNRTQKPEKEYKRSRVRGKWDGALISQTLANRAVMGYLAPQAHTSSNSTVTRTTDPVTGKITKTFKLKEGKTLRPEIADYFPEIINHTLFSAVSLLKEDQAGRKRSSGLPNSVMLFKKLMYCSGCGLPLSVYGSRESYPGVYQCSGTRFKACDEISISRRDVDSALLNHLLPNLSKLNVNDSLAEQIAKLENHRDRLVSEAVNIYDIVKVAGMNPQTAQMIAENTKAQADANTQIDALTTKRNASEYESLSHLNLELYEDRVEAQIIIKRMIKKIIIDTDTRKMNITLVNGSEMHGFEVDSKINQRAGLNSALNPSEVDKEINETFGVHKVIHHVALRGASEEPEPHEPPEYDDKGNRLRDIQWRNEDNSEPECNPADEEE

SEQ ID NO: 37262 - DNA, 50 bp, Buttiauxella noackiae
  source 1..50: mol_type = genomic DNA
ttgtgtcgtatcttagagagttgaaatgaagattgcaagaactaaaaaac

SEQ ID NO: 37263 - DNA, 40 bp, Buttiauxella noackiae
  source 1..40: mol_type = genomic DNA
tatgttgtacggacgattaaatgaatttagttaagacagt

SEQ ID NO: 37264 - DNA, 50 bp, Buttiauxella noackiae
  source 1..50: mol_type = genomic DNA
ttgtgtcgtatcttagagagttgatttgaagattgcaagaactaaaaaac

SEQ ID NO: 37265 - DNA, 40 bp, Buttiauxella noackiae
  source 1..40: mol_type = genomic DNA
tttgttttactgaccattatttttatttttttgagacaga

SEQ ID NO: 37266 - protein, 543 aa, Microbacterium sp TPU 3598
MSITAPAPTTTDAVTKAPLLEAVSYLRVSTREQAERGGTDEGFSIPAQREANVRKATELGARVVREFVDAGESARSADRDGLQDMLAFVQASRVNFCIVHKLDRLARNRADDIEIHQALLAAGVTLVSATESIDQTPSGMLVHGIMSSIAEFYSRNLATEVTKGMQQKLAQGGTPMRAPIGYVNVRRIDEQGREVRTVEVDPERAPLIRWAFERYATGEVSVAGLLRDLTARGLLTVASPKRPSKSLGRATFYSLLTNPYYAGVIRYKGALHPGAHTPLIEPTLFDQVQSLLKARNAKATRHVRHAHHLKGLLHCGSCGSRMLLDFATNPRGATYAYFVCSGRAAKKTPCTRRAVPVAVAERLVEASYVSNTISEDDYRNLAARVDAAFDKRSAGRDAEFADLTTNRARLEAESDKLLAAHFADAIDLTTLKRHQDRIRAGLADIEQRLSEHDEHHSGGRAFLHDSLRLLTNAHHAYKHSEDGNRRLANQAFYTRLEITDDEELRPQLAEPFATITEVARSKETEHEHDKSCDVTCSRKELWV

SEQ ID NO: 37267 - DNA, 50 bp, Microbacterium sp TPU 3598
  source 1..50: mol_type = genomic DNA
tcacgtgttcccgtaaggaactttgggtgggcctgactgagcactacggg

SEQ ID NO: 37268 - DNA, 40 bp, Microbacterium sp TPU 3598
  source 1..40: mol_type = genomic DNA
gcctgggggcttcagtgttcggtggacctaaggggattcg

SEQ ID NO: 37269 - DNA, 50 bp, Microbacterium sp TPU 3598
  source 1..50: mol_type = genomic DNA
tcacgtgttcccgtaaggaactttctgtgggcctgactgagcactacggg

SEQ ID NO: 37270 - DNA, 40 bp, Microbacterium sp TPU 3598
  source 1..40: mol_type = genomic DNA
gcatctggtcatcagaattctgtgtacctaaggtgattcc

SEQ ID NO: 37271 - protein, 585 aa, Streptococcus anginosus
MKKNNVEIIKADSLVRRRGINVERHLKRVAAYCRVSSDSEDQKNSYESQVRHYKDYISQRSDWELADIYADEGISGTQAGKRQDFQRLITDCMNGEIDYIVTKAIARFARNTLDTLKYVRMLKDMQIGVYFEEENIDTLTMDGELLLTILSSVAQQEVENTSAHVKKGLKMKMQRGELIGFQGCLGYDYDIETKKLSINKEEAIIVRYIFERYLEGIGGKVIARELDELGYKSPRGLDHWNDTTVLGIIKNEKYKGDILMGKTFTVDPISKRRLSNLGEEDKYYIKDNHEAIISKEDFEKAQEIRLRRAGNKKTAANVNGKRERYSKMYAFSSMLECGFCGSLLSRRSWHCRSDYRKVVWHCVTSIKKGKKYCKHSKGLEEVAIEGAFMEAYRQLYHSNENIMTDLLETIESELNDNSLNKELKKITNKLHALLKKEENLVNLRLEGEISDSIYTEKYNEISSEKEYLAEEKVNIEVTLKSEIDVKKRLTEFKQLLSSQKILTEFDRTVFESIVEKIIVGGVNSDGKIDPAMLTIIFKTGETQNKNGKKFKSKRKNAKLKSDKLCSQNSDENKKLYSQEIDNTCG

SEQ ID NO: 37272 - DNA, 50 bp, Streptococcus anginosus
  source 1..50: mol_type = genomic DNA
tgtattcccaagagatagacaacacatgtggagtgcgtagtgttgctaca

SEQ ID NO: 37273 - DNA, 40 bp, Streptococcus anginosus
  source 1..40: mol_type = genomic DNA
tttatttccaatgacgcatcatgtggagacggtagcgtta

SEQ ID NO: 37274 - DNA, 50 bp, Streptococcus anginosus
  source 1..50: mol_type = genomic DNA
tgtattcccaagagatagacaacagctgtggagtgcgtagtgttgctaca

SEQ ID NO: 37275 - DNA, 40 bp, Streptococcus anginosus
  source 1..40: mol_type = genomic DNA
tttgtttgcaaggaagcatgctgtagagacactggggttt

SEQ ID NO: 37276 - protein, 556 aa, Streptococcus mitis
MTNSTLTRQIPDWTEVEFEGLSEISVLYCRLSAEDANEGESNSISNQRLILSKLAERENLSNPIVFYDDGYSGSNAQRPAFQQALALVKNNQVSNFVVKDLSRVSRDYLLSGNLLEVVFPSKNIRFISLQENIDSNKKSSQDAYLTPLVSLFNNWYSMQCSEKIKLSKHTKAKNGEKIGWITPYGYLNNPENRKEWLVDEYASEIVKRIFSEYISGRTPTEIAQGLRCDKILTPARYKINLGIANYRILESDPCYWKTQMIWQILEKEEYIGSTINLKTAKISYKQRNCRMRPREDWLIFPDSHEAIISKEDFEIARKMMGHKRVIQRQNWKNKIGHENLFAGLLYCENGHKLSFCPQEKAGVNLDHYKCHHFKRAGDTCSGGHYLRKEVLENLILNELQELINSFQINEADLSQRLKNKFEIKETKKFSELQKQMTKNEQRMAELDTIIQRLYEKQLLGEIADDRFKKLCDSYEAEQAELKEKVQTATETLGAEMKSAHNIEKFMTTIRKYTQLEKLTPKIINELIDKIIIHQPIGRGKNRQIKLEIHYRFIGDI

SEQ ID NO: 37277 - DNA, 50 bp, Streptococcus mitis
  source 1..50: mol_type = genomic DNA
ggactgctgagcgaagtatggtataatgtccacacctcactcagcagtcc

SEQ ID NO: 37278 - DNA, 40 bp, Streptococcus mitis; identical to SEQ ID NO: 22223
  source 1..40: mol_type = genomic DNA

SEQ ID NO: 37279 - DNA, 50 bp, Streptococcus mitis
  source 1..50: mol_type = genomic DNA
ggactgctgagcgaagtatggtatcttgtccacacctcactcagcagtcc

SEQ ID NO: 37280 - DNA, 40 bp, Streptococcus mitis
  source 1..40: mol_type = genomic DNA
aagcagtctttagtgttatcttagaagcattaaaacacac

SEQ ID NO: 37281 - protein, 567 aa, Streptococcus anginosus
MNRTLTISDYRQVDTSKLSDITVVYCRLSQDDGLDGDSNSIINQKKILLDVVMRENLPNPILFIDDGFSGTNFDRPAISEALRLVENRQVSNFIVKDLSRLGRSYIKVGQLTEITFPSFDVRFIALNDGVDSNKPNESNSIFLPIKSLMDEMYAADTSKKIRAVVQSKARAGERVTVNPPYDYLKDSNNPKNWIIDPVASEVVKRIFQEAKNGKSLSEIAKGLENDKVFKPDRHRIEIGLKPISASSNVETLPYFWTRETLSAILGREEYLGHTVNLRTRTKSYKDKRKVDNSKEDWLIFKNTHEAIIDQETFDIVQKMRSHKRSNQRYKNRVGHENLFAGLVFCGTCGRKHYFCPQEKNGLNHDHYKCSGYRKPIDGCENPHYIQKSALIEIVSGKLRQTIQEAHFDQDTFLKKLEQQNRAQFSKDNKRQQLQLQKDEHRFKEIDGIIQKLYEDNLLGKISDERFVKLSQNYEEEQKQLQASISDLTEKLAQQQEDSLNISKFMARISKYTKLPELTVEIVNELIDKIVIHKPTGTKRNRIIQVDIYYNFIGKLNNEKSEPNELAR

SEQ ID NO: 37282 - DNA, 50 bp, Streptococcus anginosus
  source 1..50: mol_type = genomic DNA
aaactgctatgtgtcaggtcggctaaaggaagtatgacatttagcagttt

SEQ ID NO: 37283 - DNA, 40 bp, Streptococcus anginosus
  source 1..40: mol_type = genomic DNA
gaacataaaaagagccgagaaggctcgactctttattatt

SEQ ID NO: 37284 - DNA, 50 bp, Streptococcus anginosus
  source 1..50: mol_type = genomic DNA
aaactgctatgtgtcaggtcggctgtaggaagtatgacatttagcagttt

SEQ ID NO: 37285 - DNA, 40 bp, Streptococcus anginosus
  source 1..40: mol_type = genomic DNA
gaacataaaaaatgacacagtgcctcgattcttttttttt

SEQ ID NO: 37286 - protein, 515 aa, Vibrio parahaemolyticus; identical to SEQ ID NO: 29211

SEQ ID NO: 37287 - DNA, 50 bp, Vibrio parahaemolyticus
  source 1..50: mol_type = genomic DNA
ataggtcttttaggttctaaaagtaggaatcttgggtataatagacctac

SEQ ID NO: 37288 - DNA, 40 bp, Vibrio parahaemolyticus
  source 1..40: mol_type = genomic DNA
atctggaggccattggcaaagaagtcgatgaagtccgtga

SEQ ID NO: 37289 - DNA, 50 bp, Vibrio parahaemolyticus
  source 1..50: mol_type = genomic DNA
ataggtcttttaggttctaaaagtgtgaatcttgggtataatagacctac

SEQ ID NO: 37290 - DNA, 40 bp, Vibrio parahaemolyticus
  source 1..40: mol_type = genomic DNA
ttctggaggagattggcatgtgagtcagtgaactctgtgg

SEQ ID NO: 37291 - protein, 492 aa, Paenibacillus alvei
MVVKKKEKEKTLAIGYIRQSDERADKEDISEQTQLSKIKQFCDYHDLELVAIFKDIDYSGFRISYTKRPGLMDGLAYLKTNKKVKKLICYNLSRLTRRKKDFSLIHESLEGLGVDICSALEQLDFGSANGRLFASMLADFNEYTSDSLSEITNSNKQTNAEKGRWNGGPFPFGIVKHGKGSIEDENGNYIKTMFEMAKEGNGTFKIAKWAVENNIPSETGVPWTPRRVRYVLTNPTYARMQRWKGKLYPLLPIYAMLVTWEDFLYIQSTLFGEEKAWKGKERQMLTSVMRCPVCGKKMFSRTTRYSDNRRYVCCGKNEPGSCKSPNFDLATLDAAVIELIAKISKERYSKSEIWASMNDDDNISSIQTIRLELERLDKAKQKVFDDYYVNQRLSEDDFEAAMSRFEKRQSELAKQLEKIPMPNNKFGDFDDILSELGATILDMEKDDKRKIVELIITEIVPGESTRVQFRWGEIFEIKAAEKKKHFCDVYFY

SEQ ID NO: 37292 - DNA, 50 bp, Paenibacillus alvei
  source 1..50: mol_type = genomic DNA
gcgcgcagatattggataggagtggagagtcctgtccgcttactgtaaat

SEQ ID NO: 37293 - DNA, 40 bp, Paenibacillus alvei
  source 1..40: mol_type = genomic DNA
attctattggataggagtggagagaaaccatactgtactg

SEQ ID NO: 37294 - DNA, 50 bp, Paenibacillus alvei
  source 1..50: mol_type = genomic DNA
gcgcgcagatattggataggagtggggagtcctgtccgcttactgtaaat

SEQ ID NO: 37295 - DNA, 40 bp, Paenibacillus alvei
  source 1..40: mol_type = genomic DNA
tgtgtattggagaggagagggaacaaaacctactgtgctg

SEQ ID NO: 37296 - protein, 457 aa, Clostridioides difficile
MDKIKRVALYIRVSTEEQVLHGDSIRTQTEALEQYSKDNNFIIVDKYIDEGYSATNLKRPNLKRMIEDVKNNKIDLVMITKIDRLSRGVKNYYKIMETLEKHKCDWKTILEDYDSSTAAGRLHINIMLSVAENEAAQTSERIKFVFQDKLKRGEVITGSVPFGYKIKDKHLVIKEDEASIVREAFDAYQDFSSLAKTIQHINTKFSTKYMFKWMPKMLKNKIYIGIYEKGDLVVENYCEPIISKEQFNFVQTLLKKNIRFSENKFKMNYLFSGMIVCGSCGRKMGGVHSRGGANRHYLYYRCPLSFATKLCDNKPYLNEKKVEAFLLENVKKELQKTILEHESNNKKRQKKNNNKNLRNKLEKQIEKLQDLYFDDLINKDTYKFKYKKLNDDLSELNKAKNEAESVEKDLKSMKIFLDTNFEDNYYDMNYSEKRTLWTSAIDRIEVQKNGELVIKFL

SEQ ID NO: 37297 - DNA, 50 bp, Clostridioides difficile
  source 1..50: mol_type = genomic DNA
tgttgtacaaaaagtccttcaccatctggttaaagtattttagtacaatt

SEQ ID NO: 37298 - DNA, 40 bp, Clostridioides difficile
  source 1..40: mol_type = genomic DNA
aatatcataaccttcgccatctggtaacataatatccaat

SEQ ID NO: 37299 - DNA, 50 bp, Clostridioides difficile
  source 1..50: mol_type = genomic DNA
tgttgtacaaaaagtccttcaccaactggttaaagtattttagtacaatt

SEQ ID NO: 37300 - DNA, 40 bp, Clostridioides difficile
  source 1..40: mol_type = genomic DNA
gatatgataactttctcccactttcaacataatattcatt

SEQ ID NO: 37301 - protein, 457 aa, Clostridioides difficile
MDKIKRVALYIRVSTEEQVLHGDSIRTQTEALEQYSKDNNFIIVDKYIDEGYSATNLKRPNLKRMIEDVKNNKIDLVMITKIDRLSRGVKNYYKIMETLEKHKCDWKTILEDYDSSTAAGRLHINIMLSVAENEAAQTSERIKFVFQDKLKRGEVITGSVPFGYKIKDKHLVIKEDEASIVREAFDAYQDFSSLAKTIQHINTKFSTKYMFKWMPKMLKNKIYIGIYEKGDLVVENYCEPIISKEQFNFVQTLLKKNIRFSENKFKMNYLFSGMIVCGSCGRKMGGVHSRGGANRHYLYYRCPLSFATKLCDNKPYLNEKKVEAFLLENVKKELQKTILEHESNNKKRQKKNNNKNLRNKLEKQIEKLQDLYFDDLINKDTYKFKYKKLNDDLSELNKAENEAESVEKDLKSMKIFLDTNFEDNYYDMNYSEKRTLWTSAIDRIEVQKNGELVIKFL

SEQ ID NO: 37302 - DNA, 50 bp, Clostridioides difficile; identical to SEQ ID NO: 37297
  source 1..50: mol_type = genomic DNA

SEQ ID NO: 37303 - DNA, 40 bp, Clostridioides difficile; identical to SEQ ID NO: 37298
  source 1..40: mol_type = genomic DNA

SEQ ID NO: 37304 - DNA, 50 bp, Clostridioides difficile; identical to SEQ ID NO: 37299
  source 1..50: mol_type = genomic DNA

SEQ ID NO: 37305 - DNA, 40 bp, Clostridioides difficile; identical to SEQ ID NO: 37300
  source 1..40: mol_type = genomic DNA

SEQ ID NO: 37306 - protein, 457 aa, Clostridioides difficile
MDKIKRVALYIRVSTEEQVLHGDSIRTQTEALEQYSKDNNFIIVDKYIDEGYSATNLKRPNLKRMIEDVKNNKIDLVMITKIDRLSRGVKNYYKIMETLEKHKCDWKTILEDYDSSTAAGRLHINIMLSVAENEAAQTSERIKFVFQDKLKRGEVITGSVPFGYKIKDKHLVIKEDEASIVREAFDAYQDFSSLAKTIQHINTKFSTKYMFKWMPKMLKNKIYIGIYEKGDLVVENYCEPIISREQFNFVQTLLKKNIRFSENKFKMNYLFSGMIVCGSCGRKMGGVHSRGGANRHYLYYRCPLSFATKLCDNKPYLNEKKVEAFLLENVKKELQKTILEHESNNKKRQKKNNNKNLRNKLEKQIEKLQDLYFDDLINKDTYKFKYKKLNDDLSELNKAENEAESVEKDLKSMKIFLDTNFEDNYYDMNYSEKRTLWTSAIDRIEVQKNGELVIKFL

SEQ ID NO: 37307 - DNA, 50 bp, Clostridioides difficile
  source 1..50: mol_type = genomic DNA
tgttgtacaaaaagtccttcgccatctggcaaaggactttttatacaact

SEQ ID NO: 37308 - DNA, 40 bp, Clostridioides difficile; identical to SEQ ID NO: 37298
  source 1..40: mol_type = genomic DNA

SEQ ID NO: 37309 - DNA, 50 bp, Clostridioides difficile
  source 1..50: mol_type = genomic DNA
tgttgtacaaaaagtccttcgccaactggcaaaggactttttatacaact

SEQ ID NO: 37310 - DNA, 40 bp, Clostridioides difficile; identical to SEQ ID NO: 37300
  source 1..40: mol_type = genomic DNA

SEQ ID NO: 37311 - protein, 457 aa, Clostridioides difficile
MDKIKRVALYIRVSTEEQVLHGDSIRTQTEALEQYSKDNNFIIVDKYIDEGYSATNLKRPNLKRMIEDVKNNKIDLVMITKIDRLSRGVKNYYKIMETLEKHKCDWKTILEDYDSSTAAGRLHINIMLSVAENEAAQTSERIKFVFQDKLKRGEVITGSVPFGYKIKDKHLVIKEDEASIVREAFDAYQDFSSLAKTIQHINTKFSTKYMFKWMPKMLKNKIYIGIYEKGDLVVENYCEPIISREQFNFVQTLLKKNIRFSENKFKMNYLFSGMIVCGSCGRKMGGVHSRGGANRHYLYYRCPLSFATKLCDNKPYLNEKKVEAFLLENVKKELQKTILEHESNKKKRQKKNNNKNLRNKLEKQIEKLQDLYFDDLINKDTYKFKYKKLNDDLSELNKAENEAESVEKDLKSMKIFLDTNFEDNYYDMNYSEKRTLWTSAIDRIEVQKNGELVIKFL

SEQ ID NO: 37312 - DNA, 50 bp, Clostridioides difficile; identical to SEQ ID NO: 37307
  source 1..50: mol_type = genomic DNA

SEQ ID NO: 37313 - DNA, 40 bp, Clostridioides difficile; identical to SEQ ID NO: 37298
  source 1..40: mol_type = genomic DNA

SEQ ID NO: 37314 - DNA, 50 bp, Clostridioides difficile; identical to SEQ ID NO: 37309
  source 1..50: mol_type = genomic DNA

SEQ ID NO: 37315 - DNA, 40 bp, Clostridioides difficile; identical to SEQ ID NO: 37300
  source 1..40: mol_type = genomic DNA

SEQ ID NO: 37316 - protein, 488 aa, Bacillus wiedmannii
MKYAVYVRVSTDKDEQVASIQNQIDICRYWIEKNGFEWDEDAVYKDEAVSGTEWFKRQAIQLILAKARKRELDTVIFKSIHRLARDLRDALEIKSILLGHGVRLVTIEEGYDSYYEGNNDMKFEMYAMFAAQYPKTMSVSISAALNAKVRRGEYNGGRVPYGYRVVDQKYVIDDEESENVKELFDLYNQGLGYLKVALYMNDKGLRFVDGKLWRDYHIRHIINNPFYVGDYIAQKYTKVKVDGRRKQTVNPKEKWVAYKNHHPAIIERDLWDKIHSFEKKGQNRTKRRVSVDNELRGLVYCAHCGQPMKAEAVKKTQRDGVIKYVYMRCSKYRRTGGRECVKHVPLYYSQVRELIVEKLKEKEQDLEKQISGEHKNKNKQKISKVNKEIKEWERKKEKLLDLYLDGQNISKEVFTQRDKKIDKIIREKNMELLKLNSLEEQIKEDNATKKAFDLLKNSENLYECFNTLIKRIDITQNGGLDIYYRFEE

SEQ ID NO: 37317 - DNA, 50 bp, Bacillus wiedmannii
  source 1..50: mol_type = genomic DNA
agtttgtcatacttgttaatcggattaccaattaactcatacaacaaact

SEQ ID NO: 37318 - DNA, 40 bp, Bacillus wiedmannii
  source 1..40: mol_type = genomic DNA
agtttcgctaatgtttgctttagaactaggtggacaaaag

SEQ ID NO: 37319 - DNA, 50 bp, Bacillus wiedmannii
  source 1..50: mol_type = genomic DNA
agtttgtcatacttgttaatcggaaaaccaattaactcatacaacaaact

SEQ ID NO: 37320 - DNA, 40 bp, Bacillus wiedmannii
  source 1..40: mol_type = genomic DNA
agtttcacaaatatttgctaaagcaataattagaccaaaa

SEQ ID NO: 37321 - protein, 488 aa, Bacillus wiedmannii
MKYAIYVRVSTDKDEQVSSIQNQIDICRYWIEKNGFEWDEDAIYKDEAVSGTEWFKRQAIQLILAKARKRELDTVIFKSIHRLARDLRDALEIKSILLGHGVRLVTIEEGYDSYYEGNNDMKFEMYAMFAAQYPKTMSVSISAALNAKVRRGEYNGGRVPYGYRVVDQKYVIDDEESENVKELFDLYNQGLGYLKVALYMNDKGLRFIDGKLWRDYHIRHIINNPFYVGDYIAQKYTKIKVDGRRKQAVNPKEKWVVYKNHHPAIIDRELWDKIHNLEKKEKNRTKRRVSVDNELRGLVYCAHCGQPMKAETVKKTKKDSVIKYVYMRCSTYRRTGGRECVKHVPLYYSQVRELIVEKLKEKEQDLEKQINVEHENKNKQKVSKINKEIKEWESKKEKLLDLYLDGQNISKEVFTQRDKKIDKIIREKNMELLKLNSLEEQIKEDNATKKAFDLLKNAENLYESFNKLIKRIDITQNGGLDIFYRFEE

SEQ ID NO: 37322 - DNA, 50 bp, Bacillus wiedmannii
  source 1..50: mol_type = genomic DNA
agtttgtcacataagttaatcggattacctattaacttatgtgacaaact

SEQ ID NO: 37323 - DNA, 40 bp, Bacillus wiedmannii; identical to SEQ ID NO: 37318
  source 1..40: mol_type = genomic DNA

SEQ ID NO: 37324 - DNA, 50 bp, Bacillus wiedmannii
  source 1..50: mol_type = genomic DNA
agtttgtcacataagttaatcggaaaacctattaacttatgtgacaaact

SEQ ID NO: 37325 - DNA, 40 bp, Bacillus wiedmannii; identical to SEQ ID NO: 37320
  source 1..40: mol_type = genomic DNA

SEQ ID NO: 37326 - protein, 561 aa, Escherichia coli
MKKPKAFSYVRFSTPKQAQGDSYRRQIQQAQDYCAANDLELEDKTIEDFGVSAFRGSNRTDGALGRFIDAVKCGEIERGSYLLVESVDRLSRQAIEDALTQFLEIVREGIVIVTLSDNQVFRSGEVDFTKLIVSIVYMARANDESEMKSRRSRAAWSNGRQQARDNNKVIANSRLPSWLKLEGDKIVPIPERVAIVNEMFQMARSGQGYQQIAKVFTENDYKTFGQGKVWRPAGIQSVIKSRTVIGEFQPHVIVEGKRVPEGEPILDYYPAIVPPSIFAEVLHIVDKRSNHSGSYRKGLYNNLFSGVIRCQCGELLRFHNKGSRGQVRNYLVCPMEGVTGCQLPYLLYNKIEPQLLQAISKLSVVMKQRIPQTEKTSLLKDGLAVLRGQLEIETRKSKKAAQAMLELDDDAVFRSLYEECKANCQSLEEKILQIENEIVGLELSTRTLFQLLSPEDLSNTEQRQRFNSQLKLAVKIEFIYEHSGLVAVIKNLEDELLLEQAFGHKLMNSIVHDFEGHVVVKTISDSPYIDPSWAYEEREEYTKGISVEFDQCGDFNIDNFK

SEQ ID NO: 37327 - DNA, 50 bp, Escherichia coli
  source 1..50: mol_type = genomic DNA
ttaggttcttataataaaaatagctcgcagactttaggagaaaggccgta

SEQ ID NO: 37328 - DNA, 40 bp, Escherichia coli; identical to SEQ ID NO: 27548
  source 1..40: mol_type = genomic DNA

SEQ ID NO: 37329 - DNA, 50 bp, Escherichia coli
  source 1..50: mol_type = genomic DNA
ttaggttcttataataaaaatagcgcgcagactttaggagaaaggccgta

SEQ ID NO: 37330 - DNA, 40 bp, Escherichia coli
  source 1..40: mol_type = genomic DNA
tcagccctctgtactggtggcacaattttgaatactgtaa

SEQ ID NO: 37331 - protein, 555 aa, Syntrophomonas wolfei
MNNRQSNNTVKDNKITALYCRLSRDDESQGDSNSIKNQKTILQKYADDNGFTNTEFFVDDGYSGTNFDRPDWQRLLSQVEEGNIGTIIVKDMSRLGRDYLKVGYYTEVLFPGSDIRFIAINNNVDSSNQQDSDFTPFLNIINEWYAKDTSKKIRSVFKSKGQSGKPLCTNPPYGYIKDPEDKLHWIVDEDAAKVVKEAFRLCMQGYGPTQIAKEFSERHIMNPTAHAKASGINIPDNRGHDDDYIWRGSTIVHMLSRQEYLGHTVNFKTYRKSYKQKKQMKNDPSEWQIFENTHEAIIEEPVFEVVQKIREGRRRITPMGEMPILSGMLFCADCGAKLYQVRHRGWEHDKEHFVCATYRKIKGGCSSHQIRNVVVDELLLDGIRRVTAFAREQEDEFVEMVTKKTRIDLDRSIRDGKRELEQSQTRINKLDDIIQRLYEDNIEGKISDERFAKMTANYEAEQHTLKSRVAELKSAMTSDKESALGVDHFLALVRKYTDIKELTAEIIREFVDKIEVYKAARIDGRRVQRIKIVYNCIGEFDPSVSTSTTEQEKSA

SEQ ID NO: 37332 - DNA, 50 bp, Syntrophomonas wolfei
  source 1..50: mol_type = genomic DNA
aaaaatccctaagacgcaccctctaaagggagttcaacttagggatttac

SEQ ID NO: 37333 - DNA, 40 bp, Syntrophomonas wolfei
  source 1..40: mol_type = genomic DNA
agtcaaagaacctccctctaaagggaggttcttttatttt

SEQ ID NO: 37334 - DNA, 50 bp, Syntrophomonas wolfei; identical to SEQ ID NO: 37332
  source 1..50: mol_type = genomic DNA

SEQ ID NO: 37335 - DNA, 40 bp, Syntrophomonas wolfei
  source 1..40: mol_type = genomic DNA
agagaaacagcacagctctaaagggaggtttttttttttt

SEQ ID NO: 37336 - protein, 479 aa, Streptococcus pneumoniae; identical to SEQ ID NO: 1896

SEQ ID NO: 37337 - DNA, 50 bp, Streptococcus pneumoniae
  source 1..50: mol_type = genomic DNA
ataacaattttagatactcttatttcaagtagcgtatctaaaactctcat

SEQ ID NO: 37338 - DNA, 40 bp, Streptococcus pneumoniae
  source 1..40: mol_type = genomic DNA
tgaacctttgtctcttttttcaaccagtgatagagggatt

SEQ ID NO: 37339 - DNA, 50 bp, Streptococcus pneumoniae
  source 1..50: mol_type = genomic DNA
ataacaattttagatactcttattaaaagtagcgtatctaaaactctcat

SEQ ID NO: 37340 - DNA, 40 bp, Streptococcus pneumoniae
  source 1..40: mol_type = genomic DNA
taaacctgtctctctgtttaaggccagtactagagggcta

SEQ ID NO: 37341 - protein, 533 aa, Nitrospira sp
MIVALYARVSTTRQADKDLSIPDQLGQMRAWCQAGGHTVGAEYVESGASATDDRRPVFQRMITDACVSPSPFEAIVVHSLSRFFRDSLEFGLYERKLKRYEVRVLSITQQTSDDPSGEMIRRIFSVFDEYQSKENGKHTLRAMRENARQGFFNGSRPPVGYRTVEVQLPGNKGRKRQLVVEESESVAVNQIFRWYLHGERGQELGLYGIASRLNAQGILIRGRQWTKGRIYEVLTNRAYIGEHYFNKYEKRGGAVRRMKPRQEWVPVKVDPIVSQELFLAVKEKLESRSPEKVPPRVVNCPTLLTGLLKCGACGAGMTLATGKGGKYRYYKCSSRILKGKDTCTSENLPTELVDRMVLSSLADRVFTPSRVHTMLEGLRKRLRQSQTDQDGKVKLLTKELERVQQSSNQLYEAVEKGFLPMDSTLTDRANKLQAQRQALLTEIAGLRRLKQMPLDALGEKRVQAFTKILRKRLIEKDRGFSKKYLKLLVEEIRCLDKQLVMRGSYAALAKMVGETKKGTPESGVPSFGLDWLP

SEQ ID NO: 37342 - DNA, 50 bp, Nitrospira sp
  source 1..50: mol_type = genomic DNA
tgcccagttttggtctagattggctccccgaacacgacaaacatgagcaa

SEQ ID NO: 37343 - DNA, 40 bp, Nitrospira sp
  source 1..40: mol_type = genomic DNA
tgtgcaaggagggattggctccccgggcaggactcgaacc

SEQ ID NO: 37344 - DNA, 50 bp, Nitrospira sp
  source 1..50: mol_type = genomic DNA
tgcccagttttggtctagattggctgcccgaacacgacaaacatgagcaa

SEQ ID NO: 37345 - DNA, 40 bp, Nitrospira sp
  source 1..40: mol_type = genomic DNA
agtgaagggagggcttggctgcctggggaggaggtgaccc

SEQ ID NO: 37346 - protein, 540 aa, Blautia massiliensis; identical to SEQ ID NO: 12131

SEQ ID NO: 37347 - DNA, 50 bp, Blautia massiliensis
  source 1..50: mol_type = genomic DNA
caacaatatctttaattaagggagaacggagtttcccatagttaaagata

SEQ ID NO: 37348 - DNA, 40 bp, Blautia massiliensis
  source 1..40: mol_type = genomic DNA
agcggtgaataaatgggagacggggaactccaatccagat

SEQ ID NO: 37349 - DNA, 50 bp, Blautia massiliensis
  source 1..50: mol_type = genomic DNA
caacaatatctttaattaagggagatcggagtttcccatagttaaagata

SEQ ID NO: 37350 - DNA, 40 bp, Blautia massiliensis
  source 1..40: mol_type = genomic DNA
aaggctgaataaataggagatggctatgtcaaatccagaa

SEQ ID NO: 37351 - protein, 540 aa, Blautia massiliensis
MKQPYNTTIYNTALYLRLSRDDELQGESGSIQTQRMMLRQYAAEHGLTVVDEYIDDGWSGTNFERPSFQRMIDDIEDGKINCVVTKDLSRLGRNYILTGQYTEIYFPSKGVRYIAINDNVDTINGESELAPFLNILNEMHARQTSKKVKAAMHTRFANGAHYGAYAPLGYVKDPDKKGHLLIDPETRWIVEKIFDLAVHGRGAASITRILVEEKVPTPGWLNYERYGTFANIYAGAPAEKAYAWTIAQVKSILKEETYIGHSIHNKQSNISFKNKKKVRKPQEEWYRVENTHEAIISEKVFQKVQELIASRRRKRRNGTTQIFAGLIKCADCGWSLAYGENKQNKNPYGYYHCSKNGQGLRQCSMHYIRYDVLYAYVLARLQYWSMLAQKDEDKLLKRLLNASDRERNSAKKKQAAELKKAEKRKAEVDGLFAKMYEDWSAGRITEYNFNMLSEKYQNEQKELETKIRQLHETMEAAVQTAADAEKWIALMKQYVNPVELTAELLNTLIEKITVHEAVKGEDGSREQEVEIYYRFIGKID

SEQ ID NO: 37352 - DNA, 50 bp, Blautia massiliensis; identical to SEQ ID NO: 37347
  source 1..50: mol_type = genomic DNA

SEQ ID NO: 37353 - DNA, 40 bp, Blautia massiliensis; identical to SEQ ID NO: 37348
  source 1..40: mol_type = genomic DNA

SEQ ID NO: 37354 - DNA, 50 bp, Blautia massiliensis; identical to SEQ ID NO: 37349
  source 1..50: mol_type = genomic DNA

SEQ ID NO: 37355 - DNA, 40 bp, Blautia massiliensis; identical to SEQ ID NO: 37350
  source 1..40: mol_type = genomic DNA

SEQ ID NO: 37356 - protein, 479 aa, Streptococcus pneumoniae
MTKIALYLRLSVDEADTDESNSITNQRYLLNNYLDQTPEFKNWERLEFVDDGFSGTSLKRPAFQRMMADVKAGTIRHIIVKDLSRFMRDYLELGNYLENIFPFLGVRFIALNDHYDSLVSEHNGLDIDVPFRNLLNDFYAKDVSEKVKSAMNSMKRSGKNMSWLPPFGYIKDPNDRFKIIIDEEVAPIVRRIFRLCIEGMGTQKIAMLLNSEQTITPAERKMQVSQARYTKSIIITAEQKRNVWTRSGILQILKNEAYKGTYLFNTRTTVNGKQIRRPESEWERLDNNHEAIVSSEDFDKAQQSLTSRISGTKSQVCNQPEEVLLRGLVICEHCGHRLLRYSHNNNNNYFYCCYCRSQGQNMKSCRIDRIEEAIEKELKSRLPMNSPKLSKTNLIREVERLKTQKVSHFQDYKEGLMTRETYMEKRQNLDNSIMEIEEQLKVVGRENIAFDKKLTREVVDTHIERIVVNGQGSFTVVYK

SEQ ID NO: 37357 - DNA, 50 bp, Streptococcus pneumoniae
  source 1..50: mol_type = genomic DNA
atagtgtcatttacttgacataagaggggggggggattgtgtcataataa

SEQ ID NO: 37358 - DNA, 40 bp, Streptococcus pneumoniae
  source 1..40: mol_type = genomic DNA
gttatgagatcgttgcctgggggttagtgggaggagatgg

SEQ ID NO: 37359 - DNA, 50 bp, Streptococcus pneumoniae
  source 1..50: mol_type = genomic DNA
atagtgtcatttacttgacataagtggggggggggattgtgtcataataa

SEQ ID NO: 37360 - DNA, 40 bp, Streptococcus pneumoniae
  source 1..40: mol_type = genomic DNA
gctatgaggtcattgtcagtggcctagtgagaagtgatgg

SEQ ID NO: 37361 - protein, 612 aa, Corynebacterium pseudotuberculosis
MIEYTNKITALYSRLSVGDEDRDGGESNSIVNQKAFLERYARQHKLMNIRHYIDDDESGRFFDRSAYTQMISDVESGKIGIVIMKDMTRWGRDYLQVGNAMEIFRRNNVRFIAINNGIDSQDQNTLEFAPFINIMSEWYARDISKKVKTGIKTKGASGKPVATEAPYGYIKDPNNKDFWVVDKEAAEVVKLIFTLFMEGKSRNQIAVYLKEKEILTPTFYMKQQGRGTAKNRKLNEENRYNWNKATLTRILKRQEYCGDVINFKTEKHYRDKRNHYVDKSKWQIIENVHEPIIDRSTYENVQRILKNAPVKRPNGDGEIHALSGLMYCKDCGTKMHIRTIHKNGKVQHVTYCSEYAKGKAKHPKCHSPHRIDVDDVMENLTDVLRKIAKFSLENKEEFEALIKNSLAKEQTEEIKKQKKRMQQITDRIEQIERVMNKLYEDNALGNIEANRYELLSRKYGEEYYSLKAEQEKIEERLSEFENANQRAKNFIKLAESYSDFEQLTPIAINEFISKIVVHERDVKRAKYAVQRIEVYFNYIGRFENELTKEIEPTEEEMIQMREEIEEAKKEKSKAYHRAYSKEYRAKNLEKFREYERMKAREYRARKKLQAIT

SEQ ID NO: 37362 - DNA, 50 bp, Corynebacterium pseudotuberculosis
  source 1..50: mol_type = genomic DNA
ggtacttgacaaaatgctttcctgggttgcataatattaactgaacagga

SEQ ID NO: 37363 - DNA, 40 bp, Corynebacterium pseudotuberculosis
  source 1..40: mol_type = genomic DNA
agcaactcgtctcacggtgggtgcgggtgcgaggtccttt

SEQ ID NO: 37364 - DNA, 50 bp, Corynebacterium pseudotuberculosis
  source 1..50: mol_type = genomic DNA
ggtacttgacaaaatgctttcctgcattgcataatattaactgaacagga

SEQ ID NO: 37365 - DNA, 40 bp, Corynebacterium pseudotuberculosis
  source 1..40: mol_type = genomic DNA
agcagctctcaccacagtgcatgagggtgcgatgtcccat

SEQ ID NO: 37366 - protein, 511 aa, Burkholderia ubonensis
MELDASLSLRDEGLSAYHQRHVRQGALGVFLRAIEDGQVPTGSVLIVEGLDRLSRAEPLQAQAQLAQIVNAGITVVTASDGREYNRERLKAQPMDLVYSLLVMIRAHEESDTKSKRVKAAIRRQCQGWIAGTWRAPIRVGRDPHWVREIEGGGFELIPERALAVQLAIQMFKQGHGAVQVVRELAERGLKISETGRTHSSNIYKILANRMLIGEKTVEVEGETFRLECYYPALLTPTEFADLRYLAEQRGRRKGKGEIPGVVTGLGITYCGYCGAAIVAQNLMGRKRLADGRPYPGHRRLHCVTYSQGAGCKISGSCSVVPVERALMLYCSDQINLTRLLEGDGGTAAISAQLADARQRVAELEAQVQRVTDALLFDDGEAPVAVLKRLRELENRLAGERREVDSFEHHLAVSASAVAPAAAEAWRELVNGVEQLDYNARLMARQLVADTFSRIVIYQSGFQPETDHGTIGVVLVGKRGNTRMLNVDRRTGEWRSAEDIKLSGFTTVPLPA

SEQ ID NO: 37367 - DNA, 50 bp, Burkholderia ubonensis
  source 1..50: mol_type = genomic DNA
atatctttcgggcagccaagcgaaactatacctatacgcgggctttgcga

SEQ ID NO: 37368 - DNA, 40 bp, Burkholderia ubonensis
  source 1..40: mol_type = genomic DNA
cttcgggcacccgagggatacgaagcctactttcggggat

SEQ ID NO: 37369 - DNA, 50 bp, Burkholderia ubonensis
  source 1..50: mol_type = genomic DNA
atatctttcgggcagccaagcgaaggtatacctatacgcgggctttgcga

SEQ ID NO: 37370 - DNA, 40 bp, Burkholderia ubonensis
  source 1..40: mol_type = genomic DNA
cttggggctctcgagggaagggcagcctgctgctggggaa

SEQ ID NO: 37371 - protein, 588 aa, Streptococcus anginosus
MKKDVKVIKGDTTLKRTASGCVERSIKRVAAYCRVSTDTEDQINRYNSQVEHYTEFIQKNNEWTLAGIYADEAITGTQVDRRIDFQRLINDCINGDIDMIITKSISRFARNTLDTLKYVRKLKEFNVAVFFEEENINTLTMDGELLLTILSSVAQQEVENISANVKKGLRMKMERGEMVGFQGCLGYDYDPETKSISINEKEAEIVRYIFRRYIEGVGGMVISRELEEQGYLSPRGNKRWTETTVLGIIKNEKYKGDLMMGKTYTVDPISKRRLDNYGEQDKFYIENHHEPIISEEVFEKAQGIRLRRSKNRNTVANNGGKREKYSRKYAFSSMLECGFCGHNLSRRNWHSSSEYTKVIWQCVNATKNGKKYCPHSKGIEEEAIEKAFMESYRQVCHNNVEITNEFLKTVEEELKDNSLAKDLKKITNQLDKVLKKEKDLVELRLNESISMDIYQDKYNEIAISKEKLLAEKRTLEVTLTDEKALKKRLEGFKKILESNKYLEKFDRAVFESIVDKIIIGGTNDEGEIDPAMITIIYKTGKKDSQDGRLFKSRRKNAKEVNEETDNKLYPQSSDEVNNLCSYHMDNTC

SEQ ID NO: 37372 - DNA, 50 bp, Streptococcus anginosus
  source 1..50: mol_type = genomic DNA
gtgttcctatcatatggacaacacatgtggagtgcatagcgttgatacaa

SEQ ID NO: 37373 - DNA, 40 bp, Streptococcus anginosus
  source 1..40: mol_type = genomic DNA
ttatttgctcactcagttcatgtagagacagtagctctgt

SEQ ID NO: 37374 - DNA, 50 bp, Streptococcus anginosus
  source 1..50: mol_type = genomic DNA
gtgttcctatcatatggacaacacgggtggagtgcatagcgttgatacaa

SEQ ID NO: 37375 - DNA, 40 bp, Streptococcus anginosus
  source 1..40: mol_type = genomic DNA
ttcttggctccctgagttcggatatagactgtatctctag

SEQ ID NO: 37376 - protein, 589 aa, Peptostreptococcus anaerobius
MKKDVKVIKGDTTLKRTASGCVERSIKRVAAYCRVSTDTEDQINRYNSQVEHYTEFIQKNNEWTLAGIYADEAITGTQVDRRIDFQRLINDCINGDIDMIITKSISRFARNTLDTLKYVRKLKEFNVAVFFEEENINTLTMDGELLLTILSSVAQQEVENISANVKKGLRMKMERGEMVGFQGCLGYDYDPETKSISINEKEAEIVRYIFRRYIEGVGGMVISRELEEQGYLSPRGNKRWTETTVLGIIKNEKYKGDLMMGKTYTVDPISKRRLDNYGEQDKFYIENHHEPIISEEVFEKAQGIRLRRSKNRNTVANNGGKREKYSRKYAFSSMLECGFCGHNLSRRNWHSSSEYTKVIWQCVNATKNGKKYCPHSKGIEEEAIEKAFMESYRQVCHNNVEITNEFLKTVEEELKDNSLAKDLKKITNQLDKVLKKEKDLVELRLNESISMDIYQDKYNEIAISKEKLLAEKRTLEVTLTDEKALKKRLEGFKKILESNKYLEKFDRAVFESIVDKIIIGGTNDEGEIDPAMITIIYKTGKKDSQDGRLFKSRRKNAKEVNEETDNKLYPQSSDEVNNLCSYHMDNTCR

SEQ ID NO: 37377 - DNA, 50 bp, Peptostreptococcus anaerobius; identical to SEQ ID NO: 37372
  source 1..50: mol_type = genomic DNA

SEQ ID NO: 37378 - DNA, 40 bp, Peptostreptococcus anaerobius; identical to SEQ ID NO: 37373
  source 1..40: mol_type = genomic DNA

SEQ ID NO: 37379 - DNA, 50 bp, Peptostreptococcus anaerobius; identical to SEQ ID NO: 37374
  source 1..50: mol_type = genomic DNA

SEQ ID NO: 37380 - DNA, 40 bp, Peptostreptococcus anaerobius; identical to SEQ ID NO: 37375
  source 1..40: mol_type = genomic DNA

SEQ ID NO: 37381 - protein, 552 aa, Eubacterium ventriosum; identical to SEQ ID NO: 21036

SEQ ID NO: 37382 - DNA, 50 bp, Eubacterium ventriosum
  source 1..50: mol_type = genomic DNA
tgttgggacaacgaaagtaccgttgagacggttgttcttttgtcccaaca

SEQ ID NO: 37383 - DNA, 40 bp, Eubacterium ventriosum
  source 1..40: mol_type = genomic DNA
tccgaacacaaatcatgtggagacggtatgtttattgtcc

SEQ ID NO: 37384 - DNA, 50 bp, Eubacterium ventriosum; identical to SEQ ID NO: 37382
  source 1..50: mol_type = genomic DNA

SEQ ID NO: 37385 - DNA, 40 bp, Eubacterium ventriosum
  source 1..40: mol_type = genomic DNA
tcctcacactagtgtagtggagccgctatgtttattgacc

SEQ ID NO: 37386 - protein, 520 aa, Aeromonas veronii
MATAYSYIRFSSKAQAEGDSLRRQLQRTEEWCRAKKVELSKKNFKDLGISAFKEKTRPSLDDLFTAIQNGSIVEGDYIILENLDRLSRQGIHHTQTILGQILASGVKVIDLTNGFELDKESMNDLVSVIRVALAADLAYQESKKKSERVLAAKANQRKCLREGKAVGKRLPFWISLGEGYELNSKAEVARDIIKQRAAGVGFHRIAINLNNKRSDEMYKPPVAEHWSDTTIRDIIKSRALYGSSVDMEGEVENIFPALISFTEWQAIQAEKVGSAGGHTQHNHLARLVKCECGAAMSKKIQKSKTKTKTHEYNTWKCVASTSGACKHTGVIRDLDIDVFKSLNHLKVDMKQASKELDSINKKIEKKTQRQQELEKALLEDDAPISALTTAIKETTKELKQLRSERDALSIETDSGLLVELKDDAVAFNIELRKLVKSIVVIPVSSNIFRIKIRQHNKHTVNCTKMRKSQRSEWTRFFGKTEVAPALLIDAPEPKDPDQPENQITSGMFLDDWADTDEPHS

SEQ ID NO: 37387 - DNA, 50 bp, Aeromonas veronii
  source 1..50: mol_type = genomic DNA
gtttactatgaaaagcgattcacagtgataaactgtagttagcagtaaac

SEQ ID NO: 37388 - DNA, 40 bp, Aeromonas veronii
  source 1..40: mol_type = genomic DNA
agcgggggccagattgaccgtgatgtgtttgctcggaaac

SEQ ID NO: 37389 - DNA, 50 bp, Aeromonas veronii
  source 1..50: mol_type = genomic DNA
gtttactatgaaaagcgattcacaaggataaactgtagttagcagtaaac

SEQ ID NO: 37390 - DNA, 40 bp, Aeromonas veronii
  source 1..40: mol_type = genomic DNA
agaggctgccagactgacaaggttgagtttgatcggcagc

SEQ ID NO: 37391 - protein, 414 aa, Pantoea dispersa; identical to SEQ ID NO: 12261

SEQ ID NO: 37392 - DNA, 50 bp, Pantoea dispersa
  source 1..50: mol_type = genomic DNA
gtttagctaagtaagatgaccagaattctggccttaccacgcacctcgtc

SEQ ID NO: 37393 - DNA, 40 bp, Pantoea dispersa
  source 1..40: mol_type = genomic DNA
ggagtaataaagcaccagaatttttgccatcgtgttttca

SEQ ID NO: 37394 - DNA, 50 bp, Pantoea dispersa
  source 1..50: mol_type = genomic DNA
gtttagctaagtaagatgaccagatgtctggccttaccacgcacctcgtc

SEQ ID NO: 37395 - DNA, 40 bp, Pantoea dispersa
  source 1..40: mol_type = genomic DNA
cctgggagaaagcagcaaatgttttgccatcgtgatttta

SEQ ID NO: 37396 - protein, 538 aa, Bifidobacterium dentium
MCEEEVKNAGIYIRVSTDDQARAGFSLPEQKEKLLSLCEFKGYNVFKVYEDAGISAKDMEHRPKFQEMLNDVKTGKINYIVAYKLDRVTRSVRDLEELINILEKYNCYLVCDRDDVNTSTANGRFFVRMLMVLSQLEIEIVSERTKFGLNGAIKSGHLPGVVPLGYKKDGNKKTIIDETTRHIIERIFNLYLEGNSYQQISNIFNKEKVLNKSWYDTDIEKIINNRIYMGDYEQYKRIAKKIGRDTVIYMNVVEPIITRAMWEECQTQKLTNQRTYTRTRTYLFFQKLVCPKCGRIMKCKGSGGKKKKYIYYNCEFCHFNLREDYVEEYMIKAIYEFLEFEQMCNSFFLPILANKKDKNTDLNLDKEIEGYIKQKERIKKAYLSGIVELKDFEEDLKKINEKLEILNNKKQELNELDVHSFTPEKVMARRDIEKISIDNGYKEKEFYKFEWDIKTKEEKQQFISKYIDNIIIDKDDKGNLDIKQINFRSSFIDKVVKLTQIGAYDYKLPFEVNHKEEMVLVSSPMKRKQVNKYLEYLK

SEQ ID NO: 37397 - DNA, 50 bp, Bifidobacterium dentium
  source 1..50: mol_type = genomic DNA
tcgcaaatgacccatgtcattgctccagaagcaaaaatcgtcgcaccaaa

SEQ ID NO: 37398 - DNA, 40 bp, Bifidobacterium dentium
  source 1..40: mol_type = genomic DNA
tcgactcccgtcatccgctccacgatttctccaacttcag

SEQ ID NO: 37399 - DNA, 50 bp, Bifidobacterium dentium
  source 1..50: mol_type = genomic DNA
tcgcaaatgacccatgtcattgcttgagaagcaaaaatcgtcgcaccaaa

SEQ ID NO: 37400 - DNA, 40 bp, Bifidobacterium dentium
  source 1..40: mol_type = genomic DNA
tggacttccttcctccccttgactctgtgtccaacttcat

SEQ ID NO: 37401 - protein, 538 aa, Bifidobacterium dentium
MCEEEVKNAGIYIRVSTDDQARAGFSLPEQKEKLLSLCEFKGYNVFKVYEDAGISAKDMEHRPKFQEMLNDVKTGKINYIVAYKLDRVTRSVRDLEELINILEKYNCYLVCDRDDVNTSTANGRFFVRMLTVLSQLEIEIVSERTKFGLNGAIKSGHLPGVVPLGYKKDGNKKTIIDETTRHIIERIFNLYLEGNSYQQISNIFNKEKVLNKSWYDTDIEKIINNRIYMGDYEQYKRIAKKIGRDTVIYMNVVEPIITRAMWEECQTQKLTNQRTYTRTRTYLFFQKLVCPKCGRIMKCKGSGGKKKKYIYYNCEFCHFNLREDYVEEYMIKAIYEFLEFEQMCNSFFLPILADKKDKNTDLNLDKEIEGYIKQKERIKKAYLSGIVELKDFEEDLKKINEKLEILNNKKQELNELDVHSFTPEKVMARRDIEKISIDNGYKEKEFYKFEWDIKTKEEKQQFISKYIDNIIIDKDDKGNLDIKQINFRSSFIDKVVKLTQIGAYDYKLPFEVNHKEEMVLVSSPMKRKQVNKYLEYLK

SEQ ID NO: 37402 - DNA, 50 bp, Bifidobacterium dentium; identical to SEQ ID NO: 37397
  source 1..50: mol_type = genomic DNA

SEQ ID NO: 37403 - DNA, 40 bp, Bifidobacterium dentium; identical to SEQ ID NO: 37398
  source 1..40: mol_type = genomic DNA

SEQ ID NO: 37404 - DNA, 50 bp, Bifidobacterium dentium; identical to SEQ ID NO: 37399
  source 1..50: mol_type = genomic DNA

SEQ ID NO: 37405 - DNA, 40 bp, Bifidobacterium dentium; identical to SEQ ID NO: 37400
  source 1..40: mol_type = genomic DNA

SEQ ID NO: 37406 - protein, 538 aa, Bifidobacterium dentium
MCEEEVKNAGIYIRVSTDDQARAGFSLPEQKEKLLSLCEFKGYNVFKVYEDAGISAKDMEHRPKFQEMLNDVKTGKINYIVAYKLDRVTRSVRDLEELINILEKYNCYLVCDRDDVNTSTANGRFFVRMLTVLSQLEIEIVSERTKFGLNGAIKSGHLPGVVPLGYKKDGNKKTIIDETTRHIIERIFNLYLEGNSYQQISNIFNKEKVLNKSWYDTDIEKIINNRIYMGDYEQYKRIAKKIGRDTVIYMNVVEPIITCAMWEECQTQKLTNQRTYTRTRTYLFFQKLVCPKCGRIMKCKGSGGKKKKYIYYNCEFCHFNLREDYVEEYMIKAIYEFLEFEQMCNSFFLPILADKKDKNTDLNLDKEIEGYIKQKERIKKAYLSGIVELKDFEEDLKKINEKLEILNNKKQELNELDVHSFTPEKVMARRDIEKISIDNGYKEKEFYKFEWDIKTKEEKQQFISKYIDNIIIDKDDKGNLDIKQINFRSSFIDKVVKLTQIGAYDYKLPFEVNHKEEMVLVSSPMKRKQVNKYLEYLK

SEQ ID NO: 37407 - DNA, 50 bp, Bifidobacterium dentium; identical to SEQ ID NO: 37397
  source 1..50: mol_type = genomic DNA

SEQ ID NO: 37408 - DNA, 40 bp, Bifidobacterium dentium
  source 1..40: mol_type = genomic DNA
tcgactcccgtcatccactccacgatttctccaacttcag

SEQ ID NO: 37409 - DNA, 50 bp, Bifidobacterium dentium; identical to SEQ ID NO: 37399
  source 1..50: mol_type = genomic DNA

SEQ ID NO: 37410 - DNA, 40 bp, Bifidobacterium dentium; identical to SEQ ID NO: 37400
  source 1..40: mol_type = genomic DNA

SEQ ID NO: 37411 - protein, 597 aa, Pseudomonas alloputida
MTTRPKAYSYVRFSTPEQAKGDSRRRQYKAAIEYADRHDLELVKDANYAFLDAGVSAYRGNNVNRVSSSLGRFYEYVKEGKIESGSYLLVESLDRLSREQVTEALPRFLDLLNSGIIVVTFGDGTVYKKSAEPMQLVMSIFHMSRAHSESSVKGQRVSDAWQQKQALARSEGVPLGAACPQWLSFDGKAYKAIEDRVSVVKRVFDLTVQGYGQRAIVKMFNSEGVPVFGSENRNKSGLWGSSSVAKILGNRSVLGEYQPTVWTEGRRRTAGEPIKGFYPAVVDEELYYAALEGRSSRNVSKASKTSSNFNVWAKVAQCAYCKSPMHLVNKGKPPKGSKYLRCSRSAKGACINRSIRLDQSEVVFKEILAKLNLASLIKDNAQVLRKRIVELDGRIESAKIKLLEVSELLQSYPSKTLAQTAASFEGELARLESDRDECKATLASEHITDKNDFFRRLDLTSYEGRFLANQQVQRLKVRVLLKHDEMRTQYSVYIGDLPKFFYMCEHGEECLFVPISAELLRASIRQGDMQLTKLLVKPDLLVQKALSDDSMEKFKDNVPNGIDAHHLHFSAADNELASKKLLSYFERKLWGGGKKES

SEQ ID NO: 37412 - DNA, 50 bp, Pseudomonas alloputida
  source 1..50: mol_type = genomic DNA
atgggtgttttgttgcacaacataaacaggttatggtacaatacacccat

SEQ ID NO: 37413 - DNA, 40 bp, Pseudomonas alloputida
  source 1..40: mol_type = genomic DNA
gccgggcggcccggtgaacaacaggttgtgcgccccggcc

SEQ ID NO: 37414 - DNA, 50 bp, Pseudomonas alloputida
  source 1..50: mol_type = genomic DNA
atgggtgttttgttgcacaacatagccaggttatggtacaatacacccat

SEQ ID NO: 37415 - DNA, 40 bp, Pseudomonas alloputida
  source 1..40: mol_type = genomic DNA
gccgagcggcgcagaggacgccagggcgcgcgccgcagcc

SEQ ID NO: 37416 - protein, 568 aa, Pseudomonas sp SWI36
MKPKAYSYARFSTPEQGKGDSYRRQRAAAEEYCAANGLELADTKEYRFFDNGRSAYKAKHLNDTGDFGRFLSYVDEGRIAPGSYLLVESLDRLSREEVKDALPRFLDLLKKGIRIRTSIDNHLYTENYNLTDLIISVISMSRAHEESSTKGIRVAAAWREKRGLARSDKKVPLGAACPYWLKLMDGAYVEVEERVQVVRRIFDMTIAGYGQAVISRRLNEEGVPVFGSTRSTKEKPRNKSGLWGTSSVQKILHNRALLGEYQPTHLVDRIRQNDGDPIQGYYPEIISPDVFLQAKAARAQRQTSGSTKQSKNFNIWQGIAKCQLCGDAMHLINKGRPPKGYTYLQCYSAKKGQCCNGSIRIEQTEAVFKEILTNVDSMSLINGKSAEIRKSLEIAEGHFGVVADKLQQATEVYTAVATIAGAKRIQELESEYAQCLATRDELRGQLASHRVINKKDYLKQLDLVSYERRAAANSLLKRLGIQVQFKRDNPNRFQCRVLDKSDEAVSDDLQQMLFGILYEDDHATTQPLDPDIYDRQVEQGLITAAVAIREQEQDGIGWQWFGGKLKRS

SEQ ID NO: 37417 - DNA, 50 bp, Pseudomonas sp SWI36
  source 1..50: mol_type = genomic DNA
gtaggtgcatatggttacaacctgctcaggttgtgggataatgcaccaac

SEQ ID NO: 37418 - DNA, 40 bp, Pseudomonas sp SWI36
  source 1..40: mol_type = genomic DNA
ggccggggcgcacaacctgctgttcaccgggccgcccggc

SEQ ID NO: 37419 - DNA, 50 bp, Pseudomonas sp SWI36
  source 1..50: mol_type = genomic DNA
gtaggtgcatatggttacaacctggccaggttgtgggataatgcaccaac

SEQ ID NO: 37420 - DNA, 40 bp, Pseudomonas sp SWI36
  source 1..40: mol_type = genomic DNA
ggctgcggcgcgcgccctggcgtcctctgcgccgctcggc

SEQ ID NO: 37421 - protein, 547 aa, Lachnoclostridium pacaense; identical to SEQ ID NO: 11466

SEQ ID NO: 37422 - DNA, 50 bp, Lachnoclostridium pacaense; identical to SEQ ID NO: 11112
  source 1..50: mol_type = genomic DNA

SEQ ID NO: 37423 - DNA, 40 bp, Lachnoclostridium pacaense
  source 1..40: mol_type = genomic DNA
tttctatatgagtccctatgaagtggcacaggaggactat

SEQ ID NO: 37424 - DNA, 50 bp, Lachnoclostridium pacaense; identical to SEQ ID NO: 19274
  source 1..50: mol_type = genomic DNA

SEQ ID NO: 37425 - DNA, 40 bp, Lachnoclostridium pacaense
  source 1..40: mol_type = genomic DNA
ttcctaaatgagctcctagaaaggggaataggattactat

SEQ ID NO: 37426 - protein, 535 aa, Cobetia crustatorum
MTTEQPKAPAIKAYSYLRFSTPEQMKGDSFRRQTKLAKDYAQKLGLTLDDHSFHDLGISAYQGKNRQTGALGIFLRAVEDEIIAEGSYLLVESLDRISRQSAHRAASVLSSICEMGINVVTLFDGRVYSAETLEQDPMTFMMAVLTFQRANEESATKAKRLRSVWESKRKMIAEGKPVRLTSRAPQWLKPSDDGVSFDIIPERGEVVRNIFKWTLEGIGKQSIAARLNREGAPIFGRGKLWHTSYVSKILQSSATYGTLTPFTSRADRKEHREACEPIEGYYPAVIDRETFEAVQALKASISPRRGRHSSSPVQNIVGGIAVCPLCDSRMIRVTKNKAKGWVYLVCHRAKQGAGCVYNAVRVDMVEPIIQDNISFLTAQCPVGDDDFDERFDSLNGQLEGVEELIHNVLTSIENGLDPSKYPAIGERLSALQEQQEALKEEIDQMGQQRISFNNDVAQRRAQKLETAVRENWDDKAQINTLMRGCFSKVVVDFTTGGLMFHWQQGGETELIYTFLDSEWVDPTEASQKPHERHLA

SEQ ID NO: 37427 - DNA, 50 bp, Cobetia crustatorum
  source 1..50: mol_type = genomic DNA
ataggtctccaagaacataacgctagcaggttgtgtccgtgaagacctac

SEQ ID NO: 37428 - DNA, 40 bp, Cobetia crustatorum
  source 1..40: mol_type = genomic DNA
acccggtggacctgcaaaaagcagattgtggccgccagcc

SEQ ID NO: 37429 - DNA, 50 bp, Cobetia crustatorum
  source 1..50: mol_type = genomic DNA
ataggtctccaagaacataacgctcacaggttgtgtccgtgaagacctac

SEQ ID NO: 37430 - DNA, 40 bp, Cobetia crustatorum
  source 1..40: mol_type = genomic DNA
acctggaggacctttaaaacacagattggtgggcccaccc

SEQ ID NO: 37431 - protein, 486 aa, Pseudomonas putida
MVQTWLDQHPDYVLADLSFEDLGKSGWAGDHIEGGMGELLAAVEAGFIRSGDCVLVEALDRAGRLETMEMLSKVINPILQAGVTLVTLDDGTEYTKASLNGGHIFLLIAKIQAANQFSENLSRRVKDSYKKRVQEAKAGKIPKRRTPLWLDTEGQLVEHIAPHIETAFELYADGFGERTILRKLQATGVEEFKDLYGSTLKRWLINPIAIGKWKDIPKVYPAVVSDELFYRVQQKISSNRTTRPSSPTKHHLTGIVKCAHCGRNFNYHVFKDQPTVLQCSNRFMSTADKCENSKSIPLGVLNRIVLMTSVGADMEIAQAKKLSVNQKRIIVIDGELETLAVRLAGLAKAISQVGPMAELLEQITALKTEQEKLQAEYALLTAGETPLTYTDFIEHVKREDPDKMLWNKDLQLIGYTVTCDKNGKLVTSHGKDRVFQYTGYIRKTKSYSFMTEGKEKVHTVPVQQPAINIPEKIVITKADVERLTKR

SEQ ID NO: 37432 - DNA, 50 bp, Pseudomonas putida
  source 1..50: mol_type = genomic DNA
ggctactatattgcagctttttgcatgctgtaggctgcaataacgtaata

SEQ ID NO: 37433 - DNA, 40 bp, Pseudomonas putida
  source 1..40: mol_type = genomic DNA
gagcctgatccctttcaccatgcaaatggccttcgtggtc

SEQ ID NO: 37434 - DNA, 50 bp, Pseudomonas putida
  source 1..50: mol_type = genomic DNA
ggctactatattgcagctttttgcaggctgtaggctgcaataacgtaata

SEQ ID NO: 37435 - DNA, 40 bp, Pseudomonas putida
  source 1..40: mol_type = genomic DNA
gagcctgctccctgccaccaggcatatgaccttaagtgta

SEQ ID NO: 37436 - protein, 539 aa, Clostridium botulinum
MKAAIYSRKSMFTGKGDSVENQVQMCKDYGNRLNVDEYLIYEDEGYSGGNINRPKFQELLQDVKKKKFDVLICYRLDRISRNVADFSSTLELLQDNNISFVSIKEQFDTSTPMGKAMVYIASVFAQLERETIAERVRDNMLELAKSGRWLGGQTPLGFESEKISYFDAEMKERTMYKLSPESKELELVKLIYNKYLETGSIHLTLKYLLSNNIKGKNGGEFASMSINDILRNPVYAKSNEMVLNYLKDKGMNVCGTANGNGILIYNKRNSKYKRKDINEWVAAVSKHKGIIPANVWIEVQKTLDKNSKKDTPRQGTSKKALLSGVLKCSRCGAPMRVTYGRKRKDGTSIYYYTCTMKAHSGKTRCDNPNVRGDYLEKNIITELKNLNSDVVIKGLEEHKKQLVATTENSIIKNISKEIEEKKKEMDSLINKLSKIESDIASEFILSKVDSLGKEIKELEVNLLKRTDKRKENSDIELNIEIVLQAIKEFNDFFNSVESFKDDELTIQRKRYLLERAVDEIRIDGETNGIDIDLWRAKKK

SEQ ID NO: 37437 - DNA, 50 bp, Clostridium botulinum
  source 1..50: mol_type = genomic DNA
tgttgcaattacataaagcatgtacatgcatgattgatataattgcgaca

SEQ ID NO: 37438 - DNA, 40 bp, Clostridium botulinum
  source 1..40: mol_type = genomic DNA
agattttcctggtcataaacacgcatggctttatgatgta

SEQ ID NO: 37439 - DNA, 50 bp, Clostridium botulinum
  source 1..50: mol_type = genomic DNA
tgttgcaattacataaagcatgtatctgcatgattgatataattgcgaca

SEQ ID NO: 37440 - DNA, 40 bp, Clostridium botulinum; identical to SEQ ID NO: 10125
  source 1..40: mol_type = genomic DNA

SEQ ID NO: 37441 - protein, 434 aa, Clostridium botulinum
MLICYRLDRISRNVADFSSTLELLQDNNISFVSIKEQFDTSTPMGKAMVYIASVFAQLERETIAERVRDNMLELAKSGRWLGGQTPLGFESEKISYFDAEMKERTMYKLSPEPKELELVKLIYNKYLETGSIHLTLKYLLSNNIKGKNGGEFASMSINDILRNPVYAKSNEMVLNYLEDKGMNICGTANGNGILIYNKRNSKYKKKSVNEWIAAVSKHKGIIPANTWLEVQKTLDKNSKKDTPRQGTSKKALLSGVLKCSRCGAPMRVTYGRKRKDGTSIYYYTCTMKAHSGKTRCDNPNVRGDYLEKNIITELKNLNSDVVIKGLEEHKKQLAATTENSIIKNISKEIEEKKKEMDSLINKLSKIESDIASEFVLSKVDSLGKEIKELEVNLLKRTDKKKENCDIELNIEIVLQAIKNLMIFSIVLRVLKMMN

SEQ ID NO: 37442 - DNA, 50 bp, Clostridium botulinum; identical to SEQ ID NO: 37437
  source 1..50: mol_type = genomic DNA

SEQ ID NO: 37443 - DNA, 40 bp, Clostridium botulinum; identical to SEQ ID NO: 37438
  source 1..40: mol_type = genomic DNA

SEQ ID NO: 37444 - DNA, 50 bp, Clostridium botulinum; identical to SEQ ID NO: 37439
  source 1..50: mol_type = genomic DNA

SEQ ID NO: 37445 - DNA, 40 bp, Clostridium botulinum; identical to SEQ ID NO: 10125
  source 1..40: mol_type = genomic DNA

SEQ ID NO: 37446 - protein, 539 aa, Clostridium botulinum
MKAAIYSRKSMFTGKGDSVENQVQMCKDYGNRLNVDEYLIYEDEGYSGGNVNRPKFQELLQDVKKKKFDVLICYRLDRISRNVADFSSTLELLQDNNISFVSIKEQFDTSTPMGKAMVYIASVFAQLERETIAERVRDNMLELAKSGRWLGGQTPLGFESEKISYFDAEMKERTMYKLSPESKELELVKLIYNKYLETGSIHLTLKYLLSNNIKGKNGGEFASMSINDILRNPVYAKSNEMVLNYLEDKGMNICGTANGNGILIYNKRNSKYKKKSVNEWIAAVSKHKGIIPANTWLEVQKTLDKNSKKDTPRQGTSKKALLSGVLKCSRCGAPMRVTYGRKRKDGTSIYYYTCTMKAHSGKTRCDNPNVRGDYLEKNIITELKNLNSDVVIKGLEEHKKQLAATTENSIIKNISKEIEGKKKEMDSLINKLSKIESDIASEFVLSKVDSLGKEIKELEVNLLKRTDKKKENCDIELNIEIVLQAIKEFNDFFNSVESFKDDELTIQRKRYLLERAVDEIRIDGETNRIDIDLWRAKKK

SEQ ID NO: 37447 - DNA, 50 bp, Clostridium botulinum; identical to SEQ ID NO: 37437
  source 1..50: mol_type = genomic DNA

SEQ ID NO: 37448 - DNA, 40 bp, Clostridium botulinum; identical to SEQ ID NO: 37438
  source 1..40: mol_type = genomic DNA

SEQ ID NO: 37449 - DNA, 50 bp, Clostridium botulinum; identical to SEQ ID NO: 37439
  source 1..50: mol_type = genomic DNA

SEQ ID NO: 37450 - DNA, 40 bp, Clostridium botulinum; identical to SEQ ID NO: 10125
  source 1..40: mol_type = genomic DNA

SEQ ID NO: 37451 - protein, 539 aa, Clostridium botulinum
MKAAIYSRKSMFTGKGDSVENQVQMCKDYGNRLNVDEYLIYEDEGYSGGNVNRPKFQELLQDVKKKKFDVLICYRLDRISRNVADFSSTLELLQDNNISFVSIKEQFDTSTPMGKAMVYIASVFAQLERETIAERVRDNMLELAKSGRWLGGQTPLGFESEKISYFDAEMKERTMYKLSPEPKELELVKLIYNKYLETGSIHLTLKYLLSNNIKGKNGGEFASMSINDILRNPAYAKSNEMVLNYLEDKGMNICGTANGNGILIYNKRNSKYKKKSVNEWIAAVSKHKGIIPANTWLEVQKTLDKNSKKDTPRQGTSKKALLSGVLKCSRCGAPMRVTYGRKRKDGTSIYYYTCTMKAHSGKTRCDNPNIRGDYLEKNIITELKNLNSDVVIKGLEEHKKQLAATTENSIIKNISKEIEEKKKEMDSLINKLSKIESDIASEFILSKVDSLGKEIKELEVNLLKRTDKKKENSDIELNIEIVLQAIKEFNDFFNSVESFKDDELTIQRKRYLLERAVDEIRIDGETNGIDIDLWRAKKK

SEQ ID NO: 37452 - DNA, 50 bp, Clostridium botulinum
  source 1..50: mol_type = genomic DNA
tgttgcaattacataaatcatgtacatgcatgattgatataattgcgaca

SEQ ID NO: 37453 - DNA, 40 bp, Clostridium botulinum; identical to SEQ ID NO: 37438
  source 1..40: mol_type = genomic DNA

SEQ ID NO: 37454 - DNA, 50 bp, Clostridium botulinum
  source 1..50: mol_type = genomic DNA
tgttgcaattacataaatcatgtatctgcatgattgatataattgcgaca

SEQ ID NO: 37455 - DNA, 40 bp, Clostridium botulinum; identical to SEQ ID NO: 10125
  source 1..40: mol_type = genomic DNA

SEQ ID NO: 37456 - protein, 475 aa, Streptococcus pneumoniae
MKTMNKVAIYVRVSTTNQVEEGYSIDEQKDKLEAYCKIKDWKIYDVYVDGGFSGANTQRPELERLISDVKRKKVDIVLVYKLDRLSRSQKDTLFLIEDVFAKNDVAFISLQENFDTSTPFGKASIGMLSVFAQLEREQIKERMMLGKEGRAKNGKSMSWTTIPFGYDYSKETGVLSVNPTQALIVNRIFTEYLNGKPVVKISRDLNAEGHVGRKRPWGETITKYLLKNETYLGKVKYKDKVYEGQHEPIITQELFDLVQLEVERRQISAYEKYNNPRPFRAKYMLSGLMKCGYCGASLGLRYTRKDKNGISHHKYQCRNRHSKDLEKRCESGWYSKEELERVVIKELERIKFDPKYKNETLAKKEETIKVEEIKKQLERINNQVSKLTELYLDEIITRKELDEKNDKIKTERQFLEEQLENQKSNVLSIRKRKLTRLLKDFDVEKLSYEDASKIVKNIIKEIIVTKDGMSITLDF

SEQ ID NO: 37457 - DNA, 50 bp, Streptococcus pneumoniae
  source 1..50: mol_type = genomic DNA
ttctgtattttagtcaaagtaattaagataagttagagttagtaacagta

SEQ ID NO: 37458 - DNA, 40 bp, Streptococcus pneumoniae
  source 1..40: mol_type = genomic DNA
aggaagcagttgaacgattaagctgattttgcagttcatt

SEQ ID NO: 37459 - DNA, 50 bp, Streptococcus pneumoniae; identical to SEQ ID NO: 37457
  source 1..50: mol_type = genomic DNA

SEQ ID NO: 37460 - DNA, 40 bp, Streptococcus pneumoniae
  source 1..40: mol_type = genomic DNA
aggaagcacttggacaatcaagcagatttttctattctct

SEQ ID NO: 37461 - protein, 599 aa, Coprococcus comes
MNTAVNEYNYRFKLTDYAQFDRNRARNVAIYGRVSTEHEAQLSALENQLQWYDDQVKYHPNWTVCERYIDEGITGTQAKKRPAFLKMIEDAKQGKFDLIVTREVCRFARNVVDTLVVTRELKGIGVEVFFIDDNIWTMDGDGELRLSLMATLAQEESRKTSERVKAGQKISRDNGVLYGNGNILGYDRVGDTYVINEEQAETVRMIYDLYLQGYGSMKIAKILTERKRKTASGLIKWSVSNIMRAIKNATYTGTKCYNKSRSNNFLEQKRINNLDMSTYEYVEGDFPAIISQEIWDKAQAIRESRVKPVCVSAGKNTHSKRDSRDIWVNKLRCSCGSSYRKNKWHTKLDGKTSYGYQCYNQLNNGIKRKRAEIGLDTEGYCDSRMITDWKLDFMAKALLEHLWTERKESVLIALDLIKCYYKEEKSNETQSDTVTIQAKLDKANSRLTNLIAMRADGEISKDEYQAMRSPVDEEIKKLQKALDEIPQEKSNPKGLDIEGIRSTLNSLVDFSGSTISHDVVNRFVYLITPTSDTTFDWYVNLNGTADVKATFTAEGRKKNCIIKLEEIEKISSVHRGENEDNAHFIKNPHIFTYLHRLQS

SEQ ID NO: 37462 - DNA, 50 bp, Coprococcus comes
  source 1..50: mol_type = genomic DNA
cccccatatttttacctatctgcacaggctgctatcgcaaataggtagga

SEQ ID NO: 37463 - DNA, 40 bp, Coprococcus comes
  source 1..40: mol_type = genomic DNA
cgctcgtctggctgctgctcaggctgcaatcgctcagaag

SEQ ID NO: 37464 - DNA, 50 bp, Coprococcus comes
  source 1..50: mol_type = genomic DNA
cccccatatttttacctatctgcattggctgctatcgcaaataggtagga

SEQ ID NO: 37465 - DNA, 40 bp, Coprococcus comes
  source 1..40: mol_type = genomic DNA
ccctcctctagctgctactttagcatcaagcactcagtag

SEQ ID NO: 37466 - protein, 596 aa, Coprococcus comes
MNTAVNEYNYRFKLTDYAQFDRNRARNVAIYGRVSTEHEAQLSALENQLQWYDDQVKYHPNWTVCERYIDEGITGTQAKKRPAFLKMIEDAKQGKFDLIVTREVCRFARNVVDTLVVTRELKGIGVEVFFIDDNIWTMDGDGELRLSLMATLAQEESRKTSERVKAGQKISRDNGVLYGNGNILGYDRVGDTYVINEEQAETVRMIYDLYLQGYGSMKIAKILTERKRKTASGLIKWSVSNIMRAIKNATYTGTKCYNKSRSNNFLEQKRINNLDMSTYEYVEGDFPAIISQEIWDKAQAIRESRVKPVCVSAGKNTHSKRDSRDIWVNKLRCSCGSSYRKNKWHTKLDGKTSYGYQCYNQLNNGIKRKRAEIGLDTEGYCDSRMITDWKLDFMAKALLEHLWTERKESVLIALDLIKCYYKEEKSNETQSDTVTIQAKLDKANSRLTNLIAMRADGEISKDEYQAMRSPVDEEIKKLQKALDEIPQEKSNPKGLDIEGIRSTLNSLVDFSGSTISHDVVNRFVYLITPTSDTTFDWYVNLNGTADVKATFTAEGRKKNCIIKLEEIEKISSVHRGENEDNAHFIKNPHIFTYLHR

SEQ ID NO: 37467 - DNA, 50 bp, Coprococcus comes
  source 1..50: mol_type = genomic DNA
ccccatatttttacctatctgcacaggcggctatcgcaaataggtaggag

SEQ ID NO: 37468 - DNA, 40 bp, Coprococcus comes
  source 1..40: mol_type = genomic DNA
gctcgtctggctgctgctcaggctgcaatcgctcagaaga

SEQ ID NO: 37469 - DNA, 50 bp, Coprococcus comes
  source 1..50: mol_type = genomic DNA
ccccatatttttacctatctgcacatgcggctatcgcaaataggtaggag

SEQ ID NO: 37470 - DNA, 40 bp, Coprococcus comes
  source 1..40: mol_type = genomic DNA
ggttctctggctgctgctgatgctgctgttgctgagatta

SEQ ID NO: 37471 - protein, 569 aa, Prevotella histicola
MKAVGYIRVSTDHQDLSRQESLIRQYCQKNNYCLIKIIGEKVSGAKKDRKSLAELHILDKSLADILVVSELSRLSREADYANVIFIINNILQNGLDVVFLDEESKVYKAGKSLDIIDIITLAIGAKTAADERMKIATRMKTGKTTKIQIEPYMYTGGTAPYGYKIIDNPLYHGQIDNIPAKRLITEDEYQMSNVRLVFQMVLNGTTLRDIAEHLNKSGTLTKQNKPFCETSISKMIKNPIYNGRRRFKGLPLVIKKIISDEDWNKAQICVSQNKLFKDIATSNFNPLKGIVFCPCGYALMLHQMSPRSGQKYYVLACCRKNNKEYRKKCRNMGIKSDVLFKSVWNCVKRSLTLTEYSEKSNKKSEQINTIITQLNQQLVNNHKSMDNIKEEMRHIENAIIKVSDIPSLVDKYKIDYKKKQDEISSKEDSNKAIEEEITKNKQQLERIQKSQAYKQLHDMTDKEKSEIYKNVLDRVVYYSETMFTGFIVIDYKNGLQNIVVSKRHYNNLTLLLPTTFKFNKETRKVVIPLHKHDAKQPYNLDFIKEQEFSLAELSSSYDLEEWKINIDDK

SEQ ID NO: 37472 - DNA, 50 bp, Prevotella histicola
  source 1..50: mol_type = genomic DNA
gatagcatatctgataaattagctgacgctaaatttgcaaatatgctatc

SEQ ID NO: 37473 - DNA, 40 bp, Prevotella histicola
  source 1..40: mol_type = genomic DNA
tcatcatcacgcccttgctgatgcggaggcttgtgcttgg

SEQ ID NO: 37474 - DNA, 50 bp, Prevotella histicola
  source 1..50: mol_type = genomic DNA
gatagcatatctgataaattagctcccgctaaatttgcaaatatgctatc

SEQ ID NO: 37475 - DNA, 40 bp, Prevotella histicola
  source 1..40: mol_type = genomic DNA
tcacctccacgctcttgctcctactgctgcttctgcctgg

SEQ ID NO: 37476 - protein, 569 aa, Prevotella histicola
MKAVGYIRVSTDHQDLSRQESLIRQYCQKNNYCLTKIIGEKVSGAKKDRKSLAELHILDKSLADILVVSELSRLSREADYANVIFIINNILQNGLDVVFLDEESKVYKAGKSLDIIDIITLAIGAKTAADERMKIATRMKTGKTTKIQIEPYMYTGGTAPYGYKIIDNPLYHGQIDNIPAKRLITEDEYQMSNVRLVFQMVLNGTTLRDIAEHLNKSGTLTKQNKPFCETSISKMIKNPIYNGRRRFKGLPLVIKKIISDEDWNKAQICVSQNKLFKDIATSNFNPLKGIVFCPCGYALMLHQMSPRSGQKYYVLACCRKNNKEYRKKCRNMGIKSDVLFKSVWNCVKRSLTLTEYSEKSNKKSEQINTIITQLNQQLVNNHKSMDNIKEEMRHIENAIIKVSDIPSLVDKYKIDYKKKQDEISSKEDSNKAIEEEITKNKQQLERIQKSQAYKQLHDMTDKEKSEIYKNVLDRVVYYSETMFTGFIVIDYKNGLQNIVVSKRHYNNLTLLLPTTFKFNKETRKVVIPLHKHDAKQPYNLDFIKEQEFSLAELSSSYDLEEWKINIDDK

SEQ ID NO: 37477 - DNA, 50 bp, Prevotella histicola; identical to SEQ ID NO: 37472
  source 1..50: mol_type = genomic DNA

SEQ ID NO: 37478 - DNA, 40 bp, Prevotella histicola; identical to SEQ ID NO: 37473
  source 1..40: mol_type = genomic DNA

SEQ ID NO: 37479 - DNA, 50 bp, Prevotella histicola; identical to SEQ ID NO: 37474
  source 1..50: mol_type = genomic DNA

SEQ ID NO: 37480 - DNA, 40 bp, Prevotella histicola; identical to SEQ ID NO: 37475
  source 1..40: mol_type = genomic DNA

SEQ ID NO: 37481 - protein, 528 aa, Salmonella enterica
MKVPVWSYARVSTLNQVDGFGIQRQVNTINQFIQYLVLDHRLPFVLDTENITQMVAEGKSAFKGKNWNPKTKLGQYRKMVMDGILPDSVLIVENIDRLTRLDPFQAVEIISGLINRGTTILEIETGMTYSRYIPESITVLTMQINRANGESKRKSVMMKKSHQNRYGNVSKVRPRWFDVVEIDGIKQYRTNDTAKAIQRMYNDYVNGIGAAQIVRTYGKTDNGKAWTLVTVLRVLSDKRVADDPRYPPIIDKELYTKVQAMKVSGNKGKTHQKQMLNIFSGMSRCPVCKQSIIVKRNSHGGLYTVCLGKRTNKDCEARSVAYFALERPLLEAIKGLDFSEVYDREESNVATLRDQWIQNERDIAAFRERLTKASRHEKFAILDELETISKEQDELTIRLKSVDAPKDLQLTYNDDKLDLDVDYRIELNNRLKKIIQRIDVVRVDVDKSKYTIYCSIMYWTDFMTHLVIIDVESKRTASRGGANTLTTTLRSVSSICSDGSISGNPDLEALEYWKNVFNKAMAAALPNG

SEQ ID NO: 37482 - DNA, 50 bp, Salmonella enterica
  source 1..50: mol_type = genomic DNA
cggtgtacatactttacctactgggaacagttagtgtatgatgtacgcca

SEQ ID NO: 37483 - DNA, 40 bp, Salmonella enterica
  source 1..40: mol_type = genomic DNA
cggccccatcagcagcatggaacagtcggtggtaccgccg

SEQ ID NO: 37484 - DNA, 50 bp, Salmonella enterica
  source 1..50: mol_type = genomic DNA
cggtgtacatactttacctactggcaacagttagtgtatgatgtacgcca

SEQ ID NO: 37485 - DNA, 40 bp, Salmonella enterica
  source 1..40: mol_type = genomic DNA
cgctccaatcagctgcatacaacagttgctgtttcggccg

SEQ ID NO: 37486 - protein, 528 aa, Salmonella enterica
MKVPVWSYARVSTLNQVDGFGIQRQVNTINQFIQYLVLDHRLPFVLDTENITQMVAEGKSAFKGENWNPKTKLGQYRKMVMDGVLPDSVLIVENIDRLTRLDPFQAVEIISGLINRGTTILEIETGMTYSRYIPESITVLTMQINRANGESKRKSVMMKKSHQNRYGNVSKVRPRWFDVVEIDGIKQYRTNDTAKAIQRMYNDYVNGIGAAQIVRTYGKTDNGKAWTLVTVLRVLSDKRVADDPRYPPIIDKELYTKVQAMKVSGTKGKTHQKQMLNIFSGMSRCPVCKQSIIVKRNSHGGLYTVCLGKRTNKDCEARSVAYFALERPLLEAIKGLDFSEVYDREESNVATLRDQWIQNERDIAAFRERLTKASRHEKFAILDELETISKEQDELTIRLKSVDAPKDLQLTYNDDKLDLDVDYRIELNNRLKKIIQRIDVVRVDVDKSKYTIYCSIMYWTDFMTHLVIIDVESKRTASRGGANTLTTTLRSVSSICSDGSISGNPDLEALEYWENVFNKAMAAALPNG

SEQ ID NO: 37487 - DNA, 50 bp, Salmonella enterica
  source 1..50: mol_type = genomic DNA
gggtgtacatactttacctactgggaacagttagtgtatgatgtacgcca

SEQ ID NO: 37488 - DNA, 40 bp, Salmonella enterica; identical to SEQ ID NO: 37483
  source 1..40: mol_type = genomic DNA

SEQ ID NO: 37489 - DNA, 50 bp, Salmonella enterica
  source 1..50: mol_type = genomic DNA
gggtgtacatactttacctactggcaacagttagtgtatgatgtacgcca

SEQ ID NO: 37490 - DNA, 40 bp, Salmonella enterica; identical to SEQ ID NO: 37485
  source 1..40: mol_type = genomic DNA

SEQ ID NO: 37491 - protein, 529 aa, Salmonella enterica; identical to SEQ ID NO: 35296

SEQ ID NO: 37492 - DNA, 50 bp, Salmonella enterica; identical to SEQ ID NO: 35297
  source 1..50: mol_type = genomic DNA

SEQ ID NO: 37493 - DNA, 40 bp, Salmonella enterica; identical to SEQ ID NO: 37483
  source 1..40: mol_type = genomic DNA

SEQ ID NO: 37494 - DNA, 50 bp, Salmonella enterica
  source 1..50: mol_type = genomic DNA
gggtgtacttactataccaattggcaacagttgatgtataatgtacgcca

SEQ ID NO: 37495 - DNA, 40 bp, Salmonella enterica; identical to SEQ ID NO: 37485
  source 1..40: mol_type = genomic DNA

SEQ ID NO: 37496 - protein, 555 aa, Oscillibacter sp
MTKQPDKITALYCRLSRDDEQDGLSGSIKNQRTILEKYAQENGFRNTRVFIDDGWSGTNFARPAFTEIMELAEKGLIGTLIVKDHSRLGRNRLIVGQLLEEGFDSLGIRYIAIMDNIDTAKGISDLVPMQDLFNEWHAKNTSQKVRNVFKSKGMSGAPLTTNPPFGYLKDRESKNGWMVDEDAAKAVRQIFAWCVDGLGPTQIAKRLKAGKIQTPTEHWGNIGRNCSKPPAVPYNWCSATVADILGKQEYCGDTVNFRSTTKSFKNKKKIERPPEEWQIFKDTHPAIIDRETFALVQELRKHRRRPTKSGIVSPFSGLLYCADCGEKLYYSVTNNYKREQAYFFCSSYRKNSEVCSAHYIREKVVEQIVLESMQRILLNVQVFEKEFARKQMDCYTEDKKKQLAAKRRELSKAKKRIAEIDTLIQKIYEDNASGKLSDERYATLSLSYEEEQKTLKAAVPEMQAYLETETDKTESLQRFIQKVKQITELKALTPELIHEFVDRIVVYAPRYLDGKRVQLLDIYYSGVGILHELIPEEMEEAFQQHLAERNKEKTA

SEQ ID NO: 37497 - DNA, 50 bp, Oscillibacter sp
  source 1..50: mol_type = genomic DNA
caccttccttacggagggcgccccaagggagaggcttcgtaaggaagtcc

SEQ ID NO: 37498 - DNA, 40 bp, Oscillibacter sp
  source 1..40: mol_type = genomic DNA
aaaaacaaaacctccggctaagccggaggttttgttttat

SEQ ID NO: 37499 - DNA, 50 bp, Oscillibacter sp
  source 1..50: mol_type = genomic DNA
caccttccttacggagggcgccccatgggagaggcttcgtaaggaagtcc

SEQ ID NO: 37500 - DNA, 40 bp, Oscillibacter sp
  source 1..40: mol_type = genomic DNA
aaaaagaaaacatcctggtatgctggagtttattttctaa

SEQ ID NO: 37501 - protein, 668 aa, Streptomyces sp Mg1
MAQRNTDVLGIAMGVIDRVAQPALRAVDYLRVSTEEQAKGYGIAYSGKKTTRHIARKGWDHVGTYSDEGVSGSLEAADRGDLARLMEDAHRTPRPFDMVVVNEGRAIGRTGRAFWRWVWALEDLGVYVAVVEDDYDNSTSEGRKKMRAAADYAETEYEVIRKRTQGGLQEKAEEGGWPGGQPPYGYKICCQGQKGKSHLVQCEAEVLVLRAMWGLVVEDGMNTNELAERLNVLGLRTRAGGLWSAANARAKLLSESTLNARVIFRNPNRTKAGHGAKFNRDGTPVNGQTVIIKLDPVFTPDEVADLNRAMGRLANGTPKSKPHGYPLSKRLFNTCGAHSVGMKRTSRPGRWYRCSGKASKFPGDPKCTCDMVDADAIEGAVWRDVVELLGDPARLKAMAAEWVGMAAGDQVQHADRIADFDRQIANLDRAITTTVKDYAKAGLPASAIAEVTAALIEERRQLADIRAEAAAWLEETEATERRARDLEALATVARTRLADMTPAEQTEVLALLDVRVTITGPVPKAKLGLACSMTEWFKANGRLVPPTLTDEAWALVEPIVKAWEPEHPNRRLVPGRLMLDAMFHKARTGVRWADLPERFGGWNGVHTRYKTWANGGVWDQIMAALPDAGTVVPALDLVPPLRVEGRVDPRVLADGAGAEPVPAGMGVP

SEQ ID NO: 37502 - DNA, 50 bp, Streptomyces sp Mg1
  source 1..50: mol_type = genomic DNA
ccggtacctgccggaatgggcgtgcccacacctatttccggaggtgccgc

SEQ ID NO: 37503 - DNA, 40 bp, Streptomyces sp Mg1
  source 1..40: mol_type = genomic DNA
ccggctcaccatgggcgtgcccggcccggccaccagcggt

SEQ ID NO: 37504 - DNA, 50 bp, Streptomyces sp Mg1
  source 1..50: mol_type = genomic DNA
ccggtacctgccggaatgggcgtgggcacacctatttccggaggtgccgc

SEQ ID NO: 37505 - DNA, 40 bp, Streptomyces sp Mg1
  source 1..40: mol_type = genomic DNA
ccagaacaccaagggcgaaggcggcccgagcacctgctgt

SEQ ID NO: 37506 - protein, 467 aa, Bacillus cereus
MKCVIYRRVSTDMQVEEGISLDMQRLRLEQYAKSQGWVVVNDYCDEGYSAKNTERPAFQQMIKDMKKNQFDIILVYRLDRFTRSVSDLHSILKIMDEYNVKFKSSTEIFDTTTATGRMFITLVATLAQWERETTAERVRDSMHKKAELGLRNGAKAPMGYDVKKGNLYINHTEAEIVKYIFEMYKTKGVVSIVKSLNSRGIKTKRGKTFNYLAVRYIINNPIYIGKIRWGEDVLTDIAQEDFETFIDKDTWYTVQQVQDSRKIGKVRLQNFFVFSNVLKCARCGKHFLGNKQVRSYDRIAVGYRCSSRHHQGTCDMPQVPEDVLEKEFLNLLEVAIVDLDATDEKPVELSNLQEQYNRIQDKKARLKFLFIEGDIPKNEYKKDMLTLNQEENIIQKQLANITDTVSSFEIKELLNQLKDEWFNLNNESKKAAVNAIVSSIIVDIIKPARAGKNPIPPVIKIIDFKLK

SEQ ID NO: 37507 - DNA, 50 bp, Bacillus cereus
  source 1..50: mol_type = genomic DNA
taatgtagttaggttgggtttggatgaccgaacaatacataactacacca

SEQ ID NO: 37508 - DNA, 40 bp, Bacillus cereus
  source 1..40: mol_type = genomic DNA
ctgtggcccagtcatcaattgaccaaaccatggtgtttga

SEQ ID NO: 37509 - DNA, 50 bp, Bacillus cereus
  source 1..50: mol_type = genomic DNA
taatgtagttaggttgggtttggatcaccgaacaatacataactacacca

SEQ ID NO: 37510 - DNA, 40 bp, Bacillus cereus
  source 1..40: mol_type = genomic DNA
ctggggcacagaaaacaattccccaaaatatggtgcttca

SEQ ID NO: 37511 - protein, 467 aa, Bacillus thuringiensis
MKCVIYRRVSTDMQVEEGISLDMQKLRLEQYAKSQGWVVVNDYCDEGYSAKNTERPAFQKMIKDMKKKQFDIILVYRLDRFTRSVSDLHSILKIMDEYNVKFKSSTEIFDTTTATGRMFITLVATLAQWERETTAERVRDSMHKKAELGLRNGAKSPMGYDLNKGNLYINHTEAEIVKYIFEMFKTKGIISIVKSLNSRGVKTKRGKIFNYDAVRYIINNPIYIGKIRWGDDILTDIAQKDFETFIDKDTWYTVQQVQDSRKRGKVRLHNFFVFSNVLKCARCGKHFLGNKQVRSHNRIVMSYRCSSRHHKGTCDMPQVPEDVIEKEFLNLLEDAIVDLDDTEEKPIELGNLQEQYNRIQDKKARLKYLFIEGDIPKNEYKKDMLTLTQEENIIQKQLANVTDTASSLEIKELLNQLKDEWYNLNNESKKAAVNAIVSSITVEVTKPARVGKNPIAPVIKVTDFKIK

SEQ ID NO: 37512 - DNA, 50 bp, Bacillus thuringiensis
  source 1..50: mol_type = genomic DNA
tgatgtagttaggttgtgtttaattgaccgaacaccatataaatacaaca

SEQ ID NO: 37513 - DNA, 40 bp, Bacillus thuringiensis; identical to SEQ ID NO: 37508
  source 1..40: mol_type = genomic DNA

SEQ ID NO: 37514 - DNA, 50 bp, Bacillus thuringiensis
  source 1..50: mol_type = genomic DNA
tgatgtagttaggttgtgtttaattcaccgaacaccatataaatacaaca

SEQ ID NO: 37515 - DNA, 40 bp, Bacillus thuringiensis; identical to SEQ ID NO: 37510
  source 1..40: mol_type = genomic DNA

SEQ ID NO: 37516 - protein, 453 aa, Tsukamurella tyrosinosolvens
MQALIYCRISRDRSGEHAGVQRQEADCRELAASLGWDVADVLVDNDVSATKSRPRPAFVRLIDLLSSGAYGGLLFWHPDRAYRRLEDLGSLIEVAKANNVAIRTVKAGEIDLTTASGILQAEILASVAKHETARMAERVKRAKAETLAQGGYRGGPRPFGYESDGMTIRESEAALVREAAAHVLDGGSLRRLTIDWNDRGHVTARGREWRVSTIRHILLTPRVAGLVPINGRSTDDAGKAQWPGIISEDDWRAVVAILRDPARTTTTSYEIAHQGVGGAYLCGVCGATVNTVKSEVGRSYKCSKSTHLSAKKSSVDEFVDELVIGRLSMPDAVEAFAGRGGGDAGALRAERDRLDSALAERVDMLDAGDLSVEQFRRSSGRLREQLAAVDRKLAAESERSPLADLLFADDVAEHWKSLTPAVRSQVIKALMVVRILRFERRGPMSGRIAIEWR

SEQ ID NO: 37517 - DNA, 50 bp, Tsukamurella tyrosinosolvens
  source 1..50: mol_type = genomic DNA
ctgagtccgaaccatagttatgcctcggcgttaagtcaagttacactcag

SEQ ID NO: 37518 - DNA, 40 bp, Tsukamurella tyrosinosolvens
  source 1..40: mol_type = genomic DNA
ctgcaccagcgtgtaggcctcgtcgatgaacagcacccca

SEQ ID NO: 37519 - DNA, 50 bp, Tsukamurella tyrosinosolvens; identical to SEQ ID NO: 37517
  source 1..50: mol_type = genomic DNA

SEQ ID NO: 37520 - DNA, 40 bp, Tsukamurella tyrosinosolvens
  source 1..40: mol_type = genomic DNA
ctgaaccagggtgtaggcctcctcgaggagctgcaacaag

SEQ ID NO: 37521 - protein, 583 aa, Listeria innocua
MKEVEVIKANSSTSKSKRGKQIERIRVSAYCRVSTDSEDQLSSYISQKTYYTDLIQKNSDWIFAGIYADEAITGTQVTKREDFQRMINDCMNGEIDMVITKSISRFARNTLDTLKYVRMLKEKDIAVYFEDEKINTLTMDGELLLVVLSSVAQQEVENISANVKKGLKMKMKRGELVGFQGCLGYDYHPEDKSITINEEEAEIVRYIFKRYVEGAGGSVIGQELENLGYKTKYGNSTWVPTTVLGIIKNEKYKGDLLLGKTFTVDPISKRRLENMGEEDQFYIRNHHEPIISEEIFEKAHEILNRRNKNRGKIGDGNTKREKFSRKYAFSCLLECGFCKGTLTRRKWHSGSQYDKVIWQCVTSTKKGKKHCPESKGIPEQAIEDAFVESYRILCDSNKDVLDEFLRTMNETLSSSSVNKQLSKVEKEIEALEKKKSKLVDMRLEDVIDSETYEYKFSSLTSKQDELLNEREKLQTTAMNEKDIKRRLQEFKRTLEQNEVLHEFDRYVFESIVEKVIVGGYDEDGNIDPAQLVFVYKTGFKNSLDGNRFKPMRKNARGNRKTNELCSQTNNEVQSLSSHSSSDT

SEQ ID NO: 37522 - DNA, 50 bp, Listeria innocua
  source 1..50: mol_type = genomic DNA
tgtcttcccatagtagttccgacacatgtggagactattgtgttgctaca

SEQ ID NO: 37523 - DNA, 40 bp, Listeria innocua
  source 1..40: mol_type = genomic DNA
tatgtttccgatgacgacacatattgaagctgtgaccgtt

SEQ ID NO: 37524 - DNA, 50 bp, Listeria innocua
  source 1..50: mol_type = genomic DNA
tgtcttcccatagtagttccgacaattgtggagactattgtgttgctaca

SEQ ID NO: 37525 - DNA, 40 bp, Listeria innocua
  source 1..40: mol_type = genomic DNA
taggattcacatgaaaataattactgaagctgttaccatt

SEQ ID NO: 37526 - protein, 492 aa, Ruminococcus flavefaciens
MTDKITALYCRLSQDDMLQGESNSITNQKAILKKYAEDNGFRNPVFYVDDGVSGTTFERDGFKAMMADVEAGKVSTVITKDLSRLGRDYLKTGEYIEIIFPDYDVRYIAINDGVDTFKSENELMAFKNIFNDWYARDTSKKIRAVFKAKGQSGKPLSVPIYGYKKSETDKNLWLIDDEPAAVVRRIYKLCIDGYGPTQIAKILTADEIPTPTAYAILQGRNPVNKNANLKRWDSKTVSGILDKAEYCGHTVNFRTHNQQEFDLVQELRKNKRRPTKHEEVNPFSGMVYCADCGKKMYLCRATSLTADQEHLKCSTYSSDKDACSAHFIRTVVLNEIVLNELNKLLVRVKEHEDDFVQAAMDNSVQKQSSELTKAKKALKQAEKRIIELVSEGYEEEQKKLRDSASELTAYIETAEQKSADVTAFISVVQKYERITELTPEIMHELIEKIVVHAPDKSSGHRTQQIDIYYRFDVAVSTAVADSMKYDKKRKAA

SEQ ID NO: 37527 - DNA, 50 bp, Ruminococcus flavefaciens
  source 1..50: mol_type = genomic DNA
atacttctttatcggcgctcctctaaaggattgcgctcatatagaagttt

SEQ ID NO: 37528 - DNA, 40 bp, Ruminococcus flavefaciens
  source 1..40: mol_type = genomic DNA
aaatatcaaaggcttcacaaacgtgaagccttttgtgttt

SEQ ID NO: 37529 - DNA, 50 bp, Ruminococcus flavefaciens
  source 1..50: mol_type = genomic DNA
atacttctttatcggcgctcctctacaggattgcgctcatatagaagttt

SEQ ID NO: 37530 - DNA, 40 bp, Ruminococcus flavefaciens
  source 1..40: mol_type = genomic DNA
gaatataaaaggttacacaacatagaagcgtaatgtgttt

SEQ ID NO: 37531 - protein, 512 aa, Tritonibacter mobilis
MFDKQLKQTRTKCVIYCRVSSIKQTMDGAGLSSQERSCRDYAQQCCMQVEDVFTDVISGASSNRPGMNQLLDFLNRVDARDYMVIVDDVSRFARDVGAHTELRNKIMTAGAAIDSPKTKFGVDAETRFLEMLWALLASRDREKNAELSKTRTISRMKNGYWTFKAPVGYQTVKAPGGGKLLVRKEPEASIIQEALEGFASGRFQSQAEVKRFLDDKPEFPRPRSAKEVKFHRVTGLLTRLVYAGYLEKPEWGVPLTKAQHEPLISYETYLINQDRLNGKKVAPARENIDREFVLRGFLTCSECGYSLTSCWSKSGTGKRYPYYLCHHKGCSQRGKSIARDKLEGEFEHVLKGLTPTAKTFELAGQMFRDAWDRRRSNTKEESSRYRTRLRQIDTEVSSLIDRAARTQHEETAHAYETRIAELRSETAVLEEKLAQQAVPEGKFDEMFELSMKFLASPWSIWEKGSYELRRTVLRMAFSDPLRVSRETGLRTAETILPFKALRFLSTSESQMV

SEQ ID NO: 37532 - DNA, 50 bp, Tritonibacter mobilis
  source 1..50: mol_type = genomic DNA
gtttctatccacgtctgagagtcaaatggtgcacctaaagggagaaactt

SEQ ID NO: 37533 - DNA, 40 bp, Tritonibacter mobilis
  source 1..40: mol_type = genomic DNA
aatttttaaaagggggagatatggtgcccagaagaggact

SEQ ID NO: 37534 - DNA, 50 bp, Tritonibacter mobilis
  source 1..50: mol_type = genomic DNA
gtttctatccacgtctgagagtcaactggtgcacctaaagggagaaactt

SEQ ID NO: 37535 - DNA, 40 bp, Tritonibacter mobilis
  source 1..40: mol_type = genomic DNA
tttttttaaaaaggtgagtacaggtgcccagaggtggaaa

SEQ ID NO: 37536 - protein, 468 aa, Coriobacteriaceae bacterium
MPKKAVIYARFSCNRQREASIEDQLRVCREWCAREGYEVAAEYCDRAVSGRTDDRPEFQRMIANAGESEIVLVYMMDRFSRGEYDAPIYKRELATHGVKLVSALEQIPDSPEGIIYEKLLEGLAACESRKTAIRTKRGMEGNALKCKTNGVRIFGYRRNEDDEYEVDEAQAAWVREAFALRLERMSMNAIAREFARRGLRTRKGNPCGQAMVQQMLRDRRYTGRYEWGGIVREGGMPAIVDEVTFMEVQGIKCRKQRSSENWGDFALAGTALCAECGRNLQGVSGRGRNNVKYEYYSCPGSCVRNIRREELEGSIASALRGLLGDRGEALQIANMVAERADTAEVRARRRQAEDSLRAAERGLRNILNAIEQGVIAPGVNERIAELEEQQARARYDLEAITDERIDPERFADFLQCGTALDDATLLKAFVWQAVVSEDEILVTLNYDKKGEPARLDIQRVRAKLEWCP

SEQ ID NO: 37537 - DNA, 50 bp, Coriobacteriaceae bacterium
  source 1..50: mol_type = genomic DNA
ttcgagcaaaattggaatggtgccccgtctgcatggattctagaaccgag

SEQ ID NO: 37538 - DNA, 40 bp, Coriobacteriaceae bacterium
  source 1..40: mol_type = genomic DNA
tcttacgttcgatggtgccccatgttggattcgaaccaac

SEQ ID NO: 37539 - DNA, 50 bp, Coriobacteriaceae bacterium
  source 1..50: mol_type = genomic DNA
ttcgagcaaaattggaatggtgcccagtctgcatggattctagaaccgag

SEQ ID NO: 37540 - DNA, 40 bp, Coriobacteriaceae bacterium
  source 1..40: mol_type = genomic DNA
tcttatgatcgttggtgcccaaagttggaagggggccaag

SEQ ID NO: 37541 - protein, 457 aa, Bacillus thuringiensis; identical to SEQ ID NO: 2466

SEQ ID NO: 37542 - DNA, 50 bp, Bacillus thuringiensis
  misc_feature 45..46: note = n is a, c, g, or t
  source 1..50: mol_type = genomic DNA
ttttgggttaatggtccatttcctctagtaaatgtattattaacnnttaa

SEQ ID NO: 37543 - DNA, 40 bp, Bacillus thuringiensis; identical to SEQ ID NO: 6793
  source 1..40: mol_type = genomic DNA

SEQ ID NO: 37544 - DNA, 50 bp, Bacillus thuringiensis
  misc_feature 45..46: note = n is a, c, g, or t
  source 1..50: mol_type = genomic DNA
ttttgggttaatggtccatttcctcaagtaaatgtattattaacnnttaa

SEQ ID NO: 37545 - DNA, 40 bp, Bacillus thuringiensis
  source 1..40: mol_type = genomic DNA
gttagaattatttaagtcacaatgacaagcattttcgaaa

SEQ ID NO: 37546 - protein, 668 aa, Lachnoanaerobaculum saburreum
MKKEYNETIVGSLDRQEEMMSIQANRKTALYCRLSRDDELQGESNSITNQKKMLSQFAKQSGFFQCEFFIDDGYSGTNFDRPEFQNMITRVANGEIGTVIVKDLSRFGRNHLHVGIYTTEFFPKHNVRFIAINDNVDTFTTDMETDISIPIKNIINEIYAVDTSRKIKAVYKAKGLEGKHTGSHAIYGYKKDPDNKEKWIIDEEAAKVVKRIYSFVVSGLGPYQIADLLYKEKVYSPSYYMAMNGYGNRINKEFDTPYRWWGTTVQYIVRREEYLGHTVNFKTIKPSFKDKRRYTNKKENWAIFENTHEAIIDKETWEIANSLLNTVRRPSREGTVNPLTGKLFCGDCGEKLYNSRGTNHKGTGHYKEDVRYDNYICSTYQKHRNECSAHYIRTEVVRELILETLKDISKYIENNEEEFKNIVISTRIEEREKSQKEHIKKLQADKNRLAVIDRLFVKLYEDNASGRINDETFNKIAIQYTEEQNTLNSEILELEEVTEKLQSVSDNTEQFIKTIKSFTDFSILTTSMINQLIDRIVIFQKQKLKRYKFTQRIDIYFSFIGKFEIEKEGEIKETEYIEETEDKKYIHKDSRFSPITNYLKEQGREVELEFSKVEELIGRKLCKSARKYLGYWYASDNRPMGNAIYNAGYDIVKVDVKKETIKLINYDK

SEQ ID NO: 37547 - DNA, 50 bp, Lachnoanaerobaculum saburreum
  source 1..50: mol_type = genomic DNA
aaactttgttgacaaatatcgaccgatgttgtattctataagagaagtta

SEQ ID NO: 37548 - DNA, 40 bp, Lachnoanaerobaculum saburreum
  source 1..40: mol_type = genomic DNA
agaatgaaactatttacaggagcggatctgattatatatt

SEQ ID NO: 37549 - DNA, 50 bp, Lachnoanaerobaculum saburreum
  source 1..50: mol_type = genomic DNA
aaactttgttgacaaatatcgaccattgttgtattctataagagaagtta

SEQ ID NO: 37550 - DNA, 40 bp, Lachnoanaerobaculum saburreum
  source 1..40: mol_type = genomic DNA
agaatgaaactattttgttatgaagattaaatgatatatt

SEQ ID NO: 37551 - protein, 549 aa, Blautia wexlerae
MKEKTKVYIYTRVSTAVQVDGYSLDAQKSRMKAYAEFNDFEIVGEYEDAGKSGKSIEGRLEFNRMMEDIKSGKDGVSYVLVFKLSRFGRNAADVLSTLQVMQDFDVNLICVEDGIDSSKDAGKLMISVLSAVAEIERENIRVQTMEGRIQKAREGKWNGGFAPYGYKLEKGMLYINEEEAEAIRIIFDQYVHTDIGANGLAKYLANHGINKIQRQNGKNPLFDAALIRRILKNPVYCGKIAYGRRRTEKVHGTRNDYRLVEQENYLLVDGLHEAIVSEGLWHEAQVKLLAQAKKYEKVNNGKDNKVHLLTGLLKCPICGAGMYGNKSIKHKPDGTKYKDFFYYGCKHRTMTRGHKCEYKKQINEELLDGAVAEVIIKLVSNPKFAAMMQQKINMKIDTSAIEQEIANYEKQLRQSYATKSRLIDEIDTLDPDDKHYIKRKADLDDRLYKMYDKIEDTENLLIEARAKKMAIEAEKLTADNIYKVLIYFEKLYAVMDEQEKRQIMESLISEIHIYEERQPNGQWLKSIKFKLPIIEEDMEMSLDSDTHVE

SEQ ID NO: 37552 - DNA, 50 bp, Blautia wexlerae
  source 1..50: mol_type = genomic DNA
agtttggacagtgacacacatgtcgagacggtatgtttattgtccaaact

SEQ ID NO: 37553 - DNA, 40 bp, Blautia wexlerae
  source 1..40: mol_type = genomic DNA
tgggatgactgttcatgtggagactgtggtgggactacaa

SEQ ID NO: 37554 - DNA, 50 bp, Blautia wexlerae
  source 1..50: mol_type = genomic DNA
agtttggacagtgacacacatgtccagacggtatgtttattgtccaaact

SEQ ID NO: 37555 - DNA, 40 bp, Blautia wexlerae
  source 1..40: mol_type = genomic DNA
tgggattacagttcaaggtcagtcttgggtgggaacacaa

SEQ ID NO: 37556 - protein, 520 aa, Vibrio lentus
MNTAHSYIRFSTKQQASGDSFRRQTQLAMDYCLANDLTLNTQSYQDLGVSAFHSSNAFEDSGLGQFLVGLNEGKVVTPCTLLVENLDRLSRDSVETALTQFMNIIQAGVTIVTLFDKHVYKKGMTVVDYLTAILQMQRAHDESLVKSKRVSAAWEQRRKGLSATKPKTSPFWMDLSDDKKSYVLNDRVELVHRIFAHANDGLGSQVIAKMLNSEDIKAPRGGNWSDATITKTLNNISVLGQYQPRTRYDENRKRVDAIAGEPIKNFYPAIMDEEYFYLTQAAIKSRSKTQRRGATKNHLNVIKGVASCAHCGSSVRLKQQGHLYYLQCNQYHLGTCQGSKPINFRFLTDWLNEVWLSVEYAPITAQDTPENRKLKSANAKLEAVNETIKKLVSLVGDDSDEIIMARILEKKAEKKLLTIEIADLSEELAPYNLANEALRHRHVLVKTAFMTEHTEQTIKARCQLALLLNQLKGFKIHMDASKLVTFEVITAQNESKVYHSAINPYHVSSKHSGKVWSKGY

SEQ ID NO: 37557 - DNA, 50 bp, Vibrio lentus
  source 1..50: mol_type = genomic DNA
ttaaggcatacttagtcaaactcctttatgatttgtttgacaaagcatgg

SEQ ID NO: 37558 - DNA, 40 bp, Vibrio lentus
  source 1..40: mol_type = genomic DNA
ggaaacaatctgttatgcgtttatgcaagctacaggaatg

SEQ ID NO: 37559 - DNA, 50 bp, Vibrio lentus
  source 1..50: mol_type = genomic DNA
ttaaggcatacttagtcaaactcccatatgatttgtttgacaaagcatgg

SEQ ID NO: 37560 - DNA, 40 bp, Vibrio lentus
  source 1..40: mol_type = genomic DNA
ggaaattatctgttctgcgcatcttcactaaacaggaaag

SEQ ID NO: 37561 - protein, 573 aa, Bacteroides thetaiotaomicron
MTKKAAIYLRVSSIDQNYERQEIELKALAKCLGYEVKYIFEEKRSAVLKMDTRDELTQMRKLTKNEIDRIFIWDITRLSRRAIDFITLINEFTDKGICLHFKDKNIITLDEDGKQDMFVSMYLYILGLFAQMDAENLKAKMRSGRERGLAIGHAYTGCAPYGYKLINKQLYIDEKEAETVRAIFNNYVDGKSIQHIIDILNSNKIPTRTGILWTRNSIYAIITNPVYKGKPELTSITKRDENKKPLEKITRVFKAPVIIESPIWDEAQVQRKKHKSFIDKSKEREALLRGILQCGNCGKAYCTAINGSGVPTYICSDNRANINQKLNCKNGGVACYFLDSICWQTIKDIYAYKNFQDTFTKEKAKNQQLLQENQTQINNFIDKQIELDKENERVNKGYRIGIYTDSEAIRAKGEINNNKARYEKMIEELKAQNSILTAKIKQDFSHYKIPTVELSYEEKKAVCKELIETAKIYSYPPNNRIVQLQLKMGLIFNIVLNPKRRLYYIIDNSTVTFNNPQSAPIFLREELKDKDFTVTCDNNDYFNEEIFGEYSFAQMWNIMDKYGYIQDYPKVKK

SEQ ID NO: 37562 - DNA, 50 bp, Bacteroides thetaiotaomicron
  source 1..50: mol_type = genomic DNA
cgtctatcaattgtttgcggcaattcatcacaataaacaattgtaatact

SEQ ID NO: 37563 - DNA, 40 bp, Bacteroides thetaiotaomicron
  source 1..40: mol_type = genomic DNA
tgtaatagtgcccggcaactctgattcgtagtgagtcacc

SEQ ID NO: 37564 - DNA, 50 bp, Bacteroides thetaiotaomicron
  source 1..50: mol_type = genomic DNA
cgtctatcaattgtttgcggcaatttatcacaataaacaattgtaatact

SEQ ID NO: 37565 - DNA, 40 bp, Bacteroides thetaiotaomicron
  source 1..40: mol_type = genomic DNA
tgtgatagggcccaggaatttgcatttctagtgagttacc

SEQ ID NO: 37566 - protein, 534 aa, Mesorhizobium ciceri
MLWTEDPLFCKGEPMTKHTPHSALTNRPKAYSYVRFSTPEQERGDSLRRQTEAAERYAALHGLDLDDKLTFRDLGVSAFKGANEETGRLGEFLAAVEYQDIKSGSWLLVESLDRLSRQKPRKAVKVLERICEAGITVVTLDDGRVYTEEVLDDDPTALMVALLVAARANEESAKKGRRVGEAWANKRRNAATKPLSALCPGWLRLREDRTAFDVIAERADIVRRVFDMTLAGKGQHAIAETFNKECVPRFGTGSHWHRTYIKKMLADASTIGAFTPHRVETVGGKKRRIPTDTVEGYFPAVIDRETFDRVNAMTNGRSVRGGSGVGMANILAGLAKCPKCGATMTRVNKGGKKGGKPYLVCTVAKAGAGCEYRQVRIEDVEEAIISNAGWLNASLPSTDGALQMELEGATNLDMAVSDEIENVVSAIGQMGHSLALLDRLRQNEIAREDIRRTVAGLERRIADTLTNRVQMTAGQFVDAAEADEPRDVALINATLRQLFTKVEVDWPSGQLWFHWKHAPGETTGIMYGWPKEDA

SEQ ID NO: 37567 - DNA, 50 bp, Mesorhizobium ciceri
  source 1..50: mol_type = genomic DNA
gcggggtcttttgtccacatcatgagcatgttatggacagaggaccccct

SEQ ID NO: 37568 - DNA, 40 bp, Mesorhizobium ciceri
  source 1..40: mol_type = genomic DNA
tcccggcggaccgatcatcagcatgttgtggccgccggcc

SEQ ID NO: 37569 - DNA, 50 bp, Mesorhizobium ciceri
  source 1..50: mol_type = genomic DNA
gcggggtcttttgtccacatcatgctcatgttatggacagaggaccccct

SEQ ID NO: 37570 - DNA, 40 bp, Mesorhizobium ciceri
  source 1..40: mol_type = genomic DNA
tctgggctgctcgagcatcctcatgatgtggcagctggct

SEQ ID NO: 37571 - protein, 644 aa, Klebsiella quasipneumoniae; identical to SEQ ID NO: 17871

SEQ ID NO: 37572 - DNA, 50 bp, Klebsiella quasipneumoniae
  source 1..50: mol_type = genomic DNA
tcctattgatgatcgtatgcgtccttttgtataatctgggaacatttgcg

SEQ ID NO: 37573 - DNA, 40 bp, Klebsiella quasipneumoniae
  source 1..40: mol_type = genomic DNA
tattcatggcatgccgtcctttcgttttttagcacaggtt

SEQ ID NO: 37574 - DNA, 50 bp, Klebsiella quasipneumoniae; identical to SEQ ID NO: 37572
  source 1..50: mol_type = genomic DNA

SEQ ID NO: 37575 - DNA, 40 bp, Klebsiella quasipneumoniae
  source 1..40: mol_type = genomic DNA
aattcatggcatgctgtgcttttgtctttatgtacaattt

SEQ ID NO: 37576 - protein, 644 aa, Cronobacter malonaticus
MLRPICYERVSSIQQVEMGNGLDDQRSSLTAYLDKNSDKFTNDRVFITDAGLSAFKNANISPESQLGIFLQDVGNRKYGKGDALIVISLDRLSRRSSWAESTIQYIVNSGVEIHDISTNLVLRADDPMSKIHMEFIQHRSHNESLMKSVRAKLAWDNKILRALQNGEVISNRMPNWLKNVDNKYQVIPEQAELIVKCFEWYREGLSTGEIVKRIGKKWQMVTVSRLIRDRRLLGEHERYNGEVVPNVYPKIIDEDLFLTANRMMDRVMLEKKKPAEDLLLEPDVVREIFKLYESGLGSGAIVKRLPKGWSTVNVLRVLRDKKVVTMKIIDNLTFERVNEKLSRNGIANRIRKDITIAQDDYITNLFPKILKCGNCGGNIAIHYNHVRTKYVICRNREEKKICDAKSFQYTRIEKNILQLVKNIDFNKLMMEGQSDSDLLLASLREELSTLKKEEETYQIKINERKVAGKKTSLPLMTGLTEVQDRIEEIESDILNAKNIKEIPVFDFDINKVLDPMNVELRAKLRKELRLVLKSVKYWVFGKRIFVQLEYFNEILSHVLVIDNKRGGGEVLHEIVISESNGERVYTVNEEGKTVFIASVTSGTDMWSLAISRTKTLDDVGLYLNLLNRENFEIVVNEDLIDWID

SEQ ID NO: 37577 - DNA, 50 bp, Cronobacter malonaticus; identical to SEQ ID NO: 37572
  source 1..50: mol_type = genomic DNA

SEQ ID NO: 37578 - DNA, 40 bp, Cronobacter malonaticus; identical to SEQ ID NO: 37573
  source 1..40: mol_type = genomic DNA

SEQ ID NO: 37579 - DNA, 50 bp, Cronobacter malonaticus; identical to SEQ ID NO: 37572
  source 1..50: mol_type = genomic DNA

SEQ ID NO: 37580 - DNA, 40 bp, Cronobacter malonaticus; identical to SEQ ID NO: 37575
  source 1..40: mol_type = genomic DNA

SEQ ID NO: 37581 - protein, 531 aa, Nocardia terpenica
MGTTSANSANMQDSELAGTPFRKHILPAPARAGAVWACKGDRSAYWFDPSGVDPADAAIVIARLSKEKAGQKESLGLRTQLFGSREEAQAAGKTIVGEFVDDDLTINEKKTRRRKREGYEAALAAVASERVTSVFAMKLDRLYRGFRELERLAEICEKYDPLVRTKYSGDLDLSTATGRAMARMVATMGILELEQIEERVREQKRTAAREGKYRGGWRPFGFEADGVTWRVVEAEAIADGSEGLLKGVPLGAITRDWQARGLTTATGKPLRTLEVRRILKRARNAGLVEEHGVIVSEDAEWDAIVDVDTWKAVCALLDDEDRASNVSFERKLPGSGVYRCGVEGCTGTMRVGRTSGKAAKASKRGEHKVYKCDTKYHLSRDAAPLDDHVERVLLKAIQEAKDAHEGGDHVFPAPDPSALAELYRQRGEVDGELMELAESEDFTVKQKAVMSAKLIAKRETLDEAIGQAREKDVISHLMLSDDVVAEWKSLSVAVKAKIIDASMTVTVLPVTGWKGAGFDPKYVRIKWKPAA

SEQ ID NO: 37582 - DNA, 50 bp, Nocardia terpenica
  source 1..50: mol_type = genomic DNA
taatgcctttagttgacattcgccagcgcgaacgttaccatttcacatta

SEQ ID NO: 37583 - DNA, 40 bp, Nocardia terpenica
  source 1..40: mol_type = genomic DNA
gagcaggcccgccgcgcccagcacgaacgcgccggtgcag

SEQ ID NO: 37584 - DNA, 50 bp, Nocardia terpenica
  source 1..50: mol_type = genomic DNA
taatgcctttagttgacattcgccggcgcgaacgttaccatttcacatta

SEQ ID NO: 37585 - DNA, 40 bp, Nocardia terpenica
  source 1..40: mol_type = genomic DNA
gcgcaggcgcgccgagcccggggcggccgcggcggggcgg

SEQ ID NO: 37586 - protein, 542 aa, Dorea formicigenerans; identical to SEQ ID NO: 35851

SEQ ID NO: 37587 - DNA, 50 bp, Dorea formicigenerans; identical to SEQ ID NO: 35852
  source 1..50: mol_type = genomic DNA

SEQ ID NO: 37588 - DNA, 40 bp, Dorea formicigenerans
  source 1..40: mol_type = genomic DNA
cttggtatcatcgtttccccatgccgcatcaaatgacagt

SEQ ID NO: 37589 - DNA, 50 bp, Dorea formicigenerans; identical to SEQ ID NO: 35852
  source 1..50: mol_type = genomic DNA

SEQ ID NO: 37590 - DNA, 40 bp, Dorea formicigenerans
  source 1..40: mol_type = genomic DNA
ctagcactcaccatttgcccattccccatccaatgacagt

SEQ ID NO: 37591 - protein, 495 aa, Streptomyces antimycoticus
MTNDSQLVPVVAYARISADLARDGHGVEDQHRVNDETAATLGLKIVHYYTDNDLSAAKADLVRPDFEAMLRALKAGRLPDAQPVRGAIVVADDRLVRRVGDYERFVDALTYEDGRVYADAKGLKDLYNEDVESMGLFGVVIAKAEVRKIKRRTRRSHRRRAEEGIPVGGKRPFGWTDDKLTLEPEEAALLAEAARDVIAGKSLHSIQLRWNDAGVRTVHGNEWRSRSLKLALWNPRLCGWRKHNGELVRDANGLPVVGKWDPIITPKEWMAIDALFSARVGPNIKADGTVTDYRTPSYLLTGILRCGKPKGDGQICNAPLRVSARSDLSGGYVYQCQSRSMGGCGGSARNGAKVDEYITEAVLAKLEERTAAKTQPDAEWGGQEELDRLMVKQRKMLQAWQEDQISDELFFPENHKMESRIKVLRKERTQHALKVQRASVVTEDVRKQWYSGKLDMAQKRALIREALHAVIVLPVGGGGRRPFNPDLLVPKWTES

SEQ ID NO: 37592 - DNA, 50 bp, Streptomyces antimycoticus
  source 1..50: mol_type = genomic DNA
tgttgcggtcaagatactgctggtgatactcctgtcccttgggcaatatt

SEQ ID NO: 37593 - DNA, 40 bp, Streptomyces antimycoticus
  source 1..40: mol_type = genomic DNA
ttgtccaagtactgctggtggtatgcctcggccgggtaga

SEQ ID NO: 37594 - DNA, 50 bp, Streptomyces antimycoticus
  source 1..50: mol_type = genomic DNA
tgttgcggtcaagatactgctggtactactcctgtcccttgggcaatatt

SEQ ID NO: 37595 - DNA, 40 bp, Streptomyces antimycoticus
  source 1..40: mol_type = genomic DNA
ttgtccaagtactgtaagtaccaagtctcagccaggcagc

SEQ ID NO: 37596 - protein, 521 aa, Faecalibacterium sp
MKAAIYCRLSKEDETRTGESESIQNQKSMLLQYAMEQEFELYQIYSDEDYSGIDRNRPAFNAMIQAASEHRFDVVLAKTQSRFTRDMELVEKYLHGKFIEWGVRFIAVVDHVDTDDTANKKSRQINGLINEWYLEDLSANVCSVLDHKRNEGQYIASFALYGYQKAPDAKGKLVIDPEAAEVVKRIFALALSGMGAHKIAQILNEEGVPSPTAYKQQNGERYQLARKTSCESLWSSGTIYQMLHNQTYTGDLVQGRHKKVSYKSKRTVWLPKSQWIVVENTHEAIIDKDTYDTVQRIMQRRTRSGDGGMIHPLARKVVCSCCGCIMEQTSRPPKADGTRVRYVRCRMHQRAPKRCGNKTCTNLDDLQELVLRRIREYAAEYFDPEKVELPRRDDPVQQREQAQRSELKRLKGEVERRRKAVQQLYLDKVSGLLDAVQFAEMNRAFGEEIKSAENRIRGLEAELEQQLKETDVVQAQRQRVRELAQVSQLTRELVVLLVHRVIVSPKDPLTGEQKITIEWNF

SEQ ID NO: 37597 - DNA, 50 bp, Faecalibacterium sp
  source 1..50: mol_type = genomic DNA
tgggttattttcgtccgcccatgtgggacagaacaaaccaaagataaaaa

SEQ ID NO: 37598 - DNA, 40 bp, Faecalibacterium sp
  source 1..40: mol_type = genomic DNA
gtgcctgctccggccaggtagggtagacctcactggaagc

SEQ ID NO: 37599 - DNA, 50 bp, Faecalibacterium sp
  source 1..50: mol_type = genomic DNA
tgggttattttcgtccgcccatgtcagacagaacaaaccaaagataaaaa

SEQ ID NO: 37600 - DNA, 40 bp, Faecalibacterium sp
  source 1..40: mol_type = genomic DNA
aagccagctgcggccaggccaggaagcactcactggacgg

SEQ ID NO: 37601 - protein, 560 aa, Streptomyces albus
MKAPPPSQRAPIPGELWLGYIRVSTWREEKISPELQETALRQWAARTGRRLLEPLTIDLDATGRNFNRKIMRDIERVERGEAKGIAVWRYSRFGRNRTGNAVNLARLEAVGGQLESATEPVDATTAIGRFQRGMILEFGNFESDRAGEQWKETHEHRLAQKLPATGRARFGYIWHPRRVPDLSQPGGWRLQQERYELHPDFAPVVEELYERKTEDHDGFNSLAHWLNEELAIPTTRGRAWGVSSVARFLDSGFAAGLLRIHDRDCKCGYGTDPRMSRCPHGRMVYVAGAQPPIIAPDQWTAYRAHREETKKTPPRARKATYALTGLAWHGYCRFHMSAASDTNSHGQQVRGHWLVCSRNKHTSKVDCPKGINAKREQVEADVLDWLKREAADGVDSAPSLPEQATAPCKEDPRARAKREHAYAQVELKKVEAALDRLLMDQAMDPDKYPADSFERVRDQLLGKKGAIVKRMKELGEAETLPTREEYRALVVGLVEEWDTLQPIEKNSILRQLMRRVACYDIRTEGSRWIEVRTEVHPVWEPDPWGPVEGEVIARSDEPSD

SEQ ID NO: 37602 - DNA, 50 bp, Streptomyces albus
  source 1..50: mol_type = genomic DNA
tttgcccctttaggcgcactgttccacatcagtgcacctaaaggggcctc

SEQ ID NO: 37603 - DNA, 40 bp, Streptomyces albus
  source 1..40: mol_type = genomic DNA
ccctgtggtgccgatgttccacgtcaacgcctgggggctg

SEQ ID NO: 37604 - DNA, 50 bp, Streptomyces albus
  source 1..50: mol_type = genomic DNA
tttgcccctttaggcgcactgttcatcatcagtgcacctaaaggggcctc

SEQ ID NO: 37605 - DNA, 40 bp, Streptomyces albus
  source 1..40: mol_type = genomic DNA
ccctgtgttgcccagggtcatcttgaatgcctggggtcac

SEQ ID NO: 37606 - protein, 520 aa, Ruminococcus gnavus; identical to SEQ ID NO: 12931

SEQ ID NO: 37607 - DNA, 50 bp, Ruminococcus gnavus; identical to SEQ ID NO: 12932
  source 1..50: mol_type = genomic DNA

SEQ ID NO: 37608 - DNA, 40 bp, Ruminococcus gnavus
  source 1..40: mol_type = genomic DNA
gaataatcagctggggtatggggtgctgtgtgtggaggag

SEQ ID NO: 37609 - DNA, 50 bp, Ruminococcus gnavus
  source 1..50: mol_type = genomic DNA
tgtagcaatgacttgacatcctcggcggaggacgttataataaggttaca

SEQ ID NO: 37610 - DNA, 40 bp, Ruminococcus gnavus
  source 1..40: mol_type = genomic DNA
gaagcacaagctgtggaatgcggagctgagtgtgggggtg

SEQ ID NO: 37611 - protein, 583 aa, Citrobacter werkmanii
MKKLYSYIRWSSQKQTVGTSLARQTEAARNYATENGLEYAEIRDAGISAFKGKNITHGALGSFIQAVKDGVIEKDSTIFIENLDRLTRSGVGTAQKLLLDLLDLGLTVVTGMDQRVYTMESANENPTDMLISLLMFSRANEESKTKQNRTNNTARALVARFKQGQPTNIKNMSNDPWWFDSSGSKYEAVKPHPVHWVAAQKAVELFLMGWGCFRVTAYLNSHLDLYPAPKPTKRQIDQGVKKWAVPNLVTMRKNPALMGVKKLTIEGYEHKLDGYYPALVTPEQFARIQDIRTGNKFVQGEQKKMISLLSGLGVLKCGLCGGPMIAYSREGRLRYVCSNGKIQKSSCKVWSVNGSIVENLTARALVYGYTHSILLGNTKTEDLTPLIESKETELGLVKKQLTNQAQAISTIGPIQELIEQVAVLSQREQSLLLELDSLKQKLALQGSENELDELIIKTLSLFSDELLGDVTHTDRMQIREVVRKCLPEITISKLKDKALRIDFRFHDYSHMTFQGVMQGKEKSYTLTRTPHDQLYTKFAAVFSDVLETSLDATDIDGYMAASDRMVAALGLPEPLGRDFFSKR

SEQ ID NO: 37612 - DNA, 50 bp, Citrobacter werkmanii
  source 1..50: mol_type = genomic DNA
attcgcatcaaacataattatggcaagccataatataaatagatgccaat

SEQ ID NO: 37613 - DNA, 40 bp, Citrobacter werkmanii
  source 1..40: mol_type = genomic DNA
aagagtgcgcattaatggcaagacagaattgatgattctc

SEQ ID NO: 37614 - DNA, 50 bp, Citrobacter werkmanii
  source 1..50: mol_type = genomic DNA
attcgcatcaaacataattatggcgggccataatataaatagatgccaat

SEQ ID NO: 37615 - DNA, 40 bp, Citrobacter werkmanii
  source 1..40: mol_type = genomic DNA
atgggtgcgcagaaatggcggtactgacttgatgaaagtc

SEQ ID NO: 37616 - protein, 583 aa, Citrobacter cronae
MKKLYSYIRWSSQKQTVGTSLARQTEAARNYATENGLEYAEIRDAGISAFKGKNITHGALGSFIQAVKDGVIEKDSTIFIENLDRLTRSGVGTAQKLLLDLLDLGLTVVTGMDQRVYTMESANENPTDMLISLLMFSRANEESKTKQNRTNNTARALVARFKQGQPTNIKNMSNDPWWFDSSGSKYEAVKPHPVHWVAAQKAVELFLMGWGCFRVTAYLNSHLDLYPAPKPTKRQIDQGVKKWAVPNLVTMRKNPALMGVKKLTIEGYEHKLDGYYPALVTPEQFARIQDIRTGNKFVQGEQKKMISLLSGLGVLKCGLCGGPMIAYSREGRLRYVCSNGKIQKSSCKVWSVNGSIVENLTARALVYGYTHSILLGNTKTEDLTPLIESKETELGLVKKQLTNQAQAISTIGPIQELIEQVAVLSQREQSLLLELDSLKQKLALQGSENELDELIIKTLSLFSDELLGDVTHTDRMQIREVVRKCLPEITISKLKDKALRIDFRFHDYSHMTFQGVMQGKEKSYTLTRTPHDQLYTKIAAVFSDVLETSLDATDIDGYMAASDRMVAALGLPKPLGRDFFSKR

SEQ ID NO: 37617 - DNA, 50 bp, Citrobacter cronae; identical to SEQ ID NO: 37612
  source 1..50: mol_type = genomic DNA

SEQ ID NO: 37618 - DNA, 40 bp, Citrobacter cronae; identical to SEQ ID NO: 37613
  source 1..40: mol_type = genomic DNA

SEQ ID NO: 37619 - DNA, 50 bp, Citrobacter cronae; identical to SEQ ID NO: 37614
  source 1..50: mol_type = genomic DNA

SEQ ID NO: 37620 - DNA, 40 bp, Citrobacter cronae; identical to SEQ ID NO: 37615
  source 1..40: mol_type = genomic DNA

SEQ ID NO: 37621 - protein, 583 aa, Citrobacter werkmanii
MKKLYSYIRWSSQKQTVGTSLARQTEAARNYATENGLEYAEIRDAGISAFKGKNITHGALGSFIQAVKDGVIEKDSTIFIENLDRLTRSGVGTAQKLLLDLLDLGLTVVTGMDQRVYTMESANENPTDMLISLLMFSRANEESKTKQNRTNNTARALVARFKQGQPTNIKNMSNDPWWFDSSGSKYEAVKPHPVHWVAAQKAVELFLMGWGCFRVTAYLNSHLDLYPAPKPTKRQIDQGVKKWAVPNLVTMRKNPALMGVKKLTIEGYEHKLDGYYPALVTPEQFARIQDIRTGNKFVQGEQKKMISLLSGLGVLKCGLCGGPMIAYSREGRLRYVCSNGKIQKSSCKVWSVNGSIVENLTARALVYGYTHSILLGNTKTEDLTPLIESKETELGLVKKQLTNQAQAISTIGPIQELIEQVAVLSQREQSLLLELDSLKQKLALQGSENELDELIIKTLSLFSDELLGDVTHTDRMQIREVVRKCLPEITISKLKDKALRIDFRFHDYSHMTFQGVMQGKEKSYTLTRTPHDQLYTKIAAVFSDVLETSLDATDIDGYMAASDRMVAALGLPEPLGRDFFSKR

SEQ ID NO: 37622 - DNA, 50 bp, Citrobacter werkmanii; identical to SEQ ID NO: 37612
  source 1..50: mol_type = genomic DNA

SEQ ID NO: 37623 - DNA, 40 bp, Citrobacter werkmanii
  source 1..40: mol_type = genomic DNA
aagagtgcgcagtaatggcaagacacaattgatgattctc

SEQ ID NO: 37624 - DNA, 50 bp, Citrobacter werkmanii; identical to SEQ ID NO: 37614
  source 1..50: mol_type = genomic DNA

SEQ ID NO: 37625 - DNA, 40 bp, Citrobacter werkmanii; identical to SEQ ID NO: 37615
  source 1..40: mol_type = genomic DNA

SEQ ID NO: 37626 - protein, 565 aa, Streptococcus suis
MNRTLTIPYYNQVDTSRLSNITVVYCRLSQDDGLNGDSNSIINQKKILSEAVQRERLENPILFVDDGYSGTNFDRPAISEALRLVENRQVSNFIVKDLSRLGRSYIKVGQLTEITFPSFDVRFIALNDGVDSNKPNETNSIFLPIKSLMDEMYAADTSKKIRAVIQAKAKAGERVTANPPYGYLKDPENPKNWIVDPVASEVVKRIFQEAKNGKSANEIGKMLEADKVEKPDCYRIKSGRKPLAGVQDKRYSPYYWSRETITRLLKREEYLGHTVNLRTQTKSYKDKRSIDKPKEDWLIFKDTHEAIIDQETFDIVQKMRSHKRSNQRYKNRVGHENLFAGLVFCGTCGRKHYFCPFQSKTGLNHDHYKCSGYRKPIDGCENPHYIQKSALIEIVGAKLRQTIQEIQLDKNKFLEKLEWQSQVKFSKDSQRQRQQLQKDEFRSKEIDAIIQKLYEDNLLGKISDERFVKLSQSYETEQKQLQTSILDLTKKLAQQQEETQNISKFMARISKYTELPELTVEIVNELIDKIVIHKPTGTKRNRIVQIDIHYNFIGKLNNEKASQVD

SEQ ID NO: 37627 - DNA, 50 bp, Streptococcus suis
  source 1..50: mol_type = genomic DNA
aaactgctttttgtcagcctagctaaagacagtatgacacatagcagtct

SEQ ID NO: 37628 - DNA, 40 bp, Streptococcus suis
  source 1..40: mol_type = genomic DNA
gaatataaaaaatccgctcaaaggcggattttttgtctat

SEQ ID NO: 37629 - DNA, 50 bp, Streptococcus suis
  source 1..50: mol_type = genomic DNA
aaactgctttttgtcagcctagctgtagacagtatgacacatagcagtct

SEQ ID NO: 37630 - DNA, 40 bp, Streptococcus suis
  source 1..40: mol_type = genomic DNA
gaatgtataaaatccgccagtagtgtgattgtttttcaat

SEQ ID NO: 37631 - protein, 565 aa, Streptococcus suis
MNRTLTIPYYNQVDTSRLSNITVVYCRLSQDDGLNGDSNSIINQKKILSEAVQRERLENPILFVDDGYSGTNFDRPAISEALRLVENRQVSNFIVKDLSRLGRSYIKVGQLTEITFPSFDVRFIALNDGVDSNKPNETNSIFLPIKSLMDEMYAADTSKKIRAVIQAKAKAGERVTANPPYGYLKDPENPKNWIVDPVASEVVKRIFQEAKNGKSANEIGKMLEADKVEKPDCYRIKSGRKPLAGVQDKRYSPYYWSRETITRLLKREEYLGHTVNLRTQTKSYKDKRSIDKPKEDWLIFKDTHEAIIDQETFDIVQKMRSHKRSNQRYKNRVGHENLFAGLVFCGTCGRKHYFCPFQSKTGLNHDHYKCSGYRKPIDGCENPHYIQKSALIEIVGAKLRQTIQEIQLDKNKFLEKLEWQSQVKFSKDSQRQRQQLPKDEFRSKEIDAIIQKLYEDNLLGKISDERFVKLSQSYETEQKQLQTSILDLTKKLAQQQEETQNISKFMARISKYTELPELTVEIVNELIDKIVIHKPTGTKRNRIVQIDIHYNFIGKLNNEKASQVD

SEQ ID NO: 37632 - DNA, 50 bp, Streptococcus suis; identical to SEQ ID NO: 37627
  source 1..50: mol_type = genomic DNA

SEQ ID NO: 37633 - DNA, 40 bp, Streptococcus suis; identical to SEQ ID NO: 37628
  source 1..40: mol_type = genomic DNA

SEQ ID NO: 37634 - DNA, 50 bp, Streptococcus suis; identical to SEQ ID NO: 37629
  source 1..50: mol_type = genomic DNA

SEQ ID NO: 37635 - DNA, 40 bp, Streptococcus suis; identical to SEQ ID NO: 37630
  source 1..40: mol_type = genomic DNA

SEQ ID NO: 37636 - protein, 565 aa, Streptococcus suis
MNRTLTIPYYNQVDTSRLSNITVVYCRLSQDDGLNGDSNSIINQKKILSEAVQRERLENPILFVDDGYSGTNFDRPAISEALRLVENRQVSNFIVKDLSRLGRSYIKVGQLTEITFPSFDVRFIALNDGVDSNKPNETNSIFLPIKSLMDEMYAADTSKKIRAVIQAKAKAGERVTANPPYGYLKDPENPKNWIVDPVASEVVKRIFQEAKNGKSANEIGKMLEADKVEKPDCYRIKSGRKPLAGVQDKRYSPYYWSRETITRLLKREEYLGHTVNLRTQTKSYKDKRSIDKPKEDWLIFKDTHEAIIDQETFDIVQKMRSHKRSNQRYKNRVGHENLFAGLVFYGTCGRKHYFCPFQSKTGLNHDHYKCSGYRKPIDGCENPHYIQKSALIEIVGAKLRQTIQEIQLDKNKFLEKLEWQSQVKFSKDSQRQRQQLQKDEFRSKEIDAIIQKLYEDNLLGKISDERFVKLSQSYETEQKQLQTSILDLTKKLAQQQEETQNISKFMARISKYTELPELTVEIVNELIDKIVIHKPTGTKRNRIVQIDIHYNFIGKLNNEKASQVD

SEQ ID NO: 37637 - DNA, 50 bp, Streptococcus suis; identical to SEQ ID NO: 37627
  source 1..50: mol_type = genomic DNA

SEQ ID NO: 37638 - DNA, 40 bp, Streptococcus suis; identical to SEQ ID NO: 37628
  source 1..40: mol_type = genomic DNA

SEQ ID NO: 37639 - DNA, 50 bp, Streptococcus suis; identical to SEQ ID NO: 37629
  source 1..50: mol_type = genomic DNA

SEQ ID NO: 37640 - DNA, 40 bp, Streptococcus suis; identical to SEQ ID NO: 37630
  source 1..40: mol_type = genomic DNA

SEQ ID NO: 37641 - protein, 565 aa, Streptococcus suis
MNRTLTIPYYNQVDTSRLSNITVVYCRLSQDDGLNGDSNSIINQKKILSEAVQRERLENPILFVDDGYSGTNFDRPAISEALRLVENRQVSNFIVKDLSRLGRSYIKVGQLTEITFPSFDVRFIALNDGVDSNKPNETNSIFLPIKSLMDEMYAADTSKKIRAVIQAKAKAGERVTANPPYGYLKDPENPKNWIVDPVASEVVKRIFQEAKNGKSANEIGKMLEADKVEKPDCYRIKSGRKPLAGVQDKRYSPYYWSRETITRLLKREEYLGHTVNLRTQTKSYKDKRSIDKPKEDWLIFKDTHEAIIDQETFDIVQKMRSHKRSNQRYKNRVGHENLFAGLVFCGTCGRKHYFCLFQSKTGLNHDHYKCSGYRKPIDGCENPHYIQKSALIEIVGAKLRQTIQEIQLDKNKFLEKLEWQSQVKFSKDSQRQRQQLQKDEFRSKEIDAIIQKLYEDNLLGKISDERFVKLSQSYETEQKQLQTSILDLTKKLAQQQEETQNISKFMARISKYTELPELTVEIVNELIDKIVIHKPTGTKRNRIVQIDIHYNFIGKLNNEKASQVD

SEQ ID NO: 37642 - DNA, 50 bp, Streptococcus suis; identical to SEQ ID NO: 37627
  source 1..50: mol_type = genomic DNA

SEQ ID NO: 37643 - DNA, 40 bp, Streptococcus suis; identical to SEQ ID NO: 37628
  source 1..40: mol_type = genomic DNA

SEQ ID NO: 37644 - DNA, 50 bp, Streptococcus suis; identical to SEQ ID NO: 37629
  source 1..50: mol_type = genomic DNA

SEQ ID NO: 37645 - DNA, 40 bp, Streptococcus suis; identical to SEQ ID NO: 37630
  source 1..40: mol_type = genomic DNA

SEQ ID NO: 37646 - protein, 620 aa, Lachnospira eligens; identical to SEQ ID NO: 36306

SEQ ID NO: 37647 - DNA, 50 bp, Lachnospira eligens; identical to SEQ ID NO: 11112
  source 1..50: mol_type = genomic DNA

SEQ ID NO: 37648 - DNA, 40 bp, Lachnospira eligens
  source 1..40: mol_type = genomic DNA
ccggagttgttgagtttccgatgtaggcttcaacggcatg

SEQ ID NO: 37649 - DNA, 50 bp, Lachnospira eligens
  source 1..50: mol_type = genomic DNA
actgtccgcaaaaaatgaccgactgctgtaggacggattttgcggacatt

SEQ ID NO: 37650 - DNA, 40 bp, Lachnospira eligens
  source 1..40: mol_type = genomic DNA
ctggaattgactgctttctgctgtaggcttccacagcatg

SEQ ID NO: 37651 - protein, 539 aa, Streptococcus equi
MNRTKKYIAALYCRLSKDDGNTNESMSIHSQKAMLKQYAEKENISIYDYYVDDGYSGTNFDRPSFKKMITDIENGRINCVITKDLSRLGRNYLESGAYIEMYFPQKNIRYIAITDGIDTLNTHEFDIMPFKNILNEMYAKDTSKKVKSAIQSRMREGTYIGSKAPFGFLKDPNNKHKLVIDEDVRYIIELIYELCLEGKGTQLISQELMKRKIPRPSSFTENADKLYGLSEENKYKWTHRMVLSILRDPVYCGNMARNKRPTLSFKTSKRLYIPKDEYILVRDTHEGIISEEVWKQAQDMIDKRKCNNKSGITYDNIFKGLVKCPTCGYALTPKADYRLNKKETMDFVHFSCSSYKKHGINACSSHRINARDLYNIVLEDIGYHGKMALSSREDFVLKIAEKIDKDKVDERRDKTQRLNLDREKLKDLDKAFEKLYEDRLNENITERNFNLMNDKLSKKQNQLLDEINLLEEQIKVVTQTQENCEQFIDKISKFAEVKELNSYILNQVIDKIYVYDKEEVDGELKQSVEIHYKFIGKLD

SEQ ID NO: 37652 - DNA, 50 bp, Streptococcus equi
  source 1..50: mol_type = genomic DNA
ttagccacttaggactgttcatctgatgttggacagtccgaagtggtacg

SEQ ID NO: 37653 - DNA, 40 bp, Streptococcus equi
  source 1..40: mol_type = genomic DNA
tgttccttggcgtcctgccgaccttgagcagagagccgga

SEQ ID NO: 37654 - DNA, 50 bp, Streptococcus equi
  source 1..50: mol_type = genomic DNA
ttagccacttaggactgttcatctaatgttggacagtccgaagtggtacg

SEQ ID NO: 37655 - DNA, 40 bp, Streptococcus equi
  source 1..40: mol_type = genomic DNA
tgtcccagggctccctgccaaccctgtggagggagctgga

SEQ ID NO: 37656 - protein, 547 aa, Clostridioides difficile; identical to SEQ ID NO: 2666

SEQ ID NO: 37657 - DNA, 50 bp, Clostridioides difficile; identical to SEQ ID NO: 2667
  source 1..50: mol_type = genomic DNA

SEQ ID NO: 37658 - DNA, 40 bp, Clostridioides difficile
  source 1..40: mol_type = genomic DNA
atacttaactattcacgttgaaagagtggtaagtaaaagt

SEQ ID NO: 37659 - DNA, 50 bp, Clostridioides difficile
  source 1..50: mol_type = genomic DNA
ttgtgggaaagaggtaataccgttcggacggtagtactgctttcccacaa

SEQ ID NO: 37660 - DNA, 40 bp, Clostridioides difficile
  source 1..40: mol_type = genomic DNA
ttagttaactactcaagttcggtgagtagtacatgaaagt

SEQ ID NO: 37661 - protein, 559 aa, Clostridium leptum; identical to SEQ ID NO: 11456

SEQ ID NO: 37662 - DNA, 50 bp, Clostridium leptum
  source 1..50: mol_type = genomic DNA
caccttccttacggagggtgccccaagggagaggctacataaggaagtag

SEQ ID NO: 37663 - DNA, 40 bp, Clostridium leptum
  source 1..40: mol_type = genomic DNA
acaaaaaagctcctgcgaaaagcaggagcttttttattgt

SEQ ID NO: 37664 - DNA, 50 bp, Clostridium leptum
  source 1..50: mol_type = genomic DNA
caccttccttacggagggtgccccgtgggagaggctacataaggaagtag

SEQ ID NO: 37665 - DNA, 40 bp, Clostridium leptum
  source 1..40: mol_type = genomic DNA
aaaatcaagatccagagaagtgaaggagcttgttcatggt

SEQ ID NO: 37666 - protein, 509 aa, Staphylococcus hominis
MSVKPAEIESKIKRVALYLRLSRGEGLDDLNTHEKRLIRKCGEHNWSYEMYKEIGSGSTIKDRPVMQQLLNDIERELFDAVLVVDLDRLSRGSGADNDRILYSLKSSNTLVVVENPYQILDANNESDEDMIVFKGMIARMEFKQIVKRLKVGKRMKKEQGLWVSSATPYGYKVDKKTRKLTPDEEESKVVVLIKDLFLKGNSCTDIAWELNKRKAVTRGALEWRTERVAAILHNEVYVGTIVYNKTEGSKKKEENKQYSITKPFRYLPKEEWRRLYNAHPPLFTHEEFEEIERRFAKSPKSKRNSEKSTTYALSGLCITPEGDTMSIRKNKRTGLPGTLYPKTINNRPTKYRGCSYDMVFDVVRQVLIQTKDCLDKVLTEEEKTDQINDLKKRLIAKENELSLVTQSKNKIIDGFLIGLFDENKSIEFNKEKDEEIDKLEKELQAIRNQIDNFEKVNDSIRKTKIERALEKMEDTSLEREKNKFLKTIIKEIIIDRTEENDMKIKVNFL

SEQ ID NO: 37667 - DNA, 50 bp, Staphylococcus hominis
  source 1..50: mol_type = genomic DNA
aactatatcttagtagaaggcaacgggttgctaacaatttaggtatggtc

SEQ ID NO: 37668 - DNA, 40 bp, Staphylococcus hominis
  source 1..40: mol_type = genomic DNA
aggattaatttttgctatcggtgtagctattggtatggct

SEQ ID NO: 37669 - DNA, 50 bp, Staphylococcus hominis
  source 1..50: mol_type = genomic DNA
aactatatcttagtagaaggcaactcgttgctaacaatttaggtatggtc

SEQ ID NO: 37670 - DNA, 40 bp, Staphylococcus hominis
  source 1..40: mol_type = genomic DNA
aggattaattttttctatttctgtgaagattgtcattggt

SEQ ID NO: 37671 - protein, 509 aa, Staphylococcus hominis
MSIKPAEIESKIKRVALYLRLSRGEGLDDLNTHERRLVRKCDEHNWSYEMYKEIGSGSTIKDRPVMQQLLNDVERELFDAVVVVDLDRLSRGSGADNDRILYALKTSNTLVVVENPYQILDANNESDEDMIVFKGMIARMEFKQIVKRLKVGKRMKKEQGLWVSSATPYGYKVDNETRKLTPDEEESKVVVLIKDLFLEGYSCADIAWELNKRKAVTRGALEWRSERIAAILHNEVYVGTIVYNKTEGSRKKEENKQYSITKPFRNIPKEEWRRLYNAHPPLFTHEEFEEIERKFQTSPRSKRTTDKHSTYALTGLCVTPEGDTMSIRKNKRTGLPGTLYPKTINNRPTKYRGCSYDMVFDVVRQVLIQTKDYLDKVLTEEEKTTHINELKKRITDKENELNLVIQSKNKIIDGFLIGLFDENKSIELNKEKDEEIDRIEKDIQAIRNQIDNFKKVNDSIRKSKIERVLEKIDDTSLDREKNEFLKTIIKEIIVDRTEENEMKVKVNFL

SEQ ID NO: 37672 - DNA, 50 bp, Staphylococcus hominis
  source 1..50: mol_type = genomic DNA
cgctatacctaagctattagcaacgggttgcagataatttaggtatggtc

SEQ ID NO: 37673 - DNA, 40 bp, Staphylococcus hominis; identical to SEQ ID NO: 37668
  source 1..40: mol_type = genomic DNA

SEQ ID NO: 37674 - DNA, 50 bp, Staphylococcus hominis
  source 1..50: mol_type = genomic DNA
cgctatacctaagctattagcaactcgttgcagataatttaggtatggtc

SEQ ID NO: 37675 - DNA, 40 bp, Staphylococcus hominis; identical to SEQ ID NO: 37670
  source 1..40: mol_type = genomic DNA

SEQ ID NO: 37676 - protein, 509 aa, Chryseobacterium indoltheticum
MKIADLYIRVSTDEQADKGYSQRDQEERLRRYCSQNNFTVGNVIYEDHSAKSFNRPEWKKLLIELKKKGSKTNVILFTKWDRFSRNAGDAYQMISILSKLGVDLQAVEQPLDLSIPENKMMLAIYLAAPEVENDRRALNVFYGMRRAVKEGRVMGKAPFGYANKITENGKKYIAIKEPEATKMKWAFNELSKGIYASNSIRTKINESLRKSVSRTSFHIAIRNPIYCGKVFVPKHKDEEACFVEGQHEPLISEELFDKVQEILDGKKRPQRPNTKITVQENFPLRGFLTCPNCGKTLTASASRGRNNRYYYYHCNSTCGFRERAEIVNKVFEDGLMTLEMNAPVKKYLKKLLTENYQNFISDPLKEKKKISDEIDTLNNKLSFARNKFLSEIIDDDEYLEIKRECKDRISKLEEELNKSSIPQISNIEKLLEQALETLQNIGKHYQEGEIEIKRAIIGSIFPEKLEFDGKHYRTARINSIAYHIFQINNDLDGVKKKRNDQNDHFSLNV

SEQ ID NO: 37677 - DNA, 50 bp, Chryseobacterium indoltheticum
  source 1..50: mol_type = genomic DNA
aaatgatcatttctccttgaatgtagtcttaaacgaacaaatatcgaaac

SEQ ID NO: 37678 - DNA, 40 bp, Chryseobacterium indoltheticum
  source 1..40: mol_type = genomic DNA
tcatttctccagtcaaagtagacccacagggattcgaacc

SEQ ID NO: 37679 - DNA, 50 bp, Chryseobacterium indoltheticum
  source 1..50: mol_type = genomic DNA
aaatgatcatttctccttgaatgttgtcttaaacgaacaaatatcgaaac

SEQ ID NO: 37680 - DNA, 40 bp, Chryseobacterium indoltheticum
  source 1..40: mol_type = genomic DNA
tcatttctccagccaaggctgaccatcagacaattaaacc

SEQ ID NO: 37681 - protein, 548 aa, Vibrio cincinnatiensis
MQRIIYPYVRFSSEKQSAGHSHERQIEKIKEYASVNGYEVNDTLNLRDLGVSAFKGKNAEKGALATFLKMIEDGTIPTDGTSYLCIEQFDRLSRQTVDEAYSLFRKILISNVNIITLMDEKVYTKKSLNEMVSIISSLLLMEQANVESDKKSKRVSAVFKKKLEKLRNGEKIQFAYMLPGWIDNIGTKQDPNFIINDQVKTVRMIIDMYLGGETMGHIARILNEKQIPQFARKKTKNAISSWNSGKISHLLVNRCLIGELKISKTGEVIKDYYPSVISKDEWDIIQSTKRTNATIKVAGRKTINIFQGRLFCADCGNKYYFETDDKTGKNGKKYIYHMLKCSGRRFHSCDSKSIKYDDLTNNNLFFFEKVLDQKTENYYNKIKLEISQFENQIEELKKEQNELDLLLNNKSINFTAHAIANSKILDQIDILEKDIALNKQHIAFTMNTNMIDKFDKNDPISVSKAKKFIKDNYAGILISSKYGTIISLMKSGQFIINPIPNRFDDSIPKASLQLFEIKEQIQKQDKKGLLDGKLKELLDAFNFLDRFE

SEQ ID NO: 37682 - DNA, 50 bp, Vibrio cincinnatiensis
  source 1..50: mol_type = genomic DNA
ttccctttaatactaaagttaatcgtgataaacttgagctttaacgggaa

SEQ ID NO: 37683 - DNA, 40 bp, Vibrio cincinnatiensis
  source 1..40: mol_type = genomic DNA
tgctggcgctaaatttacggtaattcgtttggcaggaaat

SEQ ID NO: 37684 - DNA, 50 bp, Vibrio cincinnatiensis; identical to SEQ ID NO: 37682
  source 1..50: mol_type = genomic DNA

SEQ ID NO: 37685 - DNA, 40 bp, Vibrio cincinnatiensis
  source 1..40: mol_type = genomic DNA
tgcttgccataaatttactgtttttcctgtgacaggaact

SEQ ID NO: 37686 - protein, 618 aa, Anaerostipes hadrus; identical to SEQ ID NO: 11111

SEQ ID NO: 37687 - DNA, 50 bp, Anaerostipes hadrus; identical to SEQ ID NO: 11112
  source 1..50: mol_type = genomic DNA

SEQ ID NO: 37688 - DNA, 40 bp, Anaerostipes hadrus
  source 1..40: mol_type = genomic DNA
gcatcttcgatagccgagggaggagcggcagcgacaaagg

SEQ ID NO: 37689 - DNA, 50 bp, Anaerostipes hadrus; identical to SEQ ID NO: 36309
  source 1..50: mol_type = genomic DNA

SEQ ID NO: 37690 - DNA, 40 bp, Anaerostipes hadrus
  source 1..40: mol_type = genomic DNA
gcttctgacatccccggggctgcagcgggagggacaaagg

SEQ ID NO: 37691 - protein, 540 aa, Blautia faecis; identical to SEQ ID NO: 12131

SEQ ID NO: 37692 - DNA, 50 bp, Blautia faecis; identical to SEQ ID NO: 2472
  source 1..50: mol_type = genomic DNA

SEQ ID NO: 37693 - DNA, 40 bp, Blautia faecis
  source 1..40: mol_type = genomic DNA
ggtttctaaatgggagcgaggcgtttgccttccggatgta

SEQ ID NO: 37694 - DNA, 50 bp, Blautia faecis; identical to SEQ ID NO: 17814
  source 1..50: mol_type = genomic DNA

SEQ ID NO: 37695 - DNA, 40 bp, Blautia faecis
  source 1..40: mol_type = genomic DNA
tgtttcaaggtctcagccaaatgtttgccttccggttgta

SEQ ID NO: 37696 - protein, 523 aa, Roseburia hominis
MGKREQKYRTAIYCRLSDEDYEKKREVSESIENQMFICRKYIEERPELEEAEVYVDDGHTGLDYDRAGYIRMMEDVDAGKIDCIITKSLARLGREHAETIRLFKVTFVIKRIRYIAVVDNIDFNGRITSIDIPIKVVMNDNYSMETSNNVRAALRAKAQRGEFIGSFATYGYVKDPKDKNHLIVDPVAAEVVRRIYAEFIDGKDIIMIAHGLNDDKIPCPSEYKRQNGCNYSNNRRLEKTYYWTYSTVKKILLNENENYIGNMVQHRIEKMAYNIKKFSQVEKSEWIRHEATHEPIIEQRDYDMVHKMIQHRWKQMDCSKNINYFAGLLFCGDCGRAMTKSKRKDGTILRCTTYARIGVQYCSQHLIYLQELEELVLQAIQANVNEAIQSMDLEKIRQQKLQTGINDESSRLELQLEQLERNYHKMVMTLSQELISIDDFNVFKTEYTAQKEIIENRKKVLQKQKDAGKIYMDEYQRWLETFLQHREIKELSREVLVNLIERIDVYENNSVNITFRFKKPHQI

SEQ ID NO: 37697 - DNA, 50 bp, Roseburia hominis
  source 1..50: mol_type = genomic DNA
ttctatcacattcaaccattaccctatgagaacgggtaatggtgattagt

SEQ ID NO: 37698 - DNA, 40 bp, Roseburia hominis
  source 1..40: mol_type = genomic DNA
tctgaccttcgactgcggatacgagaacgggaatacagag

SEQ ID NO: 37699 - DNA, 50 bp, Roseburia hominis
  source 1..50: mol_type = genomic DNA
ttctatcacattcaaccattacccgctgagaacgggtaatggtgattagt

SEQ ID NO: 37700 - DNA, 40 bp, Roseburia hominis
  source 1..40: mol_type = genomic DNA
tcttaccgtcagttgctgagccgtgaaggggaattcaggg

SEQ ID NO: 37701 - protein, 544 aa, Christensenella hongkongensis
MTKQPERITALYCRLSRDDENEGDSYSIANQKKMLDKFAKEHKFHNPEFFVDDGYSGGDFDRPDFNRMISLVRDGKIGTIIVRDMSRFGRDYLKVGFYTEVMFPDMDVRFIAIGNGIDSINQQDSDFTPFLNIINEWYLKDSSKKIRAVFKAKGEAGEHIASHPPYGYVKDKENPKRWVVDEEAAGVVQRIFSLCMDGYGPMQIARILRADRVLCPAAYVVHQGHKQRNPIPADPCKWKAETVAKILARKDYLGHTVNFKTFTKSYKDKRSKVNPVENQRVFEGTHKPVIQQDVWDRVQELRKHKRRPCKTGKSSIFSGLVYCADCGEKLYYCTTNNFTPNQDFFVCANYKSNTGTCSAHYIRQLVLEKLVHEHLRQTLAFARGFEDDFIQAVSDQSARSWEKERRDAHSALTAAQKRIAQLDALFQRLYEDNVSGRISDERFGILSKGYEDEQAALKSSMRELQARLDETERKVSGIGNFLAIVHKYTRIEKLDATILNEFIHKIVIHAPDKSSGKRTQQIDIYYNFIGEIPSKDFPCSVKAV

SEQ ID NO: 37702 - DNA, 50 bp, Christensenella hongkongensis
  source 1..50: mol_type = genomic DNA
atacttctttatgacacccgcgcataaggacaggtaggataaagaagtaa

SEQ ID NO: 37703 - DNA, 40 bp, Christensenella hongkongensis
  source 1..40: mol_type = genomic DNA
aggaaaaaggcccggcgcatatgcgccgggcctttttcct

SEQ ID NO: 37704 - DNA, 50 bp, Christensenella hongkongensis
  source 1..50: mol_type = genomic DNA
atacttctttatgacacccgcgcaagaggacaggtaggataaagaagtaa

SEQ ID NO: 37705 - DNA, 40 bp, Christensenella hongkongensis
  source 1..40: mol_type = genomic DNA
gggaaagaggccaggctcaaggggaccaggtcattttcct

SEQ ID NO: 37706 - protein, 549 aa, Enterococcus faecalis
MSKEKIKVYLYTRVSTSVQIDGYSLEAQKSRMKAFALYNDYEIVGEYEDAGKSGKSIEGRVQFTRMMEDIKSGKDGVSFVLVFKLSRFARNAADVLSTLQIMQDFGVNLICVEDGIDSSKDAGKLMISVLSAVAEIERENIRVQTMEGRIQKAKEGKWNGGFAPYGYQLIDGKLFINEEEAIAIRTIFDQYVNTSIGANGLSKYLENHGIRKIPRQNGKNPLFDAGLIRKILKNPVYNGKIAFGRRTLEKVHGTRNEYRQVEQDDYLVAEGIHEAIIPDELWQAAQVKLKAQAKKYEHVNKGKNMRTHLLSGIVKCPICGAGMFGNKSIKYKKDGTKYKEFYYYGCKHRLMNRGHKCTYSKQIREELLDDAVAEVIIKLVSNPKFASILQEKINMKVDTSAIENEIDNYQKELRKSHSTKFKIIEEIDNLDVEDKHYKRRKNDLDDRLYRMYDKIEELEGQLIEAKAKKETIEAEKLTGDNIYKVLIYFEKLYKVMNDVERRQLIEALISEIQIYEEKQPNGQWLKSITFKLPIIAEELSISLDNDKQV

SEQ ID NO: 37707 - DNA, 50 bp, Enterococcus faecalis
  source 1..50: mol_type = genomic DNA
agtttggacaatgataagcaagttgagacggtagcacttttgtccaaact

SEQ ID NO: 37708 - DNA, 40 bp, Enterococcus faecalis
  source 1..40: mol_type = genomic DNA
cccacaaacgacccacattgaatctgtcacgttattaaca

SEQ ID NO: 37709 - DNA, 50 bp, Enterococcus faecalis
  source 1..50: mol_type = genomic DNA
agtttggacaatgataagcaagttgggacggtagcacttttgtccaaact

SEQ ID NO: 37710 - DNA, 40 bp, Enterococcus faecalis
  source 1..40: mol_type = genomic DNA
gcctcagacgacccacagtggatctgtcaggtgggcagca

SEQ ID NO: 37711 - protein, 549 aa, Enterococcus faecalis; identical to SEQ ID NO: 17081

SEQ ID NO: 37712 - DNA, 50 bp, Enterococcus faecalis; identical to SEQ ID NO: 10392
  source 1..50: mol_type = genomic DNA

SEQ ID NO: 37713 - DNA, 40 bp, Enterococcus faecalis; identical to SEQ ID NO: 37708
  source 1..40: mol_type = genomic DNA

SEQ ID NO: 37714 - DNA, 50 bp, Enterococcus faecalis
  source 1..50: mol_type = genomic DNA
agtttggaaaatgatgagcaagttgggacggtagcgttattgtccaaact

SEQ ID NO: 37715 - DNA, 40 bp, Enterococcus faecalis; identical to SEQ ID NO: 37710
  source 1..40: mol_type = genomic DNA

SEQ ID NO: 37716 - protein, 549 aa, Enterococcus faecalis
MSKEKIKVYLYTRVSTSIQIEGYSLEAQKSRMKAFAIYNDYEIVGEYEDAGKSGKSIEGRKQFNRMMEDIKSGKDGVSFVLVFKLSRFARNAADVLSTLQIMQDYGVNLICVEDGIDSSKDAGKLMISVLSAVAEIERENIRIQTMEGRIQKAREGKWNGGFAPYGYKLEDGKLFINEEEAVAIRTIFDQYVNTTIGANGLSKYLENHGIRKIPRQNGKNPLFDAGLIRKILKNPVYNGKIAFGRRTLEKVHGTRNEYKQVEQDEYLISEGIHEAIVSDEVWQAAQVKLKSQAKKYEHVNKGKDTRTHLLSGIVKCPICGVGMFGNKCTKKKKDGTKYKDFYYYGCKHRQMIRGHKCTFRKQIREELLDDAVAEVIVKIVSNPKFASMMQEKINMKVDTSEIEKEIDNYQKELRKSHSTKFKLIEEIDNLDVEDKHYKRRKQDLDDRLYRMYDKIDELESSLIDSKAKKQTIEAEKLTGDNIYKVLIYFDKLYKVMNDVERRQLITALISEIQVYEEKQPNGQWLKSITFKLPIIDEDLNISLDNDEQV

SEQ ID NO: 37717 - DNA, 50 bp, Enterococcus faecalis
  source 1..50: mol_type = genomic DNA
agtttggacaatgatgaacaagttgagacggtagcacttttgtccaaact

SEQ ID NO: 37718 - DNA, 40 bp, Enterococcus faecalis; identical to SEQ ID NO: 37708
  source 1..40: mol_type = genomic DNA

SEQ ID NO: 37719 - DNA, 50 bp, Enterococcus faecalis
  source 1..50: mol_type = genomic DNA
agtttggacaatgatgaacaagttgggacggtagcacttttgtccaaact

SEQ ID NO: 37720 - DNA, 40 bp, Enterococcus faecalis; identical to SEQ ID NO: 37710
  source 1..40: mol_type = genomic DNA

SEQ ID NO: 37721 - protein, 549 aa, Enterococcus faecalis; identical to SEQ ID NO: 12326

SEQ ID NO: 37722 - DNA, 50 bp, Enterococcus faecalis; identical to SEQ ID NO: 12327
  source 1..50: mol_type = genomic DNA

SEQ ID NO: 37723 - DNA, 40 bp, Enterococcus faecalis; identical to SEQ ID NO: 37708
  source 1..40: mol_type = genomic DNA

SEQ ID NO: 37724 - DNA, 50 bp, Enterococcus faecalis
  source 1..50: mol_type = genomic DNA
ggtttggacaatgatgagcacgttgggacggtagcacttttgtccaaact

SEQ ID NO: 37725 - DNA, 40 bp, Enterococcus faecalis; identical to SEQ ID NO: 37710
  source 1..40: mol_type = genomic DNA

SEQ ID NO: 37726 - protein, 549 aa, Enterococcus faecalis
MSKEKIKVYLYTRVSTSIQIEGYSLEAQKSRMKAFAIYNDYEIVGEYEDAGKSGKSIEGRIQFNRMMEDIKSGKDGVSFVLVFKLSRFARNAADVLSTLQIMQDYGVNLICVEDGIDSSKDAGKLMISVLSAVAEIERENIRIQTMEGRIQKAREGKWNGGFAPYGYKLEDGKLFINEEEAVAIRTIFDQYVNTTIGANGISKYLENHGIRKIPRQNGKNPLFDAGLIRKILKNPVYNGKIAFGRRTLEKVHGTRNEYKQVEQDEYLISEGIHEAIVSDEVWQAAQVKLKSQAKKYEHVNKGKDTRTHLLSGIVKCPICGVGMFGNKCIKKKKDGTKYKDFYYYGCKHRQMIRGHKCTFSKQIREELLDDAVAEVIVKIVSNPKFASMMQEKINMKVDTSEIEKEIDNYQKELRKSHSTKFKLIEEIDNLDVDDKHYKRRKQDLDDRLYRMYDKIEELESLLIDAKAKKQTIEAEKLTGDNIYKILIYFDKLYKVMNDVERRQLITALISEIQIYEEKQPNGQWLKSITFKLPIIDEDLNIGLDNNEQV

SEQ ID NO: 37727 - DNA, 50 bp, Enterococcus faecalis
  source 1..50: mol_type = genomic DNA
ggtttggacaataatgagcaagttgagacggtagcacttttgtccaaact

SEQ ID NO: 37728 - DNA, 40 bp, Enterococcus faecalis; identical to SEQ ID NO: 37708
  source 1..40: mol_type = genomic DNA

SEQ ID NO: 37729 - DNA, 50 bp, Enterococcus faecalis
  source 1..50: mol_type = genomic DNA
ggtttggacaataatgagcaagttgggacggtagcacttttgtccaaact

SEQ ID NO: 37730 - DNA, 40 bp, Enterococcus faecalis; identical to SEQ ID NO: 37710
  source 1..40: mol_type = genomic DNA

SEQ ID NO: 37731 - protein, 549 aa, Enterococcus faecalis
MSKEKIKVYLYTRVSTSIQIEGYSLEAQKSRMKAFAIYNDYEIVGEYEDAGKSGKSIEGRKQFNRMMEDIKSGKDGVSFVLVFKLSRFARNAADVLSTLQIMQDYGVNLICVEDGIDSSKDAGKLMISVLSAVAEIERENIRIQTMEGRIQKAREGKWNGGFAPYGYKLEDGKLFINEEEAVAIRTIFDQYVNTTIGANGISKYLENHGIRKIPRQNGKNPLFDAGLIRKILKNPVYNGKIAFGRRTLEKVHGTRNEYKQVEQDEYLISEGIHEAIVSDEIWQAAQVKLKSQAKKYEHVNKGKDTRTHLLSGIVKCPICGVGMFGNKSIKKKKDGTKYKDYYYYGCKHRQMIRGHKCTFSKQIREELLDDAVAEVIVKIVSNPKFASMMQEKINMKVDTSEIEKEIDNYQKELRKSHSTKFKLIEEIDNLDVEDKHYKRRKQDLDDRLYRMYDKIDELESSLIDAKAKKQTIEAEKLTGDNIYKVLIYFDKLYKVMNDVERRQLITALISEIQVYEEKQPNGQWLKSITFKLPIIDDDLNISLDNNEQV

SEQ ID NO: 37732 - DNA, 50 bp, Enterococcus faecalis
  source 1..50: mol_type = genomic DNA
agtttggacaataatgaacaagttgagacggttgctttattgtccaaact

SEQ ID NO: 37733 - DNA, 40 bp, Enterococcus faecalis; identical to SEQ ID NO: 37708
  source 1..40: mol_type = genomic DNA

SEQ ID NO: 37734 - DNA, 50 bp, Enterococcus faecalis
  source 1..50: mol_type = genomic DNA
agtttggacaataatgaacaagttgggacggttgctttattgtccaaact

SEQ ID NO: 37735 - DNA, 40 bp, Enterococcus faecalis; identical to SEQ ID NO: 37710
  source 1..40: mol_type = genomic DNA

SEQ ID NO: 37736 - protein, 549 aa, Enterococcus faecalis
MSKEKIKVYLYTRVSTSIQIDGYSLEAQKSRMKAFALYNDYEIVGEYEDAGKSGKSIEGRIQFTRMMEDIKSGKDGVSFVLVFKLSRFARNAADVLSTLQIMQDFGVNLICVEDGIDSSKDAGKLMISVLSAVAEIERENIRVQTMEGRIQKAREGKWNGGFAPYGYQLIDGKLLINEEEAIAIRTIFDQYVNTSIGANGLSKYLENHGIRKIPRQNGKNPLFDAGLIRKILKNPVYNGKIAFGRRTLEKVHGTRNEYRQVEQDDYLVAEGIHEAIIPDELWQAAQVKLKAQAKKYEHVNKGKNMRTHLLSGIVKCPICGAGMFGNKSIKYKKDGTKYKDFYYYGCKHRLMNRGHKCTYNKQIREELLDDAVAEVIIKLVSNPKFASMMQEKINMKVDTSAIENEIDNYQKELRKSHSTKFKLIEEIDNLDVDDKHYKRRKQDLDDRLYRMYDKIEELEGQLIEAKAKKETIEAEKLTGDNIYKVLIYFDKLYKVMNDVERRQLIEALISEIQIYEEKQPNGQWLKSITFKLPIIDEDLNISLDNDEQV

SEQ ID NO: 37737 - DNA, 50 bp, Enterococcus faecalis
  source 1..50: mol_type = genomic DNA
agtttggacaatgatgaacaagttgagacggtagcactattgtccaaact

SEQ ID NO: 37738 - DNA, 40 bp, Enterococcus faecalis; identical to SEQ ID NO: 37708
  source 1..40: mol_type = genomic DNA

SEQ ID NO: 37739 - DNA, 50 bp, Enterococcus faecalis
  source 1..50: mol_type = genomic DNA
agtttggacaatgatgaacaagttgggacggtagcactattgtccaaact

SEQ ID NO: 37740 - DNA, 40 bp, Enterococcus faecalis; identical to SEQ ID NO: 37710
  source 1..40: mol_type = genomic DNA

SEQ ID NO: 37741 - protein, 568 aa, Vibrio cholerae
MSRPVKAYSYIRFSTPKQAQGDSYRRQLQQAMDYCAEHNLQLDDKTIDDFGTSAFRGANMSEGALGRFVDAVKHGEIEQGSYLLVESVDRLSRQAVEEALEQFLAIVRAGIVIVTLSDKQVFRRGQVDFTKLIVSIVYMARANDESEMKSRRSRAAWSNGREQARKNNKVIANSRLPSWLTRDGEQIVPIPERVAIVNEMFEMAKSGCGYEQIAKVFLEKGYKTFGKEADWRPAGIQAVIKSQAVIGVFQPHVIENGHRVPADEPILGYYPTIVSPALFEEVQHLISKRNKHSGSYRKGTFNNLFSGVLRCQCGESLRYQNKGRAGSPRNYLVCPKQNTAGCKLPNMLYDKVEPQLLQAVFLLNKVMKQRVEGEDKTIALRTMLAELRVQLEVETQKRKKAAQLVLDNDNDADYRVLFEQCKKKTQALEEQIQRAESDLMSRELSVKTLQYIVDPEDLKSTEQRQRFNGQLKTALKEIRFRFDGGYLWAEYMDIDGGRVLTQIFEDKLAGSSIYDGSSYLVRKTQTEAPYGVDPSVMQQEMDDYIRNLQKNDDGTDPDFEDLSSEYSK

SEQ ID NO: 37742 - DNA, 50 bp, Vibrio cholerae
  source 1..50: mol_type = genomic DNA
ttcggctctttcactaagaacagctcgcagtttttgggggaaatgccgta

SEQ ID NO: 37743 - DNA, 40 bp, Vibrio cholerae
  source 1..40: mol_type = genomic DNA
acgggcttttttcatggtgtcgcagttcggaatgccatac

SEQ ID NO: 37744 - DNA, 50 bp, Vibrio cholerae
  source 1..50: mol_type = genomic DNA
ttcggctctttcactaagaacagcgtgcagtttttgggggaaatgccgta

SEQ ID NO: 37745 - DNA, 40 bp, Vibrio cholerae
  source 1..40: mol_type = genomic DNA
acaggtttttttccttgtggtggagttcaggctgcagtac

SEQ ID NO: 37746 - protein, 470 aa, Phycicoccus dokdonensis
MLAYSGAMRNEGTRQAVIYCRQSQDTEKTGAAVERQEEACRALALARGWDVVEVVRDNAVSASKGKTRPGWERVLELVEAGRADVIVAWHMDRITRTTLDLERLITLVERSGAAIATATGDLDLTTDQGRMVARILAAVARGEVERKAARQSFAERKRAESGKARWSRRPFGYEKGGVLREVEAERLRWAYRQILGGARVSTIVRAFNEDEVKTATGSAWTTQAMGKLLRDPRNAGLLRYQGEVLGAGSWEPILPEDQWRVAVARMERPEFKSGGARGTSGAWLVKVATCAECEGRVFTVKRSGSEVRNYTCQRGCIFLPQEWVEGRVYLALAEILHNPENARHWRLQAEHDSEDSAALRAELAVLDERQRTLADDYATGLLTRAQMLSGTDRVRARMTEVGEELDQLGAGAGLDRLNLDPEYVAQELEAMQPDEVRELLRAVTQRVVLHRRGKGSRAGLRPELVEVVAR

SEQ ID NO: 37747 - DNA, 50 bp, Phycicoccus dokdonensis
  source 1..50: mol_type = genomic DNA
gacccaagcaagcgagcttgcttgctcaacaatgctcgcttacagtggtg

SEQ ID NO: 37748 - DNA, 40 bp, Phycicoccus dokdonensis
  source 1..40: mol_type = genomic DNA
ccaccacggcgtcctcttcctcgacgaggcccccgagttc

SEQ ID NO: 37749 - DNA, 50 bp, Phycicoccus dokdonensis
  source 1..50: mol_type = genomic DNA
gacccaagcaagcgagcttgcttggccaacaatgctcgcttacagtggtg

SEQ ID NO: 37750 - DNA, 40 bp, Phycicoccus dokdonensis
  source 1..40: mol_type = genomic DNA
gcactagggcgtcctcctcgccctcgtggccccccagacc

SEQ ID NO: 37751 - protein, 531 aa, Solobacterium sp
MIRQSDRITALYCRLSRDDELQGESNSIVNQKRILQAYAEENQFFNCEFFIDDGYSGTNFDRPGYRKMMDLVDKGRISTIIVKDHSRIGRDRIVVGDLLEKTLAEKGVRYIAINDHIDSLDGLDELLPFRDLFNEWYVRDISKKIRASMKAKGKSGEHLTTNAPYGYRKDPADRGKWIVDEVAANTVKHIFRLCLDGYGPSQIAAILHSERIETPSVHSRNMGINHPAKIQDDPYNWNPDCVADILDRIEYLGHTVNFRTEKLNYKSKKTVNKDQKDWMIFENTHPSIISEEDFRRVQEFRKSKRRPAKTGKTNMFSGYIYCADCGSKLYYCTTNKFEERQDFFCCANYRSNKGTCSAHYIRAVVLEQIVLKAVNETLELVKCHEKEFRDNYHSRQKSLKDEEIKALKKDISSAEKRLSELGNLFRKIYEDNASGKISDEEFELLANSYRKEQSDLQSKLTISRKKLEAQETNADKINTFISKAKGYTELEKVTPKALSDLVSRIIVSAPEKVDGHRTQKVKVIFTCDDLV

SEQ ID NO: 37752 - DNA, 50 bp, Solobacterium sp
  source 1..50: mol_type = genomic DNA
atacttctttattcggaaggctcatgtgagcgatcctgataaagaagtat

SEQ ID NO: 37753 - DNA, 40 bp, Solobacterium sp
  source 1..40: mol_type = genomic DNA
agaaaacaaaaggtgcggctgcccgcaccttttattgtta

SEQ ID NO: 37754 - DNA, 50 bp, Solobacterium sp
  source 1..50: mol_type = genomic DNA
atacttctttattcggaaggctcaattgagcgatcctgataaagaagtat

SEQ ID NO: 37755 - DNA, 40 bp, Solobacterium sp
  source 1..40: mol_type = genomic DNA
agaaaaaaaaaagtgtggcatcaaccacttttttgtgttt

SEQ ID NO: 37756 - protein, 588 aa, Bacteroides dorei
MKRAALLLRCSTDAQDYERQKLDLLDTIKGMGYTTSDDLVFGQYITGKDDVRKKDRESVAECKQAVREGKVDAIFINEVSRLSRDSIAGRLFIREFNDEYKIPVYFRDLGMWTINPTTRIVDRSFETMLGFHFDMAQNELKSMKTRFASGKRKNAREGKTIGGAVPFGFYKDEDGKLQVDEEQAQVVRLVYNKYLEDGGSIPSVCRYLLSCGYDKKFNKKFGTGSVRNLLRERRYIGEQRYNLVNPDEPDEAKKQEVYIYKVDSIIDTTIYNKVQIKLDKNRTTETKKVNKDKKVHLLAKLITCPICGDSYTSKTASANKSGERYRIWNYCCVSKYNFSECTSDITLNADNIESIIWQLTKKEILALQELSLEERQSKIEEAEQKLASYKDELDVVAKSIDKLNAKKKKLVALFLDIEDDDTAIFNEQREAINKEIDSYNNRIQFLNTEITICEGNIARFKEADFTDEVLDKIEQDLLKKKELIKEYIKVIRPYRLTKARLILEVESKQTNYCILFEPRNSKRRCWYIQSSLAQWQNGLLKTSTAPLGNFFYIPMASLLLDEPDDLDAIASFEDMKEICSINNYVIEY

SEQ ID NO: 37757 - DNA, 50 bp, Bacteroides dorei
  source 1..50: mol_type = genomic DNA
gactgtcatcattatcagcaggtttcaacaccgtgctaatcattacagtt

SEQ ID NO: 37758 - DNA, 40 bp, Bacteroides dorei
  source 1..40: mol_type = genomic DNA
tcctcttcagatgcaggtttcatgtttgtataaacggtct

SEQ ID NO: 37759 - DNA, 50 bp, Bacteroides dorei
  source 1..50: mol_type = genomic DNA
gactgtcatcattatcagcaggttcaaacaccgtgctaatcattacagtt

SEQ ID NO: 37760 - DNA, 40 bp, Bacteroides dorei
  source 1..40: mol_type = genomic DNA
tgcttttcatatacaggttcattctttgtttaaaagatat

SEQ ID NO: 37761 - protein, 588 aa, Phocaeicola dorei
MKRAALLLRCSTDAQDYERQKLDLLDTIKGMGYTTSDDLVFGQYITGKDDVRKKDRESVAECKQAVREGKVDAIFINEVSRLSRDSIAGRLFIREFNDEYKIPVYFRDLGMWTINPTTRIVDRSFETMLGFYFDMAQNELKSMKTRFASGKRKNAREGKTIGGAVPFGFYKDEDGKLQVDEEQAQVVRLVYNKYLEDGGSIPSVCRYLLSCGYDKKFNKKFGTGSVRNLLRERRYIGEQRYNLVNPDEPDEAKKQEVYIYKVDAIIDTTIYNKVQIKLDKNRTTETKKVNKDKKIHLLAKLITCPICGDSYTSKTASANKSGERYRIWNYCCVSKYNFSECTSDITLNADNIESIIWQLTKREILALQELSLEERQSKIDEAEQKLASYKDELDVIAKSIDKLNVKKKKLVALFLDIEDDDTAIFNEQREAINKEIDSYNNRIQFLNTEITICEGNIARFKEADFTDEVLDKIEQDLLKKKELIKEYIKVIRPYRLTKARLILEVESKQTNYCILFEPRNSKRRCWYIQSSLAQWQNGLLKTSTAPLGNFFYIPMASLLLDEPDDLDAIASFEDMKEICSINNYVIEY

SEQ ID NO: 37762 - DNA, 50 bp, Phocaeicola dorei
  source 1..50: mol_type = genomic DNA
gactgtcgtcattatcagcaggtttcaacaacctgctaattattacagtt

SEQ ID NO: 37763 - DNA, 40 bp, Phocaeicola dorei; identical to SEQ ID NO: 37758
  source 1..40: mol_type = genomic DNA

SEQ ID NO: 37764 - DNA, 50 bp, Phocaeicola dorei
  source 1..50: mol_type = genomic DNA
gactgtcgtcattatcagcaggttcaaacaacctgctaattattacagtt

SEQ ID NO: 37765 - DNA, 40 bp, Phocaeicola dorei; identical to SEQ ID NO: 37760
  source 1..40: mol_type = genomic DNA

SEQ ID NO: 37766 - protein, 588 aa, Phocaeicola vulgatus
MKRAALLLRCSTDAQDYERQKLDLLDTIKGMGYTTSDDLVFGQYITGKDDVRKKDRESVAECKQAVREGKVDAIFINEVSRLSRDSIAGRLFIREFNDEYKIPVYFRDLGMWTINPTTRIVDRSFETMLGFHFDMAQNELKSMKTRFASGKRKNAREGKTIGGAVPFGFYKDEDGKLQVDEEQAQVVRLVYNKYLEDGGSIPSVCRYLLSCGYDKKFNKKFGTGSVRNLLRERRYIGEQRYNLVNPDEPDEAKKQEVYIYKVDAIIDTTIYNKVQIKLDKNRTTETKKVNKDKKIHLLAKLITCPICGDSYTSKTASANKSGERYRIWNYCCVSKYNFSECTSDITLNADNIESIIWQLTKREILALQELSLEERQSKIDEAEQKLASYKDELDVIAKSIDKLNVKKKKLVALFLDIEDDDTAIFNEQREAINKEIDSYNNRIQFLNTEITICEGNIARFKESDFTDEVLDKIEQDLLKKKELIKEYIKVIRPYRLTKARLILEVESKQTNYCILFEPRNSKRRCWYIQSSLAQWQNGLLKTSTAPLGNFFYIPMASLLLDEPDDLDAIASFEDMKEICRINNYVIEY

SEQ ID NO: 37767 - DNA, 50 bp, Phocaeicola vulgatus
  source 1..50: mol_type = genomic DNA
gactgtcatcattatcagcaggtttcaacaacctgctaattattacagtt

SEQ ID NO: 37768 - DNA, 40 bp, Phocaeicola vulgatus; identical to SEQ ID NO: 37758
  source 1..40: mol_type = genomic DNA

SEQ ID NO: 37769 - DNA, 50 bp, Phocaeicola vulgatus
  source 1..50: mol_type = genomic DNA
gactgtcatcattatcagcaggttcaaacaacctgctaattattacagtt

SEQ ID NO: 37770 - DNA, 40 bp, Phocaeicola vulgatus; identical to SEQ ID NO: 37760
  source 1..40: mol_type = genomic DNA

SEQ ID NO: 37771 - protein, 565 aa, Phocaeicola vulgatus
MKRAALLLRCSTDAQDYERQKLDLLDTIKGMGYTTSDDLVFGQYITGKDDVRKKDRESVAECKQAVREGKVDAIFINEVSRLSRDSIAGRLFIREFNDEYKIPVYFRDLGMWTINPTTRIVDRSFETMLGFHFDMAQNELKSMKTRFASGKRKNAREGKTIGGAVPFGFYKDEDGKLQVDEEQAQVVRLVYNKYLEDGGSIPSVCRYLLSCGYDKKFNKKFGTGSVRNLLRERRYIGEQRYNLVNPDEPDEAKKQEVYIYKVDAIIDTTIYNKVQIKLDKNRTTETKKVNKDKKIHLLAKLITCPICGDSYTSKTASANKSGERYRIWNYCCVSKYNFSECTSDITLNADNIESIIWQLTKREILALQELSLEERQSKIDEAEQKLASYKDELDVIAKSIDKLNVKKKKLVALFLDIEDDDTAIFNEQREAINKEIDSYNNRIQFLNTEITICEGNIARFKESDFTDEVLDKIEQDLLKKKELIKEYIKVIRPYRLTKARLILEVESKQTNYCILFEPRNSKRRCWYIQSSLAQWQNGLLKTSTAPLGNFFYIPMASLLLDDQMI

SEQ ID NO: 37772 - DNA, 50 bp, Phocaeicola vulgatus; identical to SEQ ID NO: 37767
  source 1..50: mol_type = genomic DNA

SEQ ID NO: 37773 - DNA, 40 bp, Phocaeicola vulgatus; identical to SEQ ID NO: 37758
  source 1..40: mol_type = genomic DNA

SEQ ID NO: 37774 - DNA, 50 bp, Phocaeicola vulgatus; identical to SEQ ID NO: 37769
  source 1..50: mol_type = genomic DNA

SEQ ID NO: 37775 - DNA, 40 bp, Phocaeicola vulgatus; identical to SEQ ID NO: 37760
  source 1..40: mol_type = genomic DNA

SEQ ID NO: 37776 - protein, 588 aa, Phocaeicola vulgatus; identical to SEQ ID NO: 37761

SEQ ID NO: 37777 - DNA, 50 bp, Phocaeicola vulgatus; identical to SEQ ID NO: 37767
  source 1..50: mol_type = genomic DNA

SEQ ID NO: 37778 - DNA, 40 bp, Phocaeicola vulgatus; identical to SEQ ID NO: 37758
  source 1..40: mol_type = genomic DNA

SEQ ID NO: 37779 - DNA, 50 bp, Phocaeicola vulgatus; identical to SEQ ID NO: 37769
  source 1..50: mol_type = genomic DNA

SEQ ID NO: 37780 - DNA, 40 bp, Phocaeicola vulgatus; identical to SEQ ID NO: 37760
  source 1..40: mol_type = genomic DNA

SEQ ID NO: 37781 - protein, 546 aa, Enterococcus faecalis
MQSDFQTNRVAIYCRLSKDDEFKKGESASIQNQRDMLIDYCKQRNWTIADIYVDDGYTGLNIDRPDFQRMLVDIKAKKIDTVITKDLSRLGRNYLQTGKFTEEFFPKNGVRYIAVNDGVDTNQDNNEIVPFKNVLNEFYSRDVSKKMKSAYYTRAKQGKFTGCLAPFGYKKDENNPHLLVIDEETSWIVEKIFDYAARGYGVQYIRTLLREEKIPTPTWWNRKKGLRNAVTKWEKTMEGGEYVWDCTTLTEMIQNPVYLGHIASQKANHKFKIGWISDKPQEEWLVVEDMHEALIDEDTFEIANEKLKSRKRPFKTGELSLFAGLIKCPDCGKSLNLARNNSKKKEKLFTCNTYRRYGKDFCSQHRIMYDEVYRVVLEDIRSNAKLALKDEKEVLKILELNQEEELDSQVVLAGQMIEEDSLRYKELETKVERLYDDWIDKRINETNFNRLMEKTQKEQDILLERIKVNEEKIKNSESKDINISKWIESIKKYQNIKKLDRHILNELIDKIFVYEKEIIDGEVVQTVEIFYNFLLNTKELNIKYRL

SEQ ID NO: 37782 - DNA, 50 bp, Enterococcus faecalis
  source 1..50: mol_type = genomic DNA
taccgcctctaagtagggataaagcaattgatggctaaataaagagggca

SEQ ID NO: 37783 - DNA, 40 bp, Enterococcus faecalis
  source 1..40: mol_type = genomic DNA
gccaacgcttggcaagaaacaattaatgcccctttgattt

SEQ ID NO: 37784 - DNA, 50 bp, Enterococcus faecalis
  source 1..50: mol_type = genomic DNA
taccgcctctaagtagggataaagacattgatggctaaataaagagggca

SEQ ID NO: 37785 - DNA, 40 bp, Enterococcus faecalis
  source 1..40: mol_type = genomic DNA
gctaacccttgggaagaaaacatgaatgaaattttgaaat

SEQ ID NO: 37786 - protein, 536 aa, Blautia obeum
MLRQTNQQPITALYPRLSHEDELQGESNSISNQKRILETYAKQNGFSNLRWYTDDGYSGANFQRPGFQAMLADIEAGKVGTVIVKDMSRLGRNYLQVGMYTEMIFPQKGVRFIAINDGVDSAQGDNDFAPLRNIFNEWLVRDTSKKIKAVKRSKGMSGKPITSKPVYGYLMDEDENFIIDEEAAPVVKQIYNLCLAGNGPTKIARMLTEQQIPTPGTLEYRRTGSTRRYHPGYECKWATNTVVHILENREYTGCLVNFKTEKLSYKVKHSVENPLEKQVIFENHHEPIIDTQTWERVQELRKQRKRPNRYDEVGLFSGILFCADCGSVMYQQRYQTDKRKQDCYICGNYKKRTHDCTAHFIRTDLLTAGVLSNLRKVTSYAAKHEARFMKLLIEQNEDGGKRRNAAKKKELEAAEKRIAELSAIFKRLYEDSVTGRISDERFTELSADYEAEQRELKERAAAIQAELSKAQEATVNAEKFMNVVRRHTSFEELTPTLLREFVEKIVVHECSYDENKTRRQDIEIYYSFVGKVDLPE

SEQ ID NO: 37787 - DNA, 50 bp, Blautia obeum
  source 1..50: mol_type = genomic DNA
ttacttctttatctcacttgagcaaatgctcatgtgccataaagtaacac

SEQ ID NO: 37788 - DNA, 40 bp, Blautia obeum
  source 1..40: mol_type = genomic DNA
caacgacaatccgggcgcaaagagccagggcatgaagcag

SEQ ID NO: 37789 - DNA, 50 bp, Blautia obeum
  source 1..50: mol_type = genomic DNA
ttacttctttatctcacttgagcaattgctcatgtgccataaagtaacac

SEQ ID NO: 37790 - DNA, 40 bp, Blautia obeum
  source 1..40: mol_type = genomic DNA
ccagaacagtctgggcgccatgagcagtggcaggaagcag

SEQ ID NO: 37791 - protein, 552 aa, Eubacterium callanderi
MNQQPDVSPNGGKITALYCRLSQDDALDGESNSITNQKALLSKYAADHGFRNTRFFVDDGFSGTSFQRPGFQEMMRYVEDYSVSAVIVKDLSRLGREYSYMGRLQDFIFPAYDVRFIAINDDVDSAKGENDFAVFKNVFNDYYAKDTSKKIRAVVKMRGEAGEHLASNPPYGYIKDPQDKKKWIVDEEAAKVVQRIFNLCIAGKGPMQIAKILTADRVLTVTAYHARQKGWAMPENLYQWCSKSVAGILERREYTGCTVNFKTYTKSLKFKKRMENPVENQRVFEDTQPAIIEKGQWERVQELRKNKRRPTKTGRTSIFSGLLYCADCGAKLYFCTCNTYKDDSQNHFVCSNYKSNTGSCKIHYIREQVLYRIVLETIRQTLSYVRMFRKDFKLEMLAQDEESRKAELAEKQKALSGAKKRMEDLDRIIQHIYEDNVLGKLSDSRYLKLSRQYEKEQAEIEQLAVVLEREIEAQAGQVSDVNEFLKLVDKYLDIPELNAAILNELVSRIVVHSPVRENGRKHVQIDLYFTYVGQIRIPLKIGRESLNESEPA

SEQ ID NO: 37792 - DNA, 50 bp, Eubacterium callanderi
  source 1..50: mol_type = genomic DNA
ttacttccttatgggacgctgcctaaaggcagaggagcataaagaagtat

SEQ ID NO: 37793 - DNA, 40 bp, Eubacterium callanderi
  source 1..40: mol_type = genomic DNA
ttaaaaagaagatgcggcaaaacgccgcatcttctttttt

SEQ ID NO: 37794 - DNA, 50 bp, Eubacterium callanderi
  source 1..50: mol_type = genomic DNA
ttacttccttatgggacgctgcctcaaggcagaggagcataaagaagtat

SEQ ID NO: 37795 - DNA, 40 bp, Eubacterium callanderi
  source 1..40: mol_type = genomic DNA
tcaaaaagaggaagagacacaacgtttcattttctttctt

SEQ ID NO: 37796 - protein, 546 aa, Roseburia hominis
MNREGKKCVLYPRVSTEMQVDGYSLEGQKNGLKRFADREEMEIVGIYEDAGKSGKSIEGRPAFKKMLSDIGNGLEIDYILVYKLSRFGRNAADILNSLEYVQSYGVNLICIEEGIDSSQTSGKLLISVLSAVAEIERENIIEQTMNGRREKARQGGWNGGFAPYGYYLKDNQLLIEESEAAAIRIIFEKFAGSDIGYGGIAKYLNLQGIKKIPRQNGTLENWSGHLVRQILDNPVYCGKIAYGRRTREKVKGTKNEYKQVHAEDYILEDGQHEGIVSEELWQKVHAKRVATGIKQPSKTGKDRSHLLTGVLKCPLCGSPMYTNKHAWTNKDGTYKEVYYYICGRNKQERGHYCEYKASLRKTDIEPLVIEAIRELVSDKSFAKEIKKRFGVQTDTSKIDKELANYESKLKEVDLNKARLEREIDNLPADAKYRERKIHDMTIRLDGLYDTIVELEERIEDAKLRRSSIEMEAITLENVYRIMENFSKLYAIISDEEKKSLVSYLIKEIQIYPNGTSDRILKSIEFNFPIYRDGREIRKLLWENGNT

SEQ ID NO: 37797 - DNA, 50 bp, Roseburia hominis
  source 1..50: mol_type = genomic DNA
ttttgtgggaaaacggtaataccgtggagacggttgtacttctttcccac

SEQ ID NO: 37798 - DNA, 40 bp, Roseburia hominis
  source 1..40: mol_type = genomic DNA
tttccgtggacgaaacatgttgagtcggtagttctgatgc

SEQ ID NO: 37799 - DNA, 50 bp, Roseburia hominis
  source 1..50: mol_type = genomic DNA
ttttgtgggaaaacggtaataccggagagacggttgtacttctttcccac

SEQ ID NO: 37800 - DNA, 40 bp, Roseburia hominis
  source 1..40: mol_type = genomic DNA
attccgtggatgaaaaaatgagacagggtagttcagaggc

SEQ ID NO: 37801 - protein, 564 aa, Coprococcus comes
MSMKQVQVLEATKAAPNSKGRRTAGIQIERIRVAAYCRVSTDGDEQLGSFESQKAYYEQKIKQNKEWVSAGIFADEAITGTKVDKREGFQEMIRKCQNGEIDMILTKSISRFSRNTQDIIKYVRMLRDRNIAIVFEKENINTLDMNGEMLLTILSSLSQGEVESLSENVKMGLKMKMKRGELVGFNGCLGYDYHPDTKSITVNEQEAETVRFIYDMYLQGYGSSTIAKRLTEMGVKNKRGTVEWHDHGVMGIIKNEKYKGDILLGKTFTVDPISKRRLANMGEEDRYYIRDHHEPIVSREVWDKADEIRLKRVKPRLMENTGNRERYTRQFTFSSMLECGYCDHKLSRRTRHQTTTTKKPVWQCMNAIKNGISSCPNCKAIDEVIVENAFVDAFQLLADNFDDVFDSVLNTIEDVLKDDTELKRVKQLEKDINSIETKKSRLTDLLIDGKIEQEDYDEKKLSFQRKLHQMTEEKAYLEENIGQQKNVSKRMDQLRKTLENEDILDEFDRIVFESIVEKVIVGGYDENGNLSPYKLTFVLKCNQDLKVNDAKAEYRSKQKGKKVS

SEQ ID NO: 37802 - DNA, 50 bp, Coprococcus comes
  source 1..50: mol_type = genomic DNA
taccgatacatgttgagacggttgtactgctttcccacaaaaagccagac

SEQ ID NO: 37803 - DNA, 40 bp, Coprococcus comes
  source 1..40: mol_type = genomic DNA
gtgcatgtagagacggttgttcttttgtcccaactgaaac

SEQ ID NO: 37804 - DNA, 50 bp, Coprococcus comes
  source 1..50: mol_type = genomic DNA
taccgatacatgttgagacggttgacctgctttcccacaaaaagccagac

SEQ ID NO: 37805 - DNA, 40 bp, Coprococcus comes
  source 1..40: mol_type = genomic DNA
ctacatgtagataagattgaccctgtgttcaaactgaagc

SEQ ID NO: 37806 - protein, 547 aa, Anaerotruncus rubiinfantis
MLDQQKITVLYCRLSNEDALDGESNSIANQKAILTKYAKEHGFINIRIFVDDGYTGTNFNRPGIQEALSLVEQGLVENFIVKDMSRFGRDYLQVGQYTELVFPSYDVRFIAIHDGVDSAKGDNDFTPFRNLFNDFYAKDTSKKVRSVMRAKGNSGKHLGSPPYGYRTDPEDKHHWLIDEEAAPVIRRIFDLTIDGNGPTKIARILEQDQVLTTKALYAKQKGKPLPEKPYRWNENSVVGILERIEYTGCTCNFKTYSKSYKLKKRIANHPENMAIFPNTQEAIITQAQFDRVQELRKNKRRPTKADRQGLFSGLLFCPDCGNKLHFATCKSFDGKQDHYVCSSYKSNRGTCTAHYIREETLRDLILERIRAVCDYIRSDVDGFQEEWLQCRRTDQEKSILEDQRKIAKAKKRLADLDVLITRIYEDAVLGNLSQERYQKMSQSYEEEQERLKLKIEVTEEWVDQQMELEDNLDAFLALTEKYVDVQELTPTIVNEFIKKILVYAPDKSSGKRKQRVRIFFNFLDEVEIPAVFEPIIYERPTKNRKTA

SEQ ID NO: 37807 - DNA, 50 bp, Anaerotruncus rubiinfantis
  source 1..50: mol_type = genomic DNA
atagttacttgccactattaagcgttggcttaacagtgataaggaactaa

SEQ ID NO: 37808 - DNA, 40 bp, Anaerotruncus rubiinfantis
  source 1..40: mol_type = genomic DNA
cgaaaaagctccgcaaacttttggtttgcggagctttttt

SEQ ID NO: 37809 - DNA, 50 bp, Anaerotruncus rubiinfantis
  source 1..50: mol_type = genomic DNA
atagttacttgccactattaagcgctggcttaacagtgataaggaactaa

SEQ ID NO: 37810 - DNA, 40 bp, Anaerotruncus rubiinfantis
  source 1..40: mol_type = genomic DNA
ggaaaaaaatctgcaaactcttggtcagcacagcattttg

SEQ ID NO: 37811 - protein, 503 aa, Enterocloster clostridioformis
MNNRIDAVYARQSVDKKDSISIESQIEFCKYELKGGSCKEYTDKGYSGKNTDRPHFQELIRDIQKGLIAKVVVYKLDRISRSILDFSNMMELFQQYDVEFVSSTEKFDTSTPMGRAMLNICIVFAQLERETIQKRVTDAYYSRSQRGFKMGGKPPYGFHTEPIVMEGIHTKKLVVNQEEAAHIRLMFEMYAEPKTSYGDITRYFAEQGILFYGKELIRPTLAQMLRNPVYVQSDLDVYEFFKSQGTAIVNDAGDFSGMNGCYLYQGRDVKPDKLHNLKDQMLVLAPHEGIVPSDIWLACRRKLMNNMKIQSARKATHTWLAGKIKCGNCGYALMSIVNRVGKQYLRCTKRLDNKSCVGCGKIYTAELETVVYQQMVKKLEGYKTLTGRKKAEKANPKIAALQVELARVDSEIEKLVDSLTGANNVLLSYVNVKIAELDSRKQELVKKIAELTVDTISPEQVKQVSGYLDTWDSVSFDDKRRVVDLLITTIAATSDKLNITWKI

SEQ ID NO: 37812 - DNA, 50 bp, Enterocloster clostridioformis
  source 1..50: mol_type = genomic DNA
gtgtagtcccttgtaaactgtactttaggtcagtttacaaggaactacat

SEQ ID NO: 37813 - DNA, 40 bp, Enterocloster clostridioformis
  source 1..40: mol_type = genomic DNA
atgctcgtaatagtcaccattgctagagtaaaaatactaa

SEQ ID NO: 37814 - DNA, 50 bp, Enterocloster clostridioformis
  source 1..50: mol_type = genomic DNA
gtgtagtcccttgtaaactgtactcgaggtcagtttacaaggaactacat

SEQ ID NO: 37815 - DNA, 40 bp, Enterocloster clostridioformis
  source 1..40: mol_type = genomic DNA
atgatcgtagtagaaaccccgtctctactaaaaatacaaa

SEQ ID NO: 37816 - protein, 603 aa, Vibrio vulnificus
MATTSQINTLTAYIYSRVSKGIQVHGDGIRRQIDSAFRFIETRNRDLMEKGQPTYTIADDLITDKGLSAYRGYNTAANGGLGAFLEAARCGEIKRGSLLVVEAVDRISRMPADESRKTFSLFKEYGIDVAIVKFGIIIKHSESTTLENDLLITAAIHLAHMESQQKSSRINDRFDEKRRLEKLGGEKRTTICPLWMKISEDKKSFELIPDRARVVKRIVDMKLSGIGCHRIATTLNEEGVPYFNGKTWSVRIVMKYCKMVQLYGAFQRVRHVRTENGTKKIPAGELEQGYYPAVIDEPTFLRLKNSFKRSGGRQTGAFSNLFSGLLYCPKCGAAMSYFKPSRGSLKVRCRKQLDKQGCDQRALNYEEIEERLIRALAGLDYAKINNSSFTDLSAELSTLEATIAEIEISADSVVKQISESSNARLIQVLSDKLESLYSEIDSNKAKYNELSLIHSNYDVSIIDSLELTENEDRERYNHFVKQFVKYILCTDKKQGGTLRVVFKADAIGELPFSFSDDDTNDRAVSDVFTSNKAVSSSSTIRAINMDKSSTVYLPILKEITEVKQPSDLSDTRERLKYMHAVRVAVRLNPSKWGEIAKRAQLKY

SEQ ID NO: 37817 - DNA, 50 bp, Vibrio vulnificus
  source 1..50: mol_type = genomic DNA
tgcgatactaatggtaacccaaccaatgaagagggcgtgatagtatcgca

SEQ ID NO: 37818 - DNA, 40 bp, Vibrio vulnificus
  source 1..40: mol_type = genomic DNA
ggcgatggttattccaaccaacgaggaattcgtgatagcc

SEQ ID NO: 37819 - DNA, 50 bp, Vibrio vulnificus
  source 1..50: mol_type = genomic DNA
tgcgatactaatggtaacccaacctttgaagagggcgtgatagtatcgca

SEQ ID NO: 37820 - DNA, 40 bp, Vibrio vulnificus
  source 1..40: mol_type = genomic DNA
tgctaagctcattcccaccttagagtcattggtgatagcc

SEQ ID NO: 37821 - protein, 485 aa, Massiliimalia timonensis
MKGVIYARYSSDNQREESIEGQLRECKEYAERNDIMILGTYIDRALSAKTDNRPEFQHMIKDSAKGLFDVVLVWKLDRFARNRYDSARYKNILKKNGVKVISARENISEGSEGIILEAMLEGYAEYYSAELSEKVIRGLTDNALKCKYNGGTVPMGYYIDEQQYYQIDPKTAPVVLEMFTRYSEGATMQELINLLNSRGMRSIRGGKITLNIMNHLLKNRRYMGEYSYRDVVKEDGIPAIVPKELFERVQERLAKNKKAPARHKAEDDYLLTTKLYCGKCGSFMVGESGTSHTMKVHRYYRCVNTKKKKLCDKKAVKKDWIEDLVVSYTMKAIMNDEVMERLIDTLMELQKRESTDLPLLKKQLAETEKGINNMLNAIQAGILTPSTKQRLDELEETKSQLEISILQEEMHKPMLTREQIAFFIYRFRKFDVTKREQRQRLIDSFVNAVYLYEDKIILTFNYKDGSKTITLAEVEGSDLSVLGAP

SEQ ID NO: 37822 - DNA, 50 bp, Massiliimalia timonensis; identical to SEQ ID NO: 17467
  source 1..50: mol_type = genomic DNA

SEQ ID NO: 37823 - DNA, 40 bp, Massiliimalia timonensis
  source 1..40: mol_type = genomic DNA
agttcaagtcttgtcatccgcaccacgatggagtgacgaa

SEQ ID NO: 37824 - DNA, 50 bp, Massiliimalia timonensis
  source 1..50: mol_type = genomic DNA
ggttcggatttatccgtactcggtgaaccagataatgataatccgaaccc

SEQ ID NO: 37825 - DNA, 40 bp, Massiliimalia timonensis
  source 1..40: mol_type = genomic DNA
agtcaaagtcttgtcttcagacccaggagagggtgacaaa

SEQ ID NO: 37826 - protein, 506 aa, Escherichia albertii
MRTAITYLRFSSAIQGVEGADSTRRQNDLFKQWLKKNSDARIIASFSDEGLSGYKGKHLTGQFGDMLSRIEAGEFPEGTILLVEAIDRTGRLEHLETEALMNRILGNGIEIHTLQDGLIYTKDALADDLGISIIQRVKAYLAHQESKQKSFRVSQKWEQRAKLALAGEQRLTKMVPGWIDPETFKLNEHAETVRLIFKLLLDGESLHNIARHLQSNGIKSFSRRKDANGFSVHSVRTILRSETTIGTLPASQRNDRPAIPNYYEAAIDALTFSKAQEILDKNRKGRTPASNNPRTINIFKGLFRCECGATVHPTGVKNTYEGVYRCCRRFDGRCDIPQLKRKPFDKWMIENLLSMIAVGDDGESERKIASLQHEVEVVTARIKKATALLLEMDDITELKAQVKELNQKRTELQTTIDSMRRKASLTDKKLPQLKDIDLTTKAGRVECQLILSKHLESLTLGRGQVTVKLSNGTEIIVPTDPLPLTDGTAIFEIAEKNLLNIDVFQL

SEQ ID NO: 37827 - DNA, 50 bp, Escherichia albertii
  source 1..50: mol_type = genomic DNA
aaaccgaatagactttattcaaaggtcattgtatcgtagctattcggcat

SEQ ID NO: 37828 - DNA, 40 bp, Escherichia albertii; identical to SEQ ID NO: 30088
  source 1..40: mol_type = genomic DNA

SEQ ID NO: 37829 - DNA, 50 bp, Escherichia albertii
  source 1..50: mol_type = genomic DNA
aaaccgaatagactttattcaaaggccattgtatcgtagctattcggcat

SEQ ID NO: 37830 - DNA, 40 bp, Escherichia albertii
  source 1..40: mol_type = genomic DNA
gagaggcaaatcattaaaggccattaaattgctaggcctt

SEQ ID NO: 37831 - protein, 506 aa, Escherichia albertii
MRSVITYLRYSSTIQGVEGADSTRRQNDLFKQWLKKNSDARIIASFSDEGLSGFKGKHLTGQFGDMLSRIEAGEFPEGTILLVEAIDRIGRLEHLETEALMNRILGNGIEIHTLQDGLIYTKDALADDLGISIIQRVKAYIAHQESKQKSFRVSQKWEQRAKLALAGEQRLTKMVPGWIDPETFKLNEHAETVRLIFKLLLDGESLHNIARHLQSNGIKSFSRRKDANGFSVHSVRTILRSETTIGTLPASQRNDRPAIPNYYEAAIDALTFSKAQEILDKNRKGRTPASDNPRTINIFKGLFRCECGATVHPTGVKNTYEGVYRCCRRFDGRCDIPQLKRKPFDKWMIENLLSMITVGDDGESERKIASLQHEVEVVTARIKKATALLLEMDDITELKAQAKELNQKRTELQTTIDSMRRKASLTDKELPQLKDIDLTTKAGRVECQLILSKHLESLTLGRGQVTVKLSNGTEIIVPTDPLPLTDGTAIFEIAEKNLLNIDVFQL

SEQ ID NO: 37832 - DNA, 50 bp, Escherichia albertii; identical to SEQ ID NO: 37827
  source 1..50: mol_type = genomic DNA

SEQ ID NO: 37833 - DNA, 40 bp, Escherichia albertii; identical to SEQ ID NO: 30088
  source 1..40: mol_type = genomic DNA

SEQ ID NO: 37834 - DNA, 50 bp, Escherichia albertii; identical to SEQ ID NO: 37829
  source 1..50: mol_type = genomic DNA

SEQ ID NO: 37835 - DNA, 40 bp, Escherichia albertii; identical to SEQ ID NO: 37830
  source 1..40: mol_type = genomic DNA

SEQ ID NO: 37836 - protein, 506 aa, Escherichia albertii
MRSVITYLRYSSTIQGVEGADSTRRQNDLFKQWLKKNSDARIIASFSDEGLSGYKGKHLTGQFGDMLTRIEAGEFPEGTILLVEAIDRIGRLEHLETEALMNRILGNGIEIHTLQDGLIYTKDALADDLGISIIQRVKAYIAHQESKQKSFRVSQKWEQRAKLALAGEQRLTKMVPGWIDPETFKCNEHAETVRLIFKLLLDGESLHNIARHLQSNGIKSFSRRKDANGFSVHAVRTILRSETTIGTLPASQRNDRPAIPNYYEAAIDALTFSKAQEILDKNRKGRTPASDNPRTINIFKGLFRCECGATVHPTGVKNTYEGVYRCCRRFDGRCDIPQLKRKPFDKWMIENLLSMIVVGDDGESERKIASLQHEVEVVTARIKKATALLLEIDDITELKTQVKELNQKRTELQTTIDGMRRKASLTDKKLPQLKDIDLTTKAGRVECQLILSKHLESLTLGRGQVTVKLSNGTEIVVPTDPLPLTDGTAIFEIAEKGLLDVDAFQL

SEQ ID NO: 37837 - DNA, 50 bp, Escherichia albertii; identical to SEQ ID NO: 37827
  source 1..50: mol_type = genomic DNA

SEQ ID NO: 37838 - DNA, 40 bp, Escherichia albertii; identical to SEQ ID NO: 30088
  source 1..40: mol_type = genomic DNA

SEQ ID NO: 37839 - DNA, 50 bp, Escherichia albertii; identical to SEQ ID NO: 37829
  source 1..50: mol_type = genomic DNA

SEQ ID NO: 37840 - DNA, 40 bp, Escherichia albertii; identical to SEQ ID NO: 37830
  source 1..40: mol_type = genomic DNA

SEQ ID NO: 37841 - protein, 506 aa, Escherichia albertii
MRSVITYLRYSSTIQGVEGADSTRRQNDLFKQWLKKNSDARIIASFSDEGLSGYKGKHLTGQFGDMLTRIEAGEFPEGTILLVEAIDRIGRLEHLETEALMNRILGNGIEIHTLQDGLIYTKDALADDLGISIIQRVKAYIAHQESKQKSFRVSQKWEQRAKLALAGEQRLTKMVPGWIDPETFKCNEHAETVRLIFKLLLDGESLHNIARHLQSKGIKSFSRRKDANGFSVHAVRTILRSETTIGTLPASQRNDRPAIPNYYEAAIDALTFSKAQEILDKNRKGRTPASNNPRTINIFKGLFRCECGATVHPTGVKNTYEGVYRCCRRFDGRCDIPQLKRKPFDKWMIENLLSMIVVGDDGESERKIAALQHEVEVVTARIKKATALLLEMDDITELKTQVKELNQKRTELQTTIDSMRRKASLTDKKLPQLKDIDLTTKAGRVECQLILSKHLESLTLGRGQVTVKLSNGTEIVVPTDPLPLTDGTAIFEIAEKGLLDVDAFQL

SEQ ID NO: 37842 - DNA, 50 bp, Escherichia albertii
  source 1..50: mol_type = genomic DNA
ataccgaatagactttattcaaaggtcattgtatcgtagctattcggcat

SEQ ID NO: 37843 - DNA, 40 bp, Escherichia albertii; identical to SEQ ID NO: 30088
  source 1..40: mol_type = genomic DNA

SEQ ID NO: 37844 - DNA, 50 bp, Escherichia albertii
  source 1..50: mol_type = genomic DNA
ataccgaatagactttattcaaaggccattgtatcgtagctattcggcat

SEQ ID NO: 37845 - DNA, 40 bp, Escherichia albertii; identical to SEQ ID NO: 37830
  source 1..40: mol_type = genomic DNA

SEQ ID NO: 37846 - protein, 506 aa, Escherichia albertii
MRSVITYLRYSSTIQGVEGADSTRRQNDLFKQWLKKNSDARIIASFSDEGLSGYKGKHLTGQFGDMLTRIEAGEFPEGTILLVEAIDRIGRLEHLETEALMNRILGNGIEIHTLQDGLIYTKDALADDLGISIIQRVKAYIAHQESKQKSFRVSQKWEQRAKLALAGEQRLTKMVPGWIDPETFKCNEHAETVRLIFKLLLDGESLHNIARHLQSNGIKSFSRRKDANGFSVHAVRTILRSETTIGTLPASQRNDRPAIPNYYEAAIDALTFSKAQEILDKNRKGRTPASDNPRTINIFKGLFRCECGATVHPTGVKNTYEGVYRCCRRFDGRCDIPQLKRKPFDKWMIENLLSMIVVGDDGESERKIASLQHEVEVVTARIKKATALLLEMDDITELKTQVKELNQKRTELQTTIDGMRRKASLTDKKLPQLKDIDLTTKAGRVECQLILSKHLESLTLGRGQVTVKLSNGTEIVVPTDPLPLTDGTAIFEIAEKGLLDVDAFQL

SEQ ID NO: 37847 - DNA, 50 bp, Escherichia albertii; identical to SEQ ID NO: 37827
  source 1..50: mol_type = genomic DNA

SEQ ID NO: 37848 - DNA, 40 bp, Escherichia albertii; identical to SEQ ID NO: 30088
  source 1..40: mol_type = genomic DNA

SEQ ID NO: 37849 - DNA, 50 bp, Escherichia albertii; identical to SEQ ID NO: 37829
  source 1..50: mol_type = genomic DNA

SEQ ID NO: 37850 - DNA, 40 bp, Escherichia albertii; identical to SEQ ID NO: 37830
  source 1..40: mol_type = genomic DNA

SEQ ID NO: 37851 - protein, 506 aa, Escherichia albertii
MRSVITYLRYSSTIQGVEGADSTRRQNDLFKQWLKKNSDARIIASFSDEGLSGYKGKHLTGQFGDMLTRIEAGEFPEGTILLVEAIDRIGRLEHLETEALMNRILGNGIEIHTLQDGLIYTKDALADDLGISIIQRVKAYIAHQESKQKSFRVSQKWEQRAKLALAGEQRLTKMVPGWIDPETFKCNEHAETVRLIFKLLLDGESLHNIARHLQSKGIKSFSRRKDANGFSVHAVRTILRSETTIGTLPASQRNDRPAIPNYYEAAIDALTFSKAQEILDKNRKGRTPASNNPRTINIFKGLFRCECGATVHPTGVKNTYEGVYRCCRRFDGRCDIPQLKRKPFDKWMIENLLSMIVVGDDGESERKIAALQHEVEVVTARIKKATALLLEMDDITELKTQVKELNQKRTELQTTIDSMRRKASLTDKKLPQLKDIDLTTKAGRVECQLILSKHLESLTLGRGQVTVKLSNGTEIVVPTDPLPLTDGTAIFEIAEKDLLDIDVFQL

SEQ ID NO: 37852 - DNA, 50 bp, Escherichia albertii; identical to SEQ ID NO: 37842
  source 1..50: mol_type = genomic DNA

SEQ ID NO: 37853 - DNA, 40 bp, Escherichia albertii; identical to SEQ ID NO: 30088
  source 1..40: mol_type = genomic DNA

SEQ ID NO: 37854 - DNA, 50 bp, Escherichia albertii; identical to SEQ ID NO: 37844
  source 1..50: mol_type = genomic DNA

SEQ ID NO: 37855 - DNA, 40 bp, Escherichia albertii; identical to SEQ ID NO: 37830
  source 1..40: mol_type = genomic DNA

SEQ ID NO: 37856 - protein, 525 aa, Bradyrhizobium quebecense
MKAAIYARFSDKDKQTDKSIDDQVALCRTMCERDGLMVVEVYSDHGISGASTVNRLGLQRLMRDAKAGKFAVVVSESLDRISRDQEDLAGIHKRLNFARVEIRTFVDNTVGEIHVGVKGLVGALYLKDLAQKTRRGQAGVVRDGRHNGGRSFGYRPVLGRRGELEIDEAEAQTVRRIFDLYIDGNTPRDIAARLNREHIAGPRGGVWNASTIGGSRTRRNGILQNDLYDGRIIWNRQSFVKDPETGKRISRPNPRDQWITAEAEHLRIIDAKVWQTAQGRVGDRAGTPHKARPTHLLSGLVKCGKCGSGMIACGTDKRGVRLMCSRRRETGLCDNATGVPRVVVEERVLKGIEHHLADPDLVAEYVAEYHRMSRELNSRAAVHIRTLEKRLTTVNTAINRLVDAIVSGTPARAVQDRLAALEAERDEIERERAGVGADPVEFHPNAANAYRLKIRSLKKWLADSGDEARQAAFAGIREIIEKVTIHPRRPGEPVGIEIDGQLAAILRLSDTVTGAGESQGAMVAG

SEQ ID NO: 37857 - DNA, 50 bp, Bradyrhizobium quebecense
  source 1..50: mol_type = genomic DNA
gtcgcagggcgcgatggttgcggggacccgcaacaagcgccccctgcgac

SEQ ID NO: 37858 - DNA, 40 bp, Bradyrhizobium quebecense
  source 1..40: mol_type = genomic DNA
tccgaactttggttgcggggataggatttgaacctatgac

SEQ ID NO: 37859 - DNA, 50 bp, Bradyrhizobium quebecense
  source 1..50: mol_type = genomic DNA
gtcgcagggcgcgatggttgcggggtcccgcaacaagcgccccctgcgac

SEQ ID NO: 37860 - DNA, 40 bp, Bradyrhizobium quebecense
  source 1..40: mol_type = genomic DNA
tccaaactgtcacttgggggttaggatttcaacttatgaa

SEQ ID NO: 37861 - protein, 480 aa, Saccharomonospora cyanea
MARLVGRVRLSRDHEASTSVDRQRETIESYARMHGHDIVGWAEDVDVSGSVSPLEAPELSRWINTPGEWDILCASAMDRLGRTLFGLNDLFRWAADNGKTIAAVRESIDLSTWTGRLVASVLAGVAEGELEAIRERTAGSHRKLRELGRWHGGPTPYGYRPEKTDDGYRLVPEPSEAEIVREIFDRIANRWSVNSVTNDLRARRVPTRRGKLWTNTNVRRLLTGVWVLGQSTHNGRVVTDDHGMPVQVAEPIVDRHMWDQANTVLKDNSRPRRRSHDTGLLLHVLHCHHCGEPMYVNYQHRHDRGTTYVYWRCAGKFKGRNDCRAKAIRGDLIEPAVEELLLDDIGDYEVTEPVFVPGSDNSDELDRVSRAIDTARRENDLGLYEGDEDSYYARITALVERRKALEAEPSQPARWERHGTGETFRQAWQRMDTDDRRQLLIDCGVIVHAAVNPFRMTYYVDIEAVRTRAPDFDPENTSDN

SEQ ID NO: 37862 - DNA, 50 bp, Saccharomonospora cyanea
  source 1..50: mol_type = genomic DNA
gggcgtaatcaccataggaacacggacaccgccgacaagtcaataggcat

SEQ ID NO: 37863 - DNA, 40 bp, Saccharomonospora cyanea
  source 1..40: mol_type = genomic DNA
cgccggcatcaccaccttcgacaccgccgacgtctatgcg

SEQ ID NO: 37864 - DNA, 50 bp, Saccharomonospora cyanea
  source 1..50: mol_type = genomic DNA
gggcgtaatcaccataggaacacggccaccgccgacaagtcaataggcat

SEQ ID NO: 37865 - DNA, 40 bp, Saccharomonospora cyanea
  source 1..40: mol_type = genomic DNA
cgccgccgccaccgccgccgccgccgccgccgtctcggcg

SEQ ID NO: 37866 - protein, 559 aa, Glutamicibacter arilaitensis
MSLIADPVLTPPTKITDIALAPAITYLRVSTKEQATKGGHDEGFSIPAQRAANYAKADSIGATVVKEFVDAGESAKKADRPALKAMIAYVRAHRVAYCIVHKVDRLARNRADDVEIHLALREAGVTLVSATENIDETPSGMLLHGIMSSIAEFYSVNLANEVMKGLVQKASTGGTPMRAPLGYLNTLHRDELGREVRGIKIDEKRAALVKWAFTAYAAGNYSLAQLCKELTKKGLRSVPTPKRQARPLGISTVHRMLQNPYYKGDVVYRGVRYDGAHERLIEPEVWYQVQTMLRSHAQSGVRTQKHDHYLKGTLYCGRCRQRMTIIHAKNRHGNIYPYFICLGRNNKRTDCIMPSAPVDRVEQLVADYYQRITLTPAMTDALRGMLTHEFDQLTAGTNQSIRDLTERRKQILTEQDKLLEAHLADALSLDQLKKFQTRLRAELDGIEAQIAEHHNDYQGARDLIDGALDLARDFASIYERCDEQNKRLANQTFFSRIYLDEGGSLTVDTAAPFEAILDDNTLEQAIAWADQRSETNEKSDVATQDLFLKSGVTTSLIKC

SEQ ID NO: 37867 - DNA, 50 bp, Glutamicibacter arilaitensis
  source 1..50: mol_type = genomic DNA
ggggttacaacatcgctcattaagtgccccaagcgggacgaaactgtaac

SEQ ID NO: 37868 - DNA, 40 bp, Glutamicibacter arilaitensis
  source 1..40: mol_type = genomic DNA
agaggctattttccatttgtgcgcgaggggggacttgaac

SEQ ID NO: 37869 - DNA, 50 bp, Glutamicibacter arilaitensis
  source 1..50: mol_type = genomic DNA
ggggttacaacatcgctcattaagttccccaagcgggacgaaactgtaac

SEQ ID NO: 37870 - DNA, 40 bp, Glutamicibacter arilaitensis
  source 1..40: mol_type = genomic DNA
agaggcaaggtttcacttgttggccaggctggtcttgaac

SEQ ID NO: 37871 - protein, 461 aa, Staphylococcus hominis
MNVAIYCRVSTLEQKEHGYSIEEQERKLKQFCEINDWNVADVFIDAGFSGAKRDRPELQRLMNDIKRFDLVLVYKLDRLTRNVRDLLDLLEIFEQNNVAFRSATEVYDTSTAMGRLFVTLVGAMAEWERETIRERTQMGKLAALKKGIMLTTPPFYYDRVDNKFVPNKYKEVVLFAYEEALKGKSAKSIARKLNNSDIPPPNNRKWEDRSITRALRSPFTRGHFEWGGVYLENNHEPIITEEMYEKVKDRLEERTNTKKIKHVSIFRSKLVCPTCHNKLTMNTHKVTLKDRVYYNKHYYCNNCKETPNLKPVYIRSEEVKRVFYEYLQHQDLTQYDIVEDKEEKEITIDINKIMQQRKRYHKLYANGLMNEDELAELIEETDIAIEEYKKQSENEEVKQYDTEDIKQYKNLLLEMWDISSDEEKAEFIQMAIKNIFIEYVLGKNDNKKKRRSLKIKDIEFY

SEQ ID NO: 37872 - DNA, 50 bp, Staphylococcus hominis
  source 1..50: mol_type = genomic DNA
ttatggaagtatgcacaattaaccaatgtatagtgtgtgtacttccatat

SEQ ID NO: 37873 - DNA, 40 bp, Staphylococcus hominis; identical to SEQ ID NO: 21483
  source 1..40: mol_type = genomic DNA

SEQ ID NO: 37874 - DNA, 50 bp, Staphylococcus hominis
  source 1..50: mol_type = genomic DNA
ttatggaagtatgcacaattaacccttgtatagtgtgtgtacttccatat

SEQ ID NO: 37875 - DNA, 40 bp, Staphylococcus hominis
  source 1..40: mol_type = genomic DNA
ctctgtcatcacatgcacactccatgtctgtgtcccttct

SEQ ID NO: 37876 - protein, 461 aa, Staphylococcus hominis
MNVAIYCRVSTLEQKEHGYSIEEQERKLKSFCEINDWNVADVFVDAGFSGAKRDRPELQRMMNDIKRFDLILVYKLDRLTRNVRDLLDLLEIFEQNNVAFRSATEVYDTSTAMGRLFVTLVGAMAEWERETIRERTQMGKLAALKKGIMLTTPPFYYDRVDNKFVPNKYKEVVLFAYEEALKGKSAKSIARKLNNSDIPPPNNRKWEDRSITRALRSPFTRGHFEWGGVYLENNHEPIITEEMYEKVKDRLEERTNTKKIKHVSIFRSKLVCPVCDSKLTMNTHKVTLKDRVYYNKHYYCNNCKETPNLKPVYIRSEEVERVFYEYLQHQDLTQYDIVEDKEEKEITIDINKIMQQRKRYHKLYANGLMNEDELAELIEETDIAIEEYKKQSENEEVKQYDTEDIKQYKNLLLEMWDISSDEEKAEFIQMAIKNIFIEYVLGKNDNKKKRRSLKIKDIEFY

SEQ ID NO: 37877 - DNA, 50 bp, Staphylococcus hominis
  source 1..50: mol_type = genomic DNA
ttatggaagtatgcacaatcaaccaatgtatagtgtgtgtacttccatat

SEQ ID NO: 37878 - DNA, 40 bp, Staphylococcus hominis
  source 1..40: mol_type = genomic DNA
ctatggcggtacatgcataaaccatggctgtattccgtct

SEQ ID NO: 37879 - DNA, 50 bp, Staphylococcus hominis
  source 1..50: mol_type = genomic DNA
ttatggaagtatgcacaatcaacccttgtatagtgtgtgtacttccatat

SEQ ID NO: 37880 - DNA, 40 bp, Staphylococcus hominis; identical to SEQ ID NO: 37875
  source 1..40: mol_type = genomic DNA

SEQ ID NO: 37881 - protein, 461 aa, Staphylococcus hominis
MKVAIYCRVSTLEQKEHGYSIEEQERKLRSYCDINDWNVKDVYVDAGFSGAKRDRPELQRMMNDIKRFDLVLVYKLDRLTRNVRDLLDLLEIFEQNNVAFRSATEVYDTSTAMGRLFVTLVGAMAEWERETIRERTQMGKLAALKKGIMLTTPPFYYDRVDNKFVPNKYKEVVLFAYEEALKGKSAKSIARKLNNSDIPPPNNRKWEDRSITRALRSPFTRGHFEWGGVYLENNHEPIITEEMYEKVKDRLEERTNTKKIKHVSIFRSKLVCPVCDSKLTMNTHKVTLKDRVYYNKHYYCNNCKETPNLKPVYIRSEEVERVFYEYLQHQDLTEYDIVEDKEEKEVAIDINKVMQQRKRYHKLYANGLMNEDELAELIEETDIAIEEYKKQSENEEVKQYDTEDIKQYKNLLLEMWDISSDEEKAEFIQMAIKNIFIEYVLGKNDNKKKRRSLKIKDIEFY

SEQ ID NO: 37882 - DNA, 50 bp, Staphylococcus hominis; identical to SEQ ID NO: 37877
  source 1..50: mol_type = genomic DNA

SEQ ID NO: 37883 - DNA, 40 bp, Staphylococcus hominis; identical to SEQ ID NO: 37878
  source 1..40: mol_type = genomic DNA

SEQ ID NO: 37884 - DNA, 50 bp, Staphylococcus hominis; identical to SEQ ID NO: 37879
  source 1..50: mol_type = genomic DNA

SEQ ID NO: 37885 - DNA, 40 bp, Staphylococcus hominis; identical to SEQ ID NO: 37875
  source 1..40: mol_type = genomic DNA

SEQ ID NO: 37886 - protein, 461 aa, Staphylococcus hominis
MNVAIYCRVSTLEQKEHGYSIEEQERKLKSFCEINDWNVADVFVDAGFSGAKRDRPELQRMMNDIKRFDLVLVYKLDRLTRNVRDLLDLLEIFEQNNVAFRSATEVYDTSTAMGRLFVTLVGAMAEWERETIRERTQMGKLAALKKGIMLTTPPFYYDRVDNKFVPNKYKEVVLFAYEEALKGKSAKSIARKLNNSDIPPPNNRKWEDRSITRALRSPFTRGHFEWGGVYLENNHEPIITEEMYEKVKDRLEERTNTKKIKHVSIFRSKLVCPTCHNKLTMNTHKVTLKDRVYYNKHYYCNNCKETPNLKPVYIRAEEVERVFYDHLQHQDLTQYDIVEDKEEKEVAIDINKVMQQRKRYHKLYANGLMNEDELAELIEETDIAIEEYKKQSENKEVKQYDTEDIKQYKNLLLEMWDISSDEEKAEFIQMAIKNIFIEYVLGKNDNKKKRRSLKIKDIEFY

SEQ ID NO: 37887 - DNA, 50 bp, Staphylococcus hominis; identical to SEQ ID NO: 37872
  source 1..50: mol_type = genomic DNA

SEQ ID NO: 37888 - DNA, 40 bp, Staphylococcus hominis; identical to SEQ ID NO: 37878
  source 1..40: mol_type = genomic DNA

SEQ ID NO: 37889 - DNA, 50 bp, Staphylococcus hominis; identical to SEQ ID NO: 37874
  source 1..50: mol_type = genomic DNA

SEQ ID NO: 37890 - DNA, 40 bp, Staphylococcus hominis; identical to SEQ ID NO: 37875
  source 1..40: mol_type = genomic DNA

SEQ ID NO: 37891 - protein, 461 aa, Staphylococcus hominis
MNVAIYCRVSTLEQKEHGYSIEEQERKLKSFCEINDWTVSDVFVDAGFSGAKRDRPELQRMMNDIKRFDLVLVYKLDRLTRNVRDLLDLLEIFEQNNVAFRSATEVYDTSTAMGRLFVTLVGAMAEWERETIRERTQMGKLAALKKGIMLTTPPFYYDRVDNKFVPNKYKEVVLFAYEEALKGKSAKSIARKLNNSDIPPPNNRKWEDRSITRALRSPFTRGHFEWGGVYLENNHEPIITEEMYEKVKDRLEERTNTKKVKHVSIFRSKLVCPTCHNKLTMNTHKVTLKDRVYYNKHYYCNNCKETPNLTPVYIRSEEVERVFYEYLQHQDLTQYDIVEDKEEKEITIDINKIMQQRKRYHKLYANGLMNEDELAELIEETDIAIEEYKKQSENEEVKQYDAEDIKQYKNLLLEMWDISSDEEKAEFIQMAIKNIFIEYVLGKNDNKKKRRSLKIKDIEFY

SEQ ID NO: 37892 - DNA, 50 bp, Staphylococcus hominis
  source 1..50: mol_type = genomic DNA
ttatggaagcatgcacaattaaccaatgtatagtgtgtgtacttccatat

SEQ ID NO: 37893 - DNA, 40 bp, Staphylococcus hominis; identical to SEQ ID NO: 21483
  source 1..40: mol_type = genomic DNA

SEQ ID NO: 37894 - DNA, 50 bp, Staphylococcus hominis
  source 1..50: mol_type = genomic DNA
ttatggaagcatgcacaattaacccttgtatagtgtgtgtacttccatat

SEQ ID NO: 37895 - DNA, 40 bp, Staphylococcus hominis; identical to SEQ ID NO: 37875
  source 1..40: mol_type = genomic DNA

SEQ ID NO: 37896 - protein, 461 aa, Staphylococcus hominis
MNVAIYCRVSTLEQKEHGYSIEEQERKLKSFCEINDWTVADVFVDAGFSGAKRDRPELQRLMNGIKRFDLVLVYKLDRLTRNVRDLLDLLEIFEQNNVAFRSATEVYDTSTAMGRLFVTLVGAMAEWERETIRERTQMGKLAALKKGIMLTTPPFYYDRVDNKFVPNKYKEVVLFAYEEALKGKSSKSIARKLNNSDIPPPNNRKWEDRSITRALRSPFTRGHFEWGGVYLENNHEPIITEEMYEKVKDRLEERTNTKKIKHVSIFRSKLVCPVCDSKLTMNTHKVTLKDRVYYNKHYYCNNCKETPNLKPVYIRAEEVERVFYEYLQHQDLTQYEVVEDTEEKEVAIDINKVMQQRKRYHKLYANGLMNEDELAELIEETDAAIEEYKKQNENKEVKQYSDEDITEYKSLLLEMWNISSDEEKAEFIQMAIKNIFIEYVLGKNDNKKKRRSLKIKDIEFY

SEQ ID NO: 37897 - DNA, 50 bp, Staphylococcus hominis; identical to SEQ ID NO: 37872
  source 1..50: mol_type = genomic DNA

SEQ ID NO: 37898 - DNA, 40 bp, Staphylococcus hominis; identical to SEQ ID NO: 21483
  source 1..40: mol_type = genomic DNA

SEQ ID NO: 37899 - DNA, 50 bp, Staphylococcus hominis; identical to SEQ ID NO: 37874
  source 1..50: mol_type = genomic DNA

SEQ ID NO: 37900 - DNA, 40 bp, Staphylococcus hominis; identical to SEQ ID NO: 37875
  source 1..40: mol_type = genomic DNA

SEQ ID NO: 37901 - protein, 465 aa, Staphylococcus hominis
MYYERSYLRSCQVSTLEQKEHGYSIEEQERKLKQFCEINDWNVADVFVDAGFSGAKRDRPELQRLMSDIKRFDLVLVYKLDRLTRNVRDLLDLLEIFEQNNVAFRSATEVYDTSTAMGRLFVTLVGAMAEWERETIRERTQMGKLAALKKGIMLTTPPFYYDRVDNKFVPNKYKEVVLFAYEEALKGKSAKSIARKLNNSDIPPPNNRKWEDRSITRALRSPFTRGHFEWGGVYLENNHEPIITEEMYEKVKDRLEERTNTKKIKHVSIFRSKLVCPVCGSKLTMNTHKVTLKDRVYYNKHYYCNNCKETPNLKPVYIRAEEVERVFYEYLQHKDLTQYEIVEDTKEKEVMIDINKVMQQRKRYHKLYANGLMNEDELAELIEETDAAIEEYKKQNENKEVKQYSDEDITEYKSLLLEMWDISSDEEKAEFIQMAIKNIFIEYVLGKNDNKKKRRSLKIKDIEFY

SEQ ID NO: 37902 - DNA, 50 bp, Staphylococcus hominis; identical to SEQ ID NO: 37872
  source 1..50: mol_type = genomic DNA

SEQ ID NO: 37903 - DNA, 40 bp, Staphylococcus hominis; identical to SEQ ID NO: 37878
  source 1..40: mol_type = genomic DNA

SEQ ID NO: 37904 - DNA, 50 bp, Staphylococcus hominis; identical to SEQ ID NO: 37874
  source 1..50: mol_type = genomic DNA

SEQ ID NO: 37905 - DNA, 40 bp, Staphylococcus hominis; identical to SEQ ID NO: 37875
  source 1..40: mol_type = genomic DNA

SEQ ID NO: 37906 - protein, 521 aa, Escherichia coli; identical to SEQ ID NO: 28811

SEQ ID NO: 37907 - DNA, 50 bp, Escherichia coli
  source 1..50: mol_type = genomic DNA
ctgcggtgtacattcttgcatgactatgacagttatgttatgatgtacac

SEQ ID NO: 37908 - DNA, 40 bp, Escherichia coli
  source 1..40: mol_type = genomic DNA
ctgcggccccatcagcagcaatgaacagtcagtcgtacca

SEQ ID NO: 37909 - DNA, 50 bp, Escherichia coli
  source 1..50: mol_type = genomic DNA
ctgcggtgtacattcttgcatgacgttgacagttatgttatgatgtacac

SEQ ID NO: 37910 - DNA, 40 bp, Escherichia coli
  source 1..40: mol_type = genomic DNA
ctgcggccccatctgcagcgtggaactgttctgtgtgccc

SEQ ID NO: 37911 - protein, 499 aa, Nesterenkonia jeotgali
MSNMSEPSIPAAIYVRISKDSEALGLGVARQEKECRELAERKGWQVVDVFKDNDVSATRSKVRPRYQDMIRAIEAGWIRGIVVYDVDRLTRTPRELEDVIEWADRHQLHLASVGGVIDLATPQGRMTARIKGTVAKHEAEQQSRRLKSKMRELREDGRYIGTKPYGWDWSVNEDGTKGKDLVLNPVEAAVVKECAERTLNGEKCHAIAQDLNKRGIPTMKNSRGWTSSHLRRMLLRPINAGFTIHDDVEYPGKWPQLTTRSQYDRLVAILTDPKRVVNRGTPNRYLLSGLIRCDLCGQAMRRNVGSNAKRSYTLSDGTMKKYEYERVEIYRCVPPGCNKVGQNREGVEMMVTEYVLRLLEREGVEIFGGDSARLEAAHERVEGLKAQMRLAAGRVAEGKMTFDQLEQFNATVQPQLDQAQVELRQATPDESMIEFTGSSARAAWKKADLDRKREVIRSLLNHGLRITVGQPGQKGSRRRKIEGRMKTFNPDTVYITADW

SEQ ID NO: 37912 - DNA, 50 bp, Nesterenkonia jeotgali
  source 1..50: mol_type = genomic DNA
agtacgtcctagcgatcctccccgtggggtgatcatcactaggacgtact

SEQ ID NO: 37913 - DNA, 40 bp, Nesterenkonia jeotgali
  source 1..40: mol_type = genomic DNA
caccagaccgccctccccctggggtgcaggtcaccgagga

SEQ ID NO: 37914 - DNA, 50 bp, Nesterenkonia jeotgali; identical to SEQ ID NO: 37912
  source 1..50: mol_type = genomic DNA

SEQ ID NO: 37915 - DNA, 40 bp, Nesterenkonia jeotgali
  source 1..40: mol_type = genomic DNA
gccctgacctcccaccccctggggtcctgtccaccaagga

SEQ ID NO: 37916 - protein, 584 aa, Pseudomonas fragi
MPTAYAYIRYSSKAQGEAGRDSVDRQMASIQAITKQQGIELPPENIYSDTGISAHDGSNKRKGKLKELIDMISDMHIKEGDYIFVESIDRLSRQRLLQAKELVNGILEKGVILITTIDGQRYEKPNETNRIDDLQQDILLSVIAKRAYEESKTKSVRRKSAWNRAKKLAEDEKVIFNAHNPPYGIRYNTELNCFEVNEEEAKEIRDFFESLKYVGVSLSIKKLNAYSKRKWSSRNIKHLIDTKYVLGAYMAQRRDENKKKVFERYIENYYPQIVSYELFNEAIAAMKNRAHRKNYGNQSVGSLNIFRHSIKCDCCDASMLFEKQTNPKGVVYPYFQCYTRKELKNGCDQPRFRFDLAFGLFLELIYQSTTHEDFDVHPWQNEIEDTGIQYEWVTRESGMKYRLPTQEDIDEEERTENFKELLIKLLSNRETQTKDNKKIVELNNLLLEQKSYRDNLMKSFAGFTSGVIPKEFLEVVSKTEANINDIEQNLAELQTQINIKKTTINIYSENDIIDLYKTEDGRLKINQFFVANDITFKFNFDKTTRTLFAKIFQNGFEIDRIAKQFSLHNPLKEFGINNLNEYFN

SEQ ID NO: 37917 - DNA, 50 bp, Pseudomonas fragi
  source 1..50: mol_type = genomic DNA
gtgtggaatacccccctcccattcgagagcggtaggtgatattctcacac

SEQ ID NO: 37918 - DNA, 40 bp, Pseudomonas fragi
  source 1..40: mol_type = genomic DNA
agtcttgcgagagcccatggaaagcggctttattgtgatt

SEQ ID NO: 37919 - DNA, 50 bp, Pseudomonas fragi
  source 1..50: mol_type = genomic DNA
gtgtggaatacccccctcccattcgggagcggtaggtgatattctcacac

SEQ ID NO: 37920 - DNA, 40 bp, Pseudomonas fragi
  source 1..40: mol_type = genomic DNA
agggatgtgagagcctgtgggcaggagctttattgtggtt

SEQ ID NO: 37921 - protein, 540 aa, Vibrio parahaemolyticus
MLWLLNRMDKPKYLIEYTRVSSGKQLKGSGLETQKLSNEQVNELCENYGLTPYSEIFSDKAVSGFKVDASLRPSFSKLLTLIESGTISNDSVLVLSNIDRLSRQDINTALATLLRVMQHVHVFIVQENKLIKRDSPDLMVDLIMVLISMQRAYDESLSKATRSRSAIRHWFNNHKEGVRTKSGKPIPNPSGGVPFWYLTSKDELRLDTKLAEAAKKAVELFADGWGVVAVHSYLNEHYTPPKAHRGGKQWCVDALRRLHRDKALIGEYHVTVDGEKHVLTDYYEPIVSEQDYYRMVNQRNKSTRTAPSGAIHLFTGYGKSFCRGCGGSLTTTTSGGRTRIRCSNDLSKRNKCPNPVHVEGDKLLDVVNGLKLLHKFIPTEGCGNSEEVPKLEAKLTELNQQLDKMKADYMETQASILISLMVQKEAEIEAIKGKLDSQRASNMQSIAEWYYPSIKTEEKRRAYFERVLDCIKVHRLAKGKTIVSLYAKSGYCTNIYFLYGKVKKVGMITQELSTERELKNDNVFNQIAKSGVLTKWIKDQ

SEQ ID NO: 37922 - DNA, 50 bp, Vibrio parahaemolyticus
  source 1..50: mol_type = genomic DNA
attgggtaactatatgttttgggttgggcgaaaaccgattgttacccaaa

SEQ ID NO: 37923 - DNA, 40 bp, Vibrio parahaemolyticus
  source 1..40: mol_type = genomic DNA
gtggcaaacagagacaggttgggcgattgcggggaaccca

SEQ ID NO: 37924 - DNA, 50 bp, Vibrio parahaemolyticus
  source 1..50: mol_type = genomic DNA
attgggtaactatatgttttgggtggggcgaaaaccgattgttacccaaa

SEQ ID NO: 37925 - DNA, 40 bp, Vibrio parahaemolyticus
  source 1..40: mol_type = genomic DNA
atggaaaacagagagaggtggggtgattaacttggaccca

SEQ ID NO: 37926 - protein, 540 aa, Vibrio parahaemolyticus
MLWLLNRMDKPKYLIEYTRVSSGKQLKGSGLETQKLSNEQVNELCENYGLTPYSEIFSDKAVSGFKVDASLRPSFSKLLTLIESGTISNDSVLVLSNIDRLSRQDINTALATLLRVMQHVHVFIVQENKLIKRDSPDLMVDLIMVLISMQRAYDESLSKATRSRSAIRHWFNNHKEGVRTKSGKPIPNPSGGVPFWYLTSKDELRLDTKLAEAAKKAVELFADGWGVVAVHSYLNEHYTPPKAHRGGKQWCVDALRRLHRDKALIGEYHVTVDGEKHVLTDYYEPIVSEQDYYRMVNQRNKSTRTAPSGAIHLFTGYGKSFCRGCGGSLTTTTSGGRTRIRCSNDLSKRNKCPNPVHVEGDKLLDVVNGLKLLHKFIPTEGCGNSEEVPKLEAKLTELNQQLDKMKADYMETQASILISLMVQKEAEIEAIKGKVDSQRASNMQSIAEWYYPSIKTEEKRRAYFERVLDCIKVHRLAKGKTIVSLYAKSGYCTNIYFLYGKVKKVGMITQELSTERELKNDNVFNQIAKSGVLTKWIKDQ

SEQ ID NO: 37927 - DNA, 50 bp, Vibrio parahaemolyticus; identical to SEQ ID NO: 37922
  source 1..50: mol_type = genomic DNA

SEQ ID NO: 37928 - DNA, 40 bp, Vibrio parahaemolyticus; identical to SEQ ID NO: 37923
  source 1..40: mol_type = genomic DNA

SEQ ID NO: 37929 - DNA, 50 bp, Vibrio parahaemolyticus; identical to SEQ ID NO: 37924
  source 1..50: mol_type = genomic DNA

SEQ ID NO: 37930 - DNA, 40 bp, Vibrio parahaemolyticus; identical to SEQ ID NO: 37925
  source 1..40: mol_type = genomic DNA

SEQ ID NO: 37931 - protein, 521 aa, Blautia producta
MNTLERDCIYLRKSRADREAEARGEEETLARHERILLDLAKRRGCHIGAIYREVVSGETISARPVMQRLLQEVESGMWDGVLVVEVERLARGDSIDQGVVARAFQYSDTKIITPAKTYDPNNEFDEEYFEFGLFMSRREYKTIKRRLNAGRLSSVQEGKYCGNKPPYGYERVKLQGKGFSLRPVPAQAQIVRLMYNWYAYGVSGERLGMQKIARKLNEMGIPTLSGKPWSPATVVNILDNPVYTGKIRWNRRKAVNKIEDGAVVKTRPRSNDYIISDGLHEPIISQELYDLAQCYRQQNPPRPIGVMNAVKNPLSGLVRCGKCGHSMVRRPYANRKQEDTLLCPYTSCDNVSSRLSLVEKAVIAGLAELVQSYKVNDTLNDNNGVDIIAAKEKILVEKRAELDNLTAQKTRQYDLLEQGVYTTEIFLERSGATAKQIEDCTAAIERIDAELVHDRELLDQKFNFIPKCEHLLSNYWDWDAPTRNSVLKELLERVDYYKDSRNEYKHGDEITFTLDIYPKIQ

SEQ ID NO: 37932 - DNA, 50 bp, Blautia producta
  source 1..50: mol_type = genomic DNA
cattgataaccttagtgtactgacgaatgggcgcatagaggttatcaatg

SEQ ID NO: 37933 - DNA, 40 bp, Blautia producta
  source 1..40: mol_type = genomic DNA
taacaatacaggtacagaggaactggctcacatggaaatg

SEQ ID NO: 37934 - DNA, 50 bp, Blautia producta
  source 1..50: mol_type = genomic DNA
cattgataaccttagtgtactgacgcatgggcgcatagaggttatcaatg

SEQ ID NO: 37935 - DNA, 40 bp, Blautia producta
  source 1..40: mol_type = genomic DNA
caagaacactattactgatgcactgacacacatggaaatg

SEQ ID NO: 37936 - protein, 589 aa, Streptococcus anginosus
MKRDVKVIKGDTTLKRTASGCVERSIKRVAAYCRVSTDTEDQINSYNSQVEHYTDFIKQNNEWTLAGIYADEAITGTQVDRRIDFQRLINDCMNGDIDMVITKSISRFARNTLDTLKYVRKLKEYNVAVFFEEENINTLTMDGELLLTILSSVAQQEVENISANVKKGLRMKMERGEMVGFQGCLGYDYDPETKSISVNEKEAEIVRYIFRRYLEGVGGMVISRELEEQGYLSPRGHKRWTETTVLGIIKNEKYKGDLLMGKTFTVDPISKRRLDNFGEQDKFYIENHHEPIISEEDFEKAQGIRLRRAKNRNTVANNGGKREKYSRKYAFSSMLECGFCGHMLSRRNWHSSSEYTKVIWQCVNATKNGKKYCPHSKGIEEEAIEKAFMESYRQVCHNNVEITNEFLKTVEEELKDNSLAKDLKKISNQLDKILKKEKDLVELRLNEAISMEIYQEKYNEIAISKEKLLEEKRTLEVTLTDEKALKKRLEGFKKLLESNKYLEEFDRTVFESIVDKIVIGGTNDDGDIDPAMITIIYKTGKKDSQNGRLFKSRRKNAKVVEENDGDKLYSQSSNEVNKLCSYSTDNTCG

SEQ ID NO: 37937 - DNA, 50 bp, Streptococcus anginosus; identical to SEQ ID NO: 19727
  source 1..50: mol_type = genomic DNA

SEQ ID NO: 37938 - DNA, 40 bp, Streptococcus anginosus
  source 1..40: mol_type = genomic DNA
ttgtttccaatgacgcatcatgtggagacggtagcactat

SEQ ID NO: 37939 - DNA, 50 bp, Streptococcus anginosus; identical to SEQ ID NO: 19729
  source 1..50: mol_type = genomic DNA

SEQ ID NO: 37940 - DNA, 40 bp, Streptococcus anginosus
  source 1..40: mol_type = genomic DNA
ttgtttccaatgaagcaccaggagggaacattaggagtct

SEQ ID NO: 37941 - protein, 570 aa, Paenibacillus alvei
MAYEVEVIKASRKITDRKTGGLSDILRVAPYARVSTDTEEQLSSYKSQVAYYTELVNKRSDWQLVDIYADEAVTGTQVNKRENFQRMIDDCMNGKIDMVITKSISRFARNTLDTLKYVRMLKEQNVAVFFEDENINTMTMDGELLLVILSSVAQQEVENISSNVKKGLKMKMKRGELVGFQSCLGYDYDVQTKKISINEKEAELVRYIFERYIAGYGAYMIAKELTAAGYKTRSGRSNWQDTAILGIVKNEKYKGDLLQGKTFTVDPISKRRLENYGEEDQFYIRNHHEPIVSEEVFEKAQAILHRRGARLRGVEKGKRDKYSRKFAFSSKLECAFCGSNLSRRNWHSGTTHEKTIWQCVTATKKGKKYCPHSKALIENVIESAFLESYRRLCSNHMDVLDELMKHMETVLGNQNHMRKLNKVNNEIKLMEQKRCKLIDLCLDEKIDRATYESKYAELESQLSELLNEQVQLEQSSRQELDVEKRLEHLRKVLQKNEVLSSFDRNVFESIVEKVIVGDSTDPTQSDPHRLMFIYKTGFTNSVESKMIKQKKLSKNERGEPHSYTLNDTCG

SEQ ID NO: 37942 - DNA, 50 bp, Paenibacillus alvei
  source 1..50: mol_type = genomic DNA
cgcattcctatactttgaacgacacatgtggaggccgtagtaggaatgca

SEQ ID NO: 37943 - DNA, 40 bp, Paenibacillus alvei
  source 1..40: mol_type = genomic DNA
tatgttcccgcagacgacacatgtggagtcagtggctttg

SEQ ID NO: 37944 - DNA, 50 bp, Paenibacillus alvei
  source 1..50: mol_type = genomic DNA
cgcattcctatactttgaacgacatgtgtggaggccgtagtaggaatgca

SEQ ID NO: 37945 - DNA, 40 bp, Paenibacillus alvei
  source 1..40: mol_type = genomic DNA
catgttgcttcagaccacatgtgtagcctcggtggttttg

SEQ ID NO: 37946 - protein, 569 aa, Paenibacillus alvei
MAYEVEVIKASRKITDRKTGGLSDILRVAPYARVSTDTEEQLSSYKSQVAYYTELVNKRSDWQLVDIYADEAVTGTQVNKRENFQRMIDDCMNGKIDMVITKSISRFARNTLDTLKYVRMLKEQNVAVFFEDENINTMTMDGELLLVILSSVAQQEVENISSNVKKGLKMKMKRGELVGFQSCLGYDYDVQTKKISINEKEAELVRYIFERYIAGYGAYMIAKELTAAGYKTRSGRSNWQDTAILGIVKNEKYKGDLLQGKTFTVDPISKRRLENYGEEDQFYIRNHHEPIVSEEVFEKAQAILHRRGARLRGVEKGKRDKYSRKFAFSSKLECAFCGSNLSRRNWHSGTTHEKTIWQCVTATKKGKKYCPHSKALIENVIESAFLESYRRLCSNHMDVLDELMKHMETVLGNQNHMRKLNKVNNEIKLMEQKRCKLIDLCLDEKIDRATYESKYAELESQLSELLNEQVQLEQSSRQELDVEKRLEHLRKVLQKNEVLSSFDRNVFESIVEKVIVGDSTDPTQSDPHRLMFIYKTGFTNSVESKMIKQKKLSKNERGEPHSYTLNDTC

SEQ ID NO: 37947 - DNA, 50 bp, Paenibacillus alvei; identical to SEQ ID NO: 37942
  source 1..50: mol_type = genomic DNA

SEQ ID NO: 37948 - DNA, 40 bp, Paenibacillus alvei; identical to SEQ ID NO: 37943
  source 1..40: mol_type = genomic DNA

SEQ ID NO: 37949 - DNA, 50 bp, Paenibacillus alvei; identical to SEQ ID NO: 37944
  source 1..50: mol_type = genomic DNA

SEQ ID NO: 37950 - DNA, 40 bp, Paenibacillus alvei; identical to SEQ ID NO: 37945
  source 1..40: mol_type = genomic DNA

SEQ ID NO: 37951 - protein, 513 aa, Enterococcus faecium
MRNYVIALYIRLSVEDFKTESLSIPNQKLILREKAMSLPEWDNSEILEFIDNGHTGTNFERPAVQELLTMVQAGKINCIIVKDLSRFGRNSIETGYFIERVFPLYHTRFISVSDDFDTANFKGDTGGIDIAFKYLISECYSRDMSMKTKSAKYAKMRRGEYQSVICPYGYRKSADGRMEPDEDVAPNVQMIFQWASEGNTAAEITRRLYAMNIPTPGEYRKLKGKDYYNVSRTNGVWSTSTVLRILEDQRYIGTYVIGKRKVKEIGSRHTQLKDESEWFKIPNHHPAIVSVDLFEKANASIKRFSLLNKKPRDYLLRGKVFCGCCDHAMSLRNGAWFYCRHSEVAETLPCHGVRIKMADLEQVVFETIRAQMCPALGIDSNKDKLDLQTVQQAEHEEKLRSIQDSKRHLYEQYALGEIDLETYRTRKAVYDTELVQAKNVHAVITAQTKQIKSDYEIKLKQQEIVQEVGNANMLTKALIDRLINKVYVFPGDRIEIEYATQDFLKTKESEKEV

SEQ ID NO: 37952 - DNA, 50 bp, Enterococcus faecium; identical to SEQ ID NO: 14627
  source 1..50: mol_type = genomic DNA

SEQ ID NO: 37953 - DNA, 40 bp, Enterococcus faecium
  source 1..40: mol_type = genomic DNA
aagcaagctagcatgtgtgtgtctaagaccatgaatagta

SEQ ID NO: 37954 - DNA, 50 bp, Enterococcus faecium
  source 1..50: mol_type = genomic DNA
tttgtcgtgggcttgacatacgggttccgttacggtataataacgacaaa

SEQ ID NO: 37955 - DNA, 40 bp, Enterococcus faecium
  source 1..40: mol_type = genomic DNA
aatgaagatgttatgtgtctttctcagcccatgagtagta

SEQ ID NO: 37956 - protein, 549 aa, Fundicoccus ignavus
MINVKETKRKKAVGYIRVSTMMQKEEGHSLQSQVQQIEDFTKRHNYELTEIYSDEGISGKNVKNRPGIQKLIDDAKQDKFDLVVIWKLTRLGRSMKDVLNIAELLNANNVGLHSVSEAFDITTSTGKMMLGLLANFAEFERAQISENVKMSMLTLVEKNRGFPGGRMIGYRSIRDDTGRKILVIEPKEAKVVKLIFQKYLGGDGYRAIANSLNKMGYRTIKGNPFSITAVKDILYNPTYSGKIRYNRHVDWELKRRKGYNPNYILVDGPHEPIIDKEFFQKVQDRLKLESKQPKWNHRGENLLTGLLKCPECGAAMSASNTTNTLKDGTKKRIRYYSCGKFRQQGSSVCHANSIRADKAEPFVLERLSEVIQVPEILSNVVSELNKQIQTQRKPWERELQQLGADLVETQKKLEKWEDLIKVSPELRVDLNDRIQQLEIECVNNRKRTQELVQILHTEGYSIKLSDAKKVMGLVTQLLEDSDSKAAKKAILRTFVDKITVDKDSKSNYKIYMKFDDVVIAKLNEQMKKEPTAGNAVGSFSVGTLLEIVI

SEQ ID NO: 37957 - DNA, 50 bp, Fundicoccus ignavus
  source 1..50: mol_type = genomic DNA
aaccgcagtgacgagtgatacgcacatgcgtatcataagtagatgaggtt

SEQ ID NO: 37958 - DNA, 40 bp, Fundicoccus ignavus
  source 1..40: mol_type = genomic DNA
ctttcgaattaattcggggcatgcgtaccataaatgatga

SEQ ID NO: 37959 - DNA, 50 bp, Fundicoccus ignavus
  source 1..50: mol_type = genomic DNA
aaccgcagtgacgagtgatacgcacttgcgtatcataagtagatgaggtt

SEQ ID NO: 37960 - DNA, 40 bp, Fundicoccus ignavus
  source 1..40: mol_type = genomic DNA
cttctgaattaattcagatcttgcaaaacataacttatga

SEQ ID NO: 37961 - protein, 500 aa, Dehalococcoides mccartyi
MMQKDTKSNLKCCIYARVSTEEQAERDLSIPFQLERCRYHAQGKSWEITKEYVDAGESARTDKRPEFQKMIAAARSKEFDIILVHKFDRFARNDYDFVIYEKELEDLGIILESVSEPGDASTPAGYIGRRMMQIISTWYSKNLAVEAKKGMKQKVENGGWPKLAPPGYLNKHEKNSAWIEVDPELGPFISTAFKEMATGKWTLKEWADHAYSLGYRSRKGYPLAVSVWGVIFHNRFYLGETWLRRGDVPTKGTHEPLTDESVFTRVQQVLREHDKHKQRTQRHKYLLQGLLYSSDANSPCWVETHPKKKISYYRSKARVDGKQIFYNTKDLDAQMCKVARDITLPKEKRIELEKELDRWFEKEANGDGELDQAQERLAKLERVEKNLQRLAIEEEISIEDFKEHRTRIEAEKKNLKDVVEMISSRRSLVKGDFEIALQLSSELDNLFNGGDNDERRLLCETIFKRVYVRDGKITNAELNSPFALIASRVEGSESFLTRQP

SEQ ID NO: 37962 - DNA, 50 bp, Dehalococcoides mccartyi
  source 1..50: mol_type = genomic DNA
ggttcggaatctttcctgactcggcagccagtcataacacattccgaact

SEQ ID NO: 37963 - DNA, 40 bp, Dehalococcoides mccartyi
  source 1..40: mol_type = genomic DNA
ggttcgaatccttcttccccagccatttcgttctttacgg

SEQ ID NO: 37964 - DNA, 50 bp, Dehalococcoides mccartyi
  source 1..50: mol_type = genomic DNA
ggttcggaatctttcctgactcggaggccagtcataacacattccgaact

SEQ ID NO: 37965 - DNA, 40 bp, Dehalococcoides mccartyi
  source 1..40: mol_type = genomic DNA
tattttactcattcttcccaggcaatttcattcattactg

SEQ ID NO: 37966 - protein, 564 aa, Streptococcus suis
MNRTLTISDYRQVDTSRLSDITVVYCRLSQDDGLDGDSNSIINQKNILFEVVTREKLPNPVLFVDDGFSGTNFDRPAISEALRLVENGQVSNFIVKDLSRLGRSYIKVGQLTEITFPSFDVRFIALNDGIDSNKPNETNSIFLPIKSLMDEMYAADTSKKIRAVFQAKAKSGVPVTTNPPYGYLKDPNNPKNWIIDPVASEVVKRIFQEAKSGKSLSEIAKGLESDKVFKPDRHRIEIGLKSISASPNVEALPYFWTRETLSSILGREEYLGHTVNLRTRTKSYKDKRSIDLPREDWLIFKNTHEAIIDQETFDIVQKMRSHKRSNQRYKNRLGHENLFAGLVFCGTCGRKHYFCPQEKNGFNHDHYKCSGYRKPIDGCENPHYIQKSALIAIVSDKLRQTISEAQLDRENFLKKLEQQSQAQFSKDNKRQRQQLQKDEHRSKEIDRIIQQLYEDNLLGKISDERFVKLSQTYEEEQKQLQTSISDLTEKLAKQQEDSLNISKFMARISKYTQVSELTVEMVNELIDKIVIHRPTGTKRNRIIQIDIYYNFIGKLTNEKASQAD

SEQ ID NO: 37967 - DNA, 50 bp, Streptococcus suis
  source 1..50: mol_type = genomic DNA
aaactgctatgtgtcaggtcggtacaaccgagtatgacgttcagcagtct

SEQ ID NO: 37968 - DNA, 40 bp, Streptococcus suis
  source 1..40: mol_type = genomic DNA
agaatataaaaaatccgctcaaaggcggattttttgttta

SEQ ID NO: 37969 - DNA, 50 bp, Streptococcus suis
  source 1..50: mol_type = genomic DNA
aaactgctatgtgtcaggtcggtaacaccgagtatgacgttcagcagtct

SEQ ID NO: 37970 - DNA, 40 bp, Streptococcus suis
  source 1..40: mol_type = genomic DNA
aaagcaaaaaaaaaaagctacaaggccgattttttttttt

SEQ ID NO: 37971 - protein, 472 aa, Collinsella bouchesdurhonensis
MPKTAVIYARFSCNKQREASIDDQLRVCRDWCKREGYAIAAEYCDYAISGRTDDRPEFQRMIANAGESDIVLVYMMDRFSRGEYDAPIYKRELAKKGVKLVSALEAIPDSPEGIIYEKLLEGLAACESKKTAIRTKRGMEGNALRCKTNGVRVFGYRKSEDDEYEIDEHDAAFVREAFKRRINRETVNSIARDFAQRGVKTSNGNPCGYSMVYQMLHNRRYTGRYEWGGIVEEGGMPEIVDEVTFMDAQQVQGTKKRSSEDWGDFALAGKAICAGCGRNLQGVSGRGRHNVKYEYYSCVDGCMRNVRREELEGAIVGALRELLSDREEALRIAHMVADRADGAEIAARRKQAAESLSAAERGLKNILNAIEQGIIAPGVKERIAELEEQKARANYDLQAIQDQKIDPERFADFLQYGARLDDATLLKAFVWQVSVSDDEVLVTLNYDTESNEPARLDIQRVRGKLEWCPQRD

SEQ ID NO: 37972 - DNA, 50 bp, Collinsella bouchesdurhonensis
  source 1..50: mol_type = genomic DNA
gggttcgaggaaaattagaatggtgcccccagcgggatatccgcgtgcgg

SEQ ID NO: 37973 - DNA, 40 bp, Collinsella bouchesdurhonensis
  source 1..40: mol_type = genomic DNA
gcttctcaattcaaatggtgcccccagcgggattcgaacc

SEQ ID NO: 37974 - DNA, 50 bp, Collinsella bouchesdurhonensis
  source 1..50: mol_type = genomic DNA
gggttcgaggaaaattagaatggtagccccagcgggatatccgcgtgcgg

SEQ ID NO: 37975 - DNA, 40 bp, Collinsella bouchesdurhonensis
  source 1..40: mol_type = genomic DNA
gcttcttaattcatctggtagggccagcgtaactcatacc

SEQ ID NO: 37976 - protein, 470 aa, Collinsella aerofaciens
MPEDIKTAVIYARFSCSKQREASIDDQLRVCRDWCAREGYAIVGEYSDYAMSGRSDDRPQFQKMIANAGESDIVLVYMMDRFSRDEYDAPAYKHELRKKGVEVVSAMEAMPDGPERILIEKIYEGLAAVESVKTSMRTRRGMEGNALKCKTNGVRVYGYGRNDDDEYVVNEDEAAIVREAFRRSCDHEPVDSIASDLARRGVTTRTGRPCGYSMVYQMLHNRKYTGFYSWGGIEVEGGMPQIIDKATFAMAQEVKPKKRRASEDWGTFALSGRAICSECGHNMAGTSGRGKKNVKYEYYGCRCGAKPVRRDWLEHELAEAIRGMLRDRETALRISHMLWDEPEPEIADARRRAMASKRKAENGLQNIMAAIEQGIVMPEFTDRIAQLQAQKARAERDLASYDEARIDPEEFADFLQCGGGMDDAAVLDSFVYQVMVTPEECVATLYCDDERNEPARLSIARVRTFSGWCP

SEQ ID NO: 37977 - DNA, 50 bp, Collinsella aerofaciens
  source 1..50: mol_type = genomic DNA
gggttcgcacattttcgggttggtgccccatttgcaaagatagtcgaacc

SEQ ID NO: 37978 - DNA, 40 bp, Collinsella aerofaciens
  source 1..40: mol_type = genomic DNA
gcttcttaatttaaatggtgcccccagcgggattcgaacc

SEQ ID NO: 37979 - DNA, 50 bp, Collinsella aerofaciens
  source 1..50: mol_type = genomic DNA
gggttcgcacattttcgggttggtagcccatttgcaaagatagtcgaacc

SEQ ID NO: 37980 - DNA, 40 bp, Collinsella aerofaciens; identical to SEQ ID NO: 37975
  source 1..40: mol_type = genomic DNA

SEQ ID NO: 37981 - protein, 494 aa, Garciella nitratireducens
MNNIAIYMRISFSERDRQKQTEESINSQRNIIKHFIFNDQELKKANIEEFVDEGYSGSTTSRPGLDKLLLKIKQGKVNCIIVKDMSRFMRNYIEMGDYLENIFPFMGIRFIAINDGYDSSNEIQNGTELDIQFKNLLNDYYSRDISEKMTTSLLVAKKQGKYTSGTPPYGYLKDPEDNYKLVIDERVADNVRYIFQLLLEGHTLNETAKILNSEGVITARARRKEIKGYDAYANRWESNVEETIWSHSMVRRIANNEAYTGTFVFNKSTKSKLDGGKVTYHPKEEWIRIYDNHEALISKETFDEVQELLKSRHRKSFGVNKKKYQNSPLATFVRCSKCGYKIRFNISSNGKELVGIYLYCYHCRMLEQEEKLPNYKELEKDVFEILKDKFHIDRTEKKRLLDEQKELYDKNDLLLKKKRIEFENYKFGKISREDFLEIKNQIQESDEENKERIQAIDEELKQAGNIDKLTEDTVRKYIKTIYVSGKGIEKIEYQ

SEQ ID NO: 37982 - DNA, 50 bp, Garciella nitratireducens
  source 1..50: mol_type = genomic DNA
tgtatcatagacttgacacgatagggggaacgtgtcataatagtgatggg

SEQ ID NO: 37983 - DNA, 40 bp, Garciella nitratireducens
  source 1..40: mol_type = genomic DNA
actactagttatggctacaggaacgggaaaaacctataca

SEQ ID NO: 37984 - DNA, 50 bp, Garciella nitratireducens
  source 1..50: mol_type = genomic DNA
tgtatcatagacttgacacgatagcaggaacgtgtcataatagtgatggg

SEQ ID NO: 37985 - DNA, 40 bp, Garciella nitratireducens
  source 1..40: mol_type = genomic DNA
tatactggttatgtaaacacaaatggggaaaatctaaaca

SEQ ID NO: 37986 - protein, 458 aa, Staphylococcus aureus; identical to SEQ ID NO: 11826

SEQ ID NO: 37987 - DNA, 50 bp, Staphylococcus aureus; identical to SEQ ID NO: 12712
  source 1..50: mol_type = genomic DNA

SEQ ID NO: 37988 - DNA, 40 bp, Staphylococcus aureus
  source 1..40: mol_type = genomic DNA
aaaatgtatggaggcacttgtatcaacataggatgtattg

SEQ ID NO: 37989 - DNA, 50 bp, Staphylococcus aureus
  source 1..50: mol_type = genomic DNA
cttttgtgcggaactacgaacagtaaataaatacgaagtgtacaaacttc

SEQ ID NO: 37990 - DNA, 40 bp, Staphylococcus aureus
  source 1..40: mol_type = genomic DNA
aaaatatatggagacagttaaaatagaataggatggactt

SEQ ID NO: 37991 - protein, 499 aa, Tepidanaerobacter syntrophicus
MNAVIYARYSPGPDQTDQSIEGQLRECYEFAERNNINIVGVYTDRALTGRTDQRPDFLRMIADSESRKFEAVIVWKLDRFARNRYDSAIYKAKLKKNGVRVISAKENISDTPEGIILESMLEGMAEYYSANLSQNIKRGMKESALKCQVTGGNIALGYKIGPDKKFVVDPAEAAIVKEIFERYANGQTVTEIITELNNRGCRTSRGNKFGPNSLHRILRNEKYIGVYKWNDIIIENGVPAIIDEDLFRRVQEMLAVNKKAPARAAAKMDYLLSTKLFCGKCGTNMNGESGTSRTKGRKYYYYKCAKAKRRRGCNKKPVRKDWIETLVVSETVRRVLVDEVIEMIADRVIELQNQERDKSVLRALELELEGVKKSIANLIKAIELGIFTESTQARLLELEKEKKDLEARIAHEEIVTPKVTREQVVFWLNQFKGGDIDDPEYQRLIIDVFVKAVFVYDDHITITYNYIDESGRPRTVNIEDSGFPTDPVKGSTLKSNPPP

SEQ ID NO: 37992 - DNA, 50 bp, Tepidanaerobacter syntrophicus
  source 1..50: mol_type = genomic DNA
ggttcgactttgaagtccaaccctccaccaaagcaaaataaggcgaaccc

SEQ ID NO: 37993 - DNA, 40 bp, Tepidanaerobacter syntrophicus
  source 1..40: mol_type = genomic DNA
ggttcgattcccctcgcctccaccataaaaagctattttt

SEQ ID NO: 37994 - DNA, 50 bp, Tepidanaerobacter syntrophicus
  source 1..50: mol_type = genomic DNA
ggttcgactttgaagtccaaccctggaccaaagcaaaataaggcgaaccc

SEQ ID NO: 37995 - DNA, 40 bp, Tepidanaerobacter syntrophicus
  source 1..40: mol_type = genomic DNA
gttctgcttcaaatcgcctggactattaaaagcaattttt

SEQ ID NO: 37996 - protein, 534 aa, Dehalococcoides mccartyi
MVETKRAVAYVRVSSASQVEGYSLDAQERLFTELCKNRGWQAVRIYREEGKSAHVDSIHKRPVFRKLLEDAAKNEFEIVVVHTLDRWSRNLTVTLESLKLLGRYGIGLVSIVENLDYSKPDGILFTQMLGAFAQYFSEALSTHVRKGLDQRAREGKHNGCIPFGYESCWEIGDKGEKKRRCEKEHPGGLHIHSREGPAVAELFRRYSSGTTTLSQLAIWLNEQGFRTRNTKNLPDANGELVSGPRLFTSSSVRNILHNPFYTGQINHRDEILTGAHEALISRELFDTVQLALKKNSGRSETLTTSPGREYMLKGLVRCAYCGMPMWAQTYKSGNSYYREHQASRSIQECPGHGGTIACHVIDKQIRELVSAIELGPGWLEEVLSIISLKDEVERVKKEKEQVTGKLHRMAKTYIDGLIPEEEYLRQKRLLELSLESLVVPDYDASEQAGKLIQNLPVLWSKANLAEQRKILLTMLDGVYVDVKQSRSVIAVKVKPPFKPIFQVAVSKKESKIRILNEPLGTSPAGSSVFLVETG

SEQ ID NO: 37997 - DNA, 50 bp, Dehalococcoides mccartyi
  source 1..50: mol_type = genomic DNA
ccggctcgtccgtgtttctggtggagacgggggatcatcgaactccttgt

SEQ ID NO: 37998 - DNA, 40 bp, Dehalococcoides mccartyi
  source 1..40: mol_type = genomic DNA
acattattaactttggtggagacgggggagggttggctgc

SEQ ID NO: 37999 - DNA, 50 bp, Dehalococcoides mccartyi
  source 1..50: mol_type = genomic DNA
ccggctcgtccgtgtttctggtggctacgggggatcatcgaactccttgt

SEQ ID NO: 38000 - DNA, 40 bp, Dehalococcoides mccartyi
  source 1..40: mol_type = genomic DNA
acataatgaactttgggggctctggggaaaggttgggagg

SEQ ID NO: 38001 - protein, 589 aa, Streptococcus agalactiae
MKKDVKVIKGDTTLKRTASGCVERSIKRVAAYCRVSTDTEDQINSYNSQVEHYTEFIQKNNEWTLAGIYADEAITGTQVDRRIDFQRLINDCINGDIDMIITKSISRFARNTLDTLKYVRKLKEFNVAVFFEEENINTLTMDGELLLTILSSVAQQEVENISANVKKGLRMKMERGEMVGFQGCLGYDYDPETKSISINEKEAEIVRYIFRRYIEGVGGMVISRELEEQGYLSPRGNKRWTETTVLGIIKNEKYKGDLMMGKTYTVDPISKRRLDNFGEQDKFYIENHHEPIISEEDFEKAQGIRLRRSKNRNTVANNGGKREKYSRKYAFSSMLECGFCGHNLSRRNWHSSSEYTKVIWQCVNATKNGKKYCPHSKGIEEEAIEKAFMESYRQVCHNNVEITNEFLKTVEEELKDNSLAKDLKKISNQLDKIIKKEKDLVELRLNESISMDIYQDKYNEIAISKEKLLAEKRTLEVTLTDEKALKKRLEGFKKLLESNKYLEEFDRAVFESIVDKIIIGGTNDEGEIDPAMITIIYKTGKKDSQDGRLFKSRRKNAKEVNEETDNKLYPHSSDEVNNLYSYPINNTCG

SEQ ID NO: 38002 - DNA, 50 bp, Streptococcus agalactiae
  source 1..50: mol_type = genomic DNA
ctatcctattaacaacacatgtggagactatagcgttgatacaaagagtg

SEQ ID NO: 38003 - DNA, 40 bp, Streptococcus agalactiae
  source 1..40: mol_type = genomic DNA
ccaatgacacatcatgtggagtgtgtggctctgctcgtaa

SEQ ID NO: 38004 - DNA, 50 bp, Streptococcus agalactiae
  source 1..50: mol_type = genomic DNA
ctatcctattaacaacacatgtggccactatagcgttgatacaaagagtg

SEQ ID NO: 38005 - DNA, 40 bp, Streptococcus agalactiae
  source 1..40: mol_type = genomic DNA
tctctgacacctcatgcagcctctgtggctctccccgcaa

SEQ ID NO: 38006 - protein, 543 aa, Ruminococcus champanellensis
MKDKITALYCRLSQDDMLQGESNSITNQKAILKKYADDNSFGNTVYYVDDGVSGTTFEREGFKAMMADVEAGKVGTVITKDLSRLGRDYLKTGEYIEIIFPDYDVRYIAINDGVDTFKSENELMAFKNIFNDWYARDTSKKIRAVFKVKGQSGKHLSNPIYGYKHSETDKNLWVIDDEPAEVVRKIFRLCIDGYGPSQIARILTQEGIPTPTAYALSQGRDNGHKNAKLHRWGSETIAHILEKAEYCGHTVNFRTHVKSYKNKKRVDNPKEDWLIFENTHEAIITQQEFDLVQELRRHKHRPTKIEEVNPFSGVCFCADCGRKMYLCRAKSLTADQEHLKCGTYANDKDECTAHFIRTIVLKEIVLGELNKMISFVKENEDEFVRSAMDNSVQKQSSELAKSKKKLKEVEKRIAELDRLFTRLYEDNVSGKISDARFAVMSAGYEDEQKTLRATVAELTAYIDTAEQKSADVTAFIRAVQKYEHITELTPEVMHELIEKIVIRAPDKSSGHRTQQIEIHYRFDVAITTAVADSMKYDKKRKAA

SEQ ID NO: 38007 - DNA, 50 bp, Ruminococcus champanellensis
  source 1..50: mol_type = genomic DNA
aaacttctttattagcacctgtctttaggtcggtactcatatagaagttt

SEQ ID NO: 38008 - DNA, 40 bp, Ruminococcus champanellensis
  source 1..40: mol_type = genomic DNA
tcaaagaagcccggctgtattcgcagtcgggcttttgccg

SEQ ID NO: 38009 - DNA, 50 bp, Ruminococcus champanellensis
  source 1..50: mol_type = genomic DNA
aaacttctttattagcacctgtctgcaggtcggtactcatatagaagttt

SEQ ID NO: 38010 - DNA, 40 bp, Ruminococcus champanellensis
  source 1..40: mol_type = genomic DNA
tcaaagaagccaagctgttgccacctgctggtttttgtcg

SEQ ID NO: 38011 - protein, 501 aa, Blautia massiliensis; identical to SEQ ID NO: 11481

SEQ ID NO: 38012 - DNA, 50 bp, Blautia massiliensis; identical to SEQ ID NO: 10927
  source 1..50: mol_type = genomic DNA

SEQ ID NO: 38013 - DNA, 40 bp, Blautia massiliensis
  source 1..40: mol_type = genomic DNA
ttgtattatacgcagttggaagccagtcttcaacagaaaa

SEQ ID NO: 38014 - DNA, 50 bp, Blautia massiliensis
  source 1..50: mol_type = genomic DNA
ctgtgtgcccttgtcaagcgatgtggacatcgcttgacaagggcacacag

SEQ ID NO: 38015 - DNA, 40 bp, Blautia massiliensis
  source 1..40: mol_type = genomic DNA
aatcatgatgcacagtgagggaccagtcttcaacagaaaa

SEQ ID NO: 38016 - protein, 551 aa, Mesorhizobium opportunistum
MRRAAVYARFSTELQNEKSTEDQIALCRAYAARNGLAIVAVYEDKARSGSSILGRDALMRLMEAAGQNAFDIVVVEALDRLSRDMADLAGLHKRLSFLDIEIQAVHDGIADAVLIGIRGLVGQMQREDGAKKVRRGMAGVVRDGRHAGGRAYGYRPVLGHPGELEIVQEEADVIRRIFAAYSAGRAPRDLAGDLNRDGIAPPRGIRWNGSTINGNAQRGVGLLFNELYVGRIVWNKVRMVKNPDTGKRVSRPNPRDQWQTKEVPHLRIIEDETWHKAQARKAVRVNATSHVKRRPAHLLSGLLRCGVCGSGLSVHDRDKTGKTRIRCSAVRESGSCSNRRIIYLPEIEKAVLDGMRDQLKAPDLIEAYIRRYNQERRELSAQANAMRTALQRKHDRIEGERQRTIDLVIRSVIAEEDAKQRIAELKTQLSEVEAQLSGLDEPLSPVALHPATLQRYIETVDGLSKALADHATAADDRGPLIQNLRGLVHSVTVHPKRAREGFEIEVKGKLAALIGGAAFPNARYTEKPTGQGNHFNAAVTYDSGLEVVAGE

SEQ ID NO: 38017 - DNA, 50 bp, Mesorhizobium opportunistum
  source 1..50: mol_type = genomic DNA
tagtgggttggaagtggtagcgggagagcgctaccgcctttccccccact

SEQ ID NO: 38018 - DNA, 40 bp, Mesorhizobium opportunistum; identical to SEQ ID NO: 29288
  source 1..40: mol_type = genomic DNA

SEQ ID NO: 38019 - DNA, 50 bp, Mesorhizobium opportunistum
  source 1..50: mol_type = genomic DNA
tagtgggttggaagtggtagcgggacagcgctaccgcctttccccccact

SEQ ID NO: 38020 - DNA, 40 bp, Mesorhizobium opportunistum
  source 1..40: mol_type = genomic DNA
tagacaggatggtagcagaacagggactagagcccagggc

SEQ ID NO: 38021 - protein, 551 aa, Mesorhizobium opportunistum
MRRAAVYARFSTELQNEKSTEDQIALCRAYAARNGLAIVAVYEDKARSGSSILGRDALMRLMEAAGQNAFDIVVVEALDRLSRDMADLAGLHKRLSFLDIEIQAVHDGIADAVLIGIRGLVGQMQREDGAKKVRRGMAGVVRDGRHAGGRAYGYRPVLGHPGELEIVQEEADVIRRIFAAYSAGRAPRDLAGDLNRDGIAPPRGIRWNGSTINGNAQRGVGLLFNELYVGRIVWNKVRMVKNPDTGKRVSRPNPKDQWQTKEVAHLRIIEDEIWEKAQARKAARVNAISHITRRPAHLLSGLLRCGVCGSGLSVHDRDKTGKTRVRCSAVRESGSCSNRRIIYLPEIEKAVLDGMRDQLKAPDLIEAYIRRYNQERRELSAQANAMRTALQGKRDRIEGERQRTIDLVIRSVIAEEDAKQRIAELKTQLSEVEVQLSGLDEPLSPVALHPATLQRYIETVDGLSKALADHATAADDRGPLIQNLRGLVHSVTVHPKRAREGFEIEVKGKLAALIGGAAFPNGRYTEKPTGQGSRFNAAVTYDSGLEVVAGE

SEQ ID NO: 38022 - DNA, 50 bp, Mesorhizobium opportunistum; identical to SEQ ID NO: 38017
  source 1..50: mol_type = genomic DNA

SEQ ID NO: 38023 - DNA, 40 bp, Mesorhizobium opportunistum; identical to SEQ ID NO: 29288
  source 1..40: mol_type = genomic DNA

SEQ ID NO: 38024 - DNA, 50 bp, Mesorhizobium opportunistum; identical to SEQ ID NO: 38019
  source 1..50: mol_type = genomic DNA

SEQ ID NO: 38025 - DNA, 40 bp, Mesorhizobium opportunistum; identical to SEQ ID NO: 38020
  source 1..40: mol_type = genomic DNA

SEQ ID NO: 38026 - protein, 532 aa, Mesorhizobium opportunistum
MTRTAIYARFSTDLQNERSIDDQLALCRAYAEREGLNVVATFDDRARSGGSVLGRDGLLQLMDKAREHEFDVLVVEALDRLSRDMEDLAGIHKRLSFLGIEIRAVHEGVVNTVLVGLRGLVGQLYREDIAHKVRRGQAGRVNKGLHAGGLTYGYSYVLGDPGKRMIAEDEAEIVRRVFREYVAGQTPRDIAHDLNTDRIPPPRGRAWNASTINGNVQRGTGLLHNELYAGRLIWNRVRMIKDPDTGKRVSRPNPKGDWRVVAVPDLAIVRSDLFDAAQARKKARATTHPSHQRRPRHMLTGLLRCGACGAGMSSKGVDKSKRIRIRCSAATESGTCAAPKTFYLDTIEAAVLNGLSAELRHPEVIAQYVQTYHEERKRLAADTDARRSRLERRLEELTREIERLVNAIAKGYGDPAVLGPQSTTLNEERKGILAELDRVPAATAVIALHPAVLARYEEQLNQLRTGLAKGIAFGDSECAEAMRDLVETVTVFRDPSRIGGVEVEIAGRLTALLGEGAFPHGVKGAGGMVVAG

SEQ ID NO: 38027 - DNA, 50 bp, Mesorhizobium opportunistum
  source 1..50: mol_type = genomic DNA
agcggggggaatggtggtagcgggagaccgctacatcgttagacccacta

SEQ ID NO: 38028 - DNA, 40 bp, Mesorhizobium opportunistum; identical to SEQ ID NO: 29288
  source 1..40: mol_type = genomic DNA

SEQ ID NO: 38029 - DNA, 50 bp, Mesorhizobium opportunistum
  source 1..50: mol_type = genomic DNA
agcggggggaatggtggtagcgggacaccgctacatcgttagacccacta

SEQ ID NO: 38030 - DNA, 40 bp, Mesorhizobium opportunistum; identical to SEQ ID NO: 38020
  source 1..40: mol_type = genomic DNA

SEQ ID NO: 38031 - protein, 537 aa, Pseudomonas fluorescens
MSSKIAHSYIRFSSAQQSMGDSLKRQQELLAKWMVAHPDHTLSSTRFTDLGISGFRRKHLQNGFGKLLAAIEHGDIARGDVVLIEAIDRAGRFNPNSMLHTLTGITDAGVRLITLDDGLEYNDDPNNTNNLFLLVAKCQQAHQYSAALSSRVKAAYATKREKAAKGEGVTRRTPLWLDADGKLVEDLAPLIVSIFQDYADGIGERRILARVRGQHPLLDNLNPTTIKKWLKNPTAIGRWQPRPIDRVEQAPIEDVYPAVVSKELWHRVQKRLASGTKIKSASAVYLLSGLVRCGRCGKNFGVVNVKRSPAVMLCMGRHRLGEAGCSNSRSIPMRVLDYIRSQTMYGAMQRAAASQNLSSGEKRMIEIDGELTELRRRELNAAEAVVQYGMSKAITDVLDKVLAQIGELEQEKVLLKVAPVPSTLEDMVDLQHALLDDDKQRLNALLQGVGYAIVCDGPTITVNEPHIETGGSVQVYEYKGSHRPTETYRLLENGQLLALDMPNSKQAAAALAEFEATPITQHLQWDGGDGFVEVGGK

SEQ ID NO: 38032 - DNA, 50 bp, Pseudomonas fluorescens
  source 1..50: mol_type = genomic DNA
tatcccaacagtgccgactatatcgggatgaagtcggtaatgttaggatg

SEQ ID NO: 38033 - DNA, 40 bp, Pseudomonas fluorescens
  source 1..40: mol_type = genomic DNA
aatcagcacgcccatcagcggcgtggtggcgttgaaaatc

SEQ ID NO: 38034 - DNA, 50 bp, Pseudomonas fluorescens
  source 1..50: mol_type = genomic DNA
tatcccaacagtgccgactatatcgagatgaagtcggtaatgttaggatg

SEQ ID NO: 38035 - DNA, 40 bp, Pseudomonas fluorescens
  source 1..40: mol_type = genomic DNA
agccaccgcgcccggccgcgacgtggtaactttgaaaatc

SEQ ID NO: 38036 - protein, 503 aa, Intestinimonas butyriciproducens
MNNRIDAIYARQSVDKKDSISIESQIEFCKYELKGGNCKEYTDKGYSGKNTDRPKFQELVRDIKRGLIAKVVVYKLDRISRSILDFANMMELFQQYNVEFVSSTEKFDTSTPMGRAMLNICIVFAQLERETIQKRVTDAYYSRSQRGFKMGGKAPYGFHTEPIKMDGINTKKLVVNPDEAANIRLMFEMYAQPTTSYGDITRYFAEQGILFNGKELIRPTLAQMLRNPVYVQADLDVYEFFKSQGTIIVNDAADFTGMNGCYLYQGRDVKPRKKNDLKDQMLVLAPHEGIVPADIWLACRKKLMNNMKIQSARKATHTWLAGKIKCGNCGYALMSINNPVGKQYLRCTKRLDNKSCAGCGKIITSELEAVVYQQMVKKLEKHKTLTGRKKAAKANPKIAALQVELLHVDSEIEKLVDSLTGANNVLLSYVNVKIAELDGRKQELVKQIAELTVEAISPEQVNQISGYLDTWDNVSFDDKRRVVDLMITTVAATSDSLNITWKI

SEQ ID NO: 38037 - DNA, 50 bp, Intestinimonas butyriciproducens; identical to SEQ ID NO: 12
  source 1..50: mol_type = genomic DNA

SEQ ID NO: 38038 - DNA, 40 bp, Intestinimonas butyriciproducens
  source 1..40: mol_type = genomic DNA
ttaggctgaattagattccttgtctttcaataaaagcaac

SEQ ID NO: 38039 - DNA, 50 bp, Intestinimonas butyriciproducens; identical to SEQ ID NO: 12
  source 1..50: mol_type = genomic DNA

SEQ ID NO: 38040 - DNA, 40 bp, Intestinimonas butyriciproducens
  source 1..40: mol_type = genomic DNA
ttactctgaattagattcattgtcatttcctaaaaacagt

SEQ ID NO: 38041 - protein, 567 aa, Anaerotruncus rubiinfantis
MKQSSKYQTGTAALYCRLSRDDNMDNESNSIQNQKKILQKAAKDKGYTDTIFFVDDGITGTTMKRKDFQRMIQAIEAGYISAVFVKDLSRLGRNYIEVGKLTEEFFPQHDIRLVAVADGVDSDEGEDDFTPFRNIMNEWYAKDISKKRKIVNKMKGNAGIPLSQPPYGYMKNPDDPRFWVIDPDAADVVRRIYRLALEGNGPMQIATALCEAGILNPSAYRTSKRISKGGSKSTLEPTKWNHTTVKKILTLQEYCGDVINFKTYSKSYKMKRRIENPEENRAIFLDVHEPIIDRISWEKVQSLHTTRRRRTTVTQEPSVFSGIMKCPECGGNLTFHFNQNNHDIKFFSCNNHNSGLRKCSSTHYIRLDFLEQVVLYEVNRLAAFANEYENDFIKAMMGRSARAAETDRARKQRELDVLLARDKELDMLFERLYEDNVSGKIDDARFAKMAKRYEQEQGEAAGKIKALRLELKKADGKKMDMDFFLETIRRYTDATTITRRMVGELIDHIDVYHAEKRDGVTNQRVVIHYNCIGAFDVPDRRKIPEADIIMETRKGVALSYAPAQIAV

SEQ ID NO: 38042 - DNA, 50 bp, Anaerotruncus rubiinfantis
  source 1..50: mol_type = genomic DNA
cagatcctttaatgatactccgcatggtcggagtgtcattaaaggatctg

SEQ ID NO: 38043 - DNA, 40 bp, Anaerotruncus rubiinfantis
  source 1..40: mol_type = genomic DNA
caaaatgtagcttatgctgtggtccgaatagcgggacttg

SEQ ID NO: 38044 - DNA, 50 bp, Anaerotruncus rubiinfantis
  source 1..50: mol_type = genomic DNA
cagatcctttaatgatactccgcacggtcggagtgtcattaaaggatctg

SEQ ID NO: 38045 - DNA, 40 bp, Anaerotruncus rubiinfantis
  source 1..40: mol_type = genomic DNA
caaaatgaagcaaaacctacggtccaaatagtgccacttg

SEQ ID NO: 38046 - protein, 551 aa, Streptococcus dysgalactiae
MSKEKIKVYLYTRVSTSIQIDGYSLEAQKSRMKAFALYNDYEIVGEYEDAGKSGKSIEGRIQFTRMMEDIKSGKDGVSFVLVFKLSRFARNAADVLSTLQTMQDFGVNLICVEDGIDSSKDAGKLMISVLSAVAEIERENIRVQTMEGRIQKAREGKWNGGFAPYGYQLIDGKLLINEEEAIAIRTIFDQYVNTSIGANGLSKYLENHGIRKIPRQNGKNPLFDAGLIRKILKNPVYNGKIAFGRRTLEKVHGTRNEYRQVDQDDYIVAEGIHEAIIPDELWQAAQVKLKAQAKKYEHVNKGKNMRTHLLSGIVKCPICGAGMFGNKSIKYKKDGTKYKDFYYYGCKHRLMNRGHKCTYNKQIREELLDDAVAEVIIKLVSNPKFASMMQEKINMKVDTSAIENEIDNYQKELRKSHSTKFKLIEEIDNLDVEDKHYKRRKNDLDDRLYRMYDKIEELESLLIDAKAKKQTIEAEKLTGDNIYKVLIYFDKLYKVMNDVERRQLITALISEIQIYEEKQPNGQWLKSITFKLPIIDKDLNIGLDNDEQVEC

SEQ ID NO: 38047 - DNA, 50 bp, Streptococcus dysgalactiae
  source 1..50: mol_type = genomic DNA
aggtttggacaatgatgaacaagttgagtgcatagcgttgatacaaagag

SEQ ID NO: 38048 - DNA, 40 bp, Streptococcus dysgalactiae; identical to SEQ ID NO: 33703
  source 1..40: mol_type = genomic DNA

SEQ ID NO: 38049 - DNA, 50 bp, Streptococcus dysgalactiae
  source 1..50: mol_type = genomic DNA
aggtttggacaatgatgaacaagtcaagtgcatagcgttgatacaaagag

SEQ ID NO: 38050 - DNA, 40 bp, Streptococcus dysgalactiae
  source 1..40: mol_type = genomic DNA
ttccacagccagaggatttcaagtctataatgttgctaaa

SEQ ID NO: 38051 - protein, 551 aa, Mediterraneibacter faecis
MKNKKIKCDIYTRVSTTMQVDGYSLDAQKEKLKRYAEFQNMEIVNEYSDEGKSGKSVEGRPEFQRMLDNIENGTDEVQFVLVFKLSRFGRNAADVLNSLQRMQDFGVNLICVEDGIDSSKDSGKLMISVLSAVAEIERENILVQTMEGRKQKAREGKWNGGFAPYGYELVNGELQIAEDEAEIIRLIYDKFIHTNMGISAIAAWLNQHGYKKKKRQNNTLDAFASSFIKGVLDNPVYCGKLAYGRRKNEKVSGTRNEYRIVKQENYMLHDGIHEGIISETDWELAHQKREKTGVKYEKTHSLDHEHILSGILRCPLCGSGMYGNVNRKKKKDGTLYKDYFYYACKHRRLVDGHKCGYRKQWSEEKINNAVEEVIRKLVKNPKFEEAILNKIGSRIDTEEIEKEIEGLEKQHRQLTGAKARLGQQMDSLDIMDKFYEKKYQDMETRLYRLYDEIEGVENSIEEVKNRLLNIRQQKISEENVYQFLLYFDKLYDKFTDLEKKEFLNSFVEQVDIYEQEQPDGRFLKHIKFRFPVYFGDRETQELCWDNESTVE

SEQ ID NO: 38052 - DNA, 50 bp, Mediterraneibacter faecis; identical to SEQ ID NO: 37382
  source 1..50: mol_type = genomic DNA

SEQ ID NO: 38053 - DNA, 40 bp, Mediterraneibacter faecis
  source 1..40: mol_type = genomic DNA
cccgcagagtgtgcatgtggagacatgtgttttattgtcc

SEQ ID NO: 38054 - DNA, 50 bp, Mediterraneibacter faecis
  source 1..50: mol_type = genomic DNA
tgttgggacaacgaaagtaccgttctgacggttgttcttttgtcccaaca

SEQ ID NO: 38055 - DNA, 40 bp, Mediterraneibacter faecis
  source 1..40: mol_type = genomic DNA
ccctaaaaatgttcatgttctgacatttgttattctgtcc

SEQ ID NO: 38056 - protein, 533 aa, Dorea longicatena
MQVDGYSLDAQRDKLRKYAAYEDMVVAGEYSDEGFSGKNIQGRQEFQRMLNDIQDCKDGVSYVLVFKLSRFGRNAADVLNSLQLMQDFGVNLICVEDGIDSSKDAGKLMISVLSAVAEIERENIRTQTMAGREQKAREGKWNGGFAPYGYKLENGNLVIAEDEVEVIRVIYDRYIHTNEGVAGVAKYLNRNGYVKKLRQNNTIPGFSRDFVKNVLYNPVYMGKIAYGRRRTEKKQGTRNEIHVVEQSEFPVYEGQHEAIISEEDWYLAQEKRKINSFKREKVNNPDHAHILSGILKCPCCGKSMYGNIAKAHSKDKKTRYYYYCKNTVTPTGHECSFRLNIEQTEINKFVAKIISAMVNNPRFVEAIQAKIGTAVDTEDMEKQIAVLQGQLKQAFGTKSRLERQMDTLDINDAHYDRKILDLQRRYDEQYDTIEEIEVQIGELQSQIRSIQQEKISGDNIYRLLLAFDEVYHSATEAEQKEFMKAFIERIEMFPEKRKDGSWIKKIVFNFPVPVDGEEVKELPLETETTVETV

SEQ ID NO: 38057 - DNA, 50 bp, Dorea longicatena
  source 1..50: mol_type = genomic DNA
cccttggaaactgaaacaaccgtcgagacggttgtcttgctttccaaggg

SEQ ID NO: 38058 - DNA, 40 bp, Dorea longicatena
  source 1..40: mol_type = genomic DNA
cccgggaacttatcatgtggagacagttgttcttttgtcc

SEQ ID NO: 38059 - DNA, 50 bp, Dorea longicatena
  source 1..50: mol_type = genomic DNA
cccttggaaactgaaacaaccgtcctgacggttgtcttgctttccaaggg

SEQ ID NO: 38060 - DNA, 40 bp, Dorea longicatena; identical to SEQ ID NO: 38055
  source 1..40: mol_type = genomic DNA

SEQ ID NO: 38061 - protein, 572 aa, Massiliimalia timonensis
MKGQDNRKYAIYSRKSKFTGKGESIENQIELCRQHIKLHHENVTEEDVLIFEDEGFSGGNVNRPQFQAMMKQIRANQIQAVVCYRLDRISRNVGDFAKLKDEFDYYNVEFTSIRDDFDTTSPSGRAMMMMVSVFAQLERETTAERIRDNMHELAKSGRWLGGTTPTGYKSTQIVGSVTVDGKERKAYKLELIKEEAEIIKLIFSKFIETNSLTKTDTYLLQNNVTTKNGKNFTRFSIRSILQNPVYMIADQNAWEYFDSLGVEIYAEQSEFDGKHGIMAYNKTIQKSGKSNQMRDMDEWIVAVGKHKGLVAGADWVKVQELLSQNRSKSYRKPKSNVALLSGLLYCGNCGSFMRPKLSQRTNAQGEKIYSYLCETKERSRCQLCNSKNPNGNELDKMICEQIKLISEDSSYFMTNLVNVQKKLEGNREEYNQQLDVLKKELQENEQQIANLVDTLAKTPNTPAFDYITEQINTLHEKNEKIKNRINELESLTKNHLYSSEEFDRTKELLKSFGQSFDTMSVEQKRMALRAFIRRIVWDGKNVHVVLFGDTESEIDYTDLAEENPEPNRGDSE

SEQ ID NO: 38062 - DNA, 50 bp, Massiliimalia timonensis; identical to SEQ ID NO: 12967
  source 1..50: mol_type = genomic DNA

SEQ ID NO: 38063 - DNA, 40 bp, Massiliimalia timonensis
  source 1..40: mol_type = genomic DNA
tgccagcaggtgtattgaaaatgaaatcctaatgcatttc

SEQ ID NO: 38064 - DNA, 50 bp, Massiliimalia timonensis
  source 1..50: mol_type = genomic DNA
cagagccaaaccgaggggatagcgctaccaatcccctcataacggctctt

SEQ ID NO: 38065 - DNA, 40 bp, Massiliimalia timonensis
  source 1..40: mol_type = genomic DNA
ttgcaggagaggtactgaacttgaaagccttaggaatttc

SEQ ID NO: 38066 - protein, 575 aa, Intestinimonas butyriciproducens
MTATQNYGNIKISTPILSADPNVKEDVMTDQQKITILYCRLSNEDKLEGESNSIQNQRELLTKYAQDHGYTNLKILVDDGYTGTNFQRPGVQEGFELVKQGLVGCWLCKDLSRFGRDYLTVGQYTDIIFPSYDVRFIAVNDGVDSQRGDGEGFAAVRNLFNEWYPRDTSKKVRISLHQRGTSGKHLGKPPYGYRCDPNDKDKWILDEEAALVVKRIFDLCIDGKGPEQISRILERDQVLTTKALYASRKGKPLPKNPYGWKDQSIVGILERQEYTGCTCNFKTYSKSYKLKKRIPNNPEDMFIVPDTQEAIVSQAQWDRVQELRKNKRRPAKAERQGLFSGLLYCADCGGKLHFATCKSFEGKQDHYVCSKYKSGRGDCSAHYIREDVLRELVLERIQAVNEYIRDDVEGFQEEWLHYRRADQERDIREDQKRVEQARKRLANLDVVMSRLYEDYALGEISKEKYKKMTADYEAEQERLKLEIETTEEWVEQRQAMGDDLDAFIALTKKYVDVTELTQTIVNEYIKKIIIHAPDKSDGKRRQKVEIIFNFVDEVEIPVLAEPMIAESTIGRRKTA

SEQ ID NO: 38067 - DNA, 50 bp, Intestinimonas butyriciproducens
  source 1..50: mol_type = genomic DNA
atagttccttacgactgttgagccttggcataacagtgataaggaagtaa

SEQ ID NO: 38068 - DNA, 40 bp, Intestinimonas butyriciproducens
  source 1..40: mol_type = genomic DNA
gcaaaaagtcctgcaagccttgcaattaccagcttttttg

SEQ ID NO: 38069 - DNA, 50 bp, Intestinimonas butyriciproducens
  source 1..50: mol_type = genomic DNA
atagttccttacgactgttgagcccaggcataacagtgataaggaagtaa

SEQ ID NO: 38070 - DNA, 40 bp, Intestinimonas butyriciproducens
  source 1..40: mol_type = genomic DNA
gcctaagctcctgggagcccagcagttctcagcttttttt

SEQ ID NO: 38071 - protein, 561 aa, Burkholderia stagnalis
MAAPKKTKYKVYSYLRFSDPKQAAGSSAERQMEYAARWAAEHNMQLDASLTLRDEGLSAFHQRHVKQGALGVFLRAVEDGRIQPGSVLIVEGLDRLSRAEPIQAQAQLAQIINAGITVVTASDGREYNRERLKAQPMDLVYSLLVMIRAHEESDTKSKRVKAAIRRQCEGWVAGTWRGIVRNGKDPHWVQLGKDGEFEHVPDRVLAVRTMIDLFLQGHGSTEITRILTERNLFVSNAGNYSTHMYRIVRNRALIGEKPIAVDGEEFRLEGYYPPILSTEEFAQLQDAMNTRGRRKGKGEIPSVLTGLSITTCGYCGAAVVSQNGTWRSTSAKGVVRRLSCSTYQYNTGCPIGGSCDSEVVERALMRYCSDQFNLTRLLEGDDGTARRTAQLAIARQRASEIEAQIQRVTDALLSDDGAAPAAFMRRARELEAELEQQRREIEALEHQIAASTAHEIPAAAEAWAKLVDGALALDYSARMKARQLVADTFRQIVLFQRGFAPIDDAAADRWKRDGMIGLMLVTKRGGMRLLNIDRQTGAWQAEDNLDLSGSPVGGLPLPPEI

SEQ ID NO: 38072 - DNA, 50 bp, Burkholderia stagnalis
  source 1..50: mol_type = genomic DNA
tatatatttaccctaacgctcggcaacccgaaagttaggcaaaatacatc

SEQ ID NO: 38073 - DNA, 40 bp, Burkholderia stagnalis
  source 1..40: mol_type = genomic DNA
cctcctggtgacgctcggcaacccgaagatcatgatgttc

SEQ ID NO: 38074 - DNA, 50 bp, Burkholderia stagnalis
  source 1..50: mol_type = genomic DNA
tatatatttaccctaacgctcggcagcccgaaagttaggcaaaatacatc

SEQ ID NO: 38075 - DNA, 40 bp, Burkholderia stagnalis
  source 1..40: mol_type = genomic DNA
cctcctgctgacgctggggagctccaccttcctgaagttc

SEQ ID NO: 38076 - protein, 524 aa, Streptomyces sviceus
MTITTQRIATEVATRTAREYLRVSKGRNRSTKSTRDQHADNLAAEMDHGPWTWGQPYEDTGSASKYARKVRDDFEKLLTDIKSGAFGKPGDVLVLWEVSRLARETGRGVELIDACEAGGYLIHVTSHERTYNPQNYQDRHSLISGINDAEKEARLLSARTLRGLNSAAREGRPQGQVPFGYKRDYEVVDGRPRPVAQYPDPETGPLVRELYERVAGVNGKLPEPIYAISKDWEARGVIGKNGKTFTPQSLRSMLIRPANAGLRKHNGVLVPEEWEGWTPIISRELFDRVQRLLADPSRRKYTGAHIQHVLSMTLRCDVCGGYMAVMTRNKNGEKVALGYQCHPHGHVWIPKEETDRIIIGDLDATDPETGEPKPELGVILTYLSAPHRVARLSQRPAGGPEQDEASVELGRLRGELEELEAAPAPKTARARLQRTADMEELETDIAALEAKLAALTAPDPLAGILPDDPEADLIDWWKAADVQRQRAVAALLLTPELLGQVRVKRSPVKRNAAPVTERLEWVTA

SEQ ID NO: 38077 - DNA, 50 bp, Streptomyces sviceus
  source 1..50: mol_type = genomic DNA
gtgtgtaacaactaaggccgaaccatggttcggccttagttgttacacac

SEQ ID NO: 38078 - DNA, 40 bp, Streptomyces sviceus
  source 1..40: mol_type = genomic DNA
ggtcctggtaggccgaaccatggtgagcgaccttgaggac

SEQ ID NO: 38079 - DNA, 50 bp, Streptomyces sviceus; identical to SEQ ID NO: 38077
  source 1..50: mol_type = genomic DNA

SEQ ID NO: 38080 - DNA, 40 bp, Streptomyces sviceus
  source 1..40: mol_type = genomic DNA
ggtcctggtgggtggaagcatggagagagagctagggcac

SEQ ID NO: 38081 - protein, 514 aa, Mucilaginibacter phyllosphaerae
MTSAYLYVRVSTDEQKRKGYSLPEQEDRLLRHCEFNNIEVKGIFREDYSAKNFKRPEWNKLLTVVKNRKKKDRENILFIKWDRFSRNIEFAYQMIGILRAINVQAMAIDQPIDFSIPESTVMLAVYLSIPEAENGRRALNTSGGMRRARKEGRWMGAAPKGYQNLVYPDGRKYIAPKHPEAALMKWVFEELSKGILVAEQVRKIACQRGLKCERNNFWKLIRNPMYAGIIVVPPFENEEMQFVKSQHEALISQTLFYEVQNILNGNKRPIATKVVSKDMLPLRGFLECPDCNRMLTGSASKGRHERYYYYHCTGTTCKCRFKAETVNQYFEDELIKFNLAPGVGELFKMVVMDECRSTSRDDLDEKKVISNRIEEQELILSKARKRLLKEEIDADDFKAIKAECNEELRLLESKLADLPAKSNELKSIEMLLDVVIARYSNILQHYKNQPVEEKRKIIGSMYPKNLCFDGTQHRTAYLSEPLSLILLINSNLQGKKRGEKLSFYNLSPQVARRG

SEQ ID NO: 38082 - DNA, 50 bp, Mucilaginibacter phyllosphaerae
  source 1..50: mol_type = genomic DNA
ttttacaacctttccccccaagtagcccgtaggggaataatctcgaacca

SEQ ID NO: 38083 - DNA, 40 bp, Mucilaginibacter phyllosphaerae
  source 1..40: mol_type = genomic DNA
ttcgtaaagcggcttcgtagcccgtaggggaatcgaaccc

SEQ ID NO: 38084 - DNA, 50 bp, Mucilaginibacter phyllosphaerae
  source 1..50: mol_type = genomic DNA
ttttacaacctttccccccaagtatcccgtaggggaataatctcgaacca

SEQ ID NO: 38085 - DNA, 40 bp, Mucilaginibacter phyllosphaerae
  source 1..40: mol_type = genomic DNA
tttttaaaacggcttactttcctgaccgggaatcgaaccc

SEQ ID NO: 38086 - protein, 522 aa, Mesorhizobium amorphae
MVKKTAENPVRGGLVKALLYARVSSKEQEKEGFSIPAQCKLLREYAAQKQFGIAQEFIDVETAKSSGRTNFNEMVKYLRKHPGVRVVLVEKTDRLYRNLKDWVTLDELDVEIHLAKEGVILSQESRSSEKFMHGIKVLMAKNYIDNLSEEARKGQMEKAEQGIWPTKAPLGYLNVTGNDGKKIIEPDTELAPMITRLFERYSTGGYSLKAVARIAHAEGLVYPKSGHPVPVSTVHSILRNRLYTGLFQWNGKLHHGKHEPLISIELWERVQGVLTGRHATPIHSYGYEFAFGGLMTCARCGCAVVAEIKKGKYTYYHCTGHNDKGRGGYAECRRKYVREEVLEETFGTLLDKLHFDEEVLDWIRDALKASHADERKEQEQAIQRCQKEYKRLEDRLQAMYLDKLDGRIDSAFYDRMSAQWRVEQTRLLREMERHSEAEESYMEEGVRLLELARNARQLFARQAPGEKKRLLNLVLSNCAWDDGEVRAVFRQPFDLLAETNAVLSADQSGGIVMSKGHPVWLG

SEQ ID NO: 38087 - DNA, 50 bp, Mesorhizobium amorphae
  source 1..50: mol_type = genomic DNA
tgtccaaaggacatccagtttggctggggttcttggaagcttttcgaact

SEQ ID NO: 38088 - DNA, 40 bp, Mesorhizobium amorphae
  source 1..40: mol_type = genomic DNA
ctcgtgctgttggtttggctggggcgccaggattcgaacc

SEQ ID NO: 38089 - DNA, 50 bp, Mesorhizobium amorphae
  source 1..50: mol_type = genomic DNA
tgtccaaaggacatccagtttggcttgggttcttggaagcttttcgaact

SEQ ID NO: 38090 - DNA, 40 bp, Mesorhizobium amorphae
  source 1..40: mol_type = genomic DNA
ctcgtgctgtagggttcccttgggctccatggtgagaaac

SEQ ID NO: 38091 - protein, 475 aa, Micromonospora saelicesensis
MELAAIYERISDDREGRELGVERQNKDCLGLTRRDGLTVFGIYRDNDISASTNSRKPRPEYNRLIADAKAGKFSVIVAYTSGRLTRRPREHEDLIDLATGYGIRYRYVRSPSFDLNTAQGREIARTMAARDAGEAEEIAERVAAEVLDRAERGEYHGGPRGYGLAPNGRDLIDHEAAEIRAWYGHVLAGGSLSGLEAALNRRGVLSTTGKAWRAPVIRKILLNPRNAGMRILHDVEYAAPNKAIVSRATWLAAKQLLENPARRIHQSGPARRHVGTGLFICERCDPVTVNVNYDRNGKLLYRCLSCHRTWRADPIHRWIDATVEAMLDREDARQRLLPEPAEGVDLQDLWAEAAAIQNNLGELAAEFALARGAVKAALKTGLDRGQERLDEIQAEITAAGRVDATAALLVARNPVAAYRAITDVSLRQAVLRSMIVVRLGEPIRGRATWDATKFMGASQWAHDDRTWAEIWAGDS

SEQ ID NO: 38092 - DNA, 50 bp, Micromonospora saelicesensis
  source 1..50: mol_type = genomic DNA
ctcggtagtacagaaaccgtggaccacccgatggtgcgtagactaccggg

SEQ ID NO: 38093 - DNA, 40 bp, Micromonospora saelicesensis
  source 1..40: mol_type = genomic DNA
cgccgtgcacaccgaggaccacccgatggagtacctcgac

SEQ ID NO: 38094 - DNA, 50 bp, Micromonospora saelicesensis
  source 1..50: mol_type = genomic DNA
ctcggtagtacagaaaccgtggacgacccgatggtgcgtagactaccggg

SEQ ID NO: 38095 - DNA, 40 bp, Micromonospora saelicesensis
  source 1..40: mol_type = genomic DNA
caccatgctcaccgaggccgacccaatggtgttccgggcc

SEQ ID NO: 38096 - protein, 538 aa, Bacillus thuringiensis
MHVAIYIRVSTTSQVLKGTSLDSQLALCKKKAQELGYSNSQIIIYREAGFSGEDIDIRPEMTRLREDIKKGDISKIIIQHPDRLSRELIDKLTVCREFEKYGVEIIFVDTEFQNTPEGWLFFNVMSAIATYELGLIKKRTVRGRLKAVEKEKKVMPMRVPPFGYELVNNQLIINEKEANVVKQIYHWYVYDQLTLRQIGERLYQIGVVPKRKEKKEWSASSIRRILTSQIYIGKYTYNKRKTQKVKGEKTVTGNPKKTYTIRAEEDWIIIDVPKIVDEALFHSAQKQRSKNTKNSGNNKNQYLLKGLIKCQCGRTWEGTFYSGRKDKQTGEQQKYFIYRCPNRNPKNYGPTIKKCKTPSIKIEEIEGYIWNLVIEVFSHPDSYYVYMEEGHTEFINQYEKEVNIRLNKIKEVEKKREKLKMLFLEELISEQEMKSDFKKTNEQINKLKEELKTFEEKRNLEHKKENTKKRMDQIIKSIQNILKDKIDNKLTFEEKRNIITQLVDEIHLEFQGEEQVHVKINGTLDTLVNDIVSSSQSL

SEQ ID NO: 38097 - DNA, 50 bp, Bacillus thuringiensis
  source 1..50: mol_type = genomic DNA
acatcgtttcgagttcacaatctcttgagattatgaacacaaaagaacgt

SEQ ID NO: 38098 - DNA, 40 bp, Bacillus thuringiensis
  source 1..40: mol_type = genomic DNA
tcctgtgttctcaaattttttaacgatatgagctacaagc

SEQ ID NO: 38099 - DNA, 50 bp, Bacillus thuringiensis
  source 1..50: mol_type = genomic DNA
acatcgtttcgagttcacaatctcaagagattatgaacacaaaagaacgt

SEQ ID NO: 38100 - DNA, 40 bp, Bacillus thuringiensis
  source 1..40: mol_type = genomic DNA
tcctgttttcttaaattttaaaagaaaatgtattacaaaa

SEQ ID NO: 38101 - protein, 517 aa, Blautia faecis
MKVAIYCRLSEEDRNKQFETDDSNSIQNQKSMLLQYAMEQGWELYNIYSDDDYTGADRRRPEFNRLLKDAEQHRFDIILCKTQSRFTRELELVEKYIHGLFPIWGIRFISIVDNADTANKGNKKSRQINGLVNEWYLEDMSENIRSVLTNRRKNGFHIGAFALYGYKKDPNQKGHLIIDEEAAAVVREVFTLFSQGYGKTAIARMLNDRGIPNPTEYKRLHGLRYQQPKTRNSTLWKYFAISDMLINEIYIGNMVQGKYGSVSYKTKQNKPRPKSEWYVVEGTHEPIIDRELWDRVQALIAQRAKPFDVGTIGLFARKARCANCGYTMRSSKNHNKHYLQCSNRHVAKDACIGSFISVDKLEKMVIDELNRLAAEYLDKDELEQNIEFCDNLQGQKKRLLSDLTVYQKKVDEYSKGIRELYMDKVKGLISESDYVDMSKGFTTERDRLERVIADGKKQLAEIEEKIAAGDNRRELIEQYTNLEHLTREIVETLIDYISVGKRIPGTRDVPIEIHWNF

SEQ ID NO: 38102 - DNA, 50 bp, Blautia faecis
  source 1..50: mol_type = genomic DNA
agttgttcttatatgattgcagcagatggtacgactgcgtaagaacaaca

SEQ ID NO: 38103 - DNA, 40 bp, Blautia faecis
  source 1..40: mol_type = genomic DNA
atttgaagaccttgcagcagaacagaaagcacgctccact

SEQ ID NO: 38104 - DNA, 50 bp, Blautia faecis
  source 1..50: mol_type = genomic DNA
agttgttcttatatgattgcagcaaatggtacgactgcgtaagaacaaca

SEQ ID NO: 38105 - DNA, 40 bp, Blautia faecis
  source 1..40: mol_type = genomic DNA
atttgaagacactccagcaaaaacgcatgcattttccact

SEQ ID NO: 38106 - protein, 565 aa, Xanthomonas citri
MAIKAKVYSYLRFSDPKQAAGSSADRQMEYARRWAAEHGMTLDSELSMQDAGLSAYHQRHVTRGALGLFLQAIDDARIPAGSVLVVEGLDRLSRAEPIQAQAQLAQIINAGITVVTASDGREYNREGLKAQPMDLVYSLLVMIRAHEESDTKSKRVRAAIHRQCQGWTAGTWHGLVRNGKDPHWLRLVGQAFEIVPERGEAVRTAVSMFREGHGAVRIMRTLADRGLQITNGGNPSQQLYRIVRNRALIGEKVLEVDGQEYRLAGYYPPLLSPAEFADLQHLTAQRSRRKGTGEIPGLITGMRIAFCGYCGAAMVSQNLMTRGRREDGRPQNGHRRLICVSNSQGGGCPVAGSCSVVPIEHALVTFCADQMNLSRLLDSGNRADGIAGQLTIARVQVSDTTARIDKITDALLASDAGQAPAAFLRRARELEFELAEQQRRVEALEHELAAVALSPEPAAAKAWAGLVEGVEALDHDARIKARQLVADTFDRIVVFHRGRKPEQSRSWKGTIDLLLMAKRGGARLLHIDRQTGDWKAGEEIDTVQIPLPPGVAEATPQSEASLGPV

SEQ ID NO: 38107 - DNA, 50 bp, Xanthomonas citri
  source 1..50: mol_type = genomic DNA
agtctatttcaactaactttaggccagcccaacgatataaaccctatact

SEQ ID NO: 38108 - DNA, 40 bp, Xanthomonas citri
  source 1..40: mol_type = genomic DNA
atcgacgagcgccttcgggcagccaaggctgacgaagccg

SEQ ID NO: 38109 - DNA, 50 bp, Xanthomonas citri
  source 1..50: mol_type = genomic DNA
agtctatttcaactaactttaggcatgcccaacgatataaaccctatact

SEQ ID NO: 38110 - DNA, 40 bp, Xanthomonas citri; identical to SEQ ID NO: 10480
  source 1..40: mol_type = genomic DNA

SEQ ID NO: 38111 - protein, 565 aa, Xanthomonas campestris
MAIKAKVYSYLRFSDPKQAAGSSADRQMEYARRWAAEHGMTLDSELSMQDAGLSAYHQRHVTRGALGLFLQAIDDARIPAGSVLVVEGLDRLSRAEPIQAQAQLAQIINAGITVVTASDGREYNREGLKAQPMDLVYSLLVMIRAHEESDTKSKRVRAAIHRQCQGWTAGTWHGLVRNGKDPHWLRLVGQAFEIVPERGEAVRTAVSMFREGHGAVRIMRTLADRGLQITNGGNPSQQLYRIVRNRALIGEKVLEVDGQEYRLAGYYPPLLSPAEFADLQHLTAQRSRRKGTGEIPGLITGMRIAFCGYCGAAMVSQNLMTRGRREDGRPQNGHRRLICVSNSQGGGCPVAGSCSVVPIEHALVTFCADQMNLSRLLDSGNRADGIAGQLTIARVQVSDTTARIDKITDALLASDAGQAPAAFLRRARELEFELAEQQRRVEALEHELAAVALSPEPAAAKAWAGLVEGVEALDHDARIKARQLVADTFDRIVVFHRGREPEQSRSWKGTIDLLLMAKRGGARLLHIDRQTGDWKAGEEIDTVQIPLPPGVAETTPQSEASLGPV

SEQ ID NO: 38112 - DNA, 50 bp, Xanthomonas campestris; identical to SEQ ID NO: 38107
  source 1..50: mol_type = genomic DNA

SEQ ID NO: 38113 - DNA, 40 bp, Xanthomonas campestris; identical to SEQ ID NO: 38108
  source 1..40: mol_type = genomic DNA

SEQ ID NO: 38114 - DNA, 50 bp, Xanthomonas campestris; identical to SEQ ID NO: 38109
  source 1..50: mol_type = genomic DNA

SEQ ID NO: 38115 - DNA, 40 bp, Xanthomonas campestris; identical to SEQ ID NO: 10480
  source 1..40: mol_type = genomic DNA

SEQ ID NO: 38116 - protein, 553 aa, Xanthomonas hortorum
MAIKAKVYSYLRFSDPKQAAGSSADRQMEYARRWAAEHSMTLDSELSMQDAGLSAYHQRHVTRGALGLFLQAIDDRRIPAGSVLVVEGLDRLSRAEPIQAQAQLAQIINAGITVVTASDGREYNREGLKAQPMDLVYSLLIMIRAHEESDTKSKRVRAAIHRQCQGWMAGTWRGLVRNGKDPHWLRLVDQHFEIAPERGEAVRIAVRMFREGHGAVRIMRTLTDMGLQITNGGNPSQQLYRIVRNRALIGEKVLEVDGQEYRLANYYPALLSPAEFADLQHLTVQRSRRKGTGEIPGLITGMRIAFCGYCGAAMVAQNLMTRGRREDGRPQDGHRRLICVSNSQGGGCPVAGSCSVVPIEHALVTFCADQMNLSRLLDFGNRADGIVGQLTVARVQVSDTATRIDKITDALLASDAGQAPAAFMRRARELEAELAEQQKRVEALEHELAAVALSPEPAAAKAWACLVAGVEALDYDARIKARQLVADTFDRIVVFHRGRKPERTRSWKGTIDLLLIAKRGGARLLHIDRQTGGWQAGEQIDTTQIPLPPNIAD

SEQ ID NO: 38117 - DNA, 50 bp, Xanthomonas hortorum
  source 1..50: mol_type = genomic DNA
agtttacttgaactaactttcgggcagcctaatgatataaaccctatact

SEQ ID NO: 38118 - DNA, 40 bp, Xanthomonas hortorum; identical to SEQ ID NO: 38108
  source 1..40: mol_type = genomic DNA

SEQ ID NO: 38119 - DNA, 50 bp, Xanthomonas hortorum
  source 1..50: mol_type = genomic DNA
agtttacttgaactaactttcgggatgcctaatgatataaaccctatact

SEQ ID NO: 38120 - DNA, 40 bp, Xanthomonas hortorum; identical to SEQ ID NO: 10480
  source 1..40: mol_type = genomic DNA

SEQ ID NO: 38121 - protein, 553 aa, Xanthomonas arboricola
MAIKAKVYSYLRFSDPKQAAGSSADRQMEYARCWAAERGMTLDSELSMQDAGLSAYHQRHITRGALGLFLQAIDDARIPAGSVLVVEGLDRLSRAEPIQAEAQLAQIINAGITVVTASDGREYNREGLKAQPMDLVYSLLVMIRAHEESDTKSKRVRAAIHRQCQGWMAGTWHGLVRNGKDPHWLRLVDQHFEIAPERGEAVRIAVSMFREGHGAVRIMRTLADRGLQITNGGNPSQQLYRIVRNRALIGEKVLEVDGQEYRLAGYYPPLLSPAEFADLQHLTAQRSRRKGTGEIPGLITGMRIAFCGYCGAAMVAQNLMTRGRREDGCPQDGHRRLICVSNSQGGGCPVAGSCSVVPIEHALVTFCADQMNLSRLLDFGNRADGIVGQLTVARVQVSDTATRIDKITDALLASDAGQAPAAFMRRARELEAELAEQQKRVEALEHELAAVALSPEPAAAKAWACLVAGVEALDYDARIKARQLVADTFDRIVVFHRGRKPERTRSWKGTIDLLLIAKRGGARLLHIDRQTGGWQAGEQIDTTQIPLPPKIAD

SEQ ID NO: 38122 - DNA, 50 bp, Xanthomonas arboricola
  source 1..50: mol_type = genomic DNA
aatctatttcaactgactttaggccagcctaacgatataaaccctatact

SEQ ID NO: 38123 - DNA, 40 bp, Xanthomonas arboricola
  source 1..40: mol_type = genomic DNA
gtcgacgagcgccttcgggcagccaaggctgacgaagccg

SEQ ID NO: 38124 - DNA, 50 bp, Xanthomonas arboricola
  source 1..50: mol_type = genomic DNA
aatctatttcaactgactttaggcatgcctaacgatataaaccctatact

SEQ ID NO: 38125 - DNA, 40 bp, Xanthomonas arboricola; identical to SEQ ID NO: 10480
  source 1..40: mol_type = genomic DNA

SEQ ID NO: 38126 - protein, 505 aa, Mycobacteroides chelonae
MTGCQVRALVGARVSSVQGDEKTSHISQRDKGETYAQSQGWDVVGAFEDLDVSAIKLSPWERPDLRDWLTERADEWDALIFAKTDRVFRSAADCVRLAEWCKQNSKILVLVDDGIKLDYYHPEDAKDAFAGAMSKVFLILASVFAEIEGQRFVQRARDRVAFLRNTDRWGYGIPPFGFLVIDHPSGKGGKALDHDTEAQRVLHDAAAQLLAGGSLTGIAGGLNDDGTLSPQDWNRARGGRPTTGTQWTVDKLKAILSNPSTQGVKTANGKPVLDPQGEPVRVGPPSFDPETWGRIQSELAQRSQSPRQRRHSTNPLLGVAKCGGCGKNMRQRSQTTPAGVTHRYYICGNSPKACPSISMIAADAEKLVEESFLDVHADRLVKSRVWQDGSDHSSALDQTNRTIQSLRDDRAMGLFTTPDDEEMYRQQMSSLIAKRDQLSALPIVRAGWVEVVTSKTYGEVWPGATPEARRKLLTDAEVKITIHSPNRFEIYSDLARVLGEAPASA

SEQ ID NO: 38127 - DNA, 50 bp, Mycobacteroides chelonae
  source 1..50: mol_type = genomic DNA
gatgtacgaagttgcccgaagcagtggtgatatgggatactccgtacatg

SEQ ID NO: 38128 - DNA, 40 bp, Mycobacteroides chelonae
  source 1..40: mol_type = genomic DNA
catgaccatgccgaagcagtgatagaagggcaccggaatg

SEQ ID NO: 38129 - DNA, 50 bp, Mycobacteroides chelonae
  source 1..50: mol_type = genomic DNA
gatgtacgaagttgcccgaagcagtcgtgatatgggatactccgtacatg

SEQ ID NO: 38130 - DNA, 40 bp, Mycobacteroides chelonae
  source 1..40: mol_type = genomic DNA
catgactacgctgagggagtcccagaagggcagccgcatg

SEQ ID NO: 38131 - protein, 548 aa, Enterocloster citroniae
MIKDIENGLINCVITKDLSRLGRNYLDCGLYLEVFFPEHNVRYIAVNDGVDTLNKSAMDITPFRNILNEMYSADVSVKIKSAYRARFQQGKFMGTTAPYGYVKDPADHNHLLIDDKVAHVVREIFDLALAGNGIAKIRKHINKQHILRPAAYAVEQGATGYERYFEDNEENRYIWSENSVRGILRSPIYAGNLAGYKRIAANMKSKKRPSKLPEEWEVIPDTHEGIVTQEEFDTVQQLMTSRRREQNAGGFENIFSGVIKCADCGYAMRAASANRRKRPDIIDCVQYTCNNYGRYGNVMCTAHSIEARDLFNAVLADINRFADMAVNDEKAVRAIERRLTETDQSRAKSLEKEKKKLNKRLAELDRLFSSLYEDKVMERITERNFEMMSGKYQKEQLEIEARLKEVTETLNDSYEKSQGVRDFLSLIRNYQGLKELDATIINALIDKILVSEREKLADGTVRQEIKIYYKFIGFVGELHITPTKRWTALKPKNCTVCGVEYVPSSGISKYCPACAKRIQREKSNESKRRSRERNRRACIELSAKNDRL

SEQ ID NO: 38132 - DNA, 50 bp, Enterocloster citroniae; identical to SEQ ID NO: 11112
  source 1..50: mol_type = genomic DNA

SEQ ID NO: 38133 - DNA, 40 bp, Enterocloster citroniae
  source 1..40: mol_type = genomic DNA
ttgtccgtggagacccggagacctcgcccagcgcaagggc

SEQ ID NO: 38134 - DNA, 50 bp, Enterocloster citroniae; identical to SEQ ID NO: 11659
  source 1..50: mol_type = genomic DNA

SEQ ID NO: 38135 - DNA, 40 bp, Enterocloster citroniae
  source 1..40: mol_type = genomic DNA
tcatctttagagccctggagtcctcgccaagggcacgggc

SEQ ID NO: 38136 - protein, 618 aa, Blautia producta; identical to SEQ ID NO: 11111

SEQ ID NO: 38137 - DNA, 50 bp, Blautia producta; identical to SEQ ID NO: 11112
  source 1..50: mol_type = genomic DNA

SEQ ID NO: 38138 - DNA, 40 bp, Blautia producta
  source 1..40: mol_type = genomic DNA
cgccgcttcacagcttacagagtttacacagggagacagt

SEQ ID NO: 38139 - DNA, 50 bp, Blautia producta
  source 1..50: mol_type = genomic DNA
actgtccgcaaaaaatgaccgactcatgtaggacggattttgcggacatt

SEQ ID NO: 38140 - DNA, 40 bp, Blautia producta
  source 1..40: mol_type = genomic DNA
cccctcatctctgcttacacagtttaaacagagataaaat

SEQ ID NO: 38141 - protein, 522 aa, Variovorax boronicumulans
MRACLYARYSTDNQSQKSIEDQLRAGRERAAREGWPIAMMHADEGISGSTPVSLRAGGKALLADALADRFDVLIVEGLDRITRDLAEQERTVKRMEHRGIRIIGTADGYDTQQAGRKVMRIARGLVNELYIDDLRKKTHRGLQGQFERGMAAGGRTYGYTSVPVEGGHRIVIDEEQAKHVRWIYEQVAAGATLRSIVYTLNAQGVPSPRGNGWAASALVGNAKMGDGLLNNEMYIGRLVWNRRQWLKDPDTGKRLPVARPREEWLVREAPELRIIDQTLWGQTRPQELKRGNPTRGRPHATLFGGLLRCDTCSGPIIAINASRYGCSAHKDKGPTSCRNAATWRRTDVDNRLLAELREDLLSPAALAEVQTTVRRLLAELDGGQERAQAAARRRGAELDREIQRIVDAIVTVGASEALASRLRAAELERKTLQATLEQAPQLQVSATEIASRYRQLVMNLKETLSGEANTVSAARPVIAELLGAVTLRRDPDTGESWAQMKNPAEQLLLAVASAGSPILVAR

SEQ ID NO: 38142 - DNA, 50 bp, Variovorax boronicumulans
  source 1..50: mol_type = genomic DNA
cggggtctccaattctggttgcgcgagggggatttggacaggagagactt

SEQ ID NO: 38143 - DNA, 40 bp, Variovorax boronicumulans
  source 1..40: mol_type = genomic DNA
ccttttaaattggttgcgcgagcaagatttgaacttgcga

SEQ ID NO: 38144 - DNA, 50 bp, Variovorax boronicumulans
  source 1..50: mol_type = genomic DNA
cggggtctccaattctggttgcgcacgggggatttggacaggagagactt

SEQ ID NO: 38145 - DNA, 40 bp, Variovorax boronicumulans
  source 1..40: mol_type = genomic DNA
cctgtgaaattggttcttcacccaagaattgaaatagaga

SEQ ID NO: 38146 - protein, 564 aa, Rathayibacter tritici
MTTSTIDRRAVDDLVHPSMPSGGAVAVTYLRVSTKEQAETGGTDEGYSIPAQRQANRRKAEQLGATVIEEFVDAGESARKADRPELMRMIKYVAEHPVNYCIVHKVDRLARTRADDVTIHLALRDAGVMLVSASENIDETPSGMLLHGIMSSIAEFYSRNLATETVKGLSQKAAQGGTPNRAPIGYTNVGIRDERGREIRTVVVDTERAELVTWAFQVYASGQWTTSQLHRELVARGLTSPPTPKRPSKPIALSTMHRILTNPYYKGDVRYGGATYKGTHTPIVAKEVWYQVQTVLDAHNSAADATQVHDHYLKGTVYCGQCGERLIITNARNRHGKVYPYFVCSGRHSGKNACTRQAMLIEDVEHLIERYYETIQVSDEIRQSLAGMLHAEFDQLMASESKELNRLATERDRLEDERVKVLQAHYAGAVPLDLLKIEQDRISAGLKNIENRIAAHHEEYASARANVDDSLGLLAKVAGIYQRCDDANRRLCNQTFFTRIFIDEDRETRVEYERPFGSLCNAEEQANALNWAAAACSGKKKSGEVQTFARVETLVEGLNLTTSG

SEQ ID NO: 38147 - DNA, 50 bp, Rathayibacter tritici
  source 1..50: mol_type = genomic DNA
gggtttgaacctcaccacatcagggtcccgacgtagcacgttttcaaacc

SEQ ID NO: 38148 - DNA, 40 bp, Rathayibacter tritici
  source 1..40: mol_type = genomic DNA
tgcatgcacagccactggggtgagtaacggggctcgaacc

SEQ ID NO: 38149 - DNA, 50 bp, Rathayibacter tritici
  source 1..50: mol_type = genomic DNA
gggtttgaacctcaccacatcaggagcccgacgtagcacgttttcaaacc

SEQ ID NO: 38150 - DNA, 40 bp, Rathayibacter tritici
  source 1..40: mol_type = genomic DNA
tccatgaacagcttctgggaggaggcaggcggctccaccc

SEQ ID NO: 38151 - protein, 503 aa, Actinomyces graevenitzii
MKLHSEYNDNQMVVAYYRYSSSSQNEASIEQQREMVQRWAKSQGLVVVNEYEDAAKTGTNADRPGYQLMLRELPKIRPAYVAVWKNDRLARDRAELVLVKQAIRSIGARVHYIEGISPTDSPDSVLVEGVADAFAEYYSLQLSANIRRGQRYNAERALSNGHKIFGFTVDQDKRYIPDPETAPIVTQIFHDYASGVSMQKICNQLNAQGIRTTRGYRFTPKNLNKMLKNRAYIGEYAYGGHVHEDGMPRLVDDLTFNEVQRRFAINKRRGAKTKAELAAQGENAPDYWLTGRAYCLTCGGPMEGVSGTSKTGKTYRYYYCLNQRKKKCSAKTVRKDEIEVRIQEIVASFLADPEMLASLAVDLADHYQKTHGRGDDILKALEARRADVERKLANFVKAISQGIFNDTTAEAMRSLEEQKRELDAAIQAEHVKATLYEDEASIGAFYKRFAEATIDTPETRDQLFEYFVDKVFIGREQIIIASYFHDSAAPIEFEDLEEALTSG

SEQ ID NO: 38152 - DNA, 50 bp, Actinomyces graevenitzii
  source 1..50: mol_type = genomic DNA
ctagaagaagcgctcaccagcggacgcctgcgcgccgaagcgtgtggcac

SEQ ID NO: 38153 - DNA, 40 bp, Actinomyces graevenitzii
  source 1..40: mol_type = genomic DNA
gccccgccagatcagcggacacagagcgggggaagtgcga

SEQ ID NO: 38154 - DNA, 50 bp, Actinomyces graevenitzii
  source 1..50: mol_type = genomic DNA
ctagaagaagcgctcaccagcggacccctgcgcgccgaagcgtgtggcac

SEQ ID NO: 38155 - DNA, 40 bp, Actinomyces graevenitzii
  source 1..40: mol_type = genomic DNA
gcactggcagatatgtggacccagagcaggtgaagtgagg

SEQ ID NO: 38156 - protein, 461 aa, Staphylococcus aureus
MKVAIYTRVSTLEQKEKGHSIEEQERKLRAYSDINDWKIHKVYTDAGYSGAKKDRPALQEMLNEIDNFDLVLVYKLDRLTRSVKDLLEILELFENKNVLFRSATEVYDTTSAMGRLFVTLVGAMAEWERTTIQERTAMGRRASARKGLAKTVPPFYYDRVNDKFLPNEYKKVLRFAVEEAKKGTSLREITIKLNNSKYKAPLGKNWHRSVIGNALTSPVARGHLVFGDIFVENTHEAIISEEEYEEIKLRISEKTNSTIVKHNAIFRSKLLCPNCNQKLTLNTVKHTPKNKKVWYSKLYFCSNCKNTKNKNACNIDEGEVLKQFYNYLKQFDLTSYKIENQPKEIEDVGIDIEKLRKERARCQTLFIEGMMDKDEAFPIISRIDKEIHEYEKRKDNDKGKTFNYEKIKNFKYSLLNGWELMEDELKTEFIKMAIKNIHFEYVKGIKGKRQNSLKITGIEFY

SEQ ID NO: 38157 - DNA, 50 bp, Staphylococcus aureus
  source 1..50: mol_type = genomic DNA
aattggaagttcggaataactatgctgttacctgatacacacttccaaca

SEQ ID NO: 38158 - DNA, 40 bp, Staphylococcus aureus; identical to SEQ ID NO: 27503
  source 1..40: mol_type = genomic DNA

SEQ ID NO: 38159 - DNA, 50 bp, Staphylococcus aureus; identical to SEQ ID NO: 10524
  source 1..50: mol_type = genomic DNA

SEQ ID NO: 38160 - DNA, 40 bp, Staphylococcus aureus; identical to SEQ ID NO: 10490
  source 1..40: mol_type = genomic DNA

SEQ ID NO: 38161 - protein, 547 aa, Subdoligranulum sp
MSKTEKKFAVGYCRVSTDEQRKESIDHQQREIQKYADENGIEIIEWYKDHGYSGTTNKRPALERMIKDSKQKKFSLVLVWKLDRFSRNTYAGTVAKHALKENGVFLYSVIERIDNTPEGKIVEALFEAMNQYYVGNLARGVLGGMIENALNSLSNGSCTYGYMLTPKLDENGNIISKKTKGGKIKTVNTYAIHPENSAAVKLIFKMFLEGADRNSILKRLKDLGYKNAKGKDFNGTHIDKILRNERYTGVYIFEYNKGKQVNYNPVEVIRNEGGLPKIIEKEDFDKVQQILDARKHKPNSHSLVDYLLTGKVVCGECKAAFTGSTHYKNGTPYYYYRCGRESPDCKVVSVRKDALEDFVMSELAKVIHSEEYIVNLLDRFVAFYEEKNNNNEIIKGLETKLQDVERQISNLVKVIANSGNFNDIFQSELDSLTNEKAKILDNLQRERNIGFTQFVTKEAIRRSYFNVLKLLETGEAKDKVTIINTLLNRVVVYKDRIEIFINILPYEDAAAEMLITNDDLSTYGLLETDDNEKIAPKDDFPSDNSIG

SEQ ID NO: 38162 - DNA, 50 bp, Subdoligranulum sp
  source 1..50: mol_type = genomic DNA
tttccgagtgataactcgattggtactcctacgggtttttcactcggaat

SEQ ID NO: 38163 - DNA, 40 bp, Subdoligranulum sp
  source 1..40: mol_type = genomic DNA
attcgacaggttttttggtacaccatcagggactcgaacc

SEQ ID NO: 38164 - DNA, 50 bp, Subdoligranulum sp
  source 1..50: mol_type = genomic DNA
tttccgagtgataactcgattggttgtcctacgggtttttcactcggaat

SEQ ID NO: 38165 - DNA, 40 bp, Subdoligranulum sp
  source 1..40: mol_type = genomic DNA
acatgagagattttttggttgaccttctgggactctaaag

SEQ ID NO: 38166 - protein, 471 aa, Vibrio lentus
MTTVLYYTRFSSSKQRDGSSIERQLKLCDTYRLTHNLPSPNHTYTDKGASAYHSQQLEGELGQLLHDLENSVYQKPITILCEAIDRISRASIRDSQTIINNIIEHADLVTVSDGKVYTHSDDSLETSLIQLVKSATSREESDKKSKRAKEYWATCKENGIAQNSVCPKYLKLNADKKGYTVKGDIADEIRGIYKLLKAGQGIKKVHQSFPSWSPSSIARLRKDERIVEHGIISDTDFWKVQSTLKTTRKSGAKNSKNLFRSLFECGECGSNLVYVAPRPSRPTWSGHLMCKNRQAKGRAACPNSKNINYNKFEPIFLDFLESVSSELFKSNLAEVEAKKTQLEALVMQYEKLEKKVDNLYDILSEAPTKRGKAKIDQLETQLNELEATKEMLEVEVQGYTDIQLEQPSTDLEREEFNTQLLHAFKSITVKYPTEDNQWYTFDDKFEISGDFTQWSLLNHDTNEPPVTIEFD

SEQ ID NO: 38167 - DNA, 50 bp, Vibrio lentus
  source 1..50: mol_type = genomic DNA
acacacaataagttgtcatacgacaagcctgctgataacctattgaacaa

SEQ ID NO: 38168 - DNA, 40 bp, Vibrio lentus
  source 1..40: mol_type = genomic DNA
tcctggaatgccaaatggcaagcctgctggcgtgcgttgc

SEQ ID NO: 38169 - DNA, 50 bp, Vibrio lentus
  source 1..50: mol_type = genomic DNA
acacacaataagttgtcatacgacctgcctgctgataacctattgaacaa

SEQ ID NO: 38170 - DNA, 40 bp, Vibrio lentus
  source 1..40: mol_type = genomic DNA
gactggaaagctagatgccctgcctcctagggtgccttgc

SEQ ID NO: 38171 - protein, 557 aa, Pseudoxanthomonas winnipegensis
MSKAYAYVRWSTAEQGEEGRDSHSRQITPLQAFTETTGVPVVETVIDKGVSAFRGANARTGQLKGLLDRVENGEIGQGDYIIVESIDRLTRQKLTDSVDLIQSILKKGVRLHTVFDDKTYSYDDPSRDLETLILVGVIAKRAHEESDTKSKRLKSSWLKKRDAAETTIIRKQCPYGFRYDEKTQAFAIFEDEAQEIRHIFDLLKHMGILESIKRVNQYSKRRWTRKHIDELIKSKSPIGVLCLRRRNEDGTKSFDRYVPGYFPKLIEESYFDAAVTAIKSRFNERKNGRRSPNNYNIFRHCIQCEEHKVGMLFNLQGLGAEKKRYAYLVCSNRAERVCECDNRIRFELVFGAFLAFVKKISENRYIDERTHEKRKDFTWFSQEQYKQMDTVNDAFSRFFSARDTSAPKEEIRAKKAKLNTEKHTLEMLDASLAQFDGVIPKTFIKRIADSEAKITDLEREIQSIEGQLNIEAENLEITTYQDILSLYETEEGRLKLNTFFISRGIVFEVKYHKEPISVGLDVKIKNEKGNLYTHEYFHSTKDPLNKFGIPDLSHIIK

SEQ ID NO: 38172 - DNA, 50 bp, Pseudoxanthomonas winnipegensis
  source 1..50: mol_type = genomic DNA
ttattagaaaacgctagaccgctgaacaacggactggtattttctaataa

SEQ ID NO: 38173 - DNA, 40 bp, Pseudoxanthomonas winnipegensis
  source 1..40: mol_type = genomic DNA
cctggtgatgggcccgtggaaccatggcggccagcgcgag

SEQ ID NO: 38174 - DNA, 50 bp, Pseudoxanthomonas winnipegensis
  source 1..50: mol_type = genomic DNA
ttattagaaaacgctagaccgctgtgcaacggactggtattttctaataa

SEQ ID NO: 38175 - DNA, 40 bp, Pseudoxanthomonas winnipegensis
  source 1..40: mol_type = genomic DNA
cctggtgaagggcctggagtggcatggagggaaacgcaag

SEQ ID NO: 38176 - protein, 484 aa, Anaerostipes hadrus
MKKEKVIPIDSLDLVDLYIRVSTTEQALEGYSVAEQEHRLRQYCAAMGHRIHKVHIDAGFSGASLDRPGIKETIKDVQKHLVRRVIVWKLDRLSRSQKDTLIMLEDVFLENGCDFISMMESFDTSTSFGRAIVGILAAFAQLERENIKERTMMGRQARLAKGHYNGSRPPLGYSFIPGSNDLQVDPYQAAIVREIFKLFLSGISINAIARKMEEKYPTVRTWNNTMIRRTLKNPVYIGKVNDNGILRDGIHEPLISEIDFQMANAILVHNSKIKKQSCRSRSLLTGLLYCGDCGARMHPRRIARGYPLRRYVCYSVSRTSKSMIKSDHCTNRLHPYTQEELEQIIIDEIKKLAADEDYISEVIRNSSAEVPADDTELFQERIEELNRQTDKLLNLYQIGAIELDQIQERLAALKQERESLTAALKESQTKTDINMDHLKIMSYASAFQVALESGDPEYTNSIIRLLIDKIIVLNEDIEIHWTFC

SEQ ID NO: 38177 - DNA, 50 bp, Anaerostipes hadrus
  source 1..50: mol_type = genomic DNA
tcacacctatatgaatcaataatcttgatgaatgttctaatttggtgtgt

SEQ ID NO: 38178 - DNA, 40 bp, Anaerostipes hadrus
  source 1..40: mol_type = genomic DNA
aaccccaaaatcaataatcttctgaatcgcttttggatgg

SEQ ID NO: 38179 - DNA, 50 bp, Anaerostipes hadrus; identical to SEQ ID NO: 38177
  source 1..50: mol_type = genomic DNA

SEQ ID NO: 38180 - DNA, 40 bp, Anaerostipes hadrus
  source 1..40: mol_type = genomic DNA
aacccccaaaactataatcttctgaaatgaaattgaatga

SEQ ID NO: 38181 - protein, 540 aa, Enterocloster bolteae
MSRQTATTLITALYPRLSHEDELQGESNSISNQKRILEAYAKQNGFTNLKWYTDDGFSGANFQRPGFQSMLADIEAGLVGTVIVKDMSRLGRNYLQVGMYTEMIFPQKNVRFIAINDGVDSAQGDNDFAPLRNIFNEWLVRDTSKKIRAVKRSKGMSGKPVTSKPVYGYLMDEDENFIIDEEAAPVVKQIYSLCLAGNGPTKIARMLTEQEIPTPGTLEYRRTGRTRRYHPGYECKWAANTVVHILENREYTGCLVNFKTTTQSYKNSKIIYNSEDKQAVFENHHEIIIDKDTWERVQELRKQRKRPNRYDEVGLFSGILFCADCGSVMYQQRYQTDKRRQDCYICGSYKKRTADCTAHFIRTDLLTAGVTENLRKVTQYAAKHEARFMKLLTEQNEDGSKRRNAAKKKELEAAEKRIAELSAIFKRLYEDSVAGRISDERFTELSADYEAEQKELKEKAAVLQGELSRTLEATANAEKFMKVVRKYTSFEELTPTLLREFVEKIVIHESEALDGKRRGKLRRQEIEIYYSFVGKVELPD

SEQ ID NO: 38182 - DNA, 50 bp, Enterocloster bolteae
  source 1..50: mol_type = genomic DNA
ttacttctttatctcacatgagcaaatgctcatgtgccataaagtaacac

SEQ ID NO: 38183 - DNA, 40 bp, Enterocloster bolteae
  source 1..40: mol_type = genomic DNA
atgtgatatcccttctccaaaagctcacggattgtttcct

SEQ ID NO: 38184 - DNA, 50 bp, Enterocloster bolteae
  source 1..50: mol_type = genomic DNA
ttacttctttatctcacatgagcatatgctcatgtgccataaagtaacac

SEQ ID NO: 38185 - DNA, 40 bp, Enterocloster bolteae
  source 1..40: mol_type = genomic DNA
atgagttatgatttctccataggctcacggattatttata

SEQ ID NO: 38186 - protein, 506 aa, Streptomyces scabiei
MKPTQTADARTRAVIYCRISQDRTGAGLGVDRQRQDCEALAERNGWDVVEVYVDNDVSAYSGKLRKDYRRMLTDLDQGAATVVIVWHTDRLTRSIVELEEYIELSDRRGIATHTVQAGTIDLATPSGRMTARILGAVARQESEHKGHRVARARQQRALAGEWSGGIRPFGWGVPTGEMRTKVDRKTGEEVEAPVLDTNRIVPEEAEALRHWTDTILSGGSVRSLVRWCADKGITTTRGNPVTHVEVRDMLMRPRNAGIAVYKGEEVGRGLWEPIVEETKFRAVVAILTDPARRTTTGAQPKWVGSMLYRCGRGECGQGMTVTQSGGRAYPSYRCPTGHGGGRRAEVVDKYVEDTIVERLERDDAHELLLPGPADIDTAGLQAEAERIRQRMRDLGGLFGAGQLELVPFTEGMETARSQLEGVTRQLARAAAVDPLVGLVGAPDVRKAWRARELEQQRTVLRALVEVTLKTPRQGRMPDGGYFDYSAVVFKWKRGATASSRHALDER

SEQ ID NO: 38187 - DNA, 50 bp, Streptomyces scabiei
  source 1..50: mol_type = genomic DNA
aggcgtcacagacttatattggggttcccgaatcccggacagagacacca

SEQ ID NO: 38188 - DNA, 40 bp, Streptomyces scabiei
  source 1..40: mol_type = genomic DNA
cgcgctcaggagcgtggtcttcccggtgcccgtcccgccg

SEQ ID NO: 38189 - DNA, 50 bp, Streptomyces scabiei
  source 1..50: mol_type = genomic DNA
aggcgtcacagacttatattggggtccccgaatcccggacagagacacca

SEQ ID NO: 38190 - DNA, 40 bp, Streptomyces scabiei
  source 1..40: mol_type = genomic DNA
caggctcaggagaggggtttccctggtccccatcctgctg

SEQ ID NO: 38191 - protein, 522 aa, Clostridium fessum
MNTKSKVAIYCRLSEEDRNKQHETDDSNSIQNQKSMLIQYVLEQGWEVYNIYSDDDYTGSDRRRPEFNKLLNDAEHRKFDIILCKTQSRFTRELELVEKYIHGLFPIWGIRFISIVDNADTANKGNKKSRQINGLVNEWYLEDMSENIRSVLTDRRKNGFHIGAFALYGYKKDPEQKGHLIIDEEAAAVVREVFTLFSQGYGKTAIARMLNDRGIPNPTEYKRLHGLRYKQPTRKNSTLWKYFAISDMLTNEIYIGNMVQGKYGSVSYKTKQNKPRPKEEWYRVEGTHEPIIDRELWDRVQSMVAEKAKPFTVGTIGLFARKARCMNCGYTMRSNKQTDGRHYLQCSNRHVAKDACIGSFISVKKLEQAVISELNKLSQEYLDKDELEQNVEFHSNVKEKKTALETQLATYQKKIEEDAKVIRELYLDKVKGILSGNDFLNLSKDFTNDRERLEKLVIETQKQLDVIERKIQTGDNRRQLIEQYTNLEHLDRETVETLIDYILVGKRIPGTRNVPIEIHWNF

SEQ ID NO: 38192 - DNA, 50 bp, Clostridium fessum; identical to SEQ ID NO: 36057
  source 1..50: mol_type = genomic DNA

SEQ ID NO: 38193 - DNA, 40 bp, Clostridium fessum
  source 1..40: mol_type = genomic DNA
agttgtgcgggctttctgctctgctgccatatcctcatat

SEQ ID NO: 38194 - DNA, 50 bp, Clostridium fessum
  source 1..50: mol_type = genomic DNA
tgttgcacttatgcagttgcaccatatggggcgaccttgtaagtacaaca

SEQ ID NO: 38195 - DNA, 40 bp, Clostridium fessum
  source 1..40: mol_type = genomic DNA
agttctctgagctttctgctatcctgtaataacgtcacat

SEQ ID NO: 38196 - protein, 446 aa, Mycobacterium chimaera
MDAVIYTRVSRDVKGGRSVEDQERECREACERKGWPVRATYCDNSIGASRYSAARPAWRQLKDDLREGDILVVWEPSRAQRQMKDFLALRDLCAERGVLVAYAGGRVLDFSLGDDRFTGGIEALLAERESEQIRDRVLRGKRASAADGRPMGRPPWGYLATRDIDSQGRTRPQWEPDPVEAPRIKEAVERLLGGESQYAVLEWLRATGHAPTTPTTLRRALLNPALAGLRQHQGEVVGNASWPAIITKDQHEQLKSRDRRMRATYGTSSPRGPEPLYLLSGIAKCGVCNDGLRHRAPDARKPYYDCRKGHVSRLADMLDKAVEAEIFKRLSEIDPSDYESDDADDGAVVAEIEELERQLAEWEAEARARRVSARMFGQMEQSLLEQIASLRAKIETPSELELDPAQWSELTMGERRHIVRSLFRVVVPQLAKRVRALPGDVEITPI

SEQ ID NO: 38197 - DNA, 50 bp, Mycobacterium chimaera
  source 1..50: mol_type = genomic DNA
tgctccctatctacgtcctgcgcccaggcacccgtcggactaggggagcg

SEQ ID NO: 38198 - DNA, 40 bp, Mycobacterium chimaera
  source 1..40: mol_type = genomic DNA
ggctccggtgtcgtgcgcccaggccagcaccacgggcgcg

SEQ ID NO: 38199 - DNA, 50 bp, Mycobacterium chimaera
  source 1..50: mol_type = genomic DNA
tgctccctatctacgtcctgcgccgcggcacccgtcggactaggggagcg

SEQ ID NO: 38200 - DNA, 40 bp, Mycobacterium chimaera
  source 1..40: mol_type = genomic DNA
ggctccggagccgggcggggcggcggccgcgacgggcgcg

SEQ ID NO: 38201 - protein, 446 aa, Mycobacterium paraintracellulare
MEAVIYTRVSRDVKGGRSVEDQERECRQACERKGWPVRATYCDNSIGASRYSADRPAWRQLKDDLRQGDILVVWEPSRAQRQMKDFLALRDLCAERGVLVAYAGGRVLDFSLGDDRFTGGIEALLAERESEQIRDRVLRGKRASAADGRPMGRPPWGYLATRETDERGRLRPQWEPDPAEAPRIKEAVERLLDGESQYAVLEWLKATGNAPTTPTTLRRALLNPALAGLRQHQGEVVGNASWPAIITKGQHEQLKSRDRRMRATYGTSSPRGREPVHLLSGIARCGVCGEGLRHRSRDGREPYYDCRKGHVSRLADMLDKAVEAEIFKRLSEIDPSDYESDDAEDDAVIAEIEELERQLAEWEAEARARRVTARMFGQMEQSLLAQIAALRAKIETPSELELDPAQWPELTMGERRHIVRSLFRVIVPPLAKRVRALPGDVEITPI

SEQ ID NO: 38202 - DNA, 50 bp, Mycobacterium paraintracellulare
  source 1..50: mol_type = genomic DNA
tgctccctatctacgtcatttgcccatgcacccgtcggactaggggagca

SEQ ID NO: 38203 - DNA, 40 bp, Mycobacterium paraintracellulare; identical to SEQ ID NO: 38198
  source 1..40: mol_type = genomic DNA

SEQ ID NO: 38204 - DNA, 50 bp, Mycobacterium paraintracellulare
  source 1..50: mol_type = genomic DNA
tgctccctatctacgtcatttgccgctgcacccgtcggactaggggagca

SEQ ID NO: 38205 - DNA, 40 bp, Mycobacterium paraintracellulare; identical to SEQ ID NO: 38200
  source 1..40: mol_type = genomic DNA

SEQ ID NO: 38206 - protein, 511 aa, Sphingobacterium faecium
MKRADLYIRVSTDEQADKGYSQRDQEERLKRFCAINKITVGQVIYEDHSAKTFNRPEWVILLNNLKKKSSKTNLVLFTKWDRFSRNAGDAYQMINILTKLGVEPQAVEQPLDLSIPENKMMLAIYLAAPEVENDRRALNTFYGMRRAKKEGRLMGKAPFGYSNKSKEDGRKYVAIKDPEASAIRWAFNEIAKGVFAADQVRQKMNAQSPTKLSRSAFHVAIRNPLYYGKIFIAKFQDEEAHLVEGQHEPLISKELFQKAQLILDGNKREERPNTKILSDINLPLRGFLVCPECGRNLTGSASKGRTNRYYYYHCISACGFRQKAGIANEAFENGLVQFEIKDAIKTILKKLLLDNYKKFVQNPFEEKKRIVQEIDKLNAKLSVARNKLLSETIDDEEYFEIKNEYKKRIESLEEQLSKDSSDTKKINIEKSLDRALSYIENIPKMYSEGEINTRRAIIGSIFPEKLEFDGRTYRTARMNVIANYIFQINNGLEQNKNRRNDSKNHFSCLVA

SEQ ID NO: 38207 - DNA, 50 bp, Sphingobacterium faecium
  source 1..50: mol_type = genomic DNA
taaaaatcacttctcctgtttagtagcccaaaccgaacaaatctcgaacc

SEQ ID NO: 38208 - DNA, 40 bp, Sphingobacterium faecium
  source 1..40: mol_type = genomic DNA
tttgaagtcgctttttagtagcccgtaggggaatcgaacc

SEQ ID NO: 38209 - DNA, 50 bp, Sphingobacterium faecium
  source 1..50: mol_type = genomic DNA
taaaaatcacttctcctgtttagttgcccaaaccgaacaaatctcgaacc

SEQ ID NO: 38210 - DNA, 40 bp, Sphingobacterium faecium
  source 1..40: mol_type = genomic DNA
ttttttctctctttttagatgtccgtaggagaattgaact

SEQ ID NO: 38211 - protein, 558 aa, Megasphaera massiliensis; identical to SEQ ID NO: 3086

SEQ ID NO: 38212 - DNA, 50 bp, Megasphaera massiliensis; identical to SEQ ID NO: 3087
  source 1..50: mol_type = genomic DNA

SEQ ID NO: 38213 - DNA, 40 bp, Megasphaera massiliensis
  source 1..40: mol_type = genomic DNA
ccaaaaaacaggtatcagaaactcagagccatatttccca

SEQ ID NO: 38214 - DNA, 50 bp, Megasphaera massiliensis
  source 1..50: mol_type = genomic DNA
aggtatcgttatcttacctcaacaccagctgacgttagataacgatactt

SEQ ID NO: 38215 - DNA, 40 bp, Megasphaera massiliensis
  source 1..40: mol_type = genomic DNA
acaaaaacaaagtatatcacccagagagccatgtttccca

SEQ ID NO: 38216 - protein, 560 aa, Microbacterium paraoxydans
MTAKRASILIRVSTEDQVDGSSLADQERLCRSLIEARGWNFTGRVYADEGVSGTVENRPALTEALRDAAKGEFEVLVALNMTRLSRKLHISAKVIDDLAELDVAFVSVQESFIDTTTSAGRAMAGVFSSFAQMDRDAIVEKTARGQRAKGEAGLWPGGHPPFGWRLEGHKRTAQPMPDERERQVLAEAYRLLVTQRLNAFQVAARLNDAGLKPRKADAWNPESLRRVLANETLATGILVWGAPSSGGLYPRSHKTKVKRDGTPRYGEPIRIELPEPPFTASQHRAIVRALASRSNRGKAASPISRPLTGQVFGACGMPYYGVTIKGKAPVMRCTGRRHLAGEAKCTCPQVAWEPLESRVWAAVVGFLSDPARLETMARQYLELPAEVGDGAQDATLLAAVERQIEKLERAQANAARELLLADNPAPIREALAQVERDLEGLRERREGYQALASSAQAKGEALRDLAALAERARGNLDRLTEDQRRQVYEILRVRVQMTGSIKADAHRVAHPEGLSVSGVLDPRLWGEEGRGGGSGGGNGDSGPRPMPSFPTPSNSQVSDD

SEQ ID NO: 38217 - DNA, 50 bp, Microbacterium paraoxydans
  source 1..50: mol_type = genomic DNA
cgagtaactcgcaagtgtcggacgatcgcccccgtgagcggagttactcg

SEQ ID NO: 38218 - DNA, 40 bp, Microbacterium paraoxydans
  source 1..40: mol_type = genomic DNA
cgagtacgccatcaccaccatggccgcggtcgccttcgcc

SEQ ID NO: 38219 - DNA, 50 bp, Microbacterium paraoxydans
  source 1..50: mol_type = genomic DNA
cgagtaactcgcaagtgtcggacgaccgcccccgtgagcggagttactcg

SEQ ID NO: 38220 - DNA, 40 bp, Microbacterium paraoxydans
  source 1..40: mol_type = genomic DNA
gggtgacaccaccaccaccaccgccgctgccgccatcgcc

SEQ ID NO: 38221 - protein, 548 aa, Blautia obeum
MNREGKKCVLYPRVSTEMQVDGYSLEGQKNGLKRFADREEMEIVGIYEDAGKSGKSIEGRPAFKKMLSDIKNGLEIDYILVYKLSRFGRNAADILNSLEFVQSYGINLICIEEGIDSSQTSGKLLISVLSAVAEIERENIIEQTMNGRREKARQGGWNGGFAPYGYYLKDNQLLIEETEAEAIRIIFDKFANSDIGLGGVAKYLNLQGIKKIPRQNGTLETWSSHFIRLILDNPVYCGKIAYGRRTREKVKGTKNEYKQVHAEDYILEDGQHEGIISEELWQKVHAKRMATGIKQPSKIGKDRSHLLTGILKCPLCGSSMYTNKHAWTNKDGTYKEVYYYICGRNKQERGHHCDYKASLRKTDIEPLVIEAVKELVSDKYFAKEIEKRIGVQTDTTAIDKELANYESKLKEVDLNKARLEREIDNLPVDTRFRERKIHDMTLRLDALYDTIVELEERIKDAKLRKSSIEMETITLDNIYKLMLNFGKLYDIISDEEKKSLITYLIKEIQIYPNGESEQPLKSIEFNFPIYRDGQEVRRLLWEKGNTVE

SEQ ID NO: 38222 - DNA, 50 bp, Blautia obeum; identical to SEQ ID NO: 2672
  source 1..50: mol_type = genomic DNA

SEQ ID NO: 38223 - DNA, 40 bp, Blautia obeum
  source 1..40: mol_type = genomic DNA
cccggcgaccgaacatgtggagactgcggtgttgctacaa

SEQ ID NO: 38224 - DNA, 50 bp, Blautia obeum
  source 1..50: mol_type = genomic DNA
ttgtgggaaaaaggtaataccgttcggacggtagtactgctttcccacaa

SEQ ID NO: 38225 - DNA, 40 bp, Blautia obeum
  source 1..40: mol_type = genomic DNA
ccaggcgacacacctcgtacggactgtggtgttgctgcat

SEQ ID NO: 38226 - protein, 503 aa, Blautia sp N6H1-15; identical to SEQ ID NO: 341

SEQ ID NO: 38227 - DNA, 50 bp, Blautia sp N6H1-15; identical to SEQ ID NO: 12
  source 1..50: mol_type = genomic DNA

SEQ ID NO: 38228 - DNA, 40 bp, Blautia sp N6H1-15
  source 1..40: mol_type = genomic DNA
cggatttttcgtacattttttgtcaaagtaaaacagccag

SEQ ID NO: 38229 - DNA, 50 bp, Blautia sp N6H1-15; identical to SEQ ID NO: 14329
  source 1..50: mol_type = genomic DNA

SEQ ID NO: 38230 - DNA, 40 bp, Blautia sp N6H1-15
  source 1..40: mol_type = genomic DNA
ctgacttttttttcagtttcagtcaaaataaaactgctat

SEQ ID NO: 38231 - protein, 545 aa, Pseudomonas putida
MPLAISYVRFSSIRQYSSNSIERQQLLIAEWLTANPDYTLSDLKFQDLAKSGYHGEHVKEGGGFRKLLGAIEAGAIKAGDVVLVEAIDRTGRMETVDMLDLLTPILKAGISLITLDDGHVYNRDSCNGSGIYLLIGKIQTANQQSARLSNLTSLSYKLRRTKALAGTQVKRWTPVWLTTDGAVIDRIAKHVKTAFELYTAGVGKATISVRMRETGEPELATCSGPTVEGWLRNKTAIGYWNDIPNAYPAIIEPELFVLAQQRGKEAKTTRPSKTAKHMLVGLVKCGHCGGNYIMQNKDGRPHSMRCLNRQRLKAIGCDNTRTIPKPVLDHIRVNTSLAAVEAAFQRQQLTVNQKRILAIEGELETVGQKITALIQLVDGTGDLDEITAKIKELKAEREKLNAEHVLLERTESPVDTFGAMRVEDDLLESDTVKLNALLKGVGYSINVFVDGRMTVNWPGEENSVWAYKGVERSSGYYLLRNYEANPSPEPEGWSNPLGLKWKPMDEMIKLHPKPYLAPDRAQTLVEMAQQSPILPLLGRANRRQP

SEQ ID NO: 38232 - DNA, 50 bp, Pseudomonas putida
  source 1..50: mol_type = genomic DNA
aagacccacatacgaagaacgtgctcccagattctttgaatgtgaccctg

SEQ ID NO: 38233 - DNA, 40 bp, Pseudomonas putida
  source 1..40: mol_type = genomic DNA
catgcccatcaggccttggtcccagcctttgattaccctg

SEQ ID NO: 38234 - DNA, 50 bp, Pseudomonas putida
  source 1..50: mol_type = genomic DNA
aagacccacatacgaagaacgtgcggccagattctttgaatgtgaccctg

SEQ ID NO: 38235 - DNA, 40 bp, Pseudomonas putida
  source 1..40: mol_type = genomic DNA
tagggcctttagacctgggggccagcctttggaaaccctg

SEQ ID NO: 38236 - protein, 461 aa, Nocardia farcinica
MIAAVYLRQSEDRDGNQLAISRQREDCHKLCAQRGWTPHDYVDNDVSAVGAKRRRPAWEQMLTDVEAGVVQAVVCWDLDRLYREPIDLERIIPLADRMGVALATVTGDVDLSTDNGRMFARIKGAVAKAETERRSARQKRKFLQLAEAGDSWSSKRPFGYTRDGQIVAEEAAALVEAYQMVLSGHHNLTAICRLWDDRGILTSTGKTWTHPTLVRHILINPRYAGLRTYHGEIVGEGKWPAIVDRDVWQAVRDLLQDPERRKGRGGGRKYLLTGIARCGWCAAQGEDVPIGSAKNGPKAKPHYRCRTCFKVMRLQERTDNYMLNLVVARLSRPDAVELAVDQKRPDIEALRSEAAALRTRLETLALDYAEGVLSREQLRVATERVKSKLSLVEARMEDGHRARLFRGLVGEDAPAFLEAGLDRQRAIIDGLMRVTLLPAAQRGVWSPDDIQIVWRDAAFDS

SEQ ID NO: 38237 - DNA, 50 bp, Nocardia farcinica
  source 1..50: mol_type = genomic DNA
atggttgcttcgcgtagtaccagcaagctggtgttccgcgaaggacgcaa

SEQ ID NO: 38238 - DNA, 40 bp, Nocardia farcinica
  source 1..40: mol_type = genomic DNA
cacggtgcgcacatccagcaatccgatattcaagaacctc

SEQ ID NO: 38239 - DNA, 50 bp, Nocardia farcinica
  source 1..50: mol_type = genomic DNA
atggttgcttcgcgtagtaccagccagctggtgttccgcgaaggacgcaa

SEQ ID NO: 38240 - DNA, 40 bp, Nocardia farcinica
  source 1..40: mol_type = genomic DNA
aaagctgcacacctacagccatctgatcttcaacaacatc

SEQ ID NO: 38241 - protein, 558 aa, Erysipelatoclostridium ramosum; identical to SEQ ID NO: 11316

SEQ ID NO: 38242 - DNA, 50 bp, Erysipelatoclostridium ramosum; identical to SEQ ID NO: 77
  source 1..50: mol_type = genomic DNA

SEQ ID NO: 38243 - DNA, 40 bp, Erysipelatoclostridium ramosum
  source 1..40: mol_type = genomic DNA
attcgtgtcgggatgggaaaatgtcaatccggtttttgtt

SEQ ID NO: 38244 - DNA, 50 bp, Erysipelatoclostridium ramosum
  source 1..50: mol_type = genomic DNA
aggttacgttatcttacctcaacaagagctgacgttagataacgatactt

SEQ ID NO: 38245 - DNA, 40 bp, Erysipelatoclostridium ramosum
  source 1..40: mol_type = genomic DNA
ttttgtgtctagttgggtaagtgaaaatcaggtttttttt

SEQ ID NO: 38246 - protein, 521 aa, Mesorhizobium loti
MTKHTPRATLTNRPKAYSYVRFSTPEQERGDSLRRQTEGAARYAALHGLDLDDKLTFRDLGVSAFKGANEETGRLGEFLAAVEFQDIKAGSYLLVESLDRLSRQKPRKAVKVLERICEAGITVVTLDDGRVYTEEVLDDDPTALMVALLVAARANEESAKKGRRVGEAWANKRRNAAIKPLSALCPGWLRLREDKKGFDLIPERADIVRRVFAMTLAGRGQHSIAEAFNKEAVPVFGTGSHWHRSYIKKMLADASTIGAFTPHRVETVGGKKRRIPTETVEGYFPPVIDREVFDRVSALSSGRAVKETSGGGMMNILAGLAKCPKCEATMTRVNKGGKKGGKPYLVCTTAKAGAGCEYRQVRIGDVEEAIIKNAEWLNASLPSTDGALQMELEGANNLDMAVSDEIENVVAAIGQTGHSPALLDRLRQNEATREDIRRSITDLERRIADTLTNRVQVTAGQLVDHAEAEEPRDVALINATLRQLFTKVEVDWPNGRLWFHWKHAPGEATGIMYAWPKEEDA

SEQ ID NO: 38247 - DNA, 50 bp, Mesorhizobium loti
  source 1..50: mol_type = genomic DNA
cgggggtcttttgtccacagcatgagcatgttatggacataggaccctca

SEQ ID NO: 38248 - DNA, 40 bp, Mesorhizobium loti
  source 1..40: mol_type = genomic DNA
gccaggcgggccgatcatcagcagattgtggccgccggcc

SEQ ID NO: 38249 - DNA, 50 bp, Mesorhizobium loti
  source 1..50: mol_type = genomic DNA
cgggggtcttttgtccacagcatgttcatgttatggacataggaccctca

SEQ ID NO: 38250 - DNA, 40 bp, Mesorhizobium loti
  source 1..40: mol_type = genomic DNA
ggcagtctgtcggctcatcttcagagtgtggtccccgtcc

SEQ ID NO: 38251 - protein, 513 aa, Listeria booriae
MDTSLDIALYLRKSQQDREREAEAAKRGEIYDTLSRHRRELLDIAKKRHYNIIDIFEEVVSGAHLALRPEMNALLENVKARKYDAVLVVDIARLGRGDKVEQGVIERVFKQSDTMIITTTEMFDLNADSGEFSVEVNTFLSRMEYRQIKKRLHAGIMRSTGEGKDVSKKPPYGYRKDENLKLIIHPEEAEIVKYIFQMCIEGKGQMYITNELANMKVPSPSGNETWSNSTINRMIKNPKYKGDQVYGRKQTVRDDNGKVTIREKALESRIVYSPDSHEAIISKEDWDKAQYSISNRSTHTVRKKNLVNVFAGLLRCKKCGKILISNTRSSRSGVYLYCKTPGCDTKGIAMWKVEKALLENLADTLKNINVKDTDGSESSKDKIVKVLQKKLNGLLQEQEKDVVRRENLYDLLEDGTYDKDTFVDRMQVVQERTKEREYQIEELRGNIENAVEDQERRINLVPAVHSALDSYEKAPTAQIKNDILKGIIEAIYYERSDEYSGPLDFTIHVYLLG

SEQ ID NO: 38252 - DNA, 50 bp, Listeria booriae
  source 1..50: mol_type = genomic DNA
aacacatatgataaaccgctcaattgactgagcggtttatcatatgtaca

SEQ ID NO: 38253 - DNA, 40 bp, Listeria booriae
  source 1..40: mol_type = genomic DNA
ttcggggtgttagctcagctgggagagcgctacgctggca

SEQ ID NO: 38254 - DNA, 50 bp, Listeria booriae
  source 1..50: mol_type = genomic DNA
aacacatatgataaaccgctcaatagactgagcggtttatcatatgtaca

SEQ ID NO: 38255 - DNA, 40 bp, Listeria booriae
  source 1..40: mol_type = genomic DNA
ctaggggcgctacgacagcaggaagggcgctccgctggca

SEQ ID NO: 38256 - protein, 450 aa, Micrococcus luteus
MRAAIYLRISLDRHGDGLAVERQREDCKRIIAQRGWEHVATYEDPSVSASSRTVTRPGYERMVRDWQAGRFDAVVCWDLDRLTRQPRQLEDWIDAAEQRGLHLVTANGEADLGTDAGRMFARIKAAVSRQEVDRKSARQVRAAQQRAELGKGWGPRRPFGFAEDKVTHDPAEAAVVRRMYDDFNAGVGQREICRRLAAEGVRTSTGREWTQPALRQFLRNPRNAGLRAYRGEIIGPAEWAPLVSESVYRAALDRMDAPTKRVGGSGAKHLLIGVARCGVCDSPVGTNYTATHKRQYACRAGHVARSAEAVDAYVSEVAVGVLSTRGAAAFTRHDDAGQVELSAEADRIRARQEALAVEFADGTLTAAQLRAANARMAERLEQVTAAMVAAEGNAALRPLLEAESVAAGWERLDIPRRRAVIDTLMNVRILRTSQGSRFDPASVEITPRTG

SEQ ID NO: 38257 - DNA, 50 bp, Micrococcus luteus
  source 1..50: mol_type = genomic DNA
tatgtggggagcgtaggcatagcgacccatagaagtcaacatcgcttagg

SEQ ID NO: 38258 - DNA, 40 bp, Micrococcus luteus
  source 1..40: mol_type = genomic DNA
tgcctgcacgcggggatggacctgtacaagtgggcgtaca

SEQ ID NO: 38259 - DNA, 50 bp, Micrococcus luteus
  source 1..50: mol_type = genomic DNA
tatgtggggagcgtaggcatagcgctccatagaagtcaacatcgcttagg

SEQ ID NO: 38260 - DNA, 40 bp, Micrococcus luteus
  source 1..40: mol_type = genomic DNA
tgccttcacatgggcatcgctctgtacatgtctgtgtcca

SEQ ID NO: 38261 - protein, 500 aa, Corynebacterium variabile
MASSNTGSSDAPDRPLRACAYARVSLDLKEGAGVDRQLKACRDLARLKGYDLLAEFVDNDRSAYSGKARPEYSRMIAGLKAGKYDRVLCFHTDRLARRTVDTLDLLNLLKSTGAKVEVVTGNGLDPSSSDGELLGTILAAISQAESRHKGERVRAAQEAAARAGKPRRGGNRTFGYEHGMAEFREDEAAWIREAARRVLAGESVRSICQDMDADGVKTTTGGIMRTGVLRATLTNPKIAGYATWNPRRADGRLVKSDRQIVGRGQWEPILDEDTFHAVEAVLRDPARATNHRGNQVRHLLSGIVRCGGCGRVMYINSRKTRDGKGRRYFYFCKGAQGDGSGARRGKGHYSRAREPLDAYVTETLLARLERDDVTELLARSTGAVDAVDDLTRRRDELRQRLASLDEQVAVGRLSVDRYTTVASRVEDQLASLDAELASHVVDTDGVLASLAEAPDVRMWWSDAPLDQRRALVDATMTVTVYAGMTGGRFDPDTVKIEWKV

SEQ ID NO: 38262 - DNA, 50 bp, Corynebacterium variabile
  source 1..50: mol_type = genomic DNA
ggtgtgactgaatggatccgtgtgttcacacggttctaatcggacacacc

SEQ ID NO: 38263 - DNA, 40 bp, Corynebacterium variabile
  source 1..40: mol_type = genomic DNA
gttcatcgtggtggatgagttctccgaactcctgcatgcc

SEQ ID NO: 38264 - DNA, 50 bp, Corynebacterium variabile
  source 1..50: mol_type = genomic DNA
ggtgtgactgaatggatccgtgtgctcacacggttctaatcggacacacc

SEQ ID NO: 38265 - DNA, 40 bp, Corynebacterium variabile
  source 1..40: mol_type = genomic DNA
cttgatcgtggtggataagctcttcgaagtgctgctggat

SEQ ID NO: 38266 - protein, 578 aa, Priestia filamentosa
MNELDSMFQYHRSSERKRKQKEEAQSLANKDMYGVLIRVSTDRQAEEGDSIEMQKERAMEIIRSRDGVLHKFYIEEGISGSKNKIEKRPILQELLQDIQSGIVNKLIAYKRDRLTRITGDYLRIMDICRDSKCDMIFSSSGETQMFSDPVVGKLMETILGSISEMESANTSMRVRDTMASIAAKGQWTGGTLPYGYDMSDKGEIYVVKEVVPSIVEIEDLYLAGYGIASISRWMNGVKVKNLGVRPQGADKKRVVYKGRVEYWTPKAVQNILFNPFYAGILEYSTEGNKWLQRDQSKFIRQKGTHEPIRTTDKQTQIFYMKEKKSLGVPRQYNTSFLLTGLLYCSNCGQPFHSRTSTRSDKTYSYYCCGGRNNPDVLSRNETCKTKSYKKEILEDFVIDELTKYLEGMNFERTKELAEKGTHKSQEHSSASMKKIEDKIEDLEIDMKGVMRLMKRLDEDDPKYEILVSSYEEELSEIIVELNQTKKARQELEDKMLEQDLEIDYTRELLKAVKNFSNTFTTAPEHAKKALLSNIMDRIELHPNGDMDFHFKFNIEVHGEESFNEDNEEDDFITYNPRG

SEQ ID NO: 38267 - DNA, 50 bp, Priestia filamentosa
  source 1..50: mol_type = genomic DNA
tttattacctataaccccagaggcgaacgtgtggatacaaagataataaa

SEQ ID NO: 38268 - DNA, 40 bp, Priestia filamentosa
  source 1..40: mol_type = genomic DNA
aggaaaagagcctacgggcgatccgtttaattcagttatt

SEQ ID NO: 38269 - DNA, 50 bp, Priestia filamentosa
  source 1..50: mol_type = genomic DNA
tttattacctataaccccagaggcatacgtgtggatacaaagataataaa

SEQ ID NO: 38270 - DNA, 40 bp, Priestia filamentosa
  source 1..40: mol_type = genomic DNA
aggaaaaaggcctacatgcatgcagtttatttcagaaatg

SEQ ID NO: 38271 - protein, 536 aa, Intestinimonas butyriciproducens
MDFRIYSRKSVYTGKGESIENQVEMCKAYIFSNFAGATEADITVYEDEGFSGKSLDRPQFQQMMKDIKKHKPDCIVCYRLDRISRNVGDFASLIENLNNRDIAFVCIKEKFDTSTPMGKAMMYIASVFAQLERETIAERVRDNMLMLAKMGRWLGGQTPTGYSSEKVQEVIIDGKMKTSCKLKVNEEEMGIVRLIYQKMIAFHSVNGVRKYLASQNIKSRTGKDFSLLGIKEILQNPVYCIADEAARAYFVERDAVVCFDQEDCKDGRGLLSYNKRDYTKGHAPRQSIDKWIIAVGKHKGQIPGTEWVSIQRLFEENKTDGSKPPVMHNDYSLLSGMIYCAKCGSRMFAKRRSNNPKVFDYICSDKMQLNRCDCPNLNGPQMDDMVCEYLMNYENQNSELCQRLEKLKRTIKSDTGEDPRERLEKRIQACDQEINRLVDMLAGEDMNPAVVKRLNDKAAVLDAEMQELVRAKKELGTGLDAGEERSIQLDMLVRALAVFKENFASASVYEKRTLIRLIVQKCEWNGRDFDIFIYGE

SEQ ID NO: 38272 - DNA, 50 bp, Intestinimonas butyriciproducens
  source 1..50: mol_type = genomic DNA
attttccccagaattggtggtgtattcgcgccaccacacaaagggcaaca

SEQ ID NO: 38273 - DNA, 40 bp, Intestinimonas butyriciproducens
  source 1..40: mol_type = genomic DNA
tgtaccctgcaacgggcgatttccgaccctcattgcgatt

SEQ ID NO: 38274 - DNA, 50 bp, Intestinimonas butyriciproducens
  source 1..50: mol_type = genomic DNA
attttccccagaattggtggtgtacacgcgccaccacacaaagggcaaca

SEQ ID NO: 38275 - DNA, 40 bp, Intestinimonas butyriciproducens
  source 1..40: mol_type = genomic DNA
tgtaccatagaagggtagacaagcgatcctcattgcaatt

SEQ ID NO: 38276 - protein, 534 aa, Intestinimonas butyriciproducens
MKFKIYSRKSVFTGKGESIENQVEMCRDYIFANFPGSEDCDITVYEDEGFSGKNLDRPQFQRMMRDIKRDKPDCLVCYRLDRISRNVGDFAALIEELGRRGVAFVCIREKFDTGTPMGKAMMYIASVFAQLERETIAERVRDNMLMLAKMGRWLGGTTPTGYTSERVREIIVEGKVKFSCQLKEKPEEIRTVQTIYEKFLELQSLSGVRRYLHEQGLRSRRGEDFSLIGLREILQNPVYCAADQEALNYFTARCADVCFTAEACGRGRGLLAYNKRDYTKGHAPRNPVEKWIVAVGKHRGLICGRDWAVVQELLEANRSGARRVGAHNSYALLSGVIRCTRCGGRMFAKARSGRDEQYDYICRTKLELGRGACSCQNLHGEQADDTVCRCLEAHMRPGPGLERLLEGMRREFAEEEERTPTAAARSRREACGRELDRLVLALGSGGGQDGAFVQRIAARAAELEEELRRLEAAAQKREQRAESGKAEALCAEFLDPAQCTARMSVPEKRALIRRLVQRCEWDGGTLRIFLSATG

SEQ ID NO: 38277 - DNA, 50 bp, Intestinimonas butyriciproducens
  source 1..50: mol_type = genomic DNA
agttgccgttgggatggcggcgcatttgcgccgccatagaaaaggcaaca

SEQ ID NO: 38278 - DNA, 40 bp, Intestinimonas butyriciproducens; identical to SEQ ID NO: 38273
  source 1..40: mol_type = genomic DNA

SEQ ID NO: 38279 - DNA, 50 bp, Intestinimonas butyriciproducens
  source 1..50: mol_type = genomic DNA
agttgccgttgggatggcggcgcacatgcgccgccatagaaaaggcaaca

SEQ ID NO: 38280 - DNA, 40 bp, Intestinimonas butyriciproducens; identical to SEQ ID NO: 38275
  source 1..40: mol_type = genomic DNA

SEQ ID NO: 38281 - protein, 536 aa, Ruminococcus lactaris
MLRQTNQQPITALYPRLSHEDELQGESNSISNQKRILETYAKQNGFSNLRWYTDDGYSGANFQRPGFQAMLADIEAGKVGTVIVKDMSRLGRNYLQVGMYTEMIFPQKGVRFIAINDGVDSAQGDNDFAPLRNIFNEWLVRDTSKKIKAVKRSKGMSGKPITSKPVYGYLMDEDENFIIDEEAAPVVKQIYNLCLAGNGPTKIARMLTEQQILTPGTLEYRRTGSTRRYHPGYECKWATNTVVHILENQEYTGCLVNFKTEKLSYKVKHSVENPPEKQVIFENHHEPIIDTQTWERVQELRKQRKRPNRYDEVGLFSGILFCADCGSVMYQQRYQTDKRKQDCYICGNYKKRTHDCTAHFIRTDLLTAGVLSNLRKVTSYAAKHEARFMKLLIEQNEDGGKRRNAAKKKELEATEKRIAELSAIFKRLYEDSVTGRISDERFTELSADYEAEQRELKERAAAIQAELSKAQEATVNAEKFMNVVRRHTSFEELTPTLLREFVEKIVVHECSYDENKTRRQDIEIYYSFVGKVDLPE

SEQ ID NO: 38282 - DNA, 50 bp, Ruminococcus lactaris
  source 1..50: mol_type = genomic DNA
ttacttctttatcacacataagcaaatgctcatgtacggtagagaagcac

SEQ ID NO: 38283 - DNA, 40 bp, Ruminococcus lactaris
  source 1..40: mol_type = genomic DNA
ttaaaacctgccttaagcagaatgtgcaggcttaaagcac

SEQ ID NO: 38284 - DNA, 50 bp, Ruminococcus lactaris; identical to SEQ ID NO: 38282
  source 1..50: mol_type = genomic DNA

SEQ ID NO: 38285 - DNA, 40 bp, Ruminococcus lactaris
  source 1..40: mol_type = genomic DNA
ataacatatcccttaagttaaatgtgcaggctgagagcag

SEQ ID NO: 38286 - protein, 479 aa, Mycobacterium avium
MGKVKPAGQRVGVRSAAVYARISADVEGAGLGVARQLEDCRKLAADRGWLVGDEYVDNDVSAFSGKPRREYVRMLADLKSGARDGVIVYNLDRLHRRPVELEEFVALCELVGVRDVATVTADIDLGNDDGLFMARIFAAFAAKESGRKSARIRRKMLQNAERGLPHGSVRPFGYEPDKVAVRCDEAAVVCEMVDRYLAGASIRSLTMWLNDSGVPPAASKAWRTSTVRQILCSGRIAGLREHHGQVIGAAAWPAIITPAQRDQVLARMTARALTKTRAPRTYLLSGLLRCGRCGNRLYSQARHVNPDNRVRRYVCLSGPDQGGCGRLTVVARPVEELLTDAVLTRLDSPQLADALAGKASVDADVAALSAQLDADTTRLDELAALYANATVTAREWIAARDPITARIAETRRAIAAATDTTDVQELVGTGRLLREQWDSLDIDRQQAVIKSVLDHAVIAPGTAGSRSLDIDRVRPLWRV

SEQ ID NO: 38287 - DNA, 50 bp, Mycobacterium avium
  source 1..50: mol_type = genomic DNA
agggtagattctcaacttgcgagcaagctgaaatgttgctaatataccct

SEQ ID NO: 38288 - DNA, 40 bp, Mycobacterium avium
  source 1..40: mol_type = genomic DNA
cgggcccacccacgcgtcaaacctcaagtgctactgcaga

SEQ ID NO: 38289 - DNA, 50 bp, Mycobacterium avium
  source 1..50: mol_type = genomic DNA
agggtagattctcaacttgcgagcttgctgaaatgttgctaatataccct

SEQ ID NO: 38290 - DNA, 40 bp, Mycobacterium avium
  source 1..40: mol_type = genomic DNA
cgcgcccagcctctcttcattctttaacttctacttcaga

SEQ ID NO: 38291 - protein, 520 aa, Micromonospora aurantiaca
MVRRKARSGNQGRFDSKDALLAGGGQVRALRYQRASQDKKEQGKSVHDQGVLNLAEITKRSWTDAGSFTDNHRSASRRATKEREQFELLIEQIRAGKGDVLVVWEISRKERDLAVFVKIRDMCHEVGLYFWLVGGVLYDLRDKNDRMMLGFQAVQAEWMAEAIRDNVLRGIVGAAEAGRPHGKITYGYRRIYDQRTRALLRQEPDDEIRTAVAADGTVTEYSHAQVVRDNFRLIAAGMPLTAREAELNRLGIPASQGGVWRRGILRKQVMNPAYIGKRVLRGEIVGDGIWPALVSEETYWAVVRMLGDPARTTTRPGRAVHLLSYIVRCGVCDGPLSSQRQNRHGWTGQVYSCLHKRHVGVKAPILDEYVQRAVVAWLSRPDVHDILTAAAGSDEDVTHARAEAQRLRRELEDWRRLAENGDVTAIAYARAEKGLLAQIAEHEQRAADAGIPAVLRGRIGDHAVQAWQELDGNTPVKREIIRLVADIKLLPAAYKGDRSPFGRHRLHWNWNFDPHHHPKA

SEQ ID NO: 38292 - DNA, 50 bp, Micromonospora aurantiaca
  source 1..50: mol_type = genomic DNA
gttggcttctatagacgcttgactactgtcaaggatcgttagaagctatg

SEQ ID NO: 38293 - DNA, 40 bp, Micromonospora aurantiaca
  source 1..40: mol_type = genomic DNA
gctcgactgcacggtcggcacggccaagagccaggtctcc

SEQ ID NO: 38294 - DNA, 50 bp, Micromonospora aurantiaca
  source 1..50: mol_type = genomic DNA
gttggcttctatagacgcttgacttgtgtcaaggatcgttagaagctatg

SEQ ID NO: 38295 - DNA, 40 bp, Micromonospora aurantiaca
  source 1..40: mol_type = genomic DNA
gctccactcctggggcctctggaccaagagccaggattcc

SEQ ID NO: 38296 - protein, 536 aa, Anaerobutyricum hallii; identical to SEQ ID NO: 13136

SEQ ID NO: 38297 - DNA, 50 bp, Anaerobutyricum hallii; identical to SEQ ID NO: 3602
  source 1..50: mol_type = genomic DNA

SEQ ID NO: 38298 - DNA, 40 bp, Anaerobutyricum hallii
  source 1..40: mol_type = genomic DNA
aacggacaatccgggtgcaaagtcacaaggaataaaacac

SEQ ID NO: 38299 - DNA, 50 bp, Anaerobutyricum hallii
  source 1..50: mol_type = genomic DNA
ctacttctttatcacacatcagcaagtgctcatgtacggtaaggaagcaa

SEQ ID NO: 38300 - DNA, 40 bp, Anaerobutyricum hallii
  source 1..40: mol_type = genomic DNA
aactcacaatcctggtggaaggtgaaagggaagcaagcac

SEQ ID NO: 38301 - protein, 536 aa, Ruminococcus gnavus; identical to SEQ ID NO: 37786

SEQ ID NO: 38302 - DNA, 50 bp, Ruminococcus gnavus
  source 1..50: mol_type = genomic DNA
ttacttctttatctcacttgagcaaatgctcatgtgcggtaaagtaacac

SEQ ID NO: 38303 - DNA, 40 bp, Ruminococcus gnavus; identical to SEQ ID NO: 25943
  source 1..40: mol_type = genomic DNA

SEQ ID NO: 38304 - DNA, 50 bp, Ruminococcus gnavus
  source 1..50: mol_type = genomic DNA
ttacttctttatctcacttgagcaagtgctcatgtgcggtaaagtaacac

SEQ ID NO: 38305 - DNA, 40 bp, Ruminococcus gnavus; identical to SEQ ID NO: 38300
  source 1..40: mol_type = genomic DNA

SEQ ID NO: 38306 - protein, 505 aa, Clostridioides mangenotii
MNVAIYLRKSRADLEAEKSGEFETLNRHKSTLLKLARETNLNVVEIKEEIVSGESILHRPKMLDLLKEVEAKKYDAVLVMDIDRLGRGDMKDQGVILETFKDSGTKIITPRKTYDLMDEFDEEYSEFEAFMARKELKLINRRMQRGRIKSIEEGNYIYTDAPFGYNIVNISKKERTLEPNEQAETVKLIFDLYINGDMGYTKIARYLNNRHLPAYKSDNWSVSSIRNIVQNRIYTGVLEWQKNITTKQMNENGNSVRIKNDDKNVIVSKGKHPAIITEEIWEKARKIRESHTHTNHTNKLSNPLAGVLKCKICGKVMFSHLGRGIRHMTCRGRCGNKGARFEYVEKALLDSLVEYLNNYEIKIANSDIASIKTYSEKDINEKALNELKKELEELGRQKNKLFDLLERGIYGDDTFLERTQIIQSRTETLNKSIDEINARMKTVMKDDKQIVAGIRKVLELYPITDSAKEKNNLLKSVIKEAIYYKRPDQRNDNFDLYVELKVIEN

SEQ ID NO: 38307 - DNA, 50 bp, Clostridioides mangenotii
  source 1..50: mol_type = genomic DNA
tgtactcacgtcatacctcggaattggtttccaggtacgacatgggtaca

SEQ ID NO: 38308 - DNA, 40 bp, Clostridioides mangenotii
  source 1..40: mol_type = genomic DNA
cgtattcactccagcaaattggtttccagggcagccagtt

SEQ ID NO: 38309 - DNA, 50 bp, Clostridioides mangenotii
  source 1..50: mol_type = genomic DNA
tgtactcacgtcatacctcggaatctgtttccaggtacgacatgggtaca

SEQ ID NO: 38310 - DNA, 40 bp, Clostridioides mangenotii
  source 1..40: mol_type = genomic DNA
tgaattccctccagaacatctgagtccaggtcatccagct

SEQ ID NO: 38311 - protein, 447 aa, Clostridium botulinum
MLRCAIYIRVSTEEQAMHGLSMDAQKADLTDYAKKHNYEIIDYYVDSGKTARKRLSKRKDLQRMIEDVKLNKIDIIIFTKLDRWFRNVRDYYKIQEVLEDHNVDWKTIFENYDTSTANGRLHINIMLSVAQDEADRTSERIKRVFENKLKNNEPTSGSLPIGYKIKEKSIIIDEEKAPIAKDVFDFYYYHQSQTKVFKEILNKYNLSLCEKTIRRMLENKLYIGIYREHENFCPPLIDKNKFDEVQLILKRRNIKYIPTKRIFLFTSLLICKECRHKMIGNAQIRNTKAGKIEYILYRCNQSYARHTCNHRKVIYENKIETYLLNNIESELKKFIYDYELEDIPKVKNKVNKTNIKRKLEKLKELYINDLIDIDMYKEDYKKYTEILNTKEEKIEQRNLQPLKDFLNSDFKSLYSSISREEKRLLWRGIISEIQIDCNNDITIIPHP

SEQ ID NO: 38312 - DNA, 50 bp, Clostridium botulinum
  source 1..50: mol_type = genomic DNA
atgtttactaataagacgctctcaacccataaagtcttattagtaaacat

SEQ ID NO: 38313 - DNA, 40 bp, Clostridium botulinum; identical to SEQ ID NO: 20948
  source 1..40: mol_type = genomic DNA

SEQ ID NO: 38314 - DNA, 50 bp, Clostridium botulinum
  source 1..50: mol_type = genomic DNA
atgtttactaataagacgctctcatcccataaagtcttattagtaaacat

SEQ ID NO: 38315 - DNA, 40 bp, Clostridium botulinum
  source 1..40: mol_type = genomic DNA
tacattcactgatgccctttcattaagaaatataaaacat

SEQ ID NO: 38316 - protein, 618 aa, Enterococcus gallinarum; identical to SEQ ID NO: 11111

SEQ ID NO: 38317 - DNA, 50 bp, Enterococcus gallinarum
  source 1..50: mol_type = genomic DNA
tgtccgcaaaaaatgaccgactgatgtaggacggattttgcggacattca

SEQ ID NO: 38318 - DNA, 40 bp, Enterococcus gallinarum
  source 1..40: mol_type = genomic DNA
attcctgttgtgcctgaggtgtgggtcatataagaaattt

SEQ ID NO: 38319 - DNA, 50 bp, Enterococcus gallinarum
  source 1..50: mol_type = genomic DNA
tgtccgcaaaaaatgaccgactgatataggacggattttgcggacattca

SEQ ID NO: 38320 - DNA, 40 bp, Enterococcus gallinarum
  source 1..40: mol_type = genomic DNA
acaagtcttgtgcctgatgtatgggtcacataaaaagttc

SEQ ID NO: 38321 - protein, 540 aa, Faecalibacterium prausnitzii; identical to SEQ ID NO: 12686

SEQ ID NO: 38322 - DNA, 50 bp, Faecalibacterium prausnitzii; identical to SEQ ID NO: 3657
  source 1..50: mol_type = genomic DNA

SEQ ID NO: 38323 - DNA, 40 bp, Faecalibacterium prausnitzii
  source 1..40: mol_type = genomic DNA
aatcagcaaatgggaaaaaggctataccactcctagcatc

SEQ ID NO: 38324 - DNA, 50 bp, Faecalibacterium prausnitzii; identical to SEQ ID NO: 17834
  source 1..50: mol_type = genomic DNA

SEQ ID NO: 38325 - DNA, 40 bp, Faecalibacterium prausnitzii
  source 1..40: mol_type = genomic DNA
aaccagccaaagtggaaaaatctatagtactcataacatt

SEQ ID NO: 38326 - protein, 540 aa, Faecalibacterium prausnitzii
MKQPYNTTIYNTALYLRLSRDDELQGESGSIQTQRMMLRQYAAEHGLTVVDEYIDDGWSGTNFERPSFQRMIDDIEDGKINCVVTKDLSRLGRNYILTGQYTEIYFPSKGVRYIAINDNVDTINGESELAPFLNILNEMHARQTSKKVKAAMRTRFANGAHYGAYAPLGYVKDPDKKGHLLIDPETRWIVEKIFDLAVHGRGAASITRILVEEKVPTPGWLNYERYGTFANIYAGAPAEKAYAWTIAQVKSILKEETYIGHSVHNKQSNISFKNKKKVRKPQEEWYRVENTHEAIISEEVFQKVQELIASRRRKRRNGTTQIFAGLIKCADCGWSLAYGENKQNKNPYGYYHCSKNGQGLRQCSMHYIRYDVLYAYVLARLQYWSMLAQKDEDKLLKRLLNASDRERNSAKKKQAAELKKAEKRKAEVDGLFAKMYEDWSAGRITEYNFNMLSEKYQNEQKELETKIRQLHETMEAAVQTAADAEKWIALMKQYVNPVELTAELLNTLIEKITVHEAVKGEDGSREQEVEIYYRFIGKID

SEQ ID NO: 38327 - DNA, 50 bp, Faecalibacterium prausnitzii; identical to SEQ ID NO: 3657
  source 1..50: mol_type = genomic DNA

SEQ ID NO: 38328 - DNA, 40 bp, Faecalibacterium prausnitzii; identical to SEQ ID NO: 38323
  source 1..40: mol_type = genomic DNA

SEQ ID NO: 38329 - DNA, 50 bp, Faecalibacterium prausnitzii; identical to SEQ ID NO: 17834
  source 1..50: mol_type = genomic DNA

SEQ ID NO: 38330 - DNA, 40 bp, Faecalibacterium prausnitzii; identical to SEQ ID NO: 38325
  source 1..40: mol_type = genomic DNA

SEQ ID NO: 38331 - protein, 495 aa, Streptomyces violaceusniger
MTNDSQLVPVVAYARISADLARDGHGVEDQHRVNDETAATLGLKIVHYYTDNDFSAAKADLVRPDFEAMLRALKAGRLPDAQPVRGAIVVADDRLVRRVGDYERFVDALTYEDGRVYADAKGLKDLYNEDVESMGLFGVVIAKAEVRKIKRRTRRSHRRRAEEGIPVGGKRPFGWKDDKLTLEPDEAALLAEAARDVIAGKSLHSIQLRWNDAGVRTVHGNEWRSRSLKLALWNPRLCGWRKHNGELVRDVNGLPVVGKWESIITPKEWMAIDALFSARIGPNIKADGTVTDYRTPSYLLTGILRCGKPKGDGQICNAPLRVSARPDLSGGYVYQCPSRSMGGCGGSARNGAKVDEYITEAVLAKLEERTAAKTQLDAEWGGQEELDRLMVKQRKMLQAWQEDQISDELFFPENHKMESRIKVLRKERTQHALQVQRASVVTEDVRKQWYSGKLDMAQKRALIREALHAVIVLPVGGGGRRPFNPDLLVPKWTES

SEQ ID NO: 38332 - DNA, 50 bp, Streptomyces violaceusniger
  source 1..50: mol_type = genomic DNA
cccgttaatgttgcggtcaagatactgctggtgggtactcctgtctctcg

SEQ ID NO: 38333 - DNA, 40 bp, Streptomyces violaceusniger
  source 1..40: mol_type = genomic DNA
ccggatttttgtccaagtactgctggtggtgtgcctcggc

SEQ ID NO: 38334 - DNA, 50 bp, Streptomyces violaceusniger
  source 1..50: mol_type = genomic DNA
cccgttaatgttgcggtcaagatagagctggtgggtactcctgtctctcg

SEQ ID NO: 38335 - DNA, 40 bp, Streptomyces violaceusniger
  source 1..40: mol_type = genomic DNA
caggaattaagtccaagtagagttcgtggtctggctctgt

SEQ ID NO: 38336 - protein, 558 aa, Clostridioides difficile; identical to SEQ ID NO: 3086

SEQ ID NO: 38337 - DNA, 50 bp, Clostridioides difficile; identical to SEQ ID NO: 3087
  source 1..50: mol_type = genomic DNA

SEQ ID NO: 38338 - DNA, 40 bp, Clostridioides difficile
  source 1..40: mol_type = genomic DNA
tgggagaactgtatatactaatttagttccaggaggagca

SEQ ID NO: 38339 - DNA, 50 bp, Clostridioides difficile
  source 1..50: mol_type = genomic DNA
aggtatcgttatcttacctcaacacaagctgacgttagataacgatactt

SEQ ID NO: 38340 - DNA, 40 bp, Clostridioides difficile
  source 1..40: mol_type = genomic DNA
tgggggaagtgaatacattcatttaagtcctcgagaagca

SEQ ID NO: 38341 - protein, 558 aa, Clostridioides difficile
MLQTDKITALYCRLSQEDMQAGESESIQNQKLILQKYADEHHFFNTRFFVDDGFSGVSFEREGLQAMLHEVEAGNVATVITKDLSRLGRNYLKTGELIEIVFPEYEVRYIAINDGVDTAREDNEFTPLRNWFNEFYARDTSKKIRAVKQAKAQKGERVNGEAPYGYLIDPDNRNHLIPDPETAHVVKQIFAMYVRGDRMCEIQNWLRDNEILTVGELRYRRTGSKRHPRPQLNAWYNWPDKTLYDILTRKEYLGHTITGKTYKVSYKSKKTKKNPEEKRYFFPNTHEPLIDEETFELAQKRIATRQRPTKVDEIDLFSGLLFCGDCGYKMYAVRGAGMLERKHAYTCGNYRNRARNDMLCTTHYIRKSVLKELVLADLQRVTSYVKEHEQEFIETANECSAKAVQKTLTQQRKELDKAQNRINELNILFRKLYEDNALGKLSDEQFAFLTSGYDEEKKTLTRRIAELSQEIDNATERSADVKRFVALVRRYTAIEELTYENVHEFIDRILIHELDKETNTRKIEIFYSFVGRVDTGDKPTESISYFRQIGADVKSYAI

SEQ ID NO: 38342 - DNA, 50 bp, Clostridioides difficile; identical to SEQ ID NO: 3087
  source 1..50: mol_type = genomic DNA

SEQ ID NO: 38343 - DNA, 40 bp, Clostridioides difficile; identical to SEQ ID NO: 38338
  source 1..40: mol_type = genomic DNA

SEQ ID NO: 38344 - DNA, 50 bp, Clostridioides difficile; identical to SEQ ID NO: 38339
  source 1..50: mol_type = genomic DNA

SEQ ID NO: 38345 - DNA, 40 bp, Clostridioides difficile; identical to SEQ ID NO: 38340
  source 1..40: mol_type = genomic DNA

SEQ ID NO: 38346 - protein, 599 aa, Klebsiella michiganensis; identical to SEQ ID NO: 11361

SEQ ID NO: 38347 - DNA, 50 bp, Klebsiella michiganensis
  source 1..50: mol_type = genomic DNA
taggttcctatttcttttacagtcaagtgtagttaatataggtgcaccta

SEQ ID NO: 38348 - DNA, 40 bp, Klebsiella michiganensis
  source 1..40: mol_type = genomic DNA
tcccgcccctgctccagccaggtgtaccaggtgacgccga

SEQ ID NO: 38349 - DNA, 50 bp, Klebsiella michiganensis
  source 1..50: mol_type = genomic DNA
taggttcctatttcttttacagtcccgtgtagttaatataggtgcaccta

SEQ ID NO: 38350 - DNA, 40 bp, Klebsiella michiganensis
  source 1..40: mol_type = genomic DNA
tcctggcccggctcccctcccatgcaccaggcggcgccga

SEQ ID NO: 38351 - protein, 599 aa, Klebsiella variicola; identical to SEQ ID NO: 2021

SEQ ID NO: 38352 - DNA, 50 bp, Klebsiella variicola
  source 1..50: mol_type = genomic DNA
tgggttcctatttattttacagccaggtgtagttaatataagtgcaccta

SEQ ID NO: 38353 - DNA, 40 bp, Klebsiella variicola; identical to SEQ ID NO: 38348
  source 1..40: mol_type = genomic DNA

SEQ ID NO: 38354 - DNA, 50 bp, Klebsiella variicola
  source 1..50: mol_type = genomic DNA
tgggttcctatttattttacagccccgtgtagttaatataagtgcaccta

SEQ ID NO: 38355 - DNA, 40 bp, Klebsiella variicola; identical to SEQ ID NO: 38350
  source 1..40: mol_type = genomic DNA

SEQ ID NO: 38356 - protein, 587 aa, Streptococcus pyogenes; identical to SEQ ID NO: 10016

SEQ ID NO: 38357 - DNA, 50 bp, Streptococcus pyogenes; identical to SEQ ID NO: 9807
  source 1..50: mol_type = genomic DNA

SEQ ID NO: 38358 - DNA, 40 bp, Streptococcus pyogenes
  source 1..40: mol_type = genomic DNA
tttgtttccgcaaacgcatcacgtcgagtgtgtagtgttg

SEQ ID NO: 38359 - DNA, 50 bp, Streptococcus pyogenes; identical to SEQ ID NO: 10724
  source 1..50: mol_type = genomic DNA

SEQ ID NO: 38360 - DNA, 40 bp, Streptococcus pyogenes; identical to SEQ ID NO: 10720
  source 1..40: mol_type = genomic DNA

SEQ ID NO: 38361 - protein, 587 aa, Streptococcus pyogenes; identical to SEQ ID NO: 10721

SEQ ID NO: 38362 - DNA, 50 bp, Streptococcus pyogenes; identical to SEQ ID NO: 9807
  source 1..50: mol_type = genomic DNA

SEQ ID NO: 38363 - DNA, 40 bp, Streptococcus pyogenes; identical to SEQ ID NO: 38358
  source 1..40: mol_type = genomic DNA

SEQ ID NO: 38364 - DNA, 50 bp, Streptococcus pyogenes; identical to SEQ ID NO: 10724
  source 1..50: mol_type = genomic DNA

SEQ ID NO: 38365 - DNA, 40 bp, Streptococcus pyogenes; identical to SEQ ID NO: 10720
  source 1..40: mol_type = genomic DNA

SEQ ID NO: 38366 - protein, 583 aa, Streptococcus pyogenes; identical to SEQ ID NO: 23736

SEQ ID NO: 38367 - DNA, 50 bp, Streptococcus pyogenes; identical to SEQ ID NO: 9817
  source 1..50: mol_type = genomic DNA

SEQ ID NO: 38368 - DNA, 40 bp, Streptococcus pyogenes; identical to SEQ ID NO: 38358
  source 1..40: mol_type = genomic DNA

SEQ ID NO: 38369 - DNA, 50 bp, Streptococcus pyogenes; identical to SEQ ID NO: 10719
  source 1..50: mol_type = genomic DNA

SEQ ID NO: 38370 - DNA, 40 bp, Streptococcus pyogenes; identical to SEQ ID NO: 10720
  source 1..40: mol_type = genomic DNA

SEQ ID NO: 38371 - protein, 583 aa, Streptococcus pyogenes; identical to SEQ ID NO: 10761

SEQ ID NO: 38372 - DNA, 50 bp, Streptococcus pyogenes; identical to SEQ ID NO: 9817
  source 1..50: mol_type = genomic DNA

SEQ ID NO: 38373 - DNA, 40 bp, Streptococcus pyogenes; identical to SEQ ID NO: 38358
  source 1..40: mol_type = genomic DNA

SEQ ID NO: 38374 - DNA, 50 bp, Streptococcus pyogenes; identical to SEQ ID NO: 10719
  source 1..50: mol_type = genomic DNA

SEQ ID NO: 38375 - DNA, 40 bp, Streptococcus pyogenes; identical to SEQ ID NO: 10720
  source 1..40: mol_type = genomic DNA

SEQ ID NO: 38376 - protein, 575 aa, Fusicatenibacter saccharivorans; identical to SEQ ID NO: 3726

SEQ ID NO: 38377 - DNA, 50 bp, Fusicatenibacter saccharivorans; identical to SEQ ID NO: 277
  source 1..50: mol_type = genomic DNA

SEQ ID NO: 38378 - DNA, 40 bp, Fusicatenibacter saccharivorans
  source 1..40: mol_type = genomic DNA
gaaaaaagccccagaaaggttggattccggctttttctgc

SEQ ID NO: 38379 - DNA, 50 bp, Fusicatenibacter saccharivorans
  source 1..50: mol_type = genomic DNA
atagttacttgtcactattaagccatggcttaacagtgataaggaactaa

SEQ ID NO: 38380 - DNA, 40 bp, Fusicatenibacter saccharivorans
  source 1..40: mol_type = genomic DNA
gaaaaaagcgacagaaaggatggtttcctgccagtcatgt

SEQ ID NO: 38381 - protein, 523 aa, Enterobacter roggenkampii
MRQVITYLRFSSKPQERGDSIRRQKGLFERWLKDNPDAKVVDEFSDEGASAYHGHHLKGDFGRMLQNIQDGKYLSGQTVLLVESETRLNRQKARNTENLVDLITGKGVDVICLESGKIYTSTNIDDLDTSIQLKIAAHIAHQQSKEKSIKVSAAWEHRAQLALEGKQQLTKNVPGWIDPDTRKLNEHSSTVVTIFDLLLSGESLHNIARYLQANNIKSFSRREKANGFSVHSVRTILRSESTVGTLAASKRNDRPAIPNYYEPAIDVATFNKAQEILSKNRVGRAPASDNPITINLFKGIIRCQCGASVHPTGVKATYQGVYRCNNVPDGRCNVPTIKRKPFDKWMLDNIVGFLERDDGNNTDKRKAEIEYQISLVTSKLKKATTLLLELDDVTELKEQVKELNIQRSNLQSELDELNQRETLSDKPLHHLSEIDLTTKAGRVEAQLILSKFVQSIELQREMIIITLRNGTVIGKSRDLSPVLSQDLMKQVVSSPSPTDIDMFSVITSDEEFRKSGKQVTKRS

SEQ ID NO: 38382 - DNA, 50 bp, Enterobacter roggenkampii
  source 1..50: mol_type = genomic DNA
aacccgaatagcctatattcaagggtcattgtatttgagctattcggcga

SEQ ID NO: 38383 - DNA, 40 bp, Enterobacter roggenkampii
  source 1..40: mol_type = genomic DNA
gcggcgaggtaaatcaagggtcatcgaagtcatagtcatc

SEQ ID NO: 38384 - DNA, 50 bp, Enterobacter roggenkampii
  source 1..50: mol_type = genomic DNA
aacccgaatagcctatattcaaggaacattgtatttgagctattcggcga

SEQ ID NO: 38385 - DNA, 40 bp, Enterobacter roggenkampii
  source 1..40: mol_type = genomic DNA
ggcccaaagtaaatgaaggaacatgaaagtcatagtaatg

SEQ ID NO: 38386 - protein, 517 aa, Enterobacter roggenkampii
MRHVITYLRFSSKPQERGDSIRRQTDLFDRWLKTNPDAEVIDQFKDEGQSAFHGRHLKGDFGRMLQNIEDGKYIAGQTVLLVESEDRLNRQKARNTESLVDLITGKGIDVICLASGKVYNAENIDELGTSIQLKIAAHIAYKQSKDKSDKVSDAWGQRAKLALSGEQQLTKMVPGWIDPETRKLNEHAQTVKDIFSLLLSGDSLHNIARHLQASGTKSFSRRKDANGFSVHSVRTILRSESTIGTLAASKHNDRPAIPDYYEAAVDIATFNKAQELLSKNRKGRTPASDNPITINLFKGLMRCQCGASVHPTGVKNTYQGVYRCNNVVDGRCTVPTIKRKAFDTWMINNAVGMLEQSGDNDTERKKAELQYQIDMLSKRIAKGSALLIELDDVAELKEEVKKHSDQRKQLQSELDKLNQRETFSDKSLPHLADIDLTTKAGRIEAQLLLSKYIKGIVVHPSTFTVSLRNGNTYENLSLAPHEVYPDEEALSIRNRMQQLIDDELGIIEPTLKGQMKW

SEQ ID NO: 38387 - DNA, 50 bp, Enterobacter roggenkampii
  source 1..50: mol_type = genomic DNA
aaaccgagtagactccatacgatagtcattgtatttgagctattcggcgt

SEQ ID NO: 38388 - DNA, 40 bp, Enterobacter roggenkampii; identical to SEQ ID NO: 38383
  source 1..40: mol_type = genomic DNA

SEQ ID NO: 38389 - DNA, 50 bp, Enterobacter roggenkampii
  source 1..50: mol_type = genomic DNA
aaaccgagtagactccatacgataaacattgtatttgagctattcggcgt

SEQ ID NO: 38390 - DNA, 40 bp, Enterobacter roggenkampii; identical to SEQ ID NO: 38385
  source 1..40: mol_type = genomic DNA

SEQ ID NO: 38391 - protein, 621 aa, Blautia wexlerae
MSLLMKESEERSSNIDEQKARIRQRYKGIDPEELEVIPALPPEDIFKTEKKLRVAVYARVSTDDPRQTSSYELQKNHYQDVVNKNPNWMLVEIYADEGISGTSLQHRDAFKKMIEDCEAGKIDLIITKSVSRFARNVVDCIRYVRELSSLRPPVGVFFETEHLNTLDPKSEMILSFMSTLAQEESHTKSEIMNSSIEMRFRRGIFLTPPLLGYDQDENGDLVINPHEAKIVQLIFYMYLNGSSTQQIADSLTELGCKTKKNNDVWSSSTILQILQNERHCGDVLARKTWTPNYLDHKSRKNNQDRNQYRKVGHHEAIISRDDFIAVQKLITNAKYGNKEILPELHVIQEGSLSGFISINPRWSGFKARDYFEASQSVLKPANMNVPDTITASAGSFDLRDYEVARGQFFSSVGRISVSFSYKQISFNKDAIRKFPNIKFVELLIHPSSKLLAIRPCSSETKNKVQWSRLKDGQLIPKPISGAAFLPTLYEIFKWDKKCKYRILGVAHQKGNENVLIFNMDDTEIRIPTSTNDVSAPNNNMPDTISDSKSVLAYPADWMNSFGNNYYTQSQAPELTEFTADKNWQTASESKPYKEPELQTTPKETIIQNIKNIITEIKGDTQ

SEQ ID NO: 38392 - DNA, 50 bp, Blautia wexlerae
  source 1..50: mol_type = genomic DNA
atgctttaaggctctctttcatgcaaacccgcaaacaacgaggattatct

SEQ ID NO: 38393 - DNA, 40 bp, Blautia wexlerae
  source 1..40: mol_type = genomic DNA
ataggcaaacgtataagagaatcactatgttatcttatcc

SEQ ID NO: 38394 - DNA, 50 bp, Blautia wexlerae
  source 1..50: mol_type = genomic DNA
atgctttaaggctctctttcatgcctacccgcaaacaacgaggattatct

SEQ ID NO: 38395 - DNA, 40 bp, Blautia wexlerae
  source 1..40: mol_type = genomic DNA
ctaggaatagttgtaagaacttcactctgttaacttatct

SEQ ID NO: 38396 - protein, 536 aa, Streptococcus constellatus; identical to SEQ ID NO: 13136

SEQ ID NO: 38397 - DNA, 50 bp, Streptococcus constellatus; identical to SEQ ID NO: 3602
  source 1..50: mol_type = genomic DNA

SEQ ID NO: 38398 - DNA, 40 bp, Streptococcus constellatus; identical to SEQ ID NO: 29628
  source 1..40: mol_type = genomic DNA

SEQ ID NO: 38399 - DNA, 50 bp, Streptococcus constellatus
  source 1..50: mol_type = genomic DNA
ctacttctttatcacacatcagcagctgctcatgtacggtaaggaagcaa

SEQ ID NO: 38400 - DNA, 40 bp, Streptococcus constellatus
  source 1..40: mol_type = genomic DNA
aattgaaaatcccggaactgcatggcaaggtattaaggaa

SEQ ID NO: 38401 - protein, 543 aa, Clostridium botulinum
MKIAIYSRKSIFTGKGESIENQIKLCKEYCDIHYKNENLEYIIYEDEGFSGKNIKRPQFQNLLNDVKSKQINILICYRLDRISRNVADFSSILELLEKYNVDFISINERFDTSTPTGRAMVYISSVFAQLERETIAERVKDNMIQLAKMGKWSGGQLPLGYTSEKVHYMNEEMKEKTFIKLVPVDNELDTIQFIYNNFLTKGSILNVTKELNSHGYKTKTGIDFEITGVKRILRSALYVKSSEFVHEYLKSKKYNVFGEANGNGYLGYNKRTDKDNIIIAVSNHKAVISSTDWLSVQKKLDANIKRSKETSNRNGTGCNDTLFSGLLKCGKCGSNMVIKYNGKNKDGISYIYYTCSNKEKKYLTNRCDIPNLRSDLVDPIIVNNIKIYNKDILIKEYKNKLSELLENSDKQIINDLKSQINDKEKQARNLVTELSKTESEDVKVLYRAQIDEIIKEINKLKSIISSSEETQLQLKDTIMNIKHLIQSFIDFNNYFDNAIDINIKRTLLRNIVEKVTYDADKKDFNVNFFRIDSMQLDSASEPL

SEQ ID NO: 38402 - DNA, 50 bp, Clostridium botulinum
  source 1..50: mol_type = genomic DNA
gtatgcagttagatagtgcaagcgaatccttgagcactctaactacatat

SEQ ID NO: 38403 - DNA, 40 bp, Clostridium botulinum
  source 1..40: mol_type = genomic DNA
ctatactgatgctactggaaacccttggactgcaacttat

SEQ ID NO: 38404 - DNA, 50 bp, Clostridium botulinum
  source 1..50: mol_type = genomic DNA
gtatgcagttagatagtgcaagcggatccttgagcactctaactacatat

SEQ ID NO: 38405 - DNA, 40 bp, Clostridium botulinum
  source 1..40: mol_type = genomic DNA
ctacacgaattcttctagagatccttggacttgaaattat

SEQ ID NO: 38406 - protein, 558 aa, Pseudomonas aeruginosa
MPRAYAYVRWSTAEQGEEGRDSHDRQTTPLQAFTESTGIPVVETIIDKGVSAFKGANARIGQLKGLLDRIESGEIERGDYIIVESIDRLTRQKLNDSVDLIQSILKKGVRLHTVIDQKTYSHDDPSRDLETLLMVGVIAKRAHEESDTKSKRLKSSWLKKRNAAENTIIRKQCPYGLRYDEEAQAFAIVEDEAQEIRDIFENLKYMGILESIKRVNQYSKRRWTRKHIDELIKNKSPIGVLCLRRRNDEDGTKIFDRYVPGYYPKIIDETEFDAAVSAVKGRFNERKSGRRSPNNYNIFRHCIQCHEHKAGMLFNLQGLGVEKKRYAYLVCSNRAERVCECDNRIRFDLVFGTFLAFVKQLSENRYIDERTDKKRKDFTWFSQDNYKQMDAVNDAFSRFFSVRDTSAPKEEIRAKKAQLTSEKTALEMLDASLAQFDGLIPKTFIKRIADTEARITALEVEIQNLEGSLAIEAETLEVTTYQDILDLYATEQGRLKLNTFFISRGITFEVNSDKESNMVGLQIKIKGDEKFNLSAYQFFTTKYPLTPFGIPDLSHIIK

SEQ ID NO: 38407 - DNA, 50 bp, Pseudomonas aeruginosa
  source 1..50: mol_type = genomic DNA
ttattagaaaccgctagaccattgaacaacggacgggtattttctaataa

SEQ ID NO: 38408 - DNA, 40 bp, Pseudomonas aeruginosa
  source 1..40: mol_type = genomic DNA
gccatcgatgctgccctggaacagcatctcgaacgccagg

SEQ ID NO: 38409 - DNA, 50 bp, Pseudomonas aeruginosa
  source 1..50: mol_type = genomic DNA
ttattagaaaccgctagaccattgttcaacggacgggtattttctaataa

SEQ ID NO: 38410 - DNA, 40 bp, Pseudomonas aeruginosa
  source 1..40: mol_type = genomic DNA
tctctctatgctgcccaggttgaccatctccaactcctgg

SEQ ID NO: 38411 - protein, 490 aa, Fusobacterium nucleatum; identical to SEQ ID NO: 331

SEQ ID NO: 38412 - DNA, 50 bp, Fusobacterium nucleatum
  source 1..50: mol_type = genomic DNA
ggtaatagttaaaaatggcacacccagaagtcaactttttctaaacagct

SEQ ID NO: 38413 - DNA, 40 bp, Fusobacterium nucleatum
  source 1..40: mol_type = genomic DNA
ttttaaaaaatggcacacccagtaggacttgaacccacaa

SEQ ID NO: 38414 - DNA, 50 bp, Fusobacterium nucleatum
  source 1..50: mol_type = genomic DNA
ggtaatagttaaaaatggcacaccaagaagtcaactttttctaaacagct

SEQ ID NO: 38415 - DNA, 40 bp, Fusobacterium nucleatum
  source 1..40: mol_type = genomic DNA
ttttaaaaaaaggcagaataaaaaggaaatgaaccaaaaa

SEQ ID NO: 38416 - protein, 507 aa, Bacillus glycinifermentans
MFFEEKDTQEIIKYEDYPYAVYVRVSTEKDEQVSSKENQVDICQHWLEQNNFEWNEDAIQIDDGISGTVLLDRTAMQLILEKAKNHKLKMVVFKSISRLARDLKDSLEIREVLLAHGVRVVTLEEGYDSLYEGKNSMKFEMFSMFAAQYPQTISVAASASLAAKARRGEHSGRIPYGYKKDGKYLAIHEEEAKVIRLIFDLYNNHGYGQKRIVYKLNEELSLGNIPKPQKVEKWQLTTVQRILKNPIYCGVFIANRYTTVKVGGRKKFMRNPKEKWTVYKDWCPKIVSEEEFEKANNRERRLAKKRFTPWNELRGKMVCGECGAKMVILPSYRYKQNGEKSEFNYLKCSAYRRGGKDLCVNHAPIQYKDFRAMVIKKLKSKGKRFKLNFKSDFEERKKKKIKQMKSELESTEKKKKRLIELYLEDALISKEEFQSKRQELESQLEKLNDDLFRLEREEEQSIDISNIQNAFAQLERTDQDLFHAFSVLIDKLVIHQDGTVDFYYNFK

SEQ ID NO: 38417 - DNA, 50 bp, Bacillus glycinifermentans
  source 1..50: mol_type = genomic DNA
agtttgcaataggaatgcataacgaatgttatgcgtacctacggcaaacg

SEQ ID NO: 38418 - DNA, 40 bp, Bacillus glycinifermentans
  source 1..40: mol_type = genomic DNA
tgttcgtaatcacatttccaatgccatgcaaaaattggga

SEQ ID NO: 38419 - DNA, 50 bp, Bacillus glycinifermentans
  source 1..50: mol_type = genomic DNA
agtttgcaataggaatgcataacgtatgttatgcgtacctacggcaaacg

SEQ ID NO: 38420 - DNA, 40 bp, Bacillus glycinifermentans
  source 1..40: mol_type = genomic DNA
tgctcgtagtcacatatcctaacccatgtgaacgttgggg

SEQ ID NO: 38421 - protein, 502 aa, Streptococcus pneumoniae
MSKEKIKVYLYTRVSTSIQIEGYSLEAQKSRMKAFAIYNDYEIVGEYEDAGKSGKSIEGRIQFNRMMEDIKSGKDGVSFVLVFKLSRFERNAADVLSTLQIMQDYGVNLICVEDGIDSSKDAGKLMISVLSAVAEIERKNIRIQTMEGRIQKAREGKWNGGFAPYGYKLEDGKLFINEEEAVAIRTIFDQYVNTTIGANGISKYLENHGIRKIPRQNGKNPLFDAGLIRKILKNPVYNGKIAFGRRTLEKVHGTRNEYKQVEQDEYLISEGIHEAIVSDEVWQAAQVKLKSQAKKYEHVNKGKDTRTHLLSGIVKCPICGVGMFGNKCIKKKKDGTKYKDFYYYGCKHRQMIRGHKCTFSKQIREELLDDAVAEVIVKIVSNPKFASMMQEKINMKVDTSEIEKEIDNYQKELRKSHSTKFKLIEEIDNLDVEDKHYKRRKQDLDDRLYRMYDKIDELESSLIDAKAKKQTIEAEKLTGDNIYKVLIYFDKLYKVMNDVERR

SEQ ID NO: 38422 - DNA, 50 bp, Streptococcus pneumoniae
  source 1..50: mol_type = genomic DNA
ataggtttggacaatgatgaacaagtcgagacggtagcacttttgtccaa

SEQ ID NO: 38423 - DNA, 40 bp, Streptococcus pneumoniae
  source 1..40: mol_type = genomic DNA
atttcctcaaacgcatcacgttgaatgtgtaagtttatta

SEQ ID NO: 38424 - DNA, 50 bp, Streptococcus pneumoniae
  source 1..50: mol_type = genomic DNA
ataggtttggacaatgatgaacaatacgagacggtagcacttttgtccaa

SEQ ID NO: 38425 - DNA, 40 bp, Streptococcus pneumoniae
  source 1..40: mol_type = genomic DNA
attccctcagttgccacagtatgaatctgtgagtttgtta

SEQ ID NO: 38426 - protein, 505 aa, Streptococcus pneumoniae; identical to SEQ ID NO: 9796

SEQ ID NO: 38427 - DNA, 50 bp, Streptococcus pneumoniae; identical to SEQ ID NO: 38422
  source 1..50: mol_type = genomic DNA

SEQ ID NO: 38428 - DNA, 40 bp, Streptococcus pneumoniae; identical to SEQ ID NO: 38423
  source 1..40: mol_type = genomic DNA

SEQ ID NO: 38429 - DNA, 50 bp, Streptococcus pneumoniae; identical to SEQ ID NO: 38424
  source 1..50: mol_type = genomic DNA

SEQ ID NO: 38430 - DNA, 40 bp, Streptococcus pneumoniae; identical to SEQ ID NO: 38425
  source 1..40: mol_type = genomic DNA

SEQ ID NO: 38431 - protein, 548 aa, Streptococcus pneumoniae
MSKEKIKVYLYTRVSTSIQIEGYSLEAQKSRMKAFAIYNDYEIVGEYEDAGKSGKSIEGRIQFNRMMEDIKSGKDGVSFVLVFKLSRFARNAADVLSTLQIMQDYGVNLICVEDGIDSSKDAGKLMISVLSAVAEIERENIRIQTMEGRIQKAREGKWNGGFAPYGYKLEDGKLFINEEEAVAIRTIFDQYVNTTIGANGISKYLENHGIRKIPRQNGKNPLFDAGLIRKILKNPVYNGKIAFGRRTLEKVHGTRNEYKQVEQDEYLISEGIHEAIVSDEVWQAAQVKLKSQAKKYEHVNKGKDTRTHLLSGIVKCPICGVGMFGNKCIKKKKDGTKYKDFYYYGYKHRQMIRGHKCTFSKQIREELLDDAVAEVIVKIVSNPKFASMMQEKINMKVDTSEIEKEIDNYQKELRKSHSTKFKLIEEIDNLDVEDKHYKRRKQDLDDRLYRMYDKIDELESSLIDAKAKKQTIEAEKLTGDNIYKVLIYFDKLYKVMNDVERRQLISALISEIQVYEEKQSNGQWLKSITFKLPITEENLNIGLDNDEQ

SEQ ID NO: 38432 - DNA, 50 bp, Streptococcus pneumoniae
  source 1..50: mol_type = genomic DNA
ataggtttggataatgatgaacaagtcgagacggtagcacttttgtccaa

SEQ ID NO: 38433 - DNA, 40 bp, Streptococcus pneumoniae; identical to SEQ ID NO: 38423
  source 1..40: mol_type = genomic DNA

SEQ ID NO: 38434 - DNA, 50 bp, Streptococcus pneumoniae
  source 1..50: mol_type = genomic DNA
ataggtttggataatgatgaacaatacgagacggtagcacttttgtccaa

SEQ ID NO: 38435 - DNA, 40 bp, Streptococcus pneumoniae; identical to SEQ ID NO: 38425
  source 1..40: mol_type = genomic DNA

SEQ ID NO: 38436 - protein, 560 aa, Holdemania filiformis
MYHQSNTAAALQFPYNAMSVEAVTALYCRLSRDDELQGDSNSIINQKKILQRYALDHGYKNYRFYIDDGISGTTFNRPGFQQMIADIEAGLVKRVIIKDMSRLGRDYLQVGMYTEIMFPEHDIHFIAVNDGVDSTQGDNEFTPFRNIINEWYAKDTSKKIRAVMKVKGNAGEHLTTLPPYGYMKSPDNKKLWVRDEEAATVVYEIGLYVMDGFGPSQIARKLTERRILTPAAYYASKGRKASNIKRGLPYAWDASTVADIMDRWREYLGHTVNFKTRKKSYKSKKVIHNPESEWMIFENTHDPIWTEAIADAARAARQTRRRPTKMGEMGMFSGMMFCADCGSVMYQCRATNFRREQEYYLCAGYRKSRDFCGQTHSIRTVILEELILENLREIVSFASRSKDEFVRLVMDSDLRQRDRDLAKRKRQLVDSEKRITELDAIFKRLYEDNISGKLSDERFQKLSADYEKEEQELKVLASSLRKEVELEESKSADIDRFLSVVERYTDIPELTPCILHEFVEKIIVHAASDPKGKNRTQEIDIYYKGIGALEMSKVTASMEK

SEQ ID NO: 38437 - DNA, 50 bp, Holdemania filiformis
  source 1..50: mol_type = genomic DNA
atgttttcttatcgggagctgcctttccccgcctcctaataagaaaacat

SEQ ID NO: 38438 - DNA, 40 bp, Holdemania filiformis
  source 1..40: mol_type = genomic DNA
aagaaaagaagctttcgcgttgacagcggcgcttttttcc

SEQ ID NO: 38439 - DNA, 50 bp, Holdemania filiformis
  source 1..50: mol_type = genomic DNA
atgttttcttatcgggagctgcctgaccccgcctcctaataagaaaacat

SEQ ID NO: 38440 - DNA, 40 bp, Holdemania filiformis
  source 1..40: mol_type = genomic DNA
aagaaaggaaacctgctcggagaaagttaagcttttttcc

SEQ ID NO: 38441 - protein, 618 aa, Longicatena caecimuris; identical to SEQ ID NO: 11111

SEQ ID NO: 38442 - DNA, 50 bp, Longicatena caecimuris; identical to SEQ ID NO: 11112
  source 1..50: mol_type = genomic DNA

SEQ ID NO: 38443 - DNA, 40 bp, Longicatena caecimuris
  source 1..40: mol_type = genomic DNA
tgcttttacatgagcaagagatgtggatcattacgaatcg

SEQ ID NO: 38444 - DNA, 50 bp, Longicatena caecimuris
  source 1..50: mol_type = genomic DNA
actgtccgcaaaaaatgaccgactcctgtaggacggattttgcggacatt

SEQ ID NO: 38445 - DNA, 40 bp, Longicatena caecimuris
  source 1..40: mol_type = genomic DNA
tgctcatacaggagcaacacctgtgggtccttagcaagca

SEQ ID NO: 38446 - protein, 573 aa, Agrobacterium tumefaciens
MTKAYSYLRISSKEQIRGGGIERQLESTRRYAAENGLVLDDELRDIGKSGYHSAHVKDGALGLFLELVKTGKIDRGSVLIVESLDRLSRADVITAQSQLLQLLSADIDVVTLMDNQRYTRESDFTQLIISLTIMSRAHEESRTKAERTKAARARSKQMAIDAGGGVYVHNAPYWIDQIKQNDGTYRFKLNDKANVVRQIFNYYDNGLGATAICRMLNQNGIKTFKRNAVWSEPVIFKILRNETAIGSLTIGSKVLPGYFPACVDEVVYWRVQDLHKQRSESSPRKGRKGERFTNLYQGFVCCHHCGGPIATKRKGVGSHLQYYQCNTQFLNGDCRRDTKRKLMRLELIEKAILDNVLVYHLDNALSTNTGNVEKERSALVDDVTKFEKQISNSLVMAEMAENPEDIAVIMGRVNGLRQSVRSSKARIDELDRLMRETDADVNDRQAINQSIQDEIAKWPSLDKEALYISRSKVSHSLRKLVTAIRLDFDNQTAIVAVGGFIRFWVIQVDGTVKTDGDWSMLPFDILVHRAKEFFGDKIDITSMKSVYDRIDIERPPVALWDSERAAKGIAQNP

SEQ ID NO: 38447 - DNA, 50 bp, Agrobacterium tumefaciens
  source 1..50: mol_type = genomic DNA
atgggtttaaaaatatattccatcaagatcgaagtaccatttacacccat

SEQ ID NO: 38448 - DNA, 40 bp, Agrobacterium tumefaciens
  source 1..40: mol_type = genomic DNA
agtcgatctgaattccatcaagatcgaagtgcccgccttc

SEQ ID NO: 38449 - DNA, 50 bp, Agrobacterium tumefaciens
  source 1..50: mol_type = genomic DNA
atgggtttaaaaatatattccatccagatcgaagtaccatttacacccat

SEQ ID NO: 38450 - DNA, 40 bp, Agrobacterium tumefaciens
  source 1..40: mol_type = genomic DNA
agtctatctgagttccctccagagggaacttcctgcttcc

SEQ ID NO: 38451 - protein, 611 aa, Citrobacter koseri
MRIVKAYVYSRVSSMQQVDAFGLDRQISTVLDFLENAKLPAELGYRLDPSNYEVLESDKGLSGYKGHNFTKGSLGQFKRRVEAGEITEGCLLIESVDRFSRKQGYDAIDEFTFLIKRNIDIVEVETGQIYSYKLDHRLSTLSTSIERAYMESKRKARISQKSWRNRKETSVKEGVALNNNTPDWLSLSDDKKTYEIDSCKVVTIIKIFELYRDGVGVTDIVQQLNESGERYNGKGWNTVKVYNKLRDRRLNGYLVGKYQILTRKDNESVSDTERRVLENIKIKKEANDNAKRIYPIVIDDELFTKVQSMMDKNSLSKKQRSTTSKQRNLFNGLTKCHECGSPMIVQSMTNGGQYLRCYRQRTKDEKCNSKMLRYFESERLLLEHIKGLNLDEVYGDKKHNQSLDSLKSTLSDINEKITLLNEKIKSANDEDELFAIMSFKRKRIAEKDEVITRINSLENESEVVRLVYDYDIEKIVNQDNTVLRRKTNEHISKIISSIKCLRMDSSYIGAYYMFDIEYHKDVLKHLLITDSSGNLVSEITITQQNNERIYRVQEDGNTVFKVESNGIVWSLHASRKKTIDDLLHYMNMMMVGREPEGFDYVLNEDMIEWID

SEQ ID NO: 38452 - DNA, 50 bp, Citrobacter koseri
  source 1..50: mol_type = genomic DNA
ttgatgtattttactttacgctgcttccagcgtgctatagaatacatatt

SEQ ID NO: 38453 - DNA, 40 bp, Citrobacter koseri
  source 1..40: mol_type = genomic DNA
gggctgcatcaatggcttcttccagcgtggcgtacatagt

SEQ ID NO: 38454 - DNA, 50 bp, Citrobacter koseri
  source 1..50: mol_type = genomic DNA
ttgatgtattttactttacgctgctgccagcgtgctatagaatacatatt

SEQ ID NO: 38455 - DNA, 40 bp, Citrobacter koseri
  source 1..40: mol_type = genomic DNA
aggcagcctcagtggcttctgcccgggtggtgttcaaaga

SEQ ID NO: 38456 - protein, 611 aa, Citrobacter koseri
MRTVKAYVYSRVSSMQQVDAFGLDRQISTVMDFLENAKLPAELGYQLDPNNHEVLESDKGLSGYKGHNFTKGSLGQFKRRVEAGEITEGCLLIESVDRFSRKQGYDAIDEFTFLIKRNIDIVEVETGQIYSYKLDHRLSTLSTSIERAYMESKRKARISQKSWRNRKETSVKEGVALNNNTPDWLSLSDDKKTYEIDSSKVVTIIKIFELYRDGVGVTDIVQQLNESGERYNGKGWNTVKVYNKLRDRRLNGYLVGKYQIMKRKDNESVSDTERRVLENIKIKKEANDNAKRIYPIVIDDELFTKVQSMMDKNSLSKKQRSTTSKQRNLFNGITKCHECGSPMIVQSMTNGGQYLRCYRQRTKDEKCNSKMLRYFESERVLLEHIKGLNLDEVYSDKKHNHSLDSLKSTLSDINEKITLLNEKIKSANDEDELFAIMSFKRKRIAEKDEVITRINSLENESEVVRLVYDYDIEKIVNQDNTVLRRKTNEHISKIISSIKCLRMDSSYIGAYYMFDIEYHKDVLKHLLITDSSGNLVSEITITQQNNERIYRVQEDGNTVFKVESNGIVWSLHASRKKTIDDLLHYMNIMMVGREPEGFDYVLNEDMIEWID

SEQ ID NO: 38457 - DNA, 50 bp, Citrobacter koseri
  source 1..50: mol_type = genomic DNA
ttgatgtattttgctttaccctgcttccagcgtgctatagaatacatatt

SEQ ID NO: 38458 - DNA, 40 bp, Citrobacter koseri; identical to SEQ ID NO: 38453
  source 1..40: mol_type = genomic DNA

SEQ ID NO: 38459 - DNA, 50 bp, Citrobacter koseri
  source 1..50: mol_type = genomic DNA
ttgatgtattttgctttaccctgctgccagcgtgctatagaatacatatt

SEQ ID NO: 38460 - DNA, 40 bp, Citrobacter koseri; identical to SEQ ID NO: 38455
  source 1..40: mol_type = genomic DNA

SEQ ID NO: 38461 - protein, 611 aa, Citrobacter koseri
MRIVKAYVYSRVSSMQQVDAFGLDRQISTVLDFLENAKLPAELGYRLDPSNYEVLESDKGLSGYKGHNFTKGSLGQFKRRVEAGEITEGCLLIESVDRFSRKQGYDAIDEFTFLIKRNIDIVEVETGQIYSYKLDHRLSTLSTSIERAYMESKRKARISQKSWRNRKETSVKEGVALNNNTPDWLSLSDDKKTYEIDSCKVVTIIKIFELYRDGVGVTDIVQQLNESGERYNGKGWNTVKVYNKLRDRRLNGYLVGKYQIMTRKDNESVSDTERRVLENIKIKKEANDNAKRIYPIVIDDELFTKVQSMMDKNSLSKKQRSTTSKQRNLFNGLTKCHECGSPMIVQSMTNGGQYLRCYRQRTKDEKCNSKMLRYFESERVLLEHIKGLNLDELYGDKKHNQSLDSLKSTLSDINEKITLLNEKIKSANDEDELFAIMSFKRKRMAEKDEVITRINSLENESEVVRLVYDYDIEKIVNQDNTVLRRKTNEHISKIISSIKCLRRDSGYIGAYYMFDIEYHKDVLKHLLITDSSGNLVSEITITQQNNERTYRVREDGNTVFKIESNGIAWSLHASRKKTIDDLLHYMYMMMVRREPEGFDYVLNEDMIEWID

SEQ ID NO: 38462 - DNA, 50 bp, Citrobacter koseri
  source 1..50: mol_type = genomic DNA
ttgatgtatttcactttacgctgcttccagcgtgctatagaatacatatt

SEQ ID NO: 38463 - DNA, 40 bp, Citrobacter koseri; identical to SEQ ID NO: 38453
  source 1..40: mol_type = genomic DNA

SEQ ID NO: 38464 - DNA, 50 bp, Citrobacter koseri
  source 1..50: mol_type = genomic DNA
ttgatgtatttcactttacgctgctgccagcgtgctatagaatacatatt

SEQ ID NO: 38465 - DNA, 40 bp, Citrobacter koseri; identical to SEQ ID NO: 38455
  source 1..40: mol_type = genomic DNA

SEQ ID NO: 38466 - protein, 611 aa, Citrobacter koseri; identical to SEQ ID NO: 38451

SEQ ID NO: 38467 - DNA, 50 bp, Citrobacter koseri; identical to SEQ ID NO: 38462
  source 1..50: mol_type = genomic DNA

SEQ ID NO: 38468 - DNA, 40 bp, Citrobacter koseri; identical to SEQ ID NO: 38453
  source 1..40: mol_type = genomic DNA

SEQ ID NO: 38469 - DNA, 50 bp, Citrobacter koseri; identical to SEQ ID NO: 38464
  source 1..50: mol_type = genomic DNA

SEQ ID NO: 38470 - DNA, 40 bp, Citrobacter koseri; identical to SEQ ID NO: 38455
  source 1..40: mol_type = genomic DNA

SEQ ID NO: 38471 - protein, 562 aa, Atlantibacter hermannii
MEKRKLYSYIRWSSDKQAKGSSLQRQLETARRVAHENDLELVEIIDAGLSAFKSKHLKHGNLGAFIEAVKAEEIANDSWLTVESLDRISRDEILKAQRLFMELLELGITIYTGLDNRIYNKASVTDNPTELMLSIMTFSRANQESMVKSQRQKSAAQLKIDKFKAGERAENGYPFAIRSSGANVFWADVSDGTVKPHEYYFLIARLIVNLRLKGWGYMRIAKQLNENYTPPKGTAKRKHFKDMWSPKLICNFLQSRTLMGEKSIRVDGVEHILKDYYPQVINEKEYYNLQNVINRKLANEPNNYIPLLTGIRRFKCECGAPMVAFFQYNKIRYRCDGMKSLDKRMHCGAKSFNGAAIENAIVQICADKIFKDVKRLRSNVGAIQAMLNDAQKRHKRGMDILLNDNAPQGLNIMLVEIEKDIEGLQKQLNDELISDAGNDTSVSWDAVPENYKDVFNLERLEIKQKIQASTLSIVCTTIKTKGHLFDIKFNDGDVIRFFSDKRSIHVDIHSINNAALLQSDGIILHDHFDYLLDSEEFIERIRLKHQQMKSMQERTLDELFDI

SEQ ID NO: 38472 - DNA, 50 bp, Atlantibacter hermannii
  source 1..50: mol_type = genomic DNA
tttatcaggttttactgtttcgctaacactaaacggggaaaccttgtaaa

SEQ ID NO: 38473 - DNA, 40 bp, Atlantibacter hermannii
  source 1..40: mol_type = genomic DNA
tttttcgcgccctttggctaacactaaacgtacactcata

SEQ ID NO: 38474 - DNA, 50 bp, Atlantibacter hermannii
  source 1..50: mol_type = genomic DNA
tttatcaggttttactgtttcgctgacactaaacggggaaaccttgtaaa

SEQ ID NO: 38475 - DNA, 40 bp, Atlantibacter hermannii
  source 1..40: mol_type = genomic DNA
tttttagtgcccgttgtctgacactaaagtagtactcaga

SEQ ID NO: 38476 - protein, 479 aa, Streptococcus suis
MNKVAIYVRVSTTMQAEEGYSIDEQINKLTSYCKIKDWTVYEIYKDGGFSGSNIERPAMEKLISDAKRKRFDTVLVYKLDRLSRSQKDTLFLIEEIFGKNDISFLSLNESFDTSTPFGKAMIGILSVFAQLEREQIKERMLLGKMGRAKSGKPMMTSTISFGYTYDKYTDTLNINPAEAIVVKKIFDEYLGGRSLTKLRDYLNENEILRQGKAWNYQGLRRILSNPVYIGMVRYKNEIFPGNHQPIIDVADYDKTQEEIKKRQIEALEFSNNPRPFRAKYMLSGMAKCGYCGTPLQIVLGTKRKDGTRSMRYQCINRFPRKTKGITIYNDGKKCNSGMYEKADIEEYVIGKIRLLQLNSDMLDDMFDKYPVIDVEGLERQITAIENKMKKLNDLYLNDMIELDELKKQTHALRRQKNMLENEIANNSAITQEKNKKHFKEMLGAKDITKLNYETQKSIVNNLINKVFVKSGYIKVEWKV

SEQ ID NO: 38477 - DNA, 50 bp, Streptococcus suis
  source 1..50: mol_type = genomic DNA
ttaagagttttagatactaagcattcaagtagcgtatctaaaactcttag

SEQ ID NO: 38478 - DNA, 40 bp, Streptococcus suis
  source 1..40: mol_type = genomic DNA
acccaaaacaactaacatttccaccagagtgaaagctttc

SEQ ID NO: 38479 - DNA, 50 bp, Streptococcus suis
  source 1..50: mol_type = genomic DNA
ttaagagttttagatactaagcatggaagtagcgtatctaaaactcttag

SEQ ID NO: 38480 - DNA, 40 bp, Streptococcus suis
  source 1..40: mol_type = genomic DNA
acccaaagctaccaacaatggcagaagagccaaagggttc

SEQ ID NO: 38481 - protein, 510 aa, Phascolarctobacterium succinatutens
MVKCMKSVAERAVPAVIYARYSSSHQREESIEGQVRECREYAEREGYSVLQVYADRAITGRTDERPEFQRMLADASKGVFQAILIYKYDRFSRNRYSFAVWETKLKKHGVKVISARENVAEGAAGIVLKSVLQGMAEWYSVDLSEKVTRGMKENALKAKWTSGTVPFGYTRDAEQRLIIDPERGEFVRQIFEKVLAGEKYVDIASWLNMLGVRTARGAAWNKSSFTWMLKNVVYTGLFRWKDIEIKNAVPPIISKELFEAVQRKLKTYGRRGINVQKSDKYLLTPNIICGECGGPMHGMSGKSRSGELYYYYACANKRAKRTSCSISPLNRDELEQSVYNCAREVLLHEENIKLIAEQAEAVAEAQVDNELAEMKAERSRVKKSIANYAAAIANGATSGTIIELINAAEAKAAALDEAIAERELVAAPPKVSKEAIEYFLRNIAAAPDDKMKEKVISTMVNSVVVERVPDEGTKKDSDEKYSITVRFNFTDTPQLSALQSFDVREKSKMV

SEQ ID NO: 38482 - DNA, 50 bp, Phascolarctobacterium succinatutens
  source 1..50: mol_type = genomic DNA
tgttcgcgaaaagtctaaaatggtgaacctatcaagagttcctgcgaaca

SEQ ID NO: 38483 - DNA, 40 bp, Phascolarctobacterium succinatutens
  source 1..40: mol_type = genomic DNA
gtgttgatttcaaaatggtgacctcggcaggactcgaacc

SEQ ID NO: 38484 - DNA, 50 bp, Phascolarctobacterium succinatutens
  source 1..50: mol_type = genomic DNA
tgttcgcgaaaagtctaaaatggtggacctatcaagagttcctgcgaaca

SEQ ID NO: 38485 - DNA, 40 bp, Phascolarctobacterium succinatutens
  source 1..40: mol_type = genomic DNA
atggggatttcactatgttggccccggctggtctcgaact

SEQ ID NO: 38486 - protein, 430 aa, Azotobacter chroococcum
MSRAHDESFIKSQRVHQAWKKKQDKARADKTPLGAACPSWLTVQDGQYVPIPERVEVVRKIFNLSKEGYGQRLICNKLNDEGVPVFGTDKRNKSGKWGTSSINKILNNKAVIGEYQPTNLMEGVRKPVGEPVKDLFPKVVDEELWYSAHSERQQRAIHKTTKPAKIFNVWQGIIKCANCGNAYHLINKGEGSRGGRYLRCFGTTKRECKTPLIRWDVSELVFKELLTKVDSLPLVKDSTGAIQQQLTVVDGKLTEVNERLSEIKDQMLSLGGKMPAALVEVLVALEEQQTELKQQKNSLYQEMQREKIIDKDEFLNKVDLVSYEGRFKANRLLKHLGVNVSVHAMKDRFIFVVFSGGEKPLLLIHYDKKRGIHIGPMGTDMMKLCMDQGDFDAFERAKKDSPEEKWPALKRSLSKAYFEGMAEVEKILKE

SEQ ID NO: 38487 - DNA, 50 bp, Azotobacter chroococcum
  source 1..50: mol_type = genomic DNA
ttagggtgtattgttgtccagttgagcaggctgtgtaacaatccaccctg

SEQ ID NO: 38488 - DNA, 40 bp, Azotobacter chroococcum
  source 1..40: mol_type = genomic DNA
tccgggcgggccgctgagcagcaggttgtggctgccggcg

SEQ ID NO: 38489 - DNA, 50 bp, Azotobacter chroococcum
  source 1..50: mol_type = genomic DNA
ttagggtgtattgttgtccagttgctcaggctgtgtaacaatccaccctg

SEQ ID NO: 38490 - DNA, 40 bp, Azotobacter chroococcum
  source 1..40: mol_type = genomic DNA
tcagaaagggccgctgtgactcgggtcgtggctgccgatg

SEQ ID NO: 38491 - protein, 479 aa, Pseudonocardia sp EC080625-04
MVVNHGRRVAVYARISRDRAGAGVGVERQVADCHALAERNGWAVALPPFIDNDLSAYSGKRRPAYRALLAAIETDQIDVVLCWHTDRLHRSPVELEEWIAACEPRGVEVHTVKAGPIDLATSAGRMVARQLGAVAKYESEHRGERVAASREDIARRGGFLGGSRPFGYLADGVTLRPVEAQLIADGTRTILRGGSLRAVTLAWNASGELTTKSGRRWAPGTVRDVLLRARNAGLHVHRGQVTGKAAWPAIVSEDEWRGVTAILTDTQRRTSPGNRPRWLGSGLYRCGIEGCAGPLVVGTTGQHRHPSYLCRTYQGRPGGRHVTRAAPALDEFVAELIVGRLSMPDAVELFVPPAPVDDVDVEQVRSEIAAVEAQRVELADRLGSGTITFAQFDRANERLGERQKDLESALVLDLVEDPVVELVSAEDVAGAWHGLDLETQRSVLDELVVVTVLPAPRGRRPGGGYFDPSSLRIEWRDRA

SEQ ID NO: 38492 - DNA, 50 bp, Pseudonocardia sp EC080625-04
  source 1..50: mol_type = genomic DNA
tgtgtgctcacgctcggctacgcgttagcgtgaactcattatggcacact

SEQ ID NO: 38493 - DNA, 40 bp, Pseudonocardia sp EC080625-04
  source 1..40: mol_type = genomic DNA
ggtgcggagcagctccgacttgcccgatccggtcgcgccg

SEQ ID NO: 38494 - DNA, 50 bp, Pseudonocardia sp EC080625-04
  source 1..50: mol_type = genomic DNA
tgtgtgctcacgctcggctacgcgcgagcgtgaactcattatggcacact

SEQ ID NO: 38495 - DNA, 40 bp, Pseudonocardia sp EC080625-04
  source 1..40: mol_type = genomic DNA
gctgcggctccgctccgtccggcgagctccggacgcggcg

SEQ ID NO: 38496 - protein, 521 aa, Brevibacillus laterosporus
MTATTIPTAIPVAIYARVSTDRQGDSIEHQVSFLREYVSRNLGEGYYTDDTLIYSDEGISGYSTTILDRPAMKQLLDDAKKGVFKVVLIKELTRFGRDDEDNSRAINILEASGVRVKSNDGYDTEQQHTKMLLKFKNILAESESERISTRVAIGFREKVRSGRFPLSDKHTPMGYRLNHDSGKLKIDEQEAEIVKMIFDLYVNKRIGTTTISAILNDKGYRTRKGTLFGKNYIRLILLNPTYVGSLVYGKNKVQIQRTYDENYNLSKSKKMVKSNDPIIVENCHEPIIDNDTFLRASEIMKKRNKQQTVSNRAKYPLTGISFCAKCGGAMVCQKKTSEWRGKRYTSRYYRCSSTQNYGDRKCTQNGINAEKLEKTIYDDLLEEFTKIKEGKYVIDNEIEVRSHKERLEKLNKEREQLKKKQVQVVMNMDLFDDEGSTEILLGLKQKIQTVDEQIFITKRQIIESENHDKNVSKVKDVIESMKAIDLEDLGALKVLFHDVIEEVRIFDKQTIESIQYKYSFV

SEQ ID NO: 38497 - DNA, 50 bp, Brevibacillus laterosporus
  source 1..50: mol_type = genomic DNA
ttgtttaattacgggaagtgcggcacaaagcatataccctaatgaaacaa

SEQ ID NO: 38498 - DNA, 40 bp, Brevibacillus laterosporus
  source 1..40: mol_type = genomic DNA
tagttacgcaaaatgcagtacatgtcgtaaagctaaacaa

SEQ ID NO: 38499 - DNA, 50 bp, Brevibacillus laterosporus
  source 1..50: mol_type = genomic DNA
ttgtttaattacgggaagtgcggcctaaagcatataccctaatgaaacaa

SEQ ID NO: 38500 - DNA, 40 bp, Brevibacillus laterosporus
  source 1..40: mol_type = genomic DNA
tacttaagaagcatgaagtctatattataaatctaaacaa

SEQ ID NO: 38501 - protein, 584 aa, Clostridium scindens
MTSNLSFQSVQTKSTLSDELRSAIRDNILFFIQDQEPEDEGISALYERLSQEDKADGESNSIANQKRILERYCRDHGITAFRHYDEDDGYSGTNFNRPGFQRMLADIKAGKIKRVIVKDMSRLGRDYLQVGMYTDIVFPEFGVHFVAVNDGVDSTRGDNEFTAIRNVFNEMYARDTSKKIRATWQSKGKSGEHLTTIPPYGYMKDPEDKKKWIVDEEAAAIVQKIFSLCVDGLGPTQIAKWLRKNQVLNPTAYCHTKGLPASNKPTADPYKWTNETVSRILSRMDYLGHTVNFKTKKQSYKSKKKLWNDPTDWMIFENTQPPIIEESVFLIVQNIRKSRRRPTKMGDMGMFSGLLYCAECGGKMYQCRATHFTEEQKYFICSTYRKDRTLCTTHSIRNVILHEIVLRNLREAIQYVNEHEAAFVQDAADSSMRDQSADLTRKRETLSKADLRISELDTIISHLYEDNVTGKLTDERFIKLSHDYEHEQRNLKNMAEVLRQDLKQQDKQQTDVKAFVSVVKKYTDMKELDATILREFIDHIEVSHADRKSKTREITIVYNFIGAFDFSRAIEEAHHSNQKQQETA

SEQ ID NO: 38502 - DNA, 50 bp, Clostridium scindens
  source 1..50: mol_type = genomic DNA
atgttttcttaattcaccgcccctaatggcgcgctgacataagaaaacac

SEQ ID NO: 38503 - DNA, 40 bp, Clostridium scindens
  source 1..40: mol_type = genomic DNA
ctaaataaaaacacgacacaatgctgtcgtgtttttatgt

SEQ ID NO: 38504 - DNA, 50 bp, Clostridium scindens
  source 1..50: mol_type = genomic DNA
atgttttcttaattcaccgcccctcttggcgcgctgacataagaaaacac

SEQ ID NO: 38505 - DNA, 40 bp, Clostridium scindens
  source 1..40: mol_type = genomic DNA
ctagataaaaactagacaccttacctttgttttttttttt

SEQ ID NO: 38506 - protein, 605 aa, Vibrio rotiferianus
MKKAYSYIRYSSPQQAKGDSFRRQFSATQAYCDKNGYELDTELAVYQELGVSGVDGDQENLKRFIDDCETGKVEKGSLLIVENLDRLSRKKINKAMRQFLHLLDFVDIYTLQDQKLYSQNDDVDSDTQLLDVMTSLIVMSRAYEESATKKKRLKESWDSKRKNINSKKLTSLIPHWLELSEDRTEFHLKKDKIEIVKYIYQKSIDGMGVSQLIRHLNENLTQFPTPTHKSKLWARTSLSRILTDRSVLGEYQPHVGKHNGIGENKRKPLGDPIPDYYPQIIDEETFLKAQIARKSRVIGRGKVNRNKFSNLYRNILRCGYCDGKIEYVDKGDGSRGGKYLTCSNAKRGGKCSHNKHYKYLPLELMLLHLTTENGFMPKPEAPTDLNLRLSKLQDLNEKAESKLSFLLEEDFSIPTIREKTRELSKEIERYRSEIEELENKILTFKPDYTYSDLYQNVILEKDSVLLSSNRMTYNSYLSKKIESAYLFNDYSNFILFKMKDKHVHTVMIDEQYNFGGCSLPNNNMTYKRLNGDRTPIDEMIWQIQQNFLILIESCKGLNNKKLNNYLNRINKLISKIIIDQEIELFNQVLFQIEKATKLLNKVQNG

SEQ ID NO: 38507 - DNA, 50 bp, Vibrio rotiferianus
  source 1..50: mol_type = genomic DNA
ttggtaggtaattgacataactatagctgattatgttataatcctaccaa

SEQ ID NO: 38508 - DNA, 40 bp, Vibrio rotiferianus
  source 1..40: mol_type = genomic DNA
acctggagggccaaggaaaagcaggttgtgattgccagct

SEQ ID NO: 38509 - DNA, 50 bp, Vibrio rotiferianus
  source 1..50: mol_type = genomic DNA
ttggtaggtaattgacataactattcctgattatgttataatcctaccaa

SEQ ID NO: 38510 - DNA, 40 bp, Vibrio rotiferianus
  source 1..40: mol_type = genomic DNA
gtctggagggcagaggaaatcccagatgtggtggccagca

SEQ ID NO: 38511 - protein, 506 aa, Shigella flexneri; identical to SEQ ID NO: 7686

SEQ ID NO: 38512 - DNA, 50 bp, Shigella flexneri
  source 1..50: mol_type = genomic DNA
cctagaaaaccgaatagacttcattcaaggggcattgtattgtagctatt

SEQ ID NO: 38513 - DNA, 40 bp, Shigella flexneri
  source 1..40: mol_type = genomic DNA
ggggaagcggcgaggtaaatcaagggttattgaagtcata

SEQ ID NO: 38514 - DNA, 50 bp, Shigella flexneri
  source 1..50: mol_type = genomic DNA
cctagaaaaccgaatagacttcatggaaggggcattgtattgtagctatt

SEQ ID NO: 38515 - DNA, 40 bp, Shigella flexneri
  source 1..40: mol_type = genomic DNA
aggtaagaggagaggtaatggagaggttagtcatgtcata

SEQ ID NO: 38516 - protein, 510 aa, Streptomyces ambofaciens
MTPTDVPATSRPRKRASLYARLSVAADAENLSLDGMIRDMRALCDREGFEEVALHIDDGRSGGRRDRDEFQAWLNDARTGACDVLVNPVTDRLTREGLNVAATILDVVEGKDPATGRLAHPPVRLIDCNGLDSLHGDAFRFRFVIQAEVGRAERERIRSRSRKRARNLRRAGRWGGGTPPFGYRAIANPDGPGWVLDVEPKEAKAVQEAAEAVLKNPPDPLTRVVRRLNHQGVPPRRAKAWSRVTLKRVLTGDHILGRVSQNGRLLRDEEGEILAPFPAVLSLSQVSALRDRLKPKGGTSNGGGHPARVLSGLLSCHSCLSDLIVHHASVRTRDGKQKVEGKPPRVSYRCESRSQGRVCEQPVTVTAGPIEEFVVRLYLDTVGSFPMYKERTIVSGLEELASVEEEIKEALADLATAADAETFARLQKLQARQAELSTRDTGRRSEMVATGQTMAEFWEGALIDDRRELLESAFDELIVGPGRRGPKGFDPERLSYRWAERDDVAFQESI

SEQ ID NO: 38517 - DNA, 50 bp, Streptomyces ambofaciens
  source 1..50: mol_type = genomic DNA
tgcgtgctggatagcacttcgggtgtgtcggttctgtcatctaacacgca

SEQ ID NO: 38518 - DNA, 40 bp, Streptomyces ambofaciens
  source 1..40: mol_type = genomic DNA
gatgccgcggaactcgggtgtgtcgacggtgcgggtggtc

SEQ ID NO: 38519 - DNA, 50 bp, Streptomyces ambofaciens
  source 1..50: mol_type = genomic DNA
tgcgtgctggatagcacttcgggtgggtcggttctgtcatctaacacgca

SEQ ID NO: 38520 - DNA, 40 bp, Streptomyces ambofaciens
  source 1..40: mol_type = genomic DNA
ggcgccggggaactggggtggggggacggtgggggaagac

SEQ ID NO: 38521 - protein, 562 aa, Vibrio parahaemolyticus
MDKIIYPYVRFSSEQQSGGSSYKRQMDDILKYAKENGYTVNNSLELKDLGVSAYTAKHIEKGSLGDFLDALDAGVIEADGSAYLCIEQIDRLSRQSIDEAYQVFRKILKANVNVITLMDKKTYTKDSLNDLMTIMYSSMLMAQANEESAKKSERILKSFDKKIDQLNNDEPIQYVGIFPGWIDNIGTKQKRDFVVNDKAKIVQNVFKMYIEGTSMGDIARIFNEKSIEQVAKRRHKNFTNSWSSAKINHLLKNRCVLGDLYIKKTGETYKNYYPQIISIDDWDVVQSMTATKKTTKTSGRKSINIFTGKIFCSGCGQKYYFETDDKITKKGRTLYYMLKCQGRRVLGCKSKSIKYDDFLSSTPNMFGMITKTKKDNSEEIKKIKQKISEISSETKEVEKNINTLESMNENGSLDYETYLKESSKQRKKIRVNDTRIADFKANIARLSSDNKLAYFDKTDPVSIIKGKRFVNENFAGFVISSDSKACTALYSNGQVIHFVLKNSKIEKQENVKPVDGFGEFFELKQEIIDAYGSGKMDGRFIEILRATNFWGVDTPEKDYSLE

SEQ ID NO: 38522 - DNA, 50 bp, Vibrio parahaemolyticus
  source 1..50: mol_type = genomic DNA
ttcctgttaatcttgcgtagcactgtaattttatgtatgattaacaggaa

SEQ ID NO: 38523 - DNA, 40 bp, Vibrio parahaemolyticus
  source 1..40: mol_type = genomic DNA
tgccggggccaaattgaccgtaatgcgcttggctggaaac

SEQ ID NO: 38524 - DNA, 50 bp, Vibrio parahaemolyticus
  source 1..50: mol_type = genomic DNA
ttcctgttaatcttgcgtagcacttgaattttatgtatgattaacaggaa

SEQ ID NO: 38525 - DNA, 40 bp, Vibrio parahaemolyticus
  source 1..40: mol_type = genomic DNA
tgcaggtgccatcttcacctgaaggcccttggctccaacc

SEQ ID NO: 38526 - protein, 572 aa, Vibrio diabolicus
MAHIYSYRRVSTLGQSEGVSLEVQSDENKLRELSEAYSLPVSGRIYSDVGKSAYKGEQLENELGYFLESVHSGEIKAGSILVVYSLDRISRQNIGFAKQIYLDLTNNGVSIYSILDSHLYRAHNAADEILATIIFERANNESKTKGQRNNSTALKVIEGHLQGKRTNDGYAYLVSFGNSPWWIAHREDGAVIEHPVYWDVAKQVYQKIVSGEGNLKILSWLNDNFDAPKTRTNVKAPQRMSEWKFSTIANFHKQQALYGLKNVTINKNKPEQREFALDRYYPQLITESDWLALQAIKKKRRTADSTRKRYSLITGMGIAKCYNCGAVVAASMDKTKDVISTRYYCAGKRNLQNGCEGFSFKAKWVEKAILSCAIGHAFNIQEKDNIQLLALEGERDQAKTKLRKIKDLFVDDIEMMEEFVPQLKAIKNRIKELDVLIASEQREIAKIQEQEHLSYLTGSWNEITDDALNELNQDFRKKTRELVRDTFSKIEIGKLNEQAFCKATMIDGSVFYFVHNGKRRGNSGFIRLSKVSEDDFIEVKKHFNEFHQGYFVDEGSIKVDFDKVNNVQLVKV

SEQ ID NO: 38527 - DNA, 50 bp, Vibrio diabolicus
  source 1..50: mol_type = genomic DNA
tactgtcactaaattagttctgtgttaactgagcttaattagtgacagtt

SEQ ID NO: 38528 - DNA, 40 bp, Vibrio diabolicus
  source 1..40: mol_type = genomic DNA
acctgtcatagcgccagtgtttgcgcagtggatagtacga

SEQ ID NO: 38529 - DNA, 50 bp, Vibrio diabolicus
  source 1..50: mol_type = genomic DNA
tactgtcactaaattagttctgtgggaactgagcttaattagtgacagtt

SEQ ID NO: 38530 - DNA, 40 bp, Vibrio diabolicus
  source 1..40: mol_type = genomic DNA
aactgtcatggcgccagtgggagtgtagcagtgaggacga

SEQ ID NO: 38531 - protein, 454 aa, Bacillus thuringiensis
MIILTKAAIYIRVSTQDQVENYSIEVQRERIRAFCKAKNWTVYDEYIDGGYSGSNLERPSIKKLLTDLKNIDVVVVYKLDRLSRSQRDTLELIEEHFLKNKVDFVSITETLDTSTPFGKAMIGILSVFAQLERETIAERMRMGHIKRAENGLRGNGGDYDPAGYTRQDGHLIIKKDEANHIKRLFDLYEQQHSITKVQEVLKEEGYPIWRFRRYRDILSNTLYIGRVTFAGKEYEGQHEPIVSSEQFKRVQALLKRHKGHNAHKAKQSLLSGLITCSCCGENYVAYSTGKSKDVESKRYYYYICRAKRFPAEYEERCMNKTWSRKKLEDIIITGLKRLTVEDNVNNKQKKKINYEKLIKDIDKKMERLLDLFTTNTNISRQLLEQQMEKLNSEKENLIQKQKRQEEEKTIAQDTLIDSIKSIDLLEFKDKQVLINNLIKQINIDHKNVEIIWRF

SEQ ID NO: 38532 - DNA, 50 bp, Bacillus thuringiensis
  source 1..50: mol_type = genomic DNA
tttatgtattcatttcgggctattcaagtagccagtcttgaataccgaaa

SEQ ID NO: 38533 - DNA, 40 bp, Bacillus thuringiensis
  source 1..40: mol_type = genomic DNA
ctctgttttcccagccccgcatacagcccaaataaaaaat

SEQ ID NO: 38534 - DNA, 50 bp, Bacillus thuringiensis
  source 1..50: mol_type = genomic DNA
tttatgtattcatttcgggctattctagtagccagtcttgaataccgaaa

SEQ ID NO: 38535 - DNA, 40 bp, Bacillus thuringiensis
  source 1..40: mol_type = genomic DNA
ctcttttttcccctcctctcttacagcaccagggaaaaat

SEQ ID NO: 38536 - protein, 416 aa, Clostridium innocuum
MARKKSKLNDNNLAIAYYRYSSHSQNEASIEQQRELAHEWADAHGLKIVREYEDAAISGTKEDRPGFQLMLSEVAKIRPNTLIAWKTDRLGRDKYVLAMAKKTIRDAGCEIHLLAENIPTDTAEGILIEGLMEALAEYYSRNLSVHIQRGMDFNAEHANFNGHKVFGFKTEKVDKKRKYVIDPDTAPFVQLMFTKYAEGEPMQSICDEFNEAGLRTSRGNPFGVKTMHRMLKNRAYIGEYRHGEFVVPGGMPALVDEETFDRAQKRLAENKRKGSQRARGMDEDGAPRYWLTGKLYCGECGETMQGVSGTSKTGRTYYYYYCSAQRKKLCAKKKVKKDWIEDLVTDVLRYIIDDSENLMSLAVDAAVYYKEHYKETGYLEGLEAKRKEVEKGIANLMKAIEGGALSDTPHRAPEPA

SEQ ID NO: 38537 - DNA, 50 bp, Clostridium innocuum
  source 1..50: mol_type = genomic DNA
ttcgactgcttccccttaggctccaccaataagattttaaagcctttgtt

SEQ ID NO: 38538 - DNA, 40 bp, Clostridium innocuum
  source 1..40: mol_type = genomic DNA
ttcgactctcctcacctccaccaaataaaagtgccaagtt

SEQ ID NO: 38539 - DNA, 50 bp, Clostridium innocuum
  source 1..50: mol_type = genomic DNA
ttcgactgcttccccttaggctcctacaataagattttaaagcctttgtt

SEQ ID NO: 38540 - DNA, 40 bp, Clostridium innocuum
  source 1..40: mol_type = genomic DNA
ttccattgtcctcacctgctacaaataacattgctttatt

SEQ ID NO: 38541 - protein, 493 aa, Limosilactobacillus reuteri
MRIIPAHQQKGNSVQPQKNRLPFEQLRVAAYCRVSTDYDEQASSYETQVAHYKELIQKEPTWEFAGIYADDGISGTNTKKREQFNQMIAACKAGKIDLIVTKSISRFARNTIDCLKYIRDLKAINVAIFFEKENINTMDAKGEVLITIMASLAQQESESLSQNVKMGIQYRYQQGKVFVNHNHFLGYTKDAQGNLVIEPEEAKVIKRIFYSYLNGMSMKQIADSLKADGILTGGKTKNWQSSGVSKILKNEKYMGDALLQKTYTVDFLSKKRVKNNGIMPQYYVENDHPAIIPKSVFMQVQQIIKQRRNGITTKNGKHRRLNGKYCFSQKLFCGKCSDIFQRNMWYRPEKVAVWRCSSRIKRSKTGRRCMIRNVKEPLLKEATVEAFNQLIEGHELAGKQIKANIMKVIKNSKGPTLDQLDKQLEEVQMQLIQAANQHQNCDALTQQIMDLRKQKEKVQSRETNQQAKLHSIDEINKLVEFHKYGLVDFDEQL

SEQ ID NO: 38542 - DNA, 50 bp, Limosilactobacillus reuteri
  source 1..50: mol_type = genomic DNA
atggcctggtagactttgatgaacaactaccggcacggtccatcaagtat

SEQ ID NO: 38543 - DNA, 40 bp, Limosilactobacillus reuteri
  source 1..40: mol_type = genomic DNA
tagcacagctattacaaaccactagttcgtcgcttggtag

SEQ ID NO: 38544 - DNA, 50 bp, Limosilactobacillus reuteri
  source 1..50: mol_type = genomic DNA
atggcctggtagactttgatgaactgctaccggcacggtccatcaagtat

SEQ ID NO: 38545 - DNA, 40 bp, Limosilactobacillus reuteri
  source 1..40: mol_type = genomic DNA
aagcaaaggtaatacatactgaaagctcgtcacttggtaa

SEQ ID NO: 38546 - protein, 646 aa, Cedecea neteri
MLRPICYERVSSFDQVITGGGLDDQRSIIEQYLDDNIDKFTKNRIFITDEGVSAFKNANISAESNLGKFLQDVRDRKYGKGDALIVTSLDRLSRRSSWSENTIQFIVVSGIVIYDISTGLVLKDDDSFSKILMEIILQRSHNESLMKSVRAKVAWQNKVMRAVANGGVVSNRMPFWLENVDNKYAIKDEQAKLVVQCFEWYKAGFSTGEIVKRIDDPKWQMVRVSRLIRDRRLLGEHKRYNDEVIPNVYPKIIDDELFITANRMMDTVMTDKKKPAEDLLLEPDVVKLIFTLSETGLGSGAIVKRLPEGWSTVNVLRVLRDKRVVEEKIIDNLTFERVNEKLTKNGVANRIRKDVTIAQDDYITNLFPRILKCGCCGGNIAIHYNHVRTKYVICRTREEKKRCDAKSIQYIRIEKNIISTIMNVDFNNLMNEDSSNGSNVADSLKVELLALRKEESTYQRKISERKTGGKRTSLPLMEGLTDVQDRIDEILELISKSTIAQQPPVLNYDIDNLLDPLNVELRAKVRKEIKQVVSKITYRVIEKYIVVNLQYLTDVLSHVLIIDNKRGGGDLVCQIAIYVKDRITIYETPSFSLTVESEGMPRINFNNSESLNQIDYSLLLNYVDDIEGANTVAEWMRHNMNFLFPR

SEQ ID NO: 38547 - DNA, 50 bp, Cedecea neteri
  source 1..50: mol_type = genomic DNA
atgttcccattgatttaggaatgcgtcctgttgtaatctgtgggaacatt

SEQ ID NO: 38548 - DNA, 40 bp, Cedecea neteri; identical to SEQ ID NO: 8343
  source 1..40: mol_type = genomic DNA

SEQ ID NO: 38549 - DNA, 50 bp, Cedecea neteri
  source 1..50: mol_type = genomic DNA
atgttcccattgatttaggaatgcttcctgttgtaatctgtgggaacatt

SEQ ID NO: 38550 - DNA, 40 bp, Cedecea neteri
  source 1..40: mol_type = genomic DNA
aatgcattcatatcattacttccttttgtttttaatacaa

SEQ ID NO: 38551 - protein, 647 aa, Lelliottia amnigena; identical to SEQ ID NO: 36626

SEQ ID NO: 38552 - DNA, 50 bp, Lelliottia amnigena; identical to SEQ ID NO: 36627
  source 1..50: mol_type = genomic DNA

SEQ ID NO: 38553 - DNA, 40 bp, Lelliottia amnigena; identical to SEQ ID NO: 8343
  source 1..40: mol_type = genomic DNA

SEQ ID NO: 38554 - DNA, 50 bp, Lelliottia amnigena
  source 1..50: mol_type = genomic DNA
atgttcctattgatgatcgtatgcttcctttcgtataatctgggaacatt

SEQ ID NO: 38555 - DNA, 40 bp, Lelliottia amnigena; identical to SEQ ID NO: 38550
  source 1..40: mol_type = genomic DNA

SEQ ID NO: 38556 - protein, 523 aa, Vibrio parahaemolyticus
MNVVLYIRVSSNRQAEEGPSLEGQLQDLRNYCSHNEHIVVKEYIESGNSAYKGERPVFNQMLAEVTSGVFDVDAVIVYSLSRFARNLLYQLSSIKKLEESGVKLISATEPLPDDDMTFKSLTVVLGLVNEMNSKQNAINVKSRLTQTAEAGYFTGGPIPFGYESVACDPSKKNSRKKLVICEKEAEVVRNIFQLSLNGTVGKGFGVKAISKYLNDHSILNRGSKWTINSIHRILSSTTYIGEFVFGKNRSNTDMPKVVVPVPVIIDKDTFNSVRQGLKSRDLEQIHVKSIRSNTLLTGLLKCGICGKGMMVATGKSGKYTYYACTTKLKSGVSLCHSKWVPKLALEEQVEEAIIRQVINKEFIQSIIGDIKSTLARNNSQSEPELLKLSRKLKLIQQKLDNTYEQIAMKQDLMDDSYAEYLVGLQHQRSELQAKIETIKAQGRLLLRRFGEKQIDNFVGVIKRVFKELDNDSKKTVYLSLLKEVRVYPDKMTIKGSKLGMLNMVSKTKEGTSLLAPSFVSMWR

SEQ ID NO: 38557 - DNA, 50 bp, Vibrio parahaemolyticus
  source 1..50: mol_type = genomic DNA
cgccctctttcgtatcaatgtggcgggcagaatgggacgaatatgggcac

SEQ ID NO: 38558 - DNA, 40 bp, Vibrio parahaemolyticus
  source 1..40: mol_type = genomic DNA
gtttttttctaaaagtggcggagagatagggatttgaacc

SEQ ID NO: 38559 - DNA, 50 bp, Vibrio parahaemolyticus
  source 1..50: mol_type = genomic DNA
cgccctctttcgtatcaatgtggcaagcagaatgggacgaatatgggcac

SEQ ID NO: 38560 - DNA, 40 bp, Vibrio parahaemolyticus
  source 1..40: mol_type = genomic DNA
atatcctggtaaaagtggcaaatatataggcatgtgaacc

SEQ ID NO: 38561 - protein, 499 aa, Brevibacillus formosus
MIGIYARVSTEEQAKSGFSLDDQLRECRKKAATSEAAEYIDDVSGEFLDRPALSRLRQDVKDGVITKIVCLDPDRLSRKLMNQLLITDEFDKRGIELVFVNGEYAKTPEGQLFYSMRGAIAEFEKAKINERMSRGRREKARQGRVLRDFQIYGYSYDSEKEQIVINEAEAAVVRLVFDLFTQPNDLVEGINGIAVYLTSKGVPTKRGASVWHRQVVRQMLMNEAYVGRFYQNKWNTEGMLGNQFRQPDEKVRMKMRPREEWILLPCPSIIDEMKFEYAQRLLKESRRRWAGRSFNEYLLSGLVRCETCGNTMPGRKAKNWSQRVFEYTDVKNTAGAKNKGCGRRVRCEQLDNQVWETVASWLNNPDEIAVAVEDKVETPFEQVELERLQKELEKTKTGRKRLLKLFASGEEDIGEEDIRQELKELKEKEDKLNQRLNELLDQTKQQVNYEYSRNLIQEAAEYYLSKGQDELTFEDKKELIRHVVREVRVFEESVDIYTF

SEQ ID NO: 38562 - DNA, 50 bp, Brevibacillus formosus
  source 1..50: mol_type = genomic DNA
tgcaccccttttgacatttagattgagatattaatgtcaaaaggggagct

SEQ ID NO: 38563 - DNA, 40 bp, Brevibacillus formosus; identical to SEQ ID NO: 8298
  source 1..40: mol_type = genomic DNA

SEQ ID NO: 38564 - DNA, 50 bp, Brevibacillus formosus
  source 1..50: mol_type = genomic DNA
tgcaccccttttgacatttagattacgatattaatgtcaaaaggggagct

SEQ ID NO: 38565 - DNA, 40 bp, Brevibacillus formosus
  source 1..40: mol_type = genomic DNA
tgctctttgtattgagaatacaaagttgattaatcacaga

SEQ ID NO: 38566 - protein, 599 aa, Klebsiella pneumoniae; identical to SEQ ID NO: 2021

SEQ ID NO: 38567 - DNA, 50 bp, Klebsiella pneumoniae
  source 1..50: mol_type = genomic DNA
tgggttcctatttattttacagccaagtgtagttaatataagtgcaccta

SEQ ID NO: 38568 - DNA, 40 bp, Klebsiella pneumoniae
  source 1..40: mol_type = genomic DNA
tcccgcccctgctccagccaggtgtaccaggtaacgccga

SEQ ID NO: 38569 - DNA, 50 bp, Klebsiella pneumoniae
  source 1..50: mol_type = genomic DNA
tgggttcctatttattttacagccgggtgtagttaatataagtgcaccta

SEQ ID NO: 38570 - DNA, 40 bp, Klebsiella pneumoniae
  source 1..40: mol_type = genomic DNA
tgccgcccctgctccagctggctgcaccagttcagccaca

SEQ ID NO: 38571 - protein, 599 aa, Klebsiella pneumoniae; identical to SEQ ID NO: 2021

SEQ ID NO: 38572 - DNA, 50 bp, Klebsiella pneumoniae; identical to SEQ ID NO: 38352
  source 1..50: mol_type = genomic DNA

SEQ ID NO: 38573 - DNA, 40 bp, Klebsiella pneumoniae; identical to SEQ ID NO: 38568
  source 1..40: mol_type = genomic DNA

SEQ ID NO: 38574 - DNA, 50 bp, Klebsiella pneumoniae; identical to SEQ ID NO: 38569
  source 1..50: mol_type = genomic DNA

SEQ ID NO: 38575 - DNA, 40 bp, Klebsiella pneumoniae; identical to SEQ ID NO: 38570
  source 1..40: mol_type = genomic DNA

SEQ ID NO: 38576 - protein, 599 aa, Klebsiella pneumoniae; identical to SEQ ID NO: 2021

SEQ ID NO: 38577 - DNA, 50 bp, Klebsiella pneumoniae; identical to SEQ ID NO: 38352
  source 1..50: mol_type = genomic DNA

SEQ ID NO: 38578 - DNA, 40 bp, Klebsiella pneumoniae
  source 1..40: mol_type = genomic DNA
tcccgcccctgctccagcgaggtgtaccaggtaacgccga

SEQ ID NO: 38579 - DNA, 50 bp, Klebsiella pneumoniae; identical to SEQ ID NO: 38569
  source 1..50: mol_type = genomic DNA

SEQ ID NO: 38580 - DNA, 40 bp, Klebsiella pneumoniae; identical to SEQ ID NO: 38570
  source 1..40: mol_type = genomic DNA

SEQ ID NO: 38581 - protein, 579 aa, Holdemania massiliensis
MNSDTSLDINNHSNPVQTVAQPKEDNKMLRATDKITALYCRLSVEDTKDEKKNGKEDLSNSIQNQKAMLLQYAREHRFPHPTFFIDDGYSGVTYDRPGFQKMLDEIEAGHVGAVITKDLSRLGRNSALTGLYINYTFPQNDVRYIAINDHFDSINPNSTDSDIAGIKNWFNEFFAKDTSRKIRAVQKAKGERGERLTVHVPYGYMKNPENPKEWIIDEEAAQVVKKIFTLCMNGRGPSQIADQLEKDKILTPTAYKNKQGVKTPHTEPENPYRWHESTIVNILERKEYIGATVNFKTYTNSIWDKKQRENPEENRVIFYNTHPAIIEQEVFDKVQEIRQQRHRRTATGKSSPFSGLVFCADCKQKLYYSTTKYFEKRQDFFICSTHRVNKDKCSGHYIRAVVLEDLVWNHMKEVISYVTRYEAHFRVEMEQKLRLQSEETIRVYKKRLAQAEKRIGELDCLFIKIYEDNAKGKLNDDRFAMMSKTYEDEQAQLKVEIVNLQKEIEVQERQIEDLEQFIQRARRYTDLTELTPYALRELVKAVYVEAPDKSSGKRKQRVHIEYDLVGYILVDELIKAEQA

SEQ ID NO: 38582 - DNA, 50 bp, Holdemania massiliensis
  source 1..50: mol_type = genomic DNA
ttactgttttacgaccaccgagcattagatgggtgctcgtaagacagtaa

SEQ ID NO: 38583 - DNA, 40 bp, Holdemania massiliensis
  source 1..40: mol_type = genomic DNA
atagaaaaaagcagcgtggttatgcatgcggcttttttct

SEQ ID NO: 38584 - DNA, 50 bp, Holdemania massiliensis
  source 1..50: mol_type = genomic DNA
ttactgttttacgaccaccgagcaatagatgggtgctcgtaagacagtaa

SEQ ID NO: 38585 - DNA, 40 bp, Holdemania massiliensis
  source 1..40: mol_type = genomic DNA
aaaaaaaaaatcaatgttgataagcatgtggctttttcgt

SEQ ID NO: 38586 - protein, 596 aa, Blautia obeum
MNTAVNEYNYRFKLTDYSLFDRNRARKVAIYGRVSTEHEAQLSALENQLQWYDDQVKYHPNWTVCERYIDEGITGTQAKKRPAFLKMIEDAKQGKFDLIVTREVCRFARNVVDTLVVTRELKGIGVEVFFIDDNIWTMDGDGELRLSLMATLAQEESRKTSERVKAGQKISRDNGVLYGNGNILGYDRVGDTYVINEEQAETVRMIYDLYLQGYGSMKIAKILTERKRKTASGLIKWSVSNIMRAIKNATYTGTKCYNKSRSNNFLEQKRINNLDMSTYEYVEGDFPSIISQEIWDKAQAIRESRVKPVCVSAGKNTHSKRDSRDIWVNKLRCSCGSSYRKNKWHTKLDGKTSYGYQCYNQLNNGIKRKRAEIGLDTEGYCDSRMITDWKLDFMAKALLEHLWTERKESVLIALDLIKYYYKEEKSNETQSDTVTIQAKLDKANSRLTNLIAMRADGEISKDEYQAMRSPVDEEIKKLQKALDEIPQEKSNPKGLDIEGIRSTLNSFIDFSGSTISHDVVNQFVYLITPTSDTTFDWYVNLNGTADVKATFTAEGRKKNCIIKLEEIEKISSVHREKNEDNAHFIKNPHIFTYLHR

SEQ ID NO: 38587 - DNA, 50 bp, Blautia obeum
  source 1..50: mol_type = genomic DNA
ccccatatttttacctatctgcacaggctgctattgcaaataggtaggag

SEQ ID NO: 38588 - DNA, 40 bp, Blautia obeum
  source 1..40: mol_type = genomic DNA
gctcgtcttgcagcagcacaggcagcaatcgctgagaaga

SEQ ID NO: 38589 - DNA, 50 bp, Blautia obeum
  source 1..50: mol_type = genomic DNA
ccccatatttttacctatctgcacttgctgctattgcaaataggtaggag

SEQ ID NO: 38590 - DNA, 40 bp, Blautia obeum
  source 1..40: mol_type = genomic DNA
tctggccttccagcagcacttccagcattagcccagagga

SEQ ID NO: 38591 - protein, 586 aa, Pseudomonas syringae
MPKIWPYIRFSSEEQKRGDSLRRQKELIARFSARPEIVAEGAQIDESLNLNDLGVSGYTGKNLLKGRFKAFLDAVDSGVVKAGDYLAVEALNRITRLNPLESLPIILRLVQEKGVRIAITSSSQIYQRGDDISALYIAIGELQRGYKESQEKGMRVKEAWNSKKRRAADFGEIATSRVPLWLSVDSIKLESGGIKRVIKEIDTRVAVVKEIFRLSDSNIGAVATARILTERGVPTFTRENARKNSNYGDFWQVTYVRKILANRAVLGNYQPMQWLEVGGKRTRVKHGSEIEGYFPQIIARELFDRVQIKKDARKIEGQGNKGLRFSNLFTKIAFCSACGAVAHHVNKGKDTKKGGRYLVCYRAKYGSCSYKSWKYEKVEAMILSYLAEADIKSIMRDEDKVELLVNERYKVESEQVAIGEMLDNFKRDFKELKGRVSNVERELAIENEARLADIKSQLHALDARILEAIEQQKADLKNEVRALQELDGVADENKVFEIRSKINARLKLIVESIILNFDLQVAEVRFKSGIVRHVHERGVFANILPPATPEQSAEDMREIEEWASLSNEEKKAKWANDEFKIVPLKI

SEQ ID NO: 38592 - DNA, 50 bp, Pseudomonas syringae
  source 1..50: mol_type = genomic DNA
gaggtccaatggttgtgttaaacaaggatttagattaccattggacccat

SEQ ID NO: 38593 - DNA, 40 bp, Pseudomonas syringae
  source 1..40: mol_type = genomic DNA
gccgggcggcccgctgaacagcaggttatgcgcccccgca

SEQ ID NO: 38594 - DNA, 50 bp, Pseudomonas syringae
  source 1..50: mol_type = genomic DNA
gaggtccaatggttgtgttaaacaccgatttagattaccattggacccat

SEQ ID NO: 38595 - DNA, 40 bp, Pseudomonas syringae
  source 1..40: mol_type = genomic DNA
ggggggcggccccctgaccccctggccccgcggccccgca

SEQ ID NO: 38596 - protein, 586 aa, Listeria monocytogenes
MKKVEVIKASSSISKSKRGKMIECLRVAAYCRVSTDSEDQLNSYKSQKTYYTDLIQKNNEWIFVGIYADEAITGTQVTNRQDFQRMINDCMNGEIDMIVTKSISRFARNTLDTLKYVRMLKEKNIAVFFEDENINTLTMDGELLLVVLSSVAQQEVENISSNVKKGLKMKMKRGELVGFQGCLGYDYHPEDKSITVNKEEAEIVRYIFNRYIEGAGGSVIGKELENLGYLTKYGNATWAPTTVLGIIKNEKYKGDILLGKTFTVDPISKRRLENMGEEDQFYIRNHHEPIISEEVFDKAHEILNRRNKNRGKIGNGNTKREKYSRKYAFSCLLECGFCKGTLTRRKWHSGSEYSKVIWQCVTATKKGKKHCPESKGIPEQAIEDAFIESYRILSDDNKDVLDEFLKIMDETLSSSSINKQVTKVDKEIEAIEKKKSKLVDMRLEDIIDSDTYESKFSNMTNKQENLLKERIKLQETATTEKDVKRRLREFKKTLENNEVLHEFDRHVFESIVEKVIVGGYDEDGNIDPAQLVFVYKTGFKNSLDGNQFKPARKNARGNRKSNKLCSQTNDDVKDLCSYTSTNTRGN

SEQ ID NO: 38597 - DNA, 50 bp, Listeria monocytogenes
  source 1..50: mol_type = genomic DNA
tactagtaccaacacacgtggaaactatagtgttgctacaacgagcagat

SEQ ID NO: 38598 - DNA, 40 bp, Listeria monocytogenes
  source 1..40: mol_type = genomic DNA
caaacagctcatgtggagactgtagtactcttgcagttaa

SEQ ID NO: 38599 - DNA, 50 bp, Listeria monocytogenes
  source 1..50: mol_type = genomic DNA
tactagtaccaacacacgtggaaaacatagtgttgctacaacgagcagat

SEQ ID NO: 38600 - DNA, 40 bp, Listeria monocytogenes
  source 1..40: mol_type = genomic DNA
caaacagaccatgtggtaaacgtagcactatctaatttaa

SEQ ID NO: 38601 - protein, 529 aa, Mycolicibacter terrae
MPTQSNNLRVLGRVRLSRATEESTSVERQREQIQHWASINGHEIIGWADDLDVSGSVDPFDTPGLGPWLTDGQLQRWDILAAWKLDRISRQAIPMGKLFGWLQDHGKTLVCTADSIDLSTPMGRLIAYVIATIAEGELEAIRERTSGSQHKIRQLGRWHGGKPPYGLRAVQRPEGGYELRIDPVAAAVVERIADQLLGGTPVGQIADQLNQEGIPTPTDHYRQSVGKVGKPTRWATSAVRSLLRNPALVGQRTHIDHAKGCTSDGGAWCKRNCPPAETVRGDDGLPIRFSESVLPDARWNQVQQRLDQIAGQRRSPRQSGASALSGLTFCLEQTPDGGICGSTLHHSRVSGRSGTYPYYKCPKTVARAVAPGLRCPGAAIPADYLEEIMAERFLEAVGDLRVIERVWVDGDGRDEQLQAALTAVEELAKAAGRAKSVAARERLQAQLSRLDEQIAELESLPSRQAGWEYRETSATYADTWEAADTGERRELLRRSGIRLGARRVMGTNAYEFKLDVPADITRRFNPAGG

SEQ ID NO: 38602 - DNA, 50 bp, Mycolicibacter terrae
  source 1..50: mol_type = genomic DNA
gattgtggaaacctactaggtgacacctcggctagcagattaccactatc

SEQ ID NO: 38603 - DNA, 40 bp, Mycolicibacter terrae
  source 1..40: mol_type = genomic DNA
cgccctggtcctcggggacacctcggcgatcaccgccgcc

SEQ ID NO: 38604 - DNA, 50 bp, Mycolicibacter terrae
  source 1..50: mol_type = genomic DNA
gattgtggaaacctactaggtgaccgctcggctagcagattaccactatc

SEQ ID NO: 38605 - DNA, 40 bp, Mycolicibacter terrae
  source 1..40: mol_type = genomic DNA
cgcctcgggtctcgggggccgctctgggatcccggccacc

SEQ ID NO: 38606 - protein, 548 aa, Clostridioides difficile
MNREGKKCVLYPRVSTEMQVDGYSLEGQKNSLKRFADREEMEIVGIYEDAGKSGKSIEGRPAFKKMLSDIKNGLEIEYILVYKLSRFGRNAADILNSLEFVQSYGINLICIEEGIDSSQTSGKLLISVLSAVAEIERENIIEQTMNGRREKARQGGWNGGFAPYGYYLKDNQLLIEETEAEAIRIIFDKFGNSDIGLGGVAKYLNLQGIKKIPRQNGKLETWSSHLIRQILDNPVYCGKIAYGRRTREKVKGTKNEYKQVHTDDYILEDGQHEGIVSEELWQKVHAKRKATGIKQPSKVGKDRSHLLTGVLKCPICGSSMYTNKHAWTNKDGTYKEVYYYICGRNKQERGHHCDYKASLRKIDIEPLVVEAVKELVSDAYFAKEIEKRIGVQTDTSTVDKELANYENKLKEVDLNKARLENEIDNLPADARFRERKIHDMTLRLDALYDTMAELEERIEDAKLRKSSIEMEAITLDNVYKIMQNFGKLYAIMSDEEKKSLITYLIKEIQIYPNGESEMPLKSIEFNFPIYIDGRQVRKVLWERGNTVE

SEQ ID NO: 38607 - DNA, 50 bp, Clostridioides difficile
  source 1..50: mol_type = genomic DNA
ttgtgggaaagaggtaataccgttgagacggttgtaatgctttcccacaa

SEQ ID NO: 38608 - DNA, 40 bp, Clostridioides difficile
  source 1..40: mol_type = genomic DNA
ccctcattctacacatgtggagactgtggtgttgctacgt

SEQ ID NO: 38609 - DNA, 50 bp, Clostridioides difficile
  source 1..50: mol_type = genomic DNA
ttgtgggaaagaggtaataccgttaagacggttgtaatgctttcccacaa

SEQ ID NO: 38610 - DNA, 40 bp, Clostridioides difficile
  source 1..40: mol_type = genomic DNA
ccctcattttacaaatgagaaaactgaggtggagagaggt

SEQ ID NO: 38611 - protein, 516 aa, Staphylococcus hyicus; identical to SEQ ID NO: 7406

SEQ ID NO: 38612 - DNA, 50 bp, Staphylococcus hyicus; identical to SEQ ID NO: 13212
  source 1..50: mol_type = genomic DNA

SEQ ID NO: 38613 - DNA, 40 bp, Staphylococcus hyicus
  source 1..40: mol_type = genomic DNA
ttggcgcgactgtgaatatggacggtacagcaatcatgca

SEQ ID NO: 38614 - DNA, 50 bp, Staphylococcus hyicus; identical to SEQ ID NO: 13212
  source 1..50: mol_type = genomic DNA

SEQ ID NO: 38615 - DNA, 40 bp, Staphylococcus hyicus
  source 1..40: mol_type = genomic DNA
tcggggccaccgtgaacatggacggagcagccatcttcca

SEQ ID NO: 38616 - protein, 535 aa, Veillonellaceae bacterium
MFVTNELKTYAAYLRVSTDDQKDRQTIESQIEFVNKYCDLHQINLFKIYKDDGITGTLPLYERPAGSQLMQDAKNGLFNTLLVYKLDRLGRATRVILNAIHDLESYGVKLKSMTEPFDTGDASGRFLLTILAGVADLERSNILERMWHGANRAARSGKWLGGIVPYGYIKNEDKELIINEAPLSGLDISEADVIRLIYKLTVDEKMTTIKIADHLNALGIPPSYVARSSPDTGRRKINTAGIWRPGRVLNMLKSTTYKGIHQYGKRTKKNREIIEREVPAIVSEEIWDQAQQIIKGNFLFCRKNAKHSYLLRGLIKCGNCGHTYHGSTYNDGLTFYCCNGRTSWKQKGKEKCIGKYINLNYLDDLVWNDCLNFINDPELALKEIAAQNNNRPDKSLTENERLLMNSKLNEKEQEKERILDLFRKNLINMQDVENQLDKIAIDIDTIKSRLNDLNKKDNLSNIFSEKESTLTLLSSFKEKITDDITFETKQEITKCLVRQVLVTTNPDNVKEADIKITYHFSFIPDIATRVVHRTD

SEQ ID NO: 38617 - DNA, 50 bp, Veillonellaceae bacterium
  source 1..50: mol_type = genomic DNA
tacgcgagtagttcaccgcacggacaaccgtgcaaataaaaactcaggtg

SEQ ID NO: 38618 - DNA, 40 bp, Veillonellaceae bacterium
  source 1..40: mol_type = genomic DNA
acttagaaatccgcacggacagggattcatcgctgcaata

SEQ ID NO: 38619 - DNA, 50 bp, Veillonellaceae bacterium
  source 1..50: mol_type = genomic DNA
tacgcgagtagttcaccgcacggaagaccgtgcaaataaaaactcaggtg

SEQ ID NO: 38620 - DNA, 40 bp, Veillonellaceae bacterium
  source 1..40: mol_type = genomic DNA
acttaaaaatcctctccgaaggtgtttcttcccttcaaaa

SEQ ID NO: 38621 - protein, 590 aa, Ruthenibacterium lactatiformans
MRASEGKIAIYSRKSKFTGKGESIGNQIELCREYIRANHGQADADAAAVYEDEGFSGGNLERPAFKRMLRAARERKFKAVVVYRLDRISRNISDFSGLIEELSRLDIAFVSIKEQFDTGTPMGRAMMYIASVFSQLERETIAERIRDNMHELAKTGRWLGGTTPTGYCSKSVRTVTVDGKAKKACMLELIPEEGETVKLVYALFAETHSLTATETELLRRGVTTKNGKTFTRFSIKGILQNPVYLVADQAAYRYFIQRQADVFSNGREFDGVHGVLAYNRTDQSKGKNTVYLPVSEWIVSVGKHRGLISSEVWLEAQAALEHNRSKAYRRPRSNEALLTGLLFCRCGGRMYPKLSKRSLADGTRSYTYVCREKERSRRSLCDGKNADGNMLDSAVLQAIGALAEDKAGFAGRLAQSKGGSMGGPGLAGEKLSALRKELGGNAKKIDALVDSLAQAGAGAAREHILKRIGTLHELDRELRKRIGELERFAVQNVLGARELEAQRRLLAAFPESMETMRLAQKRAAVQALVQRVVWDGESAHVVLAGTAEVPADFLCAEEGRTEREERSEAHGDGNTQFVNTPAPHWREDSK

SEQ ID NO: 38622 - DNA, 50 bp, Ruthenibacterium lactatiformans
  source 1..50: mol_type = genomic DNA
cgccgcattggcgggaggatagcaaatgctatcctcccgcaaatgcggcg

SEQ ID NO: 38623 - DNA, 40 bp, Ruthenibacterium lactatiformans
  source 1..40: mol_type = genomic DNA
tgcagcgcgctgcattgaaaatgaggtgctcatgcagttt

SEQ ID NO: 38624 - DNA, 50 bp, Ruthenibacterium lactatiformans
  source 1..50: mol_type = genomic DNA
cgccgcattggcgggaggatagcatctgctatcctcccgcaaatgcggcg

SEQ ID NO: 38625 - DNA, 40 bp, Ruthenibacterium lactatiformans
  source 1..40: mol_type = genomic DNA
tgcagccccttgcattaactctgaggtccccttggagtct

SEQ ID NO: 38626 - protein, 542 aa, Ruminococcus albus
MTDKITALYCRLSQDDMLDGESNSITNQKAILQKFAEDNGFPNPTFYVDDGVSGTTWERDGFKAMMADIEDGKVATVITKDLSRLGRDYLKTGELIEMVFPDYDVRYIAVNDNVDTAKSENELLAFKNIFNDWYARDCSKKIRAVFRAKGQSGKHLCPPVYGYKKSDTDKNLWVIDEPAAEVVRKIFKLCIDGYGPVQIARILTEQGIPTPTAYALSQGRDNGRHNAKTYRWGANTIAHILERLEYCGHTVNFRTKMKSYKVHKIVYNPQNEWQIFENTQEPIITQQTFDLVQELRKHKRRPQKMQTVNPFAGMVYCADCGEKMYLSRRKNERPEQEHMRCSTYAKEQDKCTVHYIRTCVLNEIVLGELNKLLMMVRENEDEFIQTAMSNSVQRKSSELTKAKKTLKQAEKRITELDKLFTRLYEDNVLGRLSDERFTMMSAGYEDEQAKLKATVAELTTLIDGAEKKSSDVTAFLKVVHKYEHIETLTPEIMHELVDKIVVHEPDKSSGKRVQDIEIHFRFDVAVSTISVETGKLQILRNC

SEQ ID NO: 38627 - DNA, 50 bp, Ruminococcus albus
  source 1..50: mol_type = genomic DNA
aaacttctatatcaccactgtgctttacgacagtaggcataaagaagttt

SEQ ID NO: 38628 - DNA, 40 bp, Ruminococcus albus
  source 1..40: mol_type = genomic DNA
tctgataagcagtatatccttgccgccgggggtgaaatga

SEQ ID NO: 38629 - DNA, 50 bp, Ruminococcus albus
  source 1..50: mol_type = genomic DNA
aaacttctatatcaccactgtgcttaacgacagtaggcataaagaagttt

SEQ ID NO: 38630 - DNA, 40 bp, Ruminococcus albus
  source 1..40: mol_type = genomic DNA
tctgaaaatcagtataccatagaaacctggggtggaatca

SEQ ID NO: 38631 - protein, 537 aa, Klebsiella pneumoniae
MNTAYAYIRFSSEKQSTGDSVRRQQSLIDSWGKNNPDYILSKKIYKDEGLSAFTGKHAAGDLGRLMNDISNGSITAGDVILIESLDRLSRENISTATDRLKAILIRGVNVVTLTDQKQYTPESLNSPMDLIMSILTAQRAHEESESKSKRMREVWAKKRTEAEENGKIITKSCPRWLTVNSDRTGFDPIPDRVQTINRIFSLRVKGESLSAISKILNEEGRLTFTGKAGKWNQSTIQQLVSNRALIGYKVQSRNSVVNHPDIPNYYPVVVDLQTFQAVQQLKSDQFGKKQTSDIPVLVNMFKSVLRCKECGNIMILNSVTVNRDGYYVCSMRRQGRCDAKPINRKATDEALVKGMFYNLDRLMLSKPEQNPVTALEAQKQDLTERLNKLVVALEIAPDITEIISRMNAIKGDIQAIESQIAQHKQRLQSHISASVQGLDLLVKADRIEFQLVMKRHVETILINTLKKSADIHMFNGLKLLNFPLDRVVDGAQWLEILPLIDGEEFDFEGFATKPRHIASEEAPEWVKEMEEQPNQML

SEQ ID NO: 38632 - DNA, 50 bp, Klebsiella pneumoniae
  source 1..50: mol_type = genomic DNA
aataatgtttagacatgtgcattggtcatagtgactttctaaacgtgcat

SEQ ID NO: 38633 - DNA, 40 bp, Klebsiella pneumoniae
  source 1..40: mol_type = genomic DNA
gagcacggtacggatgttggtcatcgtcaggttgacgatc

SEQ ID NO: 38634 - DNA, 50 bp, Klebsiella pneumoniae
  source 1..50: mol_type = genomic DNA
aataatgtttagacatgtgcattgcccatagtgactttctaaacgtgcat

SEQ ID NO: 38635 - DNA, 40 bp, Klebsiella pneumoniae
  source 1..40: mol_type = genomic DNA
gaacacagaagggatgttgccctttttaaggttgtagatc

SEQ ID NO: 38636 - protein, 554 aa, Klebsiella pneumoniae
MYVNWLPRWSLFCLGHVMNTAYAYIRFSSEKQSTGDSVRRQQALIDSWGKNNPDYILSQKIYKDEGLSAFTGKHAAGDLGRLMNDISNGSITAGDVILIESLDRLSRENISTATDRLKAILIHGVNVVTLTDQKQYTPESLNSPMDLIMSILTAQRAHEESESKSKRMREVWAKKRTEAEENGKIITKSCPRWLTVNSDRTGFDPIPDRVQTINRIFSLRVKGESLSAISKILNEEGRLTFTGKAGKWNQSTIQQLVSNRALIGYKVQSRNSVVNHPDIPNYYPVVVDLQTFQAVQQLKSDQFGKKQTSDIPALVNLFKSVLRCKECGNIMILNSVTVNRDGYYVCSMRRQGRCEAKPINRKATDEALVNGLFYNLDRLMLSKPEQNPVTALEAQKQDLTERLNNLVVALEVAPDITEIISRMNAIKGDIQAIESQIAKHKQRIQSHISETVQGLNLLVKADRVEFQLVIKRHVETILINTLKKSADIHMFNGLKLCNFPLDRVVDGAQWLEVLPLIDGDEFDFEGFTTKPRHIALEEAPEWVKETEEQPSQPL

SEQ ID NO: 38637 - DNA, 50 bp, Klebsiella pneumoniae
  source 1..50: mol_type = genomic DNA
aataatgtttagatatgcgtattggtcatagtaactatctaaacatgtat

SEQ ID NO: 38638 - DNA, 40 bp, Klebsiella pneumoniae; identical to SEQ ID NO: 38633
  source 1..40: mol_type = genomic DNA

SEQ ID NO: 38639 - DNA, 50 bp, Klebsiella pneumoniae
  source 1..50: mol_type = genomic DNA
aataatgtttagatatgcgtattgcccatagtaactatctaaacatgtat

SEQ ID NO: 38640 - DNA, 40 bp, Klebsiella pneumoniae; identical to SEQ ID NO: 38635
  source 1..40: mol_type = genomic DNA

SEQ ID NO: 38641 - protein, 503 aa, Faecalibacterium prausnitzii; identical to SEQ ID NO: 341

SEQ ID NO: 38642 - DNA, 50 bp, Faecalibacterium prausnitzii; identical to SEQ ID NO: 12
  source 1..50: mol_type = genomic DNA

SEQ ID NO: 38643 - DNA, 40 bp, Faecalibacterium prausnitzii
  source 1..40: mol_type = genomic DNA
taaaggtttgaatctcagtttagaaaaatacagaatgccg

SEQ ID NO: 38644 - DNA, 50 bp, Faecalibacterium prausnitzii; identical to SEQ ID NO: 12
  source 1..50: mol_type = genomic DNA

SEQ ID NO: 38645 - DNA, 40 bp, Faecalibacterium prausnitzii
  source 1..40: mol_type = genomic DNA
ttagagtttaaatttcagtttagaaaaaaaaaaaatccca

SEQ ID NO: 38646 - protein, 558 aa, Bacteroides pectinophilus
MLQADKITALYCRLSQEDMQAGESESIQNQKLILQKYADDHHFFNTRFFVDDGFSGVSFEREGLQSMLREVEAGNVATVITKDLSRLGRNYLKTGELIEIVFPEYEVRYIAINDGVDTARDDNEFTPLRNWFNEFYARDTSKKIRAVKQAKAQKGERVNGEVPYGYIADPNDRNHLLPDPETAHVVKQIFAMYVRGDRICEIQNWLREHEILTVSEMRYRRSGSCRHPRPHPNCIYNWPDKTLYDILTRKEYLGHTITGKSYKVSYKSKKTKKNPEEKQYFFPNTHEPLIDEETFDLAQKRIATKHRPTKVNEIDIFSGLLFCGDCGYKMYLQQGAGTLERKHAYTCGKYRNRIRTGELCTTHYIRKSVLKELVLADLQRVLSYVQTHEQAFIQTANECSEQAMKKTMAQQHKELDKAQGRMSELNVLFRKLYEDNALGKLSDEQFAFLTSGYDEEKKTLTRRIAELTQELDTAAERSADVKRFVTLVRKYTAIEELTYENVHEFIDRILIHELDKETNTRKIEIFYSFVGRVDTGDKPTESISYFRQIGADVKSYAI

SEQ ID NO: 38647 - DNA, 50 bp, Bacteroides pectinophilus
  source 1..50: mol_type = genomic DNA
aggttacgttatcttacctcaacaaaagatgaggttagataacgatactt

SEQ ID NO: 38648 - DNA, 40 bp, Bacteroides pectinophilus
  source 1..40: mol_type = genomic DNA
ttacatgtcttgcattaataaggtagctcctgtgtatcct

SEQ ID NO: 38649 - DNA, 50 bp, Bacteroides pectinophilus
  source 1..50: mol_type = genomic DNA
aggttacgttatcttacctcaacattagatgaggttagataacgatactt

SEQ ID NO: 38650 - DNA, 40 bp, Bacteroides pectinophilus
  source 1..40: mol_type = genomic DNA
ttccatatcttgaattgcttttgtagctagtgtgtagact

SEQ ID NO: 38651 - protein, 575 aa, Vibrio fluvialis
MTKMAYSYTRLSTEKQINGHGFTRQREAIEKVCCQYGWQLSDQTFNDLGVSAWKGANATTGALSQFIDLAKKGAIRPNSVLIVESVDRLSRQQVDKSLRLMLELLEVGVSIFTLSDSKLYTTNSDSVMLDLMMWLMTAQRAHEESEIKSLRVRAAKKKNKELIRKGIIVTRKCPEWLTVSDDKSCFLVNNERAEIVRKIFTWYSQGFSTKPIALKLNELGIPYWGKSSTWSYRHIRSLLKHRGVIGEIQLLKRIDGRDVSDGDPVEDYYPAIIDRGLWATCQQIKSSKTTAKGRIVERGMANLFRGLLKCECGSGLAINSSTVKGRTYRFLRCSQLKTTGCQAKNWHYEKTERILLIALRHSLSSFCEEDHAVSLRESQHYLARINEELKEKERQAENAINYLLDKPSRLLEARLQTLEDDIARLKAIQEQAEHRLEAVHYEKSTALDKVEELQRVLEDIANDDDSRHKANGLLRRLIDTVTLGSISNPRSKEFMELSGSDYHGLIVIKRRDGLEVRVEVLKNYELSISWEGDEFTVIECSPTQQPNSQHVPQKFINVGEQTVDLWDDEGWVASS

SEQ ID NO: 38652 - DNA, 50 bp, Vibrio fluvialis
  source 1..50: mol_type = genomic DNA
gtttggggaatagacattaggattaaggtgctttatcgtattccctgaac

SEQ ID NO: 38653 - DNA, 40 bp, Vibrio fluvialis
  source 1..40: mol_type = genomic DNA
atttggctggcacgttgttaaagtgctgtaccgtacttaa

SEQ ID NO: 38654 - DNA, 50 bp, Vibrio fluvialis
  source 1..50: mol_type = genomic DNA
gtttggggaatagacattaggattccggtgctttatcgtattccctgaac

SEQ ID NO: 38655 - DNA, 40 bp, Vibrio fluvialis
  source 1..40: mol_type = genomic DNA
atttggctggtttgtgtttccattgtaggaccgtactgaa

SEQ ID NO: 38656 - protein, 656 aa, Vibrio parahaemolyticus; identical to SEQ ID NO: 19521

SEQ ID NO: 38657 - DNA, 50 bp, Vibrio parahaemolyticus
  source 1..50: mol_type = genomic DNA
attctcatgcacgaatctttcgcatcagccaacaaataatacatgtcaat

SEQ ID NO: 38658 - DNA, 40 bp, Vibrio parahaemolyticus
  source 1..40: mol_type = genomic DNA
ctctacgctttctttagcgtcgccaaacagcatcgaagtg

SEQ ID NO: 38659 - DNA, 50 bp, Vibrio parahaemolyticus
  source 1..50: mol_type = genomic DNA
attctcatgcacgaatctttcgcactagccaacaaataatacatgtcaat

SEQ ID NO: 38660 - DNA, 40 bp, Vibrio parahaemolyticus
  source 1..40: mol_type = genomic DNA
ctttgctatgttttttgccctgcaaaacagcatggaagtg

SEQ ID NO: 38661 - protein, 639 aa, Vibrio parahaemolyticus
MALIPYARVSSGKQLDGLSMSLQGDANLLKNTAVSDHIYNDEGVSSYKGKNVTDGELGRLIADIKKGTIKKGDIIVMRALDRLSRQKPTDSENLYNSIVGSGVHILTTIDNHLYKRDCVMSSVLKTLAFKTANEESAKKSFLTSSYASHRIEQFLSGEVPENGTAYDVGVGRHPFWIQVKDRVIQKHEHFALARIMFEKAMKGHGVARLQKFAKSQGLDLSYSAVGKMFRSHSVFGDLHITHQGKKYTLKGYYPALATETEYYKVRAIKDKLTKESNSQRKRVSILAGMQKLYCGCCGSSIGIARNTKQDIDYYGCTNKLDKCYQQLRQDIIDNIVLNAIDTHVFNVDTNDTSVLDGLELEFREKKKLHDNAVERFMILGDSAGDKAIETIHRLKSEVDEISKKIEIEKDKTASHTIDYEAISSYRDAMADYQAQQQKISAYVHGNSELKQEIKDILKLILKRITIDHRHMITIELLDGSKTYLYLLRRKDGKRLHDRYYVPIKIHDKDTINQIRESTPELVNWITEDERDTLDIYFEDVTNPFLAIERNRHQRDYESEFFDLLQGNVHEWKRADIMKLGATSTQWQEFKNADVSKYGFTKDVCTITTKHYTKQHKTIIYRNFDEQEIIEYLDCKKVEF

SEQ ID NO: 38662 - DNA, 50 bp, Vibrio parahaemolyticus
  source 1..50: mol_type = genomic DNA
atcgtagagcaactcgccttagcgtcaccgaagttaagttactctcctat

SEQ ID NO: 38663 - DNA, 40 bp, Vibrio parahaemolyticus
  source 1..40: mol_type = genomic DNA
ctctacgctttctttagcatcgccaaacagcatcgaagtg

SEQ ID NO: 38664 - DNA, 50 bp, Vibrio parahaemolyticus
  source 1..50: mol_type = genomic DNA
atcgtagagcaactcgccttagcgctaccgaagttaagttactctcctat

SEQ ID NO: 38665 - DNA, 40 bp, Vibrio parahaemolyticus; identical to SEQ ID NO: 38660
  source 1..40: mol_type = genomic DNA

SEQ ID NO: 38666 - protein, 514 aa, Chryseobacterium arthrosphaerae; identical to SEQ ID NO: 35521

SEQ ID NO: 38667 - DNA, 50 bp, Chryseobacterium arthrosphaerae
  source 1..50: mol_type = genomic DNA
attatcttctaatgtcggtcttgtgaacttgctggtaggaacatcgaacc

SEQ ID NO: 38668 - DNA, 40 bp, Chryseobacterium arthrosphaerae
  source 1..40: mol_type = genomic DNA
aatagttgtctccttcagtgacctcgacaggattcaaacc

SEQ ID NO: 38669 - DNA, 50 bp, Chryseobacterium arthrosphaerae
  source 1..50: mol_type = genomic DNA
attatcttctaatgtcggtcttgtgtacttgctggtaggaacatcgaacc

SEQ ID NO: 38670 - DNA, 40 bp, Chryseobacterium arthrosphaerae
  source 1..40: mol_type = genomic DNA
attaactgcctccttcattgtcctctacataactcagacc

SEQ ID NO: 38671 - protein, 576 aa, Anaerotruncus rubiinfantis
MLIKNAGADTIDTSNPVLADCPPIKEEHSMLRQSDKITALYCRLSRDDELQGDSNSIVNQKAILSKYAKENGFKNILFFVDDGYSGANFDRPSWCELVEKIENGEVATLIVKDMSRLGRDYLRVGLYTDVLFPEKGVRFIAISNGVDSANQQENDFTPFLNIINEWYCRDTSKKIRAVMKSKGEAGEHLCTNPPYGYIKDPDNKKRWIVDETAAEVVKRIFALCLEGYGPSQIARILKDGKVITPTIHFQRTGRATRNTPPDNPYNWTGDTIADILERPEYQGHTVNFKTSKQSYKSKKTCYNPKEKQLVFENTHEAIIDADTWERVQDLRKNKRRPTRTGKTNLFSGIVRCADCGEKLYYCTSRNFEARQDHFVCSTSRLKGKEVCPTHFIRAVVLEQGVLAHMRLVIACVSTHEERFRKAMGAKQKVEAKRELTAKRRQLTQAERRIKELDRLFKRIYEDNANGKLSDSRFQMLSDDYEQEQEELREKLLQLNEEIIQQEEQAENIDRFIGKVRKYLDLDELTPTVLNDMVKAVYVHAPDKSSGHREQQIDISYDLVGILPASLLGDLSNGETA

SEQ ID NO: 38672 - DNA, 50 bp, Anaerotruncus rubiinfantis
  source 1..50: mol_type = genomic DNA
atgctgttttatgagtgccgcccaaaaggtagctactcataaaacagtat

SEQ ID NO: 38673 - DNA, 40 bp, Anaerotruncus rubiinfantis
  source 1..40: mol_type = genomic DNA
aagaaaaagagcggctccaaagagccgctctttctatgca

SEQ ID NO: 38674 - DNA, 50 bp, Anaerotruncus rubiinfantis; identical to SEQ ID NO: 38672
  source 1..50: mol_type = genomic DNA

SEQ ID NO: 38675 - DNA, 40 bp, Anaerotruncus rubiinfantis
  source 1..40: mol_type = genomic DNA
tagaaaaagagcctctccaaagatgccctcattctaatcc

SEQ ID NO: 38676 - protein, 548 aa, Citrobacter freundii
MKLLVTYIRWSTKEQDSGDSLRRQTNLIDAFYSKHKEDYYLLPAHRYVDKGKSGFHQQHKNQGSDFRRMFENVMSGGIPEGSLIVVENFDRFSRADIDTAIDDVRQILRKGVSILTLGDGELYDKSALTDPVKLIKHIIIAERAHQESLVKQKRIAQVWNHKTQLARELKKPMGKQAPGWLELSDDGSHYIIDEDKASLVNLIFDKRLSGLSMFAICKWLNEQGYPTINQRKVRISKTQKPDGNWSALSVKHILTSRSVLGYLPAKVSTEDRKTVLREEIEGFYPQIVTDSKFYAVQQLLEETGKGKTSGGEHWLYVNILKGLIRCKCGLVMTPTGIRKPVYQGTYRCNGNKESRCNYGTVSRKLLDTQLCSRLFSKLSQLHNEATDTARLDELQRRLTTVDSELEKLTETLVQLPNITQIQEALRVKQEEKDELIAKLSREKARVKSVSSLDLSGLDMESVEGRTEAQIIIKRLVKEIVVSGNEKLVDIYLHNGNMIRGFPLDGKDDHTLTLEEATDEMQSLDDMLIFGEPVTRVYPAGDMEEVDYS

SEQ ID NO: 38677 - DNA, 50 bp, Citrobacter freundii; identical to SEQ ID NO: 16337
  source 1..50: mol_type = genomic DNA

SEQ ID NO: 38678 - DNA, 40 bp, Citrobacter freundii; identical to SEQ ID NO: 21398
  source 1..40: mol_type = genomic DNA

SEQ ID NO: 38679 - DNA, 50 bp, Citrobacter freundii
  source 1..50: mol_type = genomic DNA
gtacgtgtttagctatgtaaaagcttcagtattcttgccttaacactcat

SEQ ID NO: 38680 - DNA, 40 bp, Citrobacter freundii
  source 1..40: mol_type = genomic DNA
gtacttggcattatcaagctttttaactttagtcatgtta

SEQ ID NO: 38681 - protein, 553 aa, Citrobacter freundii
MKLLVTYIRWSTKEQDSGDSLRRQTNLIDAFYAKHKEVYYLLPAHRYVDKGKSGFHQQHKNQGSDFRRMFENVMSGVIPEGSLIVVENFDRFSRADIDTAIDDVRQILRKGVSILTLGDGELYDKSALTDPVKLIKHIIIAERAHQESLVKQKRIAQVWNHKTQLARELKKPMGKQAPGWLELSDDGSHYIIDEDKASLVNLIFDKRLSGMSMFAICKWLNEQGYPTINQRKVRISKTKKPDGNWSALSVKHILTSRSVLGYLPAKISKEDRKTVLREEIEGFYPQIVTDSKFYAVQQLLEETGKGKTSSGEHWLYVNILKGIIRCKCGLVMTPTGIRKPVYQGTYRCNGNKESRCNYGTVSRKLLDTQLCSRLFSKLSQLHDESSDTARLDELQRRLTTVDIELEKLTETLIQLPNITQIQEALRVKQEEKDELIAQLSREKARVKSVSSLDLSGLDMESVEGRTEAQIIIKRLVKEIVVSGNEKLVDIYLHNGNMIRGFPLNGKDDHTLTLEEATDEMQSLDDMLIFGEPVTRIYPAGDMEEVNADEVDYS

SEQ ID NO: 38682 - DNA, 50 bp, Citrobacter freundii; identical to SEQ ID NO: 3242
  source 1..50: mol_type = genomic DNA

SEQ ID NO: 38683 - DNA, 40 bp, Citrobacter freundii; identical to SEQ ID NO: 21398
  source 1..40: mol_type = genomic DNA

SEQ ID NO: 38684 - DNA, 50 bp, Citrobacter freundii
  source 1..50: mol_type = genomic DNA
gtacgtgtttagctatgtaaaagctttagtattcttgccttaacactcat

SEQ ID NO: 38685 - DNA, 40 bp, Citrobacter freundii; identical to SEQ ID NO: 38680
  source 1..40: mol_type = genomic DNA

SEQ ID NO: 38686 - protein, 540 aa, Anaerofustis stercorihominis
MKQPYNTTIYNTALYLRLSCDDELQGESGSIQTQRMMLRQYAAEHGLTVVDEYIDDGWSGTNFERSSFQRMIDDIEDGKINCVVTKDLSRLGRNYILTGQYTEIYFPSKGVRYIAINDNVDTINGESELAPFLNILNEMHARQTSKKVKAAMHTRFANGAHYGAYAPLGYVKDPDKKGHLLIDPETRWIVEKIFDLAVHGRGAASITRILVEEKVPTPGWLNYERYGTFANIYAGAPAEKAYAWTIAQVKSILKEETYIGHSVHNKQSNISFKNKKKVRKPQEEWYRVENTHEAIISEEVFQKVQELIASRRRRQKNGTTQIFSGLVKCADCGWSLAYGVNSQNKNPYAHYHCSKYGQGLRQCSMHYIRYDVLYAYVLARLQYWSMLAQKDEDKLLKRLLNASDRERNSAKKKQAAELKKAEKRKAEVDGLFAKMYEDWSAGRITEYNFNMLSEKYQNEQKELETKIRQLHEMMEAAVQTAADAEKWIALMKQYVNPVELTAELLNTLIEKITVHEAVKGEDGSREQEVEIYYRFIGKID

SEQ ID NO: 38687 - DNA, 50 bp, Anaerofustis stercorihominis; identical to SEQ ID NO: 3657
  source 1..50: mol_type = genomic DNA

SEQ ID NO: 38688 - DNA, 40 bp, Anaerofustis stercorihominis
  source 1..40: mol_type = genomic DNA
cgtatcaaaatgggaaaacggtacatcatatcccgaaatg

SEQ ID NO: 38689 - DNA, 50 bp, Anaerofustis stercorihominis; identical to SEQ ID NO: 3659
  source 1..50: mol_type = genomic DNA

SEQ ID NO: 38690 - DNA, 40 bp, Anaerofustis stercorihominis
  source 1..40: mol_type = genomic DNA
cattttaaaaggggaaaactttgcattatatacaaaaatc

SEQ ID NO: 38691 - protein, 511 aa, Hungatella hathewayi; identical to SEQ ID NO: 36571

SEQ ID NO: 38692 - DNA, 50 bp, Hungatella hathewayi; identical to SEQ ID NO: 36572
  source 1..50: mol_type = genomic DNA

SEQ ID NO: 38693 - DNA, 40 bp, Hungatella hathewayi
  source 1..40: mol_type = genomic DNA
tatctccaaatctacggtacataaggatgtaacagaccgt

SEQ ID NO: 38694 - DNA, 50 bp, Hungatella hathewayi
  source 1..50: mol_type = genomic DNA
gcgttctaattagttacgaccatatctatggcagtaacaaaatagaaaga

SEQ ID NO: 38695 - DNA, 40 bp, Hungatella hathewayi
  source 1..40: mol_type = genomic DNA
tatctccatattttggttatctaaatatgtaacacaaagt

SEQ ID NO: 38696 - protein, 479 aa, Streptococcus intermedius
MPKIALYLRLSVDEANTDESNSIINQRLLLSRYLDHNPEFQTFQREEFVDDGFSGTSTNRPAFQRLMAGVKSGAIRHILVKDLSRFMRDYLELGNYLENIFPFLGVRFIALNDQYDSKTSEQNGLEIDVPFRNLLNDFYAKDVSEKVKSAMNTMKRSGKNMSWLPPFGYLKDPEDRFKIIIDEEVASIVRRIFRLSIEGMGDQKIAQILNQEQTITPAERKMQVSQARYRKTMILTVEQKRNVWTKGSIRQILKNEAYKGTYLFNTRTYIRGKHVRRPESEWERIENNHEAIVSTEVFEQAQQARKVRQGSQSSSLSQKTEKSILTGLVFCEHCGHRLSLRHNKGQIGYFYCGYCKGQGHSLSFCRLDKIEASILEALSCYLESSAQLKASTETARGIERLKARKLELFQEYKECYISRDMYLDKKVAIDEQVTSLEKALIAEQKPQLSTKGLTKEIVEAHVEKIVVDCLGFFEVIYKS

SEQ ID NO: 38697 - DNA, 50 bp, Streptococcus intermedius; identical to SEQ ID NO: 14052
  source 1..50: mol_type = genomic DNA

SEQ ID NO: 38698 - DNA, 40 bp, Streptococcus intermedius
  source 1..40: mol_type = genomic DNA
aacatgggcaattccaggtggtgcaatggagcttggggag

SEQ ID NO: 38699 - DNA, 50 bp, Streptococcus intermedius
  source 1..50: mol_type = genomic DNA
tgcgtcattttcttgacatgagaggcgtattgtgtcataataatgacagg

SEQ ID NO: 38700 - DNA, 40 bp, Streptococcus intermedius
  source 1..40: mol_type = genomic DNA
agcataggccctgccagatgctcagatggagcttgggcag

SEQ ID NO: 38701 - protein, 583 aa, Streptococcus lutetiensis
MKTNNVEIIKADSLVRRRGVNVERHLKRVAAYCRVSSDSEDQKNSYESQVKHYKDYISQRSDWELADIYADEGISGTQVGKRQDFQRLINDCVNGEIDYIVTKAIARFARNTLDTLKYVRMLKDMQIGVYFEEENIDTLTMDGELLLTILSSVAQQEVENTSAHVKKGLKMKMQRGELIGFQGCLGYDYDVETKQLSINKKEAKIVRYIFERYLEGIGGKVIARELDELGYKSPRGLDHWNDTTVLGIIKNEKYKGDILMGKTFTVDPISKRRLSNFGEEDKYYIKDNHEPIISKEDFEKAQAIRLRRAGNKKTAANVNGKRERYSKMYAFSSMLECGFCGSLLSRRSWHCRSDYRKVVWHCVTSIKKGKKYCKHSKGLEELAIEGAFMEAYRQLYHSNENIVSDLLETIESELNDNSLNKELKKITNKLRTLLKKEENLVNLKLEGKISDSIYNEKYNELSSEKEYLAEEKVNVETILKSEIDVKKRLTEFKQLLSSQKMLTEFDRTVFESIVEKIIVGGVNSDGEIDPAMLTIIFKTGETQNKDGKQFKSKRKNAKLEPDKLCPQNCDEDKKLYSQGTDNT

SEQ ID NO: 38702 - DNA, 50 bp, Streptococcus lutetiensis
  source 1..50: mol_type = genomic DNA
tgtattctcaagggacagacaacacacgtcgagtgcgtagtgttgctaca

SEQ ID NO: 38703 - DNA, 40 bp, Streptococcus lutetiensis
  source 1..40: mol_type = genomic DNA
tttgttcccgaatacacaccatgttgagacggtagtattg

SEQ ID NO: 38704 - DNA, 50 bp, Streptococcus lutetiensis
  source 1..50: mol_type = genomic DNA
tgtattctcaagggacagacaacagacgtcgagtgcgtagtgttgctaca

SEQ ID NO: 38705 - DNA, 40 bp, Streptococcus lutetiensis
  source 1..40: mol_type = genomic DNA
tttggtcccaaatactcaggaggctgaggtgggaggattg

SEQ ID NO: 38706 - protein, 584 aa, Streptococcus lutetiensis
MKEVEVIKARNDLQTRTRGKTIELMRVGAYCRVSTDSADQLNSYKSQVAYYTDMIKKNKEWVLADIYADEAITGTQVAKREDFQRMINDCMNGEIDMVITKSISRFARNTLDTLKYVRMLKERNIAVYFEDEKINTLTMDGELLLVVLSSVAQQEVENISANVKKGLKMKMKRGELVGFQGCLGYDYHKDTKTITVNEEEAEIVRYIFNRYIEGAGGSVIAHELENLGYKTKYGSSTWVQSTIIGIIKNEKYKGDLLLGKTFTVDPISKRRLENFGEEDKFYIRNHHEPIISEEVFEKAQEILARRNVNRGKIGEGNTKREKYSRKYAFSCMLECGFCGGTLTRRNWHSSSQYSKVIWQCVTATKKGKKFCKHSKGIPETAIEEAFVESYRLLCDDNKDVLEEFLQRMDDTLSSSAVSKQLAKAEKEIDALEKKKSKLVDMRLEEVIDKETYESKYADLVSKQEQLVEERKKLQETSDNEKDIKKRLKEFKKTLEQNEVLDKFDRYVFESIVEKVIVGGLDENGNVDPAQLTFVYKTGLKNSVDGAKFKPQRKNARGRHRADELCSHDSNEVDKMCSDSSNDTC

SEQ ID NO: 38707 - DNA, 50 bp, Streptococcus lutetiensis; identical to SEQ ID NO: 572
  source 1..50: mol_type = genomic DNA

SEQ ID NO: 38708 - DNA, 40 bp, Streptococcus lutetiensis; identical to SEQ ID NO: 38703
  source 1..40: mol_type = genomic DNA

SEQ ID NO: 38709 - DNA, 50 bp, Streptococcus lutetiensis; identical to SEQ ID NO: 18129
  source 1..50: mol_type = genomic DNA

SEQ ID NO: 38710 - DNA, 40 bp, Streptococcus lutetiensis; identical to SEQ ID NO: 38705
  source 1..40: mol_type = genomic DNA

SEQ ID NO: 38711 - protein, 520 aa, Dorea longicatena
MSDQKLIIGYYRLSMEDDSEGESNSIINQRKLVKDYISNIPELAAMPFQEFYDDGYSGSSMERPAIKQVLELARENKVQCIVVKDFSRFARNYIEMGTYLEQIFPFLGVRFISISDRYDSKDYKGKSSDIEVQFKGLIADFYVKDQSVKVKAAVSTRRGKGEYCCGSAPYGYRINPENKKELVIVEDEAEVIRRVFELTNQRYSKIEICKLFNEEGVLTPLQSMSRRQKSDSKKAASRGLQWTSDMIRKIVDDKTYIGCMVYGKTKIPDPGTGKEVPVPRNQWKVMENHHEPIVSKEVFEKAQSLQIRYTKKSKFDRETTLLGGYVKCGNCRRSLTSSSPVHGHILYSCAYSKGKEDTGCFAGKADNKMLEYIVLAEIKAYLRQNIGQEQMQQSMRKQHEDSIEAYKTERSDCEKRQEQIKIQNRQNYEKYHEGQMNQKQFMEAKMQLEEERERLQKRVQELTALINDEKEILMKKNVPVEQMLKYLGYEKLTREMLEEYVQGIYVYDDGRVEVEWESLT

SEQ ID NO: 38712 - DNA, 50 bp, Dorea longicatena; identical to SEQ ID NO: 12932
  source 1..50: mol_type = genomic DNA

SEQ ID NO: 38713 - DNA, 40 bp, Dorea longicatena; identical to SEQ ID NO: 21498
  source 1..40: mol_type = genomic DNA

SEQ ID NO: 38714 - DNA, 50 bp, Dorea longicatena
  source 1..50: mol_type = genomic DNA
tgtagcaatgacttgacatcctcgaaggaggacgttataataaggttaca

SEQ ID NO: 38715 - DNA, 40 bp, Dorea longicatena
  source 1..40: mol_type = genomic DNA
gaatgagtaaatttagcacaaggcctaatatacagcacat

SEQ ID NO: 38716 - protein, 520 aa, Dorea longicatena
MSDQKLIIGYYRLSMEDDSEGESNSIINQRKLVKDYISNIPELVAMPFQEFYDDGYSGSSMERPAIKQVLELARENKVQCIVVKDFSRFARNYIEMGTYLEQIFPFLGVRFISISDRYDSKDYKGKSSDIEVQFKGLIADFYVKDQSVKVKAAVSTKRGKGEYCCGSAPYGYRINPESKKELVIVEDEAEVIRRVFELTNQRYSKMEICKLFNEEGVLTPLQSMSRRQKSDSKKAASRGLQWTSDMIRKIVDDKTYIGCMVYGKTKIPDPGTGKEVPVPRNQWKVMENHHEPIVSKEVFEKAQSLQIRYTKKSKFDRETTLLGGYVKCGNCRRSLTSSSPVHGHILYSCAYSKGKEDTGCFAGKADNKMLEHIVLAEIKAYLRQNISQEQMQQSMRKQHEDSIEAYKTESADCEKCQEQIKIQNRQNYEKYHEGQMNQNQFMEAKKQLEEERERLQKRVQELDELINDEKEILMKKNIPVEQMLKYLGYEKLTREMLEEYVQGIYVYDDGRVEVEWKSLT

SEQ ID NO: 38717 - DNA, 50 bp, Dorea longicatena; identical to SEQ ID NO: 12932
  source 1..50: mol_type = genomic DNA

SEQ ID NO: 38718 - DNA, 40 bp, Dorea longicatena; identical to SEQ ID NO: 21498
  source 1..40: mol_type = genomic DNA

SEQ ID NO: 38719 - DNA, 50 bp, Dorea longicatena; identical to SEQ ID NO: 38714
  source 1..50: mol_type = genomic DNA

SEQ ID NO: 38720 - DNA, 40 bp, Dorea longicatena; identical to SEQ ID NO: 38715
  source 1..40: mol_type = genomic DNA

SEQ ID NO: 38721 - protein, 484 aa, Mycolicibacterium farcinogenes
MRAVIYTRVSSDQTGEFRSVESQEEECRAMCARNGWEVVDVLVDNDRGASRWSTKCRPEYKKLSEMLGADDVQVLVTWEASRAQRDLSAYVTLRNLCEERQVFWSYSGRLYDLSKGDDRFTTGLDALLAEREADMIRDRVLRGKKAAAMKGLPGGRPAWGYRRQFDPTTGRTTGWVKDPNEEGIVTEVFARVLAGESVWAIVRDFENRGIGTPKLQKNARKEWKPQSLRRTISSPSYAGWRTHQGKPVIDDKGERVKGNWPPYITPEQHERILAIFSDPARLVTTHRGHEPKHLLSGVIKCGVCGEGMRYFNPPSNPGPSARYRCGGRKMCTSRRADAVELLVTETILNRLERPDAAELFAKSGDADIAQALEKADTLRKRLAAFVESAANGEVSPAALASIENKLKPQIEEAESKARAEIATPLVGQLMDSDVRDKWEQFTLIEKRTVIRTLLLVRVNKAKFGNNYRFDSRDIEIEWLVGDDI

SEQ ID NO: 38722 - DNA, 50 bp, Mycolicibacterium farcinogenes
  source 1..50: mol_type = genomic DNA
ctggaccgttattgagcacttaatgaagctagtgctcaataaccgtccct

SEQ ID NO: 38723 - DNA, 40 bp, Mycolicibacterium farcinogenes
  source 1..40: mol_type = genomic DNA
cgggccgaaaaccatgatcgaggccggcgatccggtgaag

SEQ ID NO: 38724 - DNA, 50 bp, Mycolicibacterium farcinogenes
  source 1..50: mol_type = genomic DNA
ctggaccgttattgagcacttaatcaagctagtgctcaataaccgtccct

SEQ ID NO: 38725 - DNA, 40 bp, Mycolicibacterium farcinogenes
  source 1..40: mol_type = genomic DNA
tgggaggaaaacgatgatccaagccagggatgagatgaag

SEQ ID NO: 38726 - protein, 558 aa, Clostridioides difficile; identical to SEQ ID NO: 76

SEQ ID NO: 38727 - DNA, 50 bp, Clostridioides difficile
  source 1..50: mol_type = genomic DNA
aggttacgttatcttacctcaacaaaagatgacgttagataacgatactt

SEQ ID NO: 38728 - DNA, 40 bp, Clostridioides difficile
  source 1..40: mol_type = genomic DNA
tagcataaccggcctcaacaacttctcctcctccaagtct

SEQ ID NO: 38729 - DNA, 50 bp, Clostridioides difficile
  source 1..50: mol_type = genomic DNA
aggttacgttatcttacctcaacattagatgacgttagataacgatactt

SEQ ID NO: 38730 - DNA, 40 bp, Clostridioides difficile
  source 1..40: mol_type = genomic DNA
cagcaagcccggcttcaatttctcctcctccacgaaatct

SEQ ID NO: 38731 - protein, 523 aa, Roseburia intestinalis
MPNTESFTVNEILVYLRKSRSDSPDMSVEEVLRKHEEMIQQYASTHFHSPIPEKNIFREVVSGETIDSRPQMKNLLKMIESEQFKAVLVVEPQRLSRGDLEDCGRLINILRYTNTTVLTLTHSFNLQEEYERKFFEMEITRGNDYLEYTKRILKRGREASVAKGNYIGSVDPYGYKKTVIKKDGVTCHTLEIIPEEANTVKLIHELYAYTPEGIGFTNIAHKLDAMHIKPKKAAHWTPAIISSILCNPLYLGMVRWNNRKVVKYINEGQLAKARPQNTEAKYYKGLHEPIITQELYDTCMARRGTNPSLRRNKELCNPFAGLLYCGTCGHAMSLKIYKNHNSVSQMMLCNHQAYCHTKSVLYSAFLRRFMSSMEDTLNDFELAQKSDDGRAQAISKTIVVNLENKLKKLNEKDARQKDAYEDGIYSKEEFLKRNVRTQQDIASTIIALEDARAKKADIVDYEEKIRRFKDCLHALNDPELSAAEKNRFLKSCVDKILYYNNMESKAGIGRYIENVFSLEIQYK

SEQ ID NO: 38732 - DNA, 50 bp, Roseburia intestinalis
  source 1..50: mol_type = genomic DNA
catatccaacatatctgaaccgatgaattgggatggagatgttggatatg

SEQ ID NO: 38733 - DNA, 40 bp, Roseburia intestinalis
  source 1..40: mol_type = genomic DNA
gacagatattgggacggaggaattagcccatctcgaaatg

SEQ ID NO: 38734 - DNA, 50 bp, Roseburia intestinalis
  source 1..50: mol_type = genomic DNA
catatccaacatatctgaaccgataaattgggatggagatgttggatatg

SEQ ID NO: 38735 - DNA, 40 bp, Roseburia intestinalis
  source 1..40: mol_type = genomic DNA
gaagggtattacgccagtgaaataagccaatctcgaaatg

SEQ ID NO: 38736 - protein, 548 aa, Mycolicibacterium farcinogenes
MSLRFAFYGRVSTEDAQDPEASRSWQKRRAIDLISPHGGVLAADYFDIGQSRSLPWKRRPEASRLLADVTSRDRGFDAVVIGEPARAFYGPQFALTFPVLTHYGVGLWVPEVGGAVDPGSEAHDLVMTLFGGMSKGERARIQMRVRTAMSALAQDTTRYLGGRPPYGYQLVDAGPHPNPAKASLGQRLHRLEPDPETAPTVERIYRMYADGAGLRFIAQQLTDDGVPSPSQYDPARNRHRDPRGWSHSAIRAILDNPAYRGIRVWGKQEKYEVLLNPDDVAAGYETRMRWRDRADWIAPDRRTHEELIPDELAQAVRLRMQARRGPGRVCSRESTVPYALRGLLFCAACGRRMQGAARPGKQTTRILYRCEFGKSRSVPVDLSDHPRTVYLREDAVTARLDEWIATLADPEDLARGQDVDPAAGPGYAALQRQLSEANAKVAALITAVESGVAVEDLTAALRQRTAERDELRARVERVERPRAMCAAEISELVKELGGLSVILGAATGAERAEVYASLGLRLDYDPHLRRVTATADLSRVAKCVRGGT

SEQ ID NO: 38737 - DNA, 50 bp, Mycolicibacterium farcinogenes
  source 1..50: mol_type = genomic DNA
gagtcgtgtcgccaaatgtgtccgaggggggacttgtccgtctacgacac

SEQ ID NO: 38738 - DNA, 40 bp, Mycolicibacterium farcinogenes
  source 1..40: mol_type = genomic DNA
ggtctcagtcgggtgtccgaggggggacttgaacccccac

SEQ ID NO: 38739 - DNA, 50 bp, Mycolicibacterium farcinogenes
  source 1..50: mol_type = genomic DNA
gagtcgtgtcgccaaatgtgtccggggggggacttgtccgtctacgacac

SEQ ID NO: 38740 - DNA, 40 bp, Mycolicibacterium farcinogenes
  source 1..40: mol_type = genomic DNA
ggtctcactgtgttgtccagggctggtcttgaactcccag

SEQ ID NO: 38741 - protein, 553 aa, Sphingomonas koreensis
MTNAALAPSETGAVQPALRAALYLRVSSPRSAESDLSIPDQRRQTSSYCHSNGWEVAAEFVEPGVSGTDDRRPAFQEMIDAALERPSPFDVIVVHSFSRFFRDQFQFEFYLRKLAKNGVQLVSITQILGDDPMSEMMRKIMTLFDEYQSKENGKHTLRAMNENARQGFWNGARPPIGYRAVAAEQRGAKIKKKLEIDPLHAETVRRIFRLALEGADGRGPIGVMAIACWLNENNIRTRYGGRWGKGMVHQVLTRTTYIGEHRFNTYDVKKGRAKPETEHAIMEVPPIITVAEFEAVQRSLKARSPKMMPPRAVGGSTLLTGICFCACCGGAMTLRTGTSRSGQEYRYYTCATKATKGKTGCPGVSLPMDRLNEAVIEHLEKRLLDPARLEVLMDQLIARRDEWVTERRQHVAEMERRATEVETKLSRLYEAIENGLVDMGDPSLKARIAELTTIRDQARGDAERAVAHIERISPEITVESLHAFALVAKRKLRHDDGSYARNHIRAVAQRVEVHSKTDVRICGTRTELLRTLTAVSGVEAAVLGTRAFGPKWC

SEQ ID NO: 38742 - DNA, 50 bp, Sphingomonas koreensis
  source 1..50: mol_type = genomic DNA
ctcgggcttttggaccgaaatggtgccccaaggcggacgaaagcgatgaa

SEQ ID NO: 38743 - DNA, 40 bp, Sphingomonas koreensis
  source 1..40: mol_type = genomic DNA
atccagagccagtattggtgcccagaagaggactcgaacc

SEQ ID NO: 38744 - DNA, 50 bp, Sphingomonas koreensis
  source 1..50: mol_type = genomic DNA
ctcgggcttttggaccgaaatggttccccaaggcggacgaaagcgatgaa

SEQ ID NO: 38745 - DNA, 40 bp, Sphingomonas koreensis
  source 1..40: mol_type = genomic DNA
gtccagaccatttcttggttcccggaatgggaatcgaacc

SEQ ID NO: 38746 - protein, 567 aa, Clostridium botulinum
MKVAIYSRKSTFTGKGDSVENQIQMCKDYMQNFKNKSNENYEFLIYEDEGFSGGNTNRPQFKKLLKDIKSKKFKILICYRLDRISRNVSDFSNILETLQMYDIDFISIKEEFDTGTPMGRAMIYIASVFAQFERETIAERVRDNMIELAKSGRWLGGTPPLGYESKTVKYMDENLNERSLTKLSENQEELNLVKLIFDKYLELKSLSNLEAYMLANYYKTRRGSNFDKTSLKRILTNTVYVKSSDEIFSYLAEQNITVVGTPDNVHGILTYNKLKSNYTRDGNFSRSFRDTKDWIAAVSKHKGIIEPKDWLMVQSIREINKDKFVVSSRSHNALLTGIIRCKKCGSKLRIVHGVVSKKTGNRHFYYTCSLKKDSKGSRCNNKNGKVELIDKIVVNAIKELGENKLNLINKLEKQLKETSKEFHEVNEKENIDHLIEQKKKQVDNLLDKISLDPDLSDLIIPKLKDLKNELKELTDSSLKHKDDLNNLKAEEINLSFIKSLLSKCSLIDSLEHDEIRELIRGLTEEIRWDGETKDLEIDTVGSRDSKKRKKLMEPVDEKILCLSDSGT

SEQ ID NO: 38747 - DNA, 50 bp, Clostridium botulinum
  source 1..50: mol_type = genomic DNA
tattgtgtttgagtgacagcggaacatgcatgcgacactcaaatgcaata

SEQ ID NO: 38748 - DNA, 40 bp, Clostridium botulinum
  source 1..40: mol_type = genomic DNA
cattgatttagcaactggacaaggtgccgacaaagttatg

SEQ ID NO: 38749 - DNA, 50 bp, Clostridium botulinum
  source 1..50: mol_type = genomic DNA
tattgtgtttgagtgacagcggaatctgcatgcgacactcaaatgcaata

SEQ ID NO: 38750 - DNA, 40 bp, Clostridium botulinum
  source 1..40: mol_type = genomic DNA
cattgattgagcaactccatcaattgccgactaattggta

SEQ ID NO: 38751 - protein, 577 aa, Clostridium botulinum
MPTNQNEVKIMKVAIYSRKSTFTGKGDSVENQIQMCKDYMQNLRNRSNEKYEFLIYEDEGFSGGNTNRPQFKKLLKDIKEKKFKILICYRLDRISRNVSDFSNILETLQMYDIDFISIKEEFDTSTPMGRAMIYIASVFAQFERETIAERVRDNMIELAKSGRWLGGTPPLGYESKTVKYMDENLNERSLTKLSENQEELNLVKLIFDKYLELKSLSNLEAYMLANYYKTRRGSNFDKTSLKRILTNTVYVKSSDEIFSYLAEQNITVVGTPDNVHGILTYNKLKSNYTRDGNFSRSFRDTKDWIAAVSKHKGIIEPKDWLMVQSIREVNKDKFVVSSRSHNALLTGIIRCKKCGSKLRIVHGVVSKKTGKRPFYYTCSLKKDSKGSRCNNKNGKVELIDKIVVNAIKELGENKLNLINELEKQLKEKSKEFHEINEKENIDHLIEQKKKQVDNLLDKISLDPDLSDLIIPKLKDLKNELKELTDSSLKHKDDLNNLKAEEINLSFIKSLLNKCSLIDSLEHDEIRELIRGLTEEIRWDGETKDLEIDTVGSRDSNKRKKLMEPVDEKILCLSDSGT

SEQ ID NO: 38752 - DNA, 50 bp, Clostridium botulinum
  source 1..50: mol_type = genomic DNA
tattgtgtttgagtgacagcggaacatccgtacgacactcaaatgcaata

SEQ ID NO: 38753 - DNA, 40 bp, Clostridium botulinum; identical to SEQ ID NO: 38748
  source 1..40: mol_type = genomic DNA

SEQ ID NO: 38754 - DNA, 50 bp, Clostridium botulinum
  source 1..50: mol_type = genomic DNA
tattgtgtttgagtgacagcggaatctccgtacgacactcaaatgcaata

SEQ ID NO: 38755 - DNA, 40 bp, Clostridium botulinum; identical to SEQ ID NO: 38750
  source 1..40: mol_type = genomic DNA

SEQ ID NO: 38756 - protein, 567 aa, Clostridium botulinum
MKVAIYSRKSTFTGKGDSVENQIQMCKDYMQNFKNKSNENYEFLIYEDEGFSGGNTNRPQFKKLLKDIKSKKFKILICYRLDRISRNVSDFSNILETLQMYDIDFISIKEEFDTGTPMGRAMIYIASVFAQFERETIAERVRDNMIELAKSGRWLGGTPPLGYESKTVKYMDENLNERSLTKLSENQEELNLVKLIFDKYLELKSLSNLEAYMLANYYKTRRGSNFDKTSLKRILTNTVYVKSSDEIFSYLAEQNITVVGTPDNVHGILTYNKLKSNYTRDGNFSRSFRDTKDWIAAVSKHKGIIEPKDWLMVQSIREVNKDKFVVSSRSHNALLTGIIRCKKCGSKLRIVHGVVSKKTGKRHFYYTCSLKKDSKGSRCNNKNGKVELIDKIVVNAIKELGENKLNLINKLEKQLKETSKEFHEVNEKENIDHLIEQKKKQVDNLLDKISLDPDLSDLIIPKLKDLKNELKELTDSSLKHKDDLNNLKAEEINLSFIKSLLNKCSLIDSLEHDEIRELIRGLTEEIRWDGETKDLEIDTVGSSDSKKRRELMEPVDEKILCLSDSGT

SEQ ID NO: 38757 - DNA, 50 bp, Clostridium botulinum
  source 1..50: mol_type = genomic DNA
tattgtgtttgagtgacagcggaacatccgtacaacactcaaatgcaata

SEQ ID NO: 38758 - DNA, 40 bp, Clostridium botulinum; identical to SEQ ID NO: 38748
  source 1..40: mol_type = genomic DNA

SEQ ID NO: 38759 - DNA, 50 bp, Clostridium botulinum
  source 1..50: mol_type = genomic DNA
tattgtgtttgagtgacagcggaatctccgtacaacactcaaatgcaata

SEQ ID NO: 38760 - DNA, 40 bp, Clostridium botulinum; identical to SEQ ID NO: 38750
  source 1..40: mol_type = genomic DNA

SEQ ID NO: 38761 - protein, 525 aa, Streptomyces hirsutus
MTATKTAPEWTVEELAELADLQARNDALPEDAPRGLLSVRLSILTQDTTSPARQELDLRRHAIRESVRVVGVARDLGVSATKKAPWERKELGDWLNNRIPEFDLILFWKLDRFIRRISDLHEVIKWCDKFGKNLISLNDTLDLSSPMAQAMVTFVAAVAEIEAANTKTRVSSHWEYTKQQDQWRIGKPSYGYKTARVDGKLRLVQDPKQARAVRYMHRAAMRGVPANRIAKVLDRAKVPTYSNRKWNNQQVIRILRNPAVKGIRTEGGTKATTYKSTPVLDKQGQEIRVTDEPILTDKEFESVQAALATRSKNKRHHEKNRRPTRFLGVMKHQCGRNVNETNNYKTLSTGEVKEYRYLRCPDCRKPGFVTPDPEHVYSALAQAAFEALGDFEVIRREYARGDENRRERKRLEESIAYYMSGLEPGGKFHKAGFIREKAESTLDALMNNLTKIDPDSTKDRWIYESTGMTYRQHWEAGGVEAMEKDLLSAGITFELGKQDDGELLGQLIIPHDVKKRLIRMDSNWS

SEQ ID NO: 38762 - DNA, 50 bp, Streptomyces hirsutus
  source 1..50: mol_type = genomic DNA
cccacgaccgggttggactctgacacgaactaccgaagaacgttccagaa

SEQ ID NO: 38763 - DNA, 40 bp, Streptomyces hirsutus
  source 1..40: mol_type = genomic DNA
gtaggcgtaggccgggtcgacgaactgcacgaagaaggag

SEQ ID NO: 38764 - DNA, 50 bp, Streptomyces hirsutus
  source 1..50: mol_type = genomic DNA
cccacgaccgggttggactctgacaagaactaccgaagaacgttccagaa

SEQ ID NO: 38765 - DNA, 40 bp, Streptomyces hirsutus
  source 1..40: mol_type = genomic DNA
gttggcgaagcccgggccgaagaggcgcaggaggaaggtg

SEQ ID NO: 38766 - protein, 488 aa, Geotoga petraea
MKYAAAYARVSTKEQSILSIEGQFEKIETYARNNKIQVVKKYYDKESGTSESRENFDKLLEDAYSKKFSIILVEKIDRFSRFSKTRAEMIIEELEKEGIFVIAVDQPFDVGSPYGRFMRSILLSQSKLEAEVTQERTTQRMRDIAKHGYWMGGKPPYGYYIDSTKDSEGRKRSVLKIKRDEAKVVREIFKLFNQGWGYKKITEYLNNHLEFAKPRSKKGLWNTSTVHDMLKNEKYVGTYVYGKGYKKRNHVEREDAIKIPGVVPAIIKKEEWELAKSKVALGGQRTRTVKTYILRGYLMCGECGAKMSGTSGKYICSAYANKQHDVYVSVSQNKIEKIVIDYILKQIERFTDQDYQEMAELYKYLRKIKDKSKNEDINKLKEALSKIQNKIKNIVGIISQGELNRSLLQELDEESKRLEVERDNIVSELNYINSKAGITITAEQIKEKYEDMKVKLNSENWLHRQDVISDVIDKVIYYKSGLYEIKMK

SEQ ID NO: 38767 - DNA, 50 bp, Geotoga petraea
  source 1..50: mol_type = genomic DNA
taggttattatctctggtagccccacgggactaccagctttattgataaa

SEQ ID NO: 38768 - DNA, 40 bp, Geotoga petraea
  source 1..40: mol_type = genomic DNA
ttttctttatggcagccccacggggaatcgaaccccgact

SEQ ID NO: 38769 - DNA, 50 bp, Geotoga petraea
  source 1..50: mol_type = genomic DNA
taggttattatctctggtagccccgggggactaccagctttattgataaa

SEQ ID NO: 38770 - DNA, 40 bp, Geotoga petraea
  source 1..40: mol_type = genomic DNA
tcttgtttaaagaagccccgggagggatagaactcagact

SEQ ID NO: 38771 - protein, 599 aa, Eubacterium rectale
MNTAVNEYNYRFKLTDYSLFDRNRARKVAIYGRVSTEHEAQLSALENQLQWYDDQVKYHPNWTVCERYIDEGITGTQAKKRPAFLKMIEDAKQGKFDLIVTREVCRFARNVVDTLVVTRELKGIGVEVFFIDDNIWTMDGDGELRLSLMATLAQEESRKTSERVKAGQKISRDNGVLYGNGNILGYDRVGDTYVINEEQAETVRMIYDLYLQGYGSMKIAKILTERKRKTASGLIKWSVSNIMRAIKNATYTGTKCYNKSRSNNFLEQKRINNLDMSTYEYVEGDFPSIISQEIWDKAQAIRESRVKPVCVSAGKNTHSKRDSRDIWVNKLRCSCGSSYRKNKWHTKLDGKTSYGYQCYNQLNNGIKRKRAEIGLDTEGYCDSRMITDWKLDFMAKALLEHLWTERKESVLIALDLIKYYYKEEKSNETQSDTVTIQAKLDKANSRLTNLIAMRADGEISKDEYQAMRSPVDEEIKKLQKALDEIPQEKSNPKGLDIEGIRSTLNSFIDFSGSTISHDVVNQFVYLITPTSDTTFDWYVNLNGTADVKATFTAEGRKKNCIIKLEEIEKISSVHREKNEDNAHFIKNPHIFTYLHRLLS

SEQ ID NO: 38772 - DNA, 50 bp, Eubacterium rectale; identical to SEQ ID NO: 36102
  source 1..50: mol_type = genomic DNA

SEQ ID NO: 38773 - DNA, 40 bp, Eubacterium rectale
  source 1..40: mol_type = genomic DNA
cgctcgtcttgctgcagcacaggctgctatcgctgagcag

SEQ ID NO: 38774 - DNA, 50 bp, Eubacterium rectale
  source 1..50: mol_type = genomic DNA
cccccatatttttacctatctgcagtggctgctattgcaaataggtagga

SEQ ID NO: 38775 - DNA, 40 bp, Eubacterium rectale
  source 1..40: mol_type = genomic DNA
ggctcttcctgctgcgccagtgcctgcgctcgctgggcgg

SEQ ID NO: 38776 - protein, 498 aa, Geobacillus thermoleovorans
MKAIYARVSTEESAQKGYSIAHQIDEAKKKAGTDQVLIYTDEGYSGEFLERPGLEKLRDDVRKGLIEAVIVYDPDRLARNLMHQLLLDDELRKNNVELIFVNGEYENTPEGKLFFSLRGAIAEFEKAKIRERTMAGRLRKAKEGKIVKDDKIYGYDYDKQTGQLVINEEEAEIVRFIFDSFIRQDRFKGINGIAHYLTEKKVKTKTGKTVWHRQVVRQILMNETYMGKRPQNRWNTEGMIANRYRKDQKVPMTLRPKEEWIYVDVPAIVTEEQFKRAQMLLEQSRRRYAKTTKHKYLLSGLLRCSQCGNTMTGRYTKNWGKYYREYTDIKNTAGAKHRGCGMTVRADEIEKVVWSHLMDIFNNPDRLSDFQPERTDGNFEKAELDRLEKEIERARKGRKRLLSLVAMSDDEIDLEEIKQEIRHLQQREKDLTEQYTQLEQQLRALQDKKPSEHILREAMDFFTRHKDELSFETKQAIVRKVIKEIRVLDKDDIEIVLF

SEQ ID NO: 38777 - DNA, 50 bp, Geobacillus thermoleovorans
  source 1..50: mol_type = genomic DNA
ccgcacactaatgacataaaaaacgaaattctaatgtctttagtgtgcgg

SEQ ID NO: 38778 - DNA, 40 bp, Geobacillus thermoleovorans
  source 1..40: mol_type = genomic DNA
ggctcgatgtatcgagaacgaaattctgatgcacctgcgt

SEQ ID NO: 38779 - DNA, 50 bp, Geobacillus thermoleovorans
  source 1..50: mol_type = genomic DNA
ccgcacactaatgacataaaaaacggaattctaatgtctttagtgtgcgg

SEQ ID NO: 38780 - DNA, 40 bp, Geobacillus thermoleovorans
  source 1..40: mol_type = genomic DNA
atctcgatgtttccagaaaggaataattactcacctgcgt

SEQ ID NO: 38781 - protein, 592 aa, Tritonibacter mobilis
MHLLDGNMSDKPLAYSYLRISTDNQRHGSGIERQMKAGAAWAEANGYELAETISDIGLSAYTSTHAKKGGFGRFLAAIETGQVPAGSILIVESLDRLSRAKVTEAFTQLVGLLKHGIKIVTLVDKQVYTESSLNENFGQLFMSLGVLLRANDESETKSKRGKAAWNHRRQNAATKKITKNAPAWLELSEDRSEFVIKPDRAKTVQKIFELAAAGQGAYSITKYLNANLSQHPGFGHSGNWADSYINKILNSEAVIGELQSYSGTGKNRVKVGDPIPNYYPRVISDELYHLVQAGIKERKTGAAGRKGDYFSNLFSGLLECGNCGGTIFMRNKGKEPRGYRFLRCSNSLKGNACNCPAWRYDEFESQFINFVKDISFAEVFSGKSADTQMVELRGRKAVELDKIAQAEQKYSALVEQFTDANLPEMLKESLIKKSVELENEIVAAKEAVETIDAELTKLSTSNVEADQTEFLESYEQLLSGDKDKLREVRFAMHNILRRNIDRISVHNGTYFEPWEEIPASLRAELADKGIISQNDIEAYLSKPHGKRLRDKHDRHFVVHFKNGARRRVGAEYSLLDVSKSDLALTEKFEGKI

SEQ ID NO: 38782 - DNA, 50 bp, Tritonibacter mobilis
  source 1..50: mol_type = genomic DNA
ggtattcaagttgaccacgggttcgagataccatatataaattgcatacc

SEQ ID NO: 38783 - DNA, 40 bp, Tritonibacter mobilis
  source 1..40: mol_type = genomic DNA
gctgggccagaagggatttgaccaagcacgctggcctgct

SEQ ID NO: 38784 - DNA, 50 bp, Tritonibacter mobilis; identical to SEQ ID NO: 38782
  source 1..50: mol_type = genomic DNA

SEQ ID NO: 38785 - DNA, 40 bp, Tritonibacter mobilis
  source 1..40: mol_type = genomic DNA
gcttgcccaaaaggaattagaccagtctggctggcttgct

SEQ ID NO: 38786 - protein, 535 aa, Thalassospira xiamenensis
MRTAIYARYSSDLQDERSIDDQVALCRDAMLKRFGGIEAGIYADYAISGAHMANRPQINQLVADAKQGKFDAVLAEDLDRLSRDQEHIAAIHKQLTYHKVKILTVADGEINEMHIGLKGTMSAMFLKNLALKIKRGTTARAKAGSNPGGRCYGYDTVHEIGADGKAIRGKRRINPDQAKVVRRIFQQFASNISPRTIAHELNEDGIPGPTGGQWTASTINGNKARHYGILFNELYIGFQVYNRVQMVKHPDTGNRLSQPNPPDQWIVTEIPELAILDRELWDAAQARKAAISELYTVAKKRRPKHPLSGLVRCGMCGGAFTITNRTAMACNTRRERGTCDNAHRIKMEDLEKRVFQGLRDKLLTPDAIDAAITEYHAERARLRKLARANLQTYTRKRTTLRSQIENMVNAIANRPDSSALVNKLAELETELADVERKVAEADDSPVIEIHPNALEDYKRAVTKLAETIRTAKEPHRAEAISVIRDLIDHIEIHPTEKKHETRVEVLGVLEAIKNLAGLPTNEVPAECTVKVVAEE

SEQ ID NO: 38787 - DNA, 50 bp, Thalassospira xiamenensis
  source 1..50: mol_type = genomic DNA
atgcactgtaaaggtggtagccgaggagcgaaaccaccaatacagtgcat

SEQ ID NO: 38788 - DNA, 40 bp, Thalassospira xiamenensis
  source 1..40: mol_type = genomic DNA
ttttttaattggtagccgaggagggacttgaacccccgac

SEQ ID NO: 38789 - DNA, 50 bp, Thalassospira xiamenensis; identical to SEQ ID NO: 38787
  source 1..50: mol_type = genomic DNA

SEQ ID NO: 38790 - DNA, 40 bp, Thalassospira xiamenensis
  source 1..40: mol_type = genomic DNA
gttttcactacgttggccaggatggtcttgaacccccgac

SEQ ID NO: 38791 - protein, 468 aa, Kocuria rosea
MPTAVIYARISQDRAGAGLGVDRQTEDCRALAARLGWDVATVFTDNDVSAYSGRRRPAYEDMLALLETGTVHGVLAWHTDRLHRSPRELERYIDLTERHGVVTHTVKAGELDLSTPSGRAIARTLGAWARYESEHKSERVRRAMHQGAQAGKFLGGAVPFGWTIINGTPVIHDTEAAEVRAATRAVLAGRSLGSIIRDLNDRGITTGTGRPWTYATLRQLLLRPRNAGLAEWHGEIVGDSQFPAIVTRDEWEGVRNHVTNPARRRSQSNRIRHLLAGLAVCGVCGEPMKSATAGNRDGTRRTVYRCKAGGIGHPVRTAAPIDELVTETIIGVLSRPDAAAALATGTGADVTALRADDMALRARLEHAAEQFADGAITGGQLATITARIQERLRAVAAELAAAQPSPAVADMLAGDNVRAAWEAADVETRRAVVDALAVVTIDSTGRAHGKEFDPATVRITAKGATDHA

SEQ ID NO: 38792 - DNA, 50 bp, Kocuria rosea
  source 1..50: mol_type = genomic DNA
tagcgtcttagaacgtaacccgggaggcctgacataggcgaaagacgcta

SEQ ID NO: 38793 - DNA, 40 bp, Kocuria rosea
  source 1..40: mol_type = genomic DNA
caggctgcacatccccgggagtccgctgttgagcgcgatg

SEQ ID NO: 38794 - DNA, 50 bp, Kocuria rosea
  source 1..50: mol_type = genomic DNA
tagcgtcttagaacgtaacccgggaagcctgacataggcgaaagacgcta

SEQ ID NO: 38795 - DNA, 40 bp, Kocuria rosea
  source 1..40: mol_type = genomic DNA
ttctcagcaaatccctgggaatcagctgttgagctagatg

SEQ ID NO: 38796 - protein, 496 aa, Rathayibacter festucae
MFSNTDMKDLIRPTIEQPRRTAAIYVRISKDRVGAGLGVERQENDCRKLAEREGYEVVTVFSDNDISAYSGKKRPGYQALLAAMKSGAIQAVFAWHTDRVHRRPTELEPYIEASDQFNIPTFTVQAGPLRLDSPSGRMGARIHGAVASYEVEIGIERQKAAKLQAAENGEWSGGQRPFGWLAGAMQVDEREAAVVREIIDRFIAGTSWRTIALDLNARGIRTQHDKGWNALKVRNIAIRPRNVGLRDHNGTAQYEAKWEALVDQDTWQRLQTAIVMSRNHHTQRGPFRKHLLKGFAYCGRCGNQMNSFSKQQRDGSYKATYRCRAMDDEKGHIGCGAVSRLGAPVEDLVKDAVFFRLESDNLGRLVSASSTETPKLRQLLADRHAQEVRLSEIVSLYGSGDLTFEEYKAAKSSAASRLDELSRRINAATASSAYANIPIGSSLSDAWDGADLLWRRELLDLIVDRVWIDPVPRGESLTRYKSWTFNPVHVRIDWKV

SEQ ID NO: 38797 - DNA, 50 bp, Rathayibacter festucae
  source 1..50: mol_type = genomic DNA
ggtgtgcttggctacttgttacgtcgtcgaatgatcttgacgactccaca

SEQ ID NO: 38798 - DNA, 40 bp, Rathayibacter festucae
  source 1..40: mol_type = genomic DNA
gcggagaactccggcgcctcgtccaggaagaggaccccgc

SEQ ID NO: 38799 - DNA, 50 bp, Rathayibacter festucae
  source 1..50: mol_type = genomic DNA
ggtgtgcttggctacttgttacgtcatcgaatgatcttgacgactccaca

SEQ ID NO: 38800 - DNA, 40 bp, Rathayibacter festucae
  source 1..40: mol_type = genomic DNA
gcggcggattccggctcctcacgcaggaagagctccccag

SEQ ID NO: 38801 - protein, 460 aa, Staphylococcus lugdunensis
MKVAIYTRVSSAEQANEGYSIHEQKKKLISYCEIHDWNEYKVFTDAGISGGSMKRPALQNLMKQLSYFDLVLVYKLDRLTRNVRDLLDMLEEFEQYNVSFKSATEVFDTTSAIGKLFITMVGAMAEWERETIRERSLFGSRAAVREGNYIREAPFCYDNIEGKLHPNEHAKVIDLIVSMFKKGISANEIARRLNSSKVYVPKKKSWNRNSLIRLMRSPVLRGHTKYGDMLIENTHEPVLSKHDYNAINDAISSKTHKSKVKHHAIFRGALVCPQCNRRLHLYAGTVKDRKGYKYDVRRYKCETCSKNKDVKNVSFNESEVENKFINLLKSYELNKFHIRKVEPVKKIEYDIDKINKQKINYTRSWSLGYIEDDEYFELMEEINATKKMIEEQTTENKQSVSKEQIQSINNFILKGWEELTIKDKEELILSTVDKIEFNFIPKDKKHKTNTLDINNIHFKF

SEQ ID NO: 38802 - DNA, 50 bp, Staphylococcus lugdunensis
  source 1..50: mol_type = genomic DNA
aatagcagttgtgtcactatttaggtctatcctgtgacacaactaacata

SEQ ID NO: 38803 - DNA, 40 bp, Staphylococcus lugdunensis
  source 1..40: mol_type = genomic DNA
cataaatggtacaactaatgtggcacctgtaccacccata

SEQ ID NO: 38804 - DNA, 50 bp, Staphylococcus lugdunensis
  source 1..50: mol_type = genomic DNA
aatagcagttgtgtcactatttagtcctatcctgtgacacaactaacata

SEQ ID NO: 38805 - DNA, 40 bp, Staphylococcus lugdunensis
  source 1..40: mol_type = genomic DNA
caaaaatcttacaagtatttcggcatcttaaccaacccta

SEQ ID NO: 38806 - protein, 460 aa, Staphylococcus lugdunensis
MKVAIYTRVSSAEQANEGYSIHEQKKKLISYCEIHDWNEYKVFTDAGISGGSMKRPALQNLMKQLSYFDLVLVYKLDRLTRNVRDLLDMLEEFEQYNVSFKSATEVFDTTSAIGKLFITMVGAMAEWERETIRERSLFGSRAAVREGNYIREAPFCYDNIEGKLHPNEHAKVIDLIVSMFKKGISANEIARRLNSSKVYVPKKKSWNRNSLIRLMRSPVLRGHTKYGDMLIENTHEPVLSKHDYNAINDAISSKTHKSKVKHHAIFRGALVCPQCNRRLHLYAGTVKDRKGYKYDVRRYKCETCSKNKDVKNVSFNEREVENKFINLLKSYELNKFHIRKVEPVKKIEYDIDKINKQKINYTRSWSLGYIEDDEYFELMEEINATKKMIEEQTTENKQSVSKEQIQSINNFILKGWEELTIKDKEELILSTVDKIEFNFIPKDKKHKTNTLDINNIHFKF

SEQ ID NO: 38807 - DNA, 50 bp, Staphylococcus lugdunensis; identical to SEQ ID NO: 38802
  source 1..50: mol_type = genomic DNA

SEQ ID NO: 38808 - DNA, 40 bp, Staphylococcus lugdunensis; identical to SEQ ID NO: 38803
  source 1..40: mol_type = genomic DNA

SEQ ID NO: 38809 - DNA, 50 bp, Staphylococcus lugdunensis; identical to SEQ ID NO: 38804
  source 1..50: mol_type = genomic DNA

SEQ ID NO: 38810 - DNA, 40 bp, Staphylococcus lugdunensis; identical to SEQ ID NO: 38805
  source 1..40: mol_type = genomic DNA

SEQ ID NO: 38811 - protein, 434 aa, Streptomyces koyangensis
MADAIEAARDPGVRVIVVGYHPSRLWRRRVERAQAIEDLRLSGCWVAFESGGSFNMAKASDRSQLANLGESDTAESEVKSERVARAALERAQEGRANGAVAYGWRRQYEYDARGQVSGFHDVEDPVQAEVVRDIVTRLLAGASVIGITADLNERGVPAPGAGMTLKRRAVGQNADGSLWNKTSVKKLALRPANVGIRVHQDVEYRAAWPALITDEQYAQLRNLFAERAGVRALPGARKHLLTWGEIATCGPCGAVLRVARRGNAKYGRKQLTYVCDAKGCVGRNVDALNGYVARVVVGLLSRPEAADVFRGDDSAALAALERAEGLKARQEAAADDYADGVITRDQLRRITGKLAKQITDAQAEARRLRPAFDLDAFDGLVGPRSAETWEALEVPQQRRVLDGLGLRLKVNPVARRGPGFDESTVALRWARTEG

SEQ ID NO: 38812 - DNA, 50 bp, Streptomyces koyangensis
  source 1..50: mol_type = genomic DNA
gttgtcctgccgggaccgcccgggaagccctagggttctctgccgtgaac

SEQ ID NO: 38813 - DNA, 40 bp, Streptomyces koyangensis
  source 1..40: mol_type = genomic DNA
gttccccaccccgccggggaagaggcagtccccggtgaag

SEQ ID NO: 38814 - DNA, 50 bp, Streptomyces koyangensis; identical to SEQ ID NO: 38812
  source 1..50: mol_type = genomic DNA

SEQ ID NO: 38815 - DNA, 40 bp, Streptomyces koyangensis
  source 1..40: mol_type = genomic DNA
ggtccccaggcagccttggaaggagcagtgcccggtgagg

SEQ ID NO: 38816 - protein, 472 aa, Streptomyces chryseus
MNDLRTFSKDNDWEIGGEYVENDVSAHSGEERPEYDRLMADAIEAAREPGVRVIVVGYHPSRVWRRRVERAQAIEDLRHAKCWVAFESGGLFNMAKASDRSQLANLGESDTAESEVKSERVARAALERAQEGRANGPVAYGWRRQYEYDARGQVDGFHDVEDPEQAAVVRDVVTRLLSGASLISITADLNERAVPAPGAGMRLKRRAVGQNADGSLWNKTSVKKLALRPANVGLRVHQGVEYKAAWPALITDEQYAQLRNLFAERAVVRELPGARKHLLTWGEVATCGPCGSVLRVALKGNATRGRKQPTYVCDASGCVGRNEEALDKYVGTVVVKLLSKPAAADVFRGDDSAALAALERAEGLKARQEAAADDYADGIITREQLRRITAKLAKQITDAQNEARRLRPAFDLDAFKGLVGPGSGEAWNALLVPQKRRVLDGLGLRLKVYPVARRGPGFDKTTIGLQWAGVGA

SEQ ID NO: 38817 - DNA, 50 bp, Streptomyces chryseus
  source 1..50: mol_type = genomic DNA
gttgtccggccaggaccgcccgggaagccctagggtcctctcctgtgaac

SEQ ID NO: 38818 - DNA, 40 bp, Streptomyces chryseus
  source 1..40: mol_type = genomic DNA
gttgcccacgccgcccgggaagaggcagtccccggtgaag

SEQ ID NO: 38819 - DNA, 50 bp, Streptomyces chryseus; identical to SEQ ID NO: 38817
  source 1..50: mol_type = genomic DNA

SEQ ID NO: 38820 - DNA, 40 bp, Streptomyces chryseus; identical to SEQ ID NO: 38815
  source 1..40: mol_type = genomic DNA

SEQ ID NO: 38821 - protein, 446 aa, Mycobacterium scrofulaceum
MDAVIYTRVSRDSAGGRSVEDQERECRQECERNDWSVRAVYCDNSIGASRYSGDRPEWRQLKKDLRKGDVLVVWEASRAQRDLQEFVELRNLCAELSVPLSYAGRVLDLTLGDDRFAGGLDALVAEYESERIRTRVLRGKRASAADGRPMSRPPWGFLATREIDAQGRSRPQWELDPLEAPRVREAVERMLAGESQYSVLAWLKSTDGYAPTTPTTLRRALLNPALAGLRQHQGEVFGPATWPGIITKEQHEQLKSRDRRMRAMFGFNSQPGPEPKYLLSGIAKCGVCGEGLRYRAKQGRKPYYACRKGHVARLASLLDKAVETEIFKRLNGIDPADYETDNIQDSALIAEIEELERQLVEWEAEAMAGRVSPGAFGRAERQLTERIESTRAKIEAPSELELDPTQWPALTMAERRHIVRSLFEVVVPKLARRVRALPGDVNITPI

SEQ ID NO: 38822 - DNA, 50 bp, Mycobacterium scrofulaceum
  source 1..50: mol_type = genomic DNA
tgctccccatcaacgtccttggcccaggcaaatgtcggattcacggtgct

SEQ ID NO: 38823 - DNA, 40 bp, Mycobacterium scrofulaceum
  source 1..40: mol_type = genomic DNA
ggcgccggtgtcgtgcgcccacgccagcacgacgggcgcg

SEQ ID NO: 38824 - DNA, 50 bp, Mycobacterium scrofulaceum
  source 1..50: mol_type = genomic DNA
tgctccccatcaacgtccttggccgcggcaaatgtcggattcacggtgct

SEQ ID NO: 38825 - DNA, 40 bp, Mycobacterium scrofulaceum
  source 1..40: mol_type = genomic DNA
ggcggcggggtcaggcgcggcgtcccgcacaatgggcgcg

SEQ ID NO: 38826 - protein, 541 aa, Klebsiella oxytoca; identical to SEQ ID NO: 26426

SEQ ID NO: 38827 - DNA, 50 bp, Klebsiella oxytoca
  source 1..50: mol_type = genomic DNA
aagtcattagagagttgtaattagcactacacatctcttatgataaactc

SEQ ID NO: 38828 - DNA, 40 bp, Klebsiella oxytoca
  source 1..40: mol_type = genomic DNA
tggtgtgcagcgttgagaggaccaggtgcccggtctgcgc

SEQ ID NO: 38829 - DNA, 50 bp, Klebsiella oxytoca
  source 1..50: mol_type = genomic DNA
aagtcattagagagttgtaattaggcctacacatctcttatgataaactc

SEQ ID NO: 38830 - DNA, 40 bp, Klebsiella oxytoca
  source 1..40: mol_type = genomic DNA
tgggctggagcccggagcggcccaggtgcagggtcggcgc

SEQ ID NO: 38831 - protein, 511 aa, Streptomyces parvus
MDNVETPATTPYDGCGRCLVAVRRLSRKNEASQSPEKQRDQVLAIVEANDAHVIAWADDWEVSGAMDPLKRPQLGPWLTDKKGPYDGIAGAAVDRIGRNVRDVLNTAYTIHERGQILLTADHDGIWDLDDSNQETDLLVKALGAQMEHRATRRRSNDSKTSARNRGRVSAKPSYGYEYFRAIPNGPVSEIRLRSKPAREIRNVARRILADQTGTITPNFEFKRLNRNGVLSPSDELAVIYGREPKGIPWSENSLRRILLSKAALGYLIHDGEPVLDENGRPVKIAPELWDYATHLALVEKLAPKKQNSLLPVGRANQGKALYAGRCFCGVCKNKMRANSQAGYQCTARHRGIAPKCKPSPSVKIEILDEEVTEQFLAEYGQGQVMEKVYDPGTNYAAQIAELQDARARLRKDRQGGMYEDEDDYHWYVTEYNRMGDEIKKLKKLPERPAGVRLIPTGQTIAEQWKAAESIPDKQEILSEFGVRIEIFPRGVKRIVMTAVDPYAELAALEAT

SEQ ID NO: 38832 - DNA, 50 bp, Streptomyces parvus
  source 1..50: mol_type = genomic DNA
gactgtgtttaagcgatgttccctgtggcaaaaatccctagagaacagac

SEQ ID NO: 38833 - DNA, 40 bp, Streptomyces parvus
  source 1..40: mol_type = genomic DNA
caacgtcccgatgttcgtcgtcttcatcatcggcatgttc

SEQ ID NO: 38834 - DNA, 50 bp, Streptomyces parvus
  source 1..50: mol_type = genomic DNA
gactgtgtttaagcgatgttccctatggcaaaaatccctagagaacagac

SEQ ID NO: 38835 - DNA, 40 bp, Streptomyces parvus
  source 1..40: mol_type = genomic DNA
catcatcacgaaggtcttcatcctcatcatcttcatgttg

SEQ ID NO: 38836 - protein, 544 aa, Sinorhizobium meliloti
MVKSLSKTLSEGTFAQASRAALYLRVSTGRQAESDLSIPDQRRQATEFCKARGWEVAAEFVDAGLSGTDENRPELQRLLELATGGGSPFDAVVVHSFSRFARDHFALEHAVRRLRKNGVRLVSITQDLGDDPMSVMVRQVFALFDEYQSKENAKHVLRAMKENARQGFWNGAAAPYGYEVVAAEQRGAKTKKRLAIDPVEAEAVRLMFRLVTEGDGGSGPLGIKAATSLLNERGHRTRGGARWGIGQLHKLLTSPTYKGEYRFNRKVWKTKEDKPETEQVIVPVEPIIEPAVFDALQARLKARNPKAVPPRVVSGPILLTGLATCASCGGGMMLRTGKSGRYRYYTCATCAVQGKAACKGRSVPMDRLDDLVTGKLAETLFTAERVKTILTGLLERQAARSEDHTQRMTGLQNKVADAESRLSRLYQAIESGLVDFGDETLKGRVAALKAERDHAKAALDRAFAELRPEARLTEDKVDAFARLMRENVTQGAIPFRRAYLRSVIDQVEVDDEEIRIHGRRDVLERLVMSGVAAAGVPSFVRKWR

SEQ ID NO: 38837 - DNA, 50 bp, Sinorhizobium meliloti
  source 1..50: mol_type = genomic DNA
tgcccagttttgtacggaagtggcgcgccggacgagatgaaactgggcac

SEQ ID NO: 38838 - DNA, 40 bp, Sinorhizobium meliloti
  source 1..40: mol_type = genomic DNA
ccatttgaaaggaaatggcgcacccgaagagattcgaact

SEQ ID NO: 38839 - DNA, 50 bp, Sinorhizobium meliloti
  source 1..50: mol_type = genomic DNA
tgcccagttttgtacggaagtggcaagccggacgagatgaaactgggcac

SEQ ID NO: 38840 - DNA, 40 bp, Sinorhizobium meliloti
  source 1..40: mol_type = genomic DNA
ccatttgagaggaaactgaaaaccctatgaaaatcaaagt

SEQ ID NO: 38841 - protein, 555 aa, Burkholderia gladioli
MATKARVYSYLRFSDPKQAAGGSIDRQLEYAARWAAERDLLLDASLSLRDEGLSAYHQRHVKQGALGVFLRAVEDGHVPPGSVLVVEGLDRLSRAEPLQAQAQLAQIVNAGITVVTASDGREYNRERLKAQPMDLVYSLLVMIRAHEESDTKSKRVKAAIRRQCQGWIAGTWRTPIRVGKDPQWVREVDGKFELIPERAAAIRVVVDMYKKGHGAVRTLRDLHNSGMTITNAGLPSAPQLYKLLANRMLIGEKAVELDGEQFRLEGYYPPVLSPAEFADLRNAAGERGRRKGKGEIPGVVTGLGITYCGYCGAAVVAQNIMGRRRMANGLPYPGHRRLHCVTYSSSSGCKVSGSCSVAPVERALMLYCSDQMNLTRLLEGDSGVTALHAELAHARASVADLERQIGRVTDALLTDEGQAPAALLKRMREMEADLERERHRCEALELRVHAIATAEAPAAADAWSTLVRGVEELDYDARMQARQLVADTFSRIVVFQSGFYPETDDGLIGLMLIAKRGSTRLLHVDRRTGEWRSADDVEIGGDLPLPLVAGVKPVL

SEQ ID NO: 38842 - DNA, 50 bp, Burkholderia gladioli
  source 1..50: mol_type = genomic DNA
agtatatattacatatcctaagggcagccgagggatactatacctatcct

SEQ ID NO: 38843 - DNA, 40 bp, Burkholderia gladioli
  source 1..40: mol_type = genomic DNA
gtcgaccagggccttcgggcagccgagggatacgaaccct

SEQ ID NO: 38844 - DNA, 50 bp, Burkholderia gladioli
  source 1..50: mol_type = genomic DNA
agtatatattacatatcctaagggaggccgagggatactatacctatcct

SEQ ID NO: 38845 - DNA, 40 bp, Burkholderia gladioli
  source 1..40: mol_type = genomic DNA
ttccaacagggcccaggggaggccgcgggagaggacccct

SEQ ID NO: 38846 - protein, 547 aa, Burkholderia gladioli
MATKARVYSYLRFSDPKQAAGGSIDRQLEYAARWAAERDLLLDASLSLRDEGLSAYHQRHVKQGALGVFLRAVEDGHVPPGSVLIVEGLDRLSRAEPLQAQAQLAQIVNAGITVVTASDGREYNRERLKAQPMDLVYSLLVMIRAHEESDTKSKRVKAAIRRQCQGWIAGTWRAPIRVGKDPQWVREVDGKFELIPERAAAIRVVVDMYKKGHGAVRTLRDLHNSGMTITNAGLPSAPQLYKLLANRMLIGEKAVELDGEQFRLEGYYPPVLSPAEFADLRNAAGERGRRKGKGEIPGVVTGLGITYCGYCGAAVVAQNIMGRRRMANGLPYPGHRRLHCVTYSSSSGCKVSGSCSVAPVERALMLYCSDQMNLTRLLEGDSGVTALHAELAHARAAVADLERQIGRVTDALLTDEGQAPAALLKRMRDMESELDRERHRCEALELRVHAAASAEAPAAADAWSTLARGVEELDYDARMQARQLVADTFSRIVVYQSGFYPETDDGLIGLMLVAKRGSTRLLHVDRRTGEWRSADDVAVADDLPLPS

SEQ ID NO: 38847 - DNA, 50 bp, Burkholderia gladioli
  source 1..50: mol_type = genomic DNA
ggtatattttaacttgctctcgggcagccgagggatactatacctatcct

SEQ ID NO: 38848 - DNA, 40 bp, Burkholderia gladioli; identical to SEQ ID NO: 38843
  source 1..40: mol_type = genomic DNA

SEQ ID NO: 38849 - DNA, 50 bp, Burkholderia gladioli
  source 1..50: mol_type = genomic DNA
ggtatattttaacttgctctcgggaggccgagggatactatacctatcct

SEQ ID NO: 38850 - DNA, 40 bp, Burkholderia gladioli; identical to SEQ ID NO: 38845
  source 1..40: mol_type = genomic DNA

SEQ ID NO: 38851 - protein, 550 aa, Burkholderia gladioli
MATKARVYSYLRFSDPKQAAGGSIDRQLEYAARWAAERDLLLDASLSLRDEGLSAYHQRHVKQGALGVFLRAVEDGHVPPGSVLIVEGLDRLSRAEPLQAQAQLAQIVNAGITVVTASDGREYNRERLKAQPMDLVYSLLVMIRAHEESDTKSKRVKAAIRRQCQGWIAGTWRTPIRVGKDPQWVREVEGKFELIPERAAAIRVVVDMYKKGHGAVRTLRDLHNSGMTITNAGLPSAPQLYKLLANRMLIGEKAVELDGEQFRLEGYYPPVLSPAEFADLRNAAGERGRRKGKGEIPGVVTGLGIAYCGYCGAAVVAQNIMGRRRMANGLPYPGHRRLHCVTYSSSAGCKVSGSCSVAPVERALMLYCSDQMNLTRLLEGDSGVTALHAELAHARAAIADMERQISRVTDALLTDEEQAPAALLKRMRDMEADLERERHRCEALELRVHAAASAEAPAAADAWSTIARGVEELDYDARMQARQLVADTFSRIVVYQSGFYPETDDGMIGLMLVAKRGSTRLLHVDRRTGEWRSADDVAIGGDLPLPRDVY

SEQ ID NO: 38852 - DNA, 50 bp, Burkholderia gladioli
  source 1..50: mol_type = genomic DNA
gatttatattgagtaccctatgggcagccgagcgatactatacctatcct

SEQ ID NO: 38853 - DNA, 40 bp, Burkholderia gladioli; identical to SEQ ID NO: 38843
  source 1..40: mol_type = genomic DNA

SEQ ID NO: 38854 - DNA, 50 bp, Burkholderia gladioli
  source 1..50: mol_type = genomic DNA
gatttatattgagtaccctatgggaggccgagcgatactatacctatcct

SEQ ID NO: 38855 - DNA, 40 bp, Burkholderia gladioli; identical to SEQ ID NO: 38845
  source 1..40: mol_type = genomic DNA

SEQ ID NO: 38856 - protein, 550 aa, Burkholderia gladioli
MATKARVYSYLRFSDPKQAAGGSIDRQLEYAARWAAERDLLLDASLSLRDEGLSAYHQRHVKQGALGVFLRAVEDGHVPSGSVLIVEGLDRLSRAEPLQAQAQLAQIVNAGITVVTASDGREYNRERLKAQPMDLVYSLLVMIRAHEESDTKSKRVKAAIRRQCQGWVAGTWRAPIRVGKDPQWVREVDGKFELIPERAAAIRVVIDMYKKGHGAVRTLRDLHNRGMTITNAGLPSAPQLYKLLANRMLIGEKAVELDGEQFRLEGYYPPVLSPAEFADLRNAAGERGRRKGKGEIPGVVTGLGITYCGYCGAAVVAQNIMGRRRMANGLPYPGHRRLHCVTYSSSAGCKVSGSCSVAPVERALMLYCSDQMNLTRLLEGDSGVTALNAELAHARAAIADMERQISRVTDALLTDEQQAPAALLKRMRDMEADLERERHRCEALELRVHAAASAEAPAAADAWSTLARGVEELDYDARMQARQLVADTFSRIVVYQSGFYPETDDGMIGLMLVAKRGSTRLLHVDRRTGEWRSADDVAIGGDLPLPRDVY

SEQ ID NO: 38857 - DNA, 50 bp, Burkholderia gladioli
  source 1..50: mol_type = genomic DNA
agtatacattgagtatcttacgggcagccgagcgatactatacctatcct

SEQ ID NO: 38858 - DNA, 40 bp, Burkholderia gladioli; identical to SEQ ID NO: 38843
  source 1..40: mol_type = genomic DNA

SEQ ID NO: 38859 - DNA, 50 bp, Burkholderia gladioli
  source 1..50: mol_type = genomic DNA
agtatacattgagtatcttacgggaggccgagcgatactatacctatcct

SEQ ID NO: 38860 - DNA, 40 bp, Burkholderia gladioli; identical to SEQ ID NO: 38845
  source 1..40: mol_type = genomic DNA

SEQ ID NO: 38861 - protein, 537 aa, Microbacterium lacticum
MSTKTRAVYYARVSTDMQVDNTSLPEQKEICEATIKMRGWELVGTYVDEGLSGTDASRPAWRQMLQDARDGKIDAVVVSKLDRFARKAGDAIRETDRLSEMGVDLVLVKEQIDMSTPQGKMMRTMMAGFAEMERDTIVARTAAGQRAKGRAGGWAGSKPPFGWKLEGLKREARPVRDEREREVLRAMYSLFVKERLSTAEVADRLNLMGLRPRQAATWQYQTVRQTATNPTLWTGETEWGAAMTGAYRPHRKVTKMNRDGSPKYGETVRVVLGNPVFTRQEWQALQRAVNRRAGWTPSAPQRQMLTGRLFGQCEFDKHYDGVTTKSRPNPFYICAGKRYRSKEQPRCSCTQIKGPAIDEPVWAELAAMLADPERLERLARQWLELDDDADLNDEAPMVAALRKQEATLERAMGRAKDLYLMADDPAEHRATVERLRGDLAELRERLDGLAAMRSNRAEQAQRITDVAALAERARGRLENASAAIRREVVELLDVRVIVSDIVDGRPQAITIHGVLDPSMFLPAEVSDRKPSEQARSS

SEQ ID NO: 38862 - DNA, 50 bp, Microbacterium lacticum
  source 1..50: mol_type = genomic DNA
ccgcaagccatccgagcaggcgcgctcctccctactcggtgggcttgcat

SEQ ID NO: 38863 - DNA, 40 bp, Microbacterium lacticum
  source 1..40: mol_type = genomic DNA
acgcaaggagatcttgatgctcctcccgctcgtcttcctg

SEQ ID NO: 38864 - DNA, 50 bp, Microbacterium lacticum
  source 1..50: mol_type = genomic DNA
ccgcaagccatccgagcaggcgcgcgcctccctactcggtgggcttgcat

SEQ ID NO: 38865 - DNA, 40 bp, Microbacterium lacticum
  source 1..40: mol_type = genomic DNA
atgaaaggtgatgtggatgcggctgcagatcctcttcctg

SEQ ID NO: 38866 - protein, 567 aa, Streptococcus sp oral taxon 431
MNRTLTISDYRQVDTSKLLDITVVYCRLSQDDGLDGDSNSIINQKNILLDVVAREKLPNPVLFVDDGFSGTNFDRPAISEALRLVENRQVSNFIVKDLSRLGRSYIKVGQLTEITFPSFDVRFIALNDGVDSNKPNETNSIFLPIKSLMDEMYAADTSKKIRAVVLAKAKAGERVTTNPPYGYLKDSNDPKNWIIDPVASEVVKRIFQEAKSGKSLSEISKGLESDKIFKPDRHRIEIGLKPISSSPNVETLPYFWTRETLSAILGREEYLGHTVNLRTRTKSYKDKRKVDNSKEDWLVFKNTHEAIIDQETFDIVQKMRSHKRSNQRYKNRAGHENLFAGLVFCGTCGRKHYFCPQEKNGLNHDHYKCSGYRKPIDGCENPHYIQKSALIEIVSDKLRQTIQECQLDQETFLKKLEQQSQAQLNKDNKRQRQQLQKDKYRSKEIDSIIQKLYEDNLLGKISDERFVKLSQSYEEEQRQLQTSISDLTEKLTKQQEDSLNISKFMARISKYTELPELTVEIVNELIDKIVIHKPTGTKRNRIIQIDIYYNFIGKLNNEKSEPNELAR

SEQ ID NO: 38867 - DNA, 50 bp, Streptococcus sp oral taxon 431
  source 1..50: mol_type = genomic DNA
aaactgctgtgtgtcaggtcagctaaagactggctgacactcagcactct

SEQ ID NO: 38868 - DNA, 40 bp, Streptococcus sp oral taxon 431
  source 1..40: mol_type = genomic DNA
caaagaaaaaaggctgggaaaaccagccattttcacacta

SEQ ID NO: 38869 - DNA, 50 bp, Streptococcus sp oral taxon 431
  source 1..50: mol_type = genomic DNA
aaactgctgtgtgtcaggtcagctttagactggctgacactcagcactct

SEQ ID NO: 38870 - DNA, 40 bp, Streptococcus sp oral taxon 431
  source 1..40: mol_type = genomic DNA
caaagaacaaatgccgtcattagcaccccttttcacacac

SEQ ID NO: 38871 - protein, 517 aa, Eubacterium ventriosum
MSTGIELRAVFYARVSTEEEKQLNALEKQIHENKDVIRDHGWRLVGEYIDEGKTGTTTKRRNDYKRLLKDMTENKFDIVVCKDQDRLQRNTLDWYLFVDNLVTNNLKLFMYLDNKFFKPSEDALITGVKAIIAEEYSRNLSKKLNNSNKRRIERALNGEEVSAMGNGKSLAFKIVNGKWVKDEEEAKLGKKIFELYLEYDSIRKVRDWVNEHGYTNSVGKPFTSESISRILKNEKAKGVIVMGKYHHDFDKKKIVRRSEEELVRIPAPELAYVSEEVFDKVQERLKAKTGNGRGVNAYSDPLSGKIYCGSCGRKLWKHASNGYVNWMCASQVAKGAVECNGTRITTVAIRNIYKKITDNLEVNKEVVKQDIVKWLNELKATLSDTSVNEKIQKDLDKLEGKRAKLLEAYLEDLISKDDYKVKYETIEGQIEEKKKLLVPVEENEDIKAIESVLQNIDDEIDAYVKTLDMEESKVDFLIEHTKRITVLENRDIIIELDLVAGAIIAGKDFLLYVHDTM

SEQ ID NO: 38872 - DNA, 50 bp, Eubacterium ventriosum
  source 1..50: mol_type = genomic DNA
ttctgctatatgttcacgatactatgcactactgtgaacaaatagcagac

SEQ ID NO: 38873 - DNA, 40 bp, Eubacterium ventriosum
  source 1..40: mol_type = genomic DNA
tttatgccacggcaatatttgtagatcaactatggcccag

SEQ ID NO: 38874 - DNA, 50 bp, Eubacterium ventriosum
  source 1..50: mol_type = genomic DNA
ttctgctatatgttcacgatactattcactactgtgaacaaatagcagac

SEQ ID NO: 38875 - DNA, 40 bp, Eubacterium ventriosum
  source 1..40: mol_type = genomic DNA
ttcaagtctccccaatacttttatatcaaatatggtccag

SEQ ID NO: 38876 - protein, 466 aa, Mycobacteroides abscessus
MRAVIYTRISKDRQGEGLGVERQHQDCVRLAESLGWTVVETFSDNDISAFSGKTRPAYDAMLATLEADRAQAVITWHTDRLHRRPMELEGFIELCERKRIDVRTVKAGTLDLSNSAGRMVARMLGAAARNEVERMIERAKSAKRQAALDGRYRGGRRPFGYESDGLRLCEPEAEAVRTGAERVLRGVSLGQVAREWNAAGLRTSLGGKHFDSRQVRKVLLRPRNAGFSLHEGHRVGRGQWTPIFDADTFAALEALLQDPSRGHRKGTERKYQGSGVYLCGKCGEPMSSASQNGSAAKGGWQKTYACGRSRHLSRLIEPVDEYVSEHVIARLAAPDAHRVILGAEADVSTLHAQREGLRSRLDQLSAMFAEGAIDGSQLKRGTADLQTKLSAIDAELAAARSSSAVAWILAEDDVRAAWNSAAPDLRGKVIETLMTVTILPIGRGRRPGGSYFDPAKVKIDWKHGTS

SEQ ID NO: 38877 - DNA, 50 bp, Mycobacteroides abscessus
  source 1..50: mol_type = genomic DNA
aagtgtgacgcacgcaccattgactcgtcatagatacgattgatacagtt

SEQ ID NO: 38878 - DNA, 40 bp, Mycobacteroides abscessus
  source 1..40: mol_type = genomic DNA
caccgcggtgccgtaggactcggcgtaggtgttggcggta

SEQ ID NO: 38879 - DNA, 50 bp, Mycobacteroides abscessus
  source 1..50: mol_type = genomic DNA
aagtgtgacgcacgcaccattgacgggtcatagatacgattgatacagtt

SEQ ID NO: 38880 - DNA, 40 bp, Mycobacteroides abscessus
  source 1..40: mol_type = genomic DNA
ccccgagggcacgtcggacggggcgtagctggtggcgggc

SEQ ID NO: 38881 - protein, 474 aa, Mycobacterium intracellulare
MTNHRISAAIYMRISQDRTGAGLGVDRQEQECRKLAERLGWKVADVYADNDISAYSGKRRPGYEALLSAIRSGAVHGVLAWHPDRLHRSPRELETYIDACDKHGVETHTVQAGHWDLSTPSGRMVARQLGAVARFESEHKGERIRAARQQQASAGEFHGGIRPYGYEADGVTLRPDEAGELAKAIEQIVSGVSLRAVVRDLNSRGIPTATGRNRWTAVALSETIQRPRTAGLSSYKGEIVGKAKWLAIVPEETWRAACAILTDPARRTNGGRGPGVRWLGSGLYVCGVCGEPDLRVSSRSGRVEKRRAYRCRSRERATSGGHISREATALDAFVEAVIVERLSRPGLVRRTISAEDTTDVAALRIEADAIRQRQEQLAEAFAEGAITRAQLAAGTKKLQQRGDAIDTRLAAAGGRSPLDVIAQAEDIPALWGTLNLGQKRAILDYLCTVTVLKVERSRGAGGFNPEGVRFDWKR

SEQ ID NO: 38882 - DNA, 50 bp, Mycobacterium intracellulare
  source 1..50: mol_type = genomic DNA
gggcgtcataactagggtgcggtgaatacagcactctacttatgacacaa

SEQ ID NO: 38883 - DNA, 40 bp, Mycobacterium intracellulare
  source 1..40: mol_type = genomic DNA
cggcggaaccggcgcgggcaagacgactttgctggccgcg

SEQ ID NO: 38884 - DNA, 50 bp, Mycobacterium intracellulare
  source 1..50: mol_type = genomic DNA
gggcgtcataactagggtgcggtgagtacagcactctacttatgacacaa

SEQ ID NO: 38885 - DNA, 40 bp, Mycobacterium intracellulare; identical to SEQ ID NO: 11110
  source 1..40: mol_type = genomic DNA

SEQ ID NO: 38886 - protein, 609 aa, Blautia obeum
MIRAVIYCRCSTEEESQKNALEKQVAEAESSVRQYGWVLVDRYVESRSGTTAKGRNEYKRLFNDLLTDKFDVIVIKSQDRLMRNTKDWYLFVDRLCTEQKKLYMYIENKFYSTDDALITGIKAILAEEYSRELSKKINNAHRNRQRDGGNVMLPGNAYGFKRMPDKSVALVEKEAEIKREMYRLCAAGYGTRTISTIMRNRGIVNRDGKPFTSSYILRMLRNPINKGTAVMGKYHFDFDSKRTIKNPKEKIYIHEDKVPRTVSDELWNAANEQIDKRSVKTKDGEDDIGKNPGKYQLSGKIVCGMCGQPYWRKVHRKHSNHELIYTWACSSYLELGRSDNLRARPNLRKVFLENEKGCDNINIAENEFYAVLEEICSNQYQKNKKKIIEKIMKLLSKSLNNQDGTKEIEKLEREQEDIERKMKFLVDKLIDGVLTDQMYKTKQEELEKKRDQNKKKILELTERTSNTQNIKDRLQEIETRLNDDDLFKKATIDDMLEEVDKIVVYPRYMEIYFSLSSVTGCMDLKIFDGDKKCFRVDYGNRLDYKGRQCDAREVVVDLIRENPRITGKMIAKEIGCSLSGANYKLKVLKKEGRIRFNGAGGKGCWEILE

SEQ ID NO: 38887 - DNA, 50 bp, Blautia obeum
  source 1..50: mol_type = genomic DNA
cgtatccgtatgcctgcacagttaaataaccttgcgtacatacggatata

SEQ ID NO: 38888 - DNA, 40 bp, Blautia obeum
  source 1..40: mol_type = genomic DNA
cagtacccacgtcagcttaaacgtctgggaaccgtagatg

SEQ ID NO: 38889 - DNA, 50 bp, Blautia obeum
  source 1..50: mol_type = genomic DNA
cgtatccgtatgcctgcacagttacataaccttgcgtacatacggatata

SEQ ID NO: 38890 - DNA, 40 bp, Blautia obeum
  source 1..40: mol_type = genomic DNA
cagcagccacgtcagtgcacacgtctggtaacacttggtg

SEQ ID NO: 38891 - protein, 609 aa, Blautia obeum
MIRAVIYCRCSTEEESQKNALEKQVAEAESCVRQYGWVLVDRYVESRSGTTAKGRNEYKRLFNDLLTDKFDVIVIKSQDRLMRNTKDWYLFVDRLCTEQKKLYMYIENKFYSTDDALITGIKAILAEEYSRELSKKINNAHRNRQRDGGNVMLSGNAYGFKRMPDKSVALVEKEAEIKREMYRLCAAGYGTRTISTIMRNRGIVNRDGKPFTSSYILRMLRNPINKGTAVMGKYHFDFDSKRTIKNPKEKIYIHEDKVPRTVSDELWNAANEQIDKRSVKIKDGGDDIGKNPGKYQLSGKIVCGMCGQPYWRKVHRKHSNHELIYTWACSSYLELGRSDNLRARPNLRKVFLENEKGCDNINIAENEFYAVLEEICSNQYQKNKKKIIEKMMKLLSKSLNNQDGIKEIEKLEREQEDIERKMKFLVDKLIDGVLTDQIYRTKQEELEKKRDQNKKKILELTERTSNTQNIKDRLQEIETRLNDDDLFKKATIDDMLEEVDKIVVYPRYMEIYFSLSSVTGCMDLKIFDGDKKCFRVDYGNRLDYKSRQCDAREVVVDLIRENPRITGKMIAKEIGCSLSGANYKLKVLKKEGRIRFNGAGGKGCWKILE

SEQ ID NO: 38892 - DNA, 50 bp, Blautia obeum; identical to SEQ ID NO: 38887
  source 1..50: mol_type = genomic DNA

SEQ ID NO: 38893 - DNA, 40 bp, Blautia obeum; identical to SEQ ID NO: 38888
  source 1..40: mol_type = genomic DNA

SEQ ID NO: 38894 - DNA, 50 bp, Blautia obeum; identical to SEQ ID NO: 38889
  source 1..50: mol_type = genomic DNA

SEQ ID NO: 38895 - DNA, 40 bp, Blautia obeum; identical to SEQ ID NO: 38890
  source 1..40: mol_type = genomic DNA

SEQ ID NO: 38896 - protein, 609 aa, Blautia obeum
MIRAVIYCRCSTEEESQKNALEKQVAEAESSVRQYGWVLVDRYVESRSGTTAKGRNEYKRLFNDLLTDKFDVIVIKSQDRLMRNTKDWYLFVDRLCTEQKKLYMYIENKFYSTDDALITGIKAILAEEYSRELSKKINNAHRNRQRDGGNVMLPGNAYGFKRMPDKSVALVEKEAEIKREMYRLCAAGYGTRTISTIMRNRGIVNRDGKPFTSSYILRMLRNPINKGTAVMGKYHFDFDSKRTIKNPKEKIYIHEDKVPRTVSDELWNAANEQIDKRSVKTKDGEDDIGKNPGKYQPSGKIVCGMCGQPYWRKVHRKHSNHELIYTWACSSYLELGRSDNLRARPNLRKVFLENEKGCDNINIAENEFYAVLEEICSNQYQKNKKKIIEKIMKLLSKSLNNQDGTKEIEKLEREQEDIERKMKFLVDKLIDGVLTDQMYKTKQEELEKKRDQNKKKILELTERTSNTQNIKDRLQEIETRLNDDDLFKKATIDDMLEEVDKIVVYPRYMEIYFSLSSVTGCMDLKIFDGDKKCFRVDYGNRLDYKGRQCDAREVVVDLIRENPRITGKMIAKEIGCSLSGANYKLKVLKKEGRIRFNGAGGKGCWEILE

SEQ ID NO: 38897 - DNA, 50 bp, Blautia obeum; identical to SEQ ID NO: 38887
  source 1..50: mol_type = genomic DNA

SEQ ID NO: 38898 - DNA, 40 bp, Blautia obeum; identical to SEQ ID NO: 38888
  source 1..40: mol_type = genomic DNA

SEQ ID NO: 38899 - DNA, 50 bp, Blautia obeum; identical to SEQ ID NO: 38889
  source 1..50: mol_type = genomic DNA

SEQ ID NO: 38900 - DNA, 40 bp, Blautia obeum; identical to SEQ ID NO: 38890
  source 1..40: mol_type = genomic DNA

SEQ ID NO: 38901 - protein, 562 aa, Nocardia farcinica
MARRNLPNRAHTNEKAVLLLRVSTKKQLDTAIDIDPDGLSIATQRDHGNAKANAMGVEVATEFIEPGYSAKSIDKRPVFRDLLKYLTEHPEVRYVIVYMRSRAFRNRFDAAIIETQLNKMGVRLISAKEDFGEGPHAVAMEGMLDVMNHLMNTLQGLDIQEKMRTKALNGGTLGFAKVGYLNTRVEYEGKQINTITLDPERAPLVRRAFELYATGEYGLEHLEATMADLGLTARARGAIPQRPLSFKLLHRMLKDPYYAGWVSVDDQLRPGRHEPIVSQELFDRVQDVMDMRSRRGQRDRVLQHYLKGDLFCDRCRRHNRTSRLIYTEARGRNGHYYGYFLCRGRQERVCDLPHLPAERVEHAIVDHYATLRLPTSFHSALRELLDEALADEQASVRAMHASLTARLKELDAKEERLVDLAADGTLPQAKIKARLRAIHTDRAKVQVSLTATSAELAVGVDVLKRGLDLLIDPAQLYRTRTDTVRRHLNQAFFQRFYLDVGGVSRDQLHQPFGDLHHAAGTRPACTQPAATPQDPAGQKPKNGLTLTQVLTDPGSSKAAVVE

SEQ ID NO: 38902 - DNA, 50 bp, Nocardia farcinica
  source 1..50: mol_type = genomic DNA
ttcgagtaaggccgctgtcgtggagcttgcgggaaactactcgaaacaag

SEQ ID NO: 38903 - DNA, 40 bp, Nocardia farcinica
  source 1..40: mol_type = genomic DNA
tgaggggccctcgagtggagctgccgggaatcgaacccgg

SEQ ID NO: 38904 - DNA, 50 bp, Nocardia farcinica
  source 1..50: mol_type = genomic DNA
ttcgagtaaggccgctgtcgtggaacttgcgggaaactactcgaaacaag

SEQ ID NO: 38905 - DNA, 40 bp, Nocardia farcinica
  source 1..40: mol_type = genomic DNA
ggccaggcccttgagtgggactgccgggaattgagtccag

SEQ ID NO: 38906 - protein, 497 aa, Streptococcus pneumoniae
MSKIALYIRLSVEDQMKKDESESIINQRYFLNDFIDRNDEFKSFKREEYVDDGYTGTNEKRPSFQRMLEEVKNGKINAIIVKDLSRFMRDYITLGDYLENIFPFLGIRFIAINDGYDSAKEKGNGTDLDIQFKGLLYDFYTKDISQKVKTVTTELKKQGKFLAWSPPFGYMKDPDNKHNIIIDEKTAWIVRKVYDLALTGLASRKIAAVMNEENIPTPNERKKELTNMDYEYNIVSSDTRDAPTWTNGTVVDILSNENYTGTYVFNMQEKSVLNPSSFKFNPKEEWGRVYDHHEAIISREEFDKVQEIKEKNSFLKGKNTDYPWRKHSPLQGFARCPTCNHILGLTQSKFKRPDGSMRIHKYFHCRICKCNNVEHKNSRVDKLEKQVLTLIKEKYGEAEVKPKEKISIKNIEKKIEKLQAKKMADFEKYKLGKMTKAKFVESKNEIDNEFDRLDEKIKLSSNETEVVTDNELTRELMEKYVESVICEGSIVQKIIWK

SEQ ID NO: 38907 - DNA, 50 bp, Streptococcus pneumoniae; identical to SEQ ID NO: 14077
  source 1..50: mol_type = genomic DNA

SEQ ID NO: 38908 - DNA, 40 bp, Streptococcus pneumoniae
  source 1..40: mol_type = genomic DNA
aatggcagaccttgcttgcggaacaggaggcttcttgact

SEQ ID NO: 38909 - DNA, 50 bp, Streptococcus pneumoniae; identical to SEQ ID NO: 36749
  source 1..50: mol_type = genomic DNA

SEQ ID NO: 38910 - DNA, 40 bp, Streptococcus pneumoniae
  source 1..40: mol_type = genomic DNA
gttggcaggccttgcttcctcttcacagggcttcttgagt

SEQ ID NO: 38911 - protein, 497 aa, Streptococcus pneumoniae; identical to SEQ ID NO: 14076

SEQ ID NO: 38912 - DNA, 50 bp, Streptococcus pneumoniae; identical to SEQ ID NO: 14077
  source 1..50: mol_type = genomic DNA

SEQ ID NO: 38913 - DNA, 40 bp, Streptococcus pneumoniae; identical to SEQ ID NO: 38908
  source 1..40: mol_type = genomic DNA

SEQ ID NO: 38914 - DNA, 50 bp, Streptococcus pneumoniae; identical to SEQ ID NO: 36749
  source 1..50: mol_type = genomic DNA

SEQ ID NO: 38915 - DNA, 40 bp, Streptococcus pneumoniae; identical to SEQ ID NO: 38910
  source 1..40: mol_type = genomic DNA

SEQ ID NO: 38916 - protein, 519 aa, Nocardia brasiliensis
MPLNPKDFPDLAPWIYGRNSQDKNKGLSVPQQVRWGQEECARFGWSDPRVTTDTDIGATRHTVKQRPGYKVLVGGLAEPAPEGKHWVLITRSSSRANRQLLDFALLREMCAKLGVYWYSGGQLYDMNNPQDRRILAQEAVDNEYQPEQNRFDSMQQLRQNFLDGKPHGKEAFGYRIVYQRGKAVARVPDEATAPVVREMARRALALESAASIARWLSGAGVQVPSAGMGLPCRVCSVTEGRRVLEAVDRRTCPCDKGWMTLWDHVAVRNVLTSATIAGLRAHTDKATGKTETVVAQWDSIISIEDHERLVALFTDPARSAHNRGAAPRWLLSGIPRCGKCDGGKVRSRSGGSAAKVRVYECERFCVARNAKLVDDLVEETVLRRLEDPALLAALERSDEEAAAAGAEAKALRAAYDRWVAEAIEAELSPMEIKQYKDRKLPAIKAAEARAQAAMPMPHVVAAAGPDARSKWDDEAQTPLQAKRDIIRSLVAITIYPAGKRRGFGGSPGVETIDIAPLVA

SEQ ID NO: 38917 - DNA, 50 bp, Nocardia brasiliensis
  source 1..50: mol_type = genomic DNA
ttaccctggaatggcgcattgatcgtggtgaagttcagttaggggggttt

SEQ ID NO: 38918 - DNA, 40 bp, Nocardia brasiliensis
  source 1..40: mol_type = genomic DNA
attgaacggctggttgatcgtggtgaagtactggatcacc

SEQ ID NO: 38919 - DNA, 50 bp, Nocardia brasiliensis
  source 1..50: mol_type = genomic DNA
ttaccctggaatggcgcattgatcccggtgaagttcagttaggggggttt

SEQ ID NO: 38920 - DNA, 40 bp, Nocardia brasiliensis
  source 1..40: mol_type = genomic DNA
cttcagagggtcgttgatcccagtgaagtactgcatcaga

SEQ ID NO: 38921 - protein, 598 aa, Vibrio alginolyticus
MDEKPRIAHIYSRVSKGTQVKGDGLRRQIEIASKFIEDVNISNSRDGLPVYTLADSPIYDRGLSAYFGLNTDENAGLGAFLKAAENGQVEKGTLLIVEAIDRISRLPVDDARALFARFKKYGIDVAICRFNLIIYHDKSSDLGQDLLITTAIHLAHLESEQKSKRIRARFTHKRLLEKEGGERRTSMSPSWIELSKDKTHFVLIPERARIVRKMVDLKLQGWGAHRITVYLNEQGFPCWNRSNTWYTKIVEKYLKMIQLVGDFQPVEHVHGEKGVRKEPVGDVIKGYYPALITEEEWIRLKASFKRSGGRQTGAFSNLFSYMLYCPTCGSCMSYFKPNRGRIKVRCRKQIDKQGCDQRALNYEEIEPRLIKALAGLDYAKINNNSFASLQKELNTLEAQVAELEASADDIKTQMLEESDPRIISVYVNKLKAIYTEQDKAKARFEKLSTQTSDYDVNTLEQLQLERNEDRERYNGFVRSFVKYVIASDSKLGKPLRIVFKSEAVGEVPVFFNDDKNNKAISDIFTAQKDVNEAAPIRLINMSRVHGNLGKLAAIDTVPVPDDLGDALERIKYLFAVRQAVLQNPEKWQAIADDARLFE

SEQ ID NO: 38922 - DNA, 50 bp, Vibrio alginolyticus
  source 1..50: mol_type = genomic DNA
tgcgatactaatggcaatccaactaatgaagagtgggtgatagcatcgca

SEQ ID NO: 38923 - DNA, 40 bp, Vibrio alginolyticus
  source 1..40: mol_type = genomic DNA
agctcttgttattcctactaacgaggaatttgtgatagcc

SEQ ID NO: 38924 - DNA, 50 bp, Vibrio alginolyticus
  source 1..50: mol_type = genomic DNA
tgcgatactaatggcaatccaacttctgaagagtgggtgatagcatcgca

SEQ ID NO: 38925 - DNA, 40 bp, Vibrio alginolyticus
  source 1..40: mol_type = genomic DNA
agctaaaatttctcctccttccaaggaaattgtgttagcc

SEQ ID NO: 38926 - protein, 598 aa, Vibrio alginolyticus; identical to SEQ ID NO: 9666

SEQ ID NO: 38927 - DNA, 50 bp, Vibrio alginolyticus
  source 1..50: mol_type = genomic DNA
tgcaatactaatagaaatccaactaacgaagagtgggtgatagcatcgca

SEQ ID NO: 38928 - DNA, 40 bp, Vibrio alginolyticus; identical to SEQ ID NO: 38923
  source 1..40: mol_type = genomic DNA

SEQ ID NO: 38929 - DNA, 50 bp, Vibrio alginolyticus
  source 1..50: mol_type = genomic DNA
tgcaatactaatagaaatccaacttccgaagagtgggtgatagcatcgca

SEQ ID NO: 38930 - DNA, 40 bp, Vibrio alginolyticus; identical to SEQ ID NO: 38925
  source 1..40: mol_type = genomic DNA

SEQ ID NO: 38931 - protein, 454 aa, Enterococcus thailandicus
MKSVALYIRVSSDQQVKFGDSLREQEDTLNEYVASQKDMFVHSTYIDDGISGQKLERDEFKRLMNDVKNGAIDLILFTKLDRWFRSLKHYLNVQEVLEKNNVHWIAVSQPYYDTTTAYGRTFINQVMSFAELEAQMTSERMKSVFANKVKMGEVISGSTPLGYSIKDKHLVPNEQAPIAQAVFEYYNHCGNLNQTSKYLLEEFGIPRTMHAIRSMLKNKKYIGEFRENKNYCQPLISHDLFESVNRQLSMNQKENTKNTYLFSGILVCGECGRKMNSGQKSTWGHQRKDGTRIKYPPKSIYTCRYAYQDPKCVNTKTIREHILEKYLLENIDDLISMAINELRAVKAPKTDTRKKQREIEKKLDRLKAAYLNEIISLSEFKNDREKLTRELTSLSDKNIVENNEQRIKALEELLSMNIAENYGGMDMLERRAFWRTFIKTIKFDSQRKITVSFV

SEQ ID NO: 38932 - DNA, 50 bp, Enterococcus thailandicus
  source 1..50: mol_type = genomic DNA
agacctactaacagtaagtgtcagacatgccgtttaccgttagtagtctt

SEQ ID NO: 38933 - DNA, 40 bp, Enterococcus thailandicus
  source 1..40: mol_type = genomic DNA
agacgtgatggaacggcagacatgcaagattgagggtctt

SEQ ID NO: 38934 - DNA, 50 bp, Enterococcus thailandicus
  source 1..50: mol_type = genomic DNA
agacctactaacagtaagtgtcagaaatgccgtttaccgttagtagtctt

SEQ ID NO: 38935 - DNA, 40 bp, Enterococcus thailandicus
  source 1..40: mol_type = genomic DNA
aaatcagatggaaatgcagaaatgcagaaatgagcgtctt

SEQ ID NO: 38936 - protein, 476 aa, Streptococcus gordonii
MNRNKVAIYVRVSTQGQVDEGYSLDEQVDLLTNYCKLKAWTLYDVYVDPGISGKNMHRPEIERLTRDAKHKLFDIVLIYDLKRLGRSQKENIVLVEDVFNKNGIRLVSFTENFDASTPVGKMVFGMLSAYAELDRANIAERMMMGKIGRAKAGKAMSWGMPPFAYDYNKETGNLELDEAKAPIVEMIFSDYLKGASVNQIVQKLNSMDYNGKDHEWKHHAVTVILENPSYCGMTRYIDQIYEANHKPIIDKVTFDLVQIERKKRLSKYHDNDLVGPFQRKYIGSKFCYCGLCGANLKSEKDKRNKHTGIRPISFYCPNTRSRGTNDCTNKRFRQDILEGYILKEVAKLQQQPEKLRVIKPKKDAENESKLDNYKNKIRQNTSKLSKLNELYINDLMPIDELKKRSKTLYDENEFLEKQIEQLSSTTREDELRNKIDTFLAFPDILTADYETQKQAIEIVVSRVEVTKNGIDIFFNF

SEQ ID NO: 38937 - DNA, 50 bp, Streptococcus gordonii
  source 1..50: mol_type = genomic DNA
aaccctgttttgctaccgagtattaaaatacatatcaataaaacaggtaa

SEQ ID NO: 38938 - DNA, 40 bp, Streptococcus gordonii
  source 1..40: mol_type = genomic DNA
accgtcctactccagctttaagatggaagccctgcaggac

SEQ ID NO: 38939 - DNA, 50 bp, Streptococcus gordonii
  source 1..50: mol_type = genomic DNA
aaccctgttttgctaccgagtatttgaatacatatcaataaaacaggtaa

SEQ ID NO: 38940 - DNA, 40 bp, Streptococcus gordonii
  source 1..40: mol_type = genomic DNA
tccttcaacctcccgctcttggatggaagccaagaaggac

SEQ ID NO: 38941 - protein, 634 aa, Vibrio parahaemolyticus; identical to SEQ ID NO: 19166

SEQ ID NO: 38942 - DNA, 50 bp, Vibrio parahaemolyticus
  source 1..50: mol_type = genomic DNA
gtgatgagtgttcgtccaccgtctgcatattgaacactgatactttttaa

SEQ ID NO: 38943 - DNA, 40 bp, Vibrio parahaemolyticus
  source 1..40: mol_type = genomic DNA
ataaccaaaagagccgtctgtccaatggatgtcttgcata

SEQ ID NO: 38944 - DNA, 50 bp, Vibrio parahaemolyticus
  source 1..50: mol_type = genomic DNA
gtgatgagtgttcgtccaccgtctatatattgaacactgatactttttaa

SEQ ID NO: 38945 - DNA, 40 bp, Vibrio parahaemolyticus
  source 1..40: mol_type = genomic DNA
ctaaccaaaacagtcctctatcccagggatgtcatccctt

SEQ ID NO: 38946 - protein, 559 aa, Pseudomonas monteilii
MPAAIPYIRFSSARQTTGSSAERQQQMVTQWLTQHSEYTLSDLTYKDLGKSGYHGDHIEEGGGFAMLLVAVKAGDIKAGDVVLVEAIDRAGRLHPLKMLNEVVTPILEAGVSIITLDDGVTYTFESAASGHLFLLVAKIQAAHNYSKQLSERTKASYAIRREQAKATGKVKRNTPIWLNSDGEPNETVVPYIKQVFELYVSGVGKNAIANRLRASGVEELATCSGPTVESWLRNQAVIGNWEYGKDDPNKTTEIIRGVYPRVVSDELFLLAQQRKKEAATKPRERTSKHFLVGLVKCAICNSNYIIHHKDGKPNNMRCGVHHRLKSAGCSNAETIPYQVVHSLFVSTAHLYIGKALQAIQLTENDKRKLALNAERGEVTASIERLVKLALKFDTPEIEAELEVTTQRRIAIDEELSVLERSNNAERRVGNSHFETQYKSAVEHDRMLRDDPIQLSALLRQAGYAITVHTEHKLFVSDDIEPWVYIGVKRKGNQTLGYRIKSGKEEWLISPTIPQPPIANATTDHSDQLSDHLKYIFQRSVPFEGYLQNQFEWTTKTETK

SEQ ID NO: 38947 - DNA, 50 bp, Pseudomonas monteilii
  source 1..50: mol_type = genomic DNA
tagggtgttttgcaaaaatgttgtgaccagcctttcagtaaatgacacgc

SEQ ID NO: 38948 - DNA, 40 bp, Pseudomonas monteilii
  source 1..40: mol_type = genomic DNA
ccgggtgatcaaaggctgggatcaaggcctgatgggcatg

SEQ ID NO: 38949 - DNA, 50 bp, Pseudomonas monteilii
  source 1..50: mol_type = genomic DNA
tagggtgttttgcaaaaatgttgttgccagcctttcagtaaatgacacgc

SEQ ID NO: 38950 - DNA, 40 bp, Pseudomonas monteilii
  source 1..40: mol_type = genomic DNA
tggggtgaggaaaggctcttgccatagcctgatgggcagg

SEQ ID NO: 38951 - protein, 492 aa, Corynebacterium tuberculostearicum
MTQKTTTTTLPAGIYVRISLDKHDGAGVERQEEMCRKLAAEHGLEVSRVYSDNSISAYSGKRRPGFIDLVADVEARKIGAVLSFAPDRISRNVSEYGIFKATLKNTHCRLIYVNGGEQALDDPNVDLISTMLSGVSQWESAIKSTRVAAAFAQHRSRGDYPTKPNRLFGYTRSGEPHPTEAPLVRDAATRILAGESLRRIAREWEEKGVTTTSGGRPNAQNLRKSLLTPTMGGFTHYGLKKKDYTAAEWEKLSAWEKLGIIGRGNWEPVLDPEVWQALWAHLTNPARTTNRVGNAPQHLLSGIALCGKCGAPISCRKKWYKKKGEGQPKRVYYCKERGGGHPSRIAEPLENYITNLVLARLSASDIVGELAAGVDTDRRAELTATRDMVRGRMADLEQQATLGNVGMDQFGRMNKALTDQLEAIDAELVELAGAGGVLSEVAGVADVRAWWVTATLELKRELIRALMTITIEHTGGPQSKFNPEYVTVDWKA

SEQ ID NO: 38952 - DNA, 50 bp, Corynebacterium tuberculostearicum
  source 1..50: mol_type = genomic DNA
gtttacactaatccaccaattagcaagctcataggtgaattggtgtacaa

SEQ ID NO: 38953 - DNA, 40 bp, Corynebacterium tuberculostearicum
  source 1..40: mol_type = genomic DNA
cggcgagaccaacgctgcgaacctcgcgacctgctgtccc

SEQ ID NO: 38954 - DNA, 50 bp, Corynebacterium tuberculostearicum
  source 1..50: mol_type = genomic DNA
gtttacactaatccaccaattagcatgctcataggtgaattggtgtacaa

SEQ ID NO: 38955 - DNA, 40 bp, Corynebacterium tuberculostearicum
  source 1..40: mol_type = genomic DNA
ctgccagaccatccctgtgattctcgccacatgctggctc

SEQ ID NO: 38956 - protein, 536 aa, Shinella sp HZN7
MHEPVRAAIYARFSTELQNERSTEDQFDLCVAYARRENFRVVASFEDKARSGGSMHGRDGLREMLHAARAGEFEVIIVESLDRISRDMEDMSGIHKRLLFAGVKIIQVHGGEANTLTVGLRAVIGQVFREDTVHKVRRGMTGLIKQGLTAGGRAYGYRPDPANPGKPVIVEEEASTVLLIFQEYERGTSPKAISRRLNAAYIKPPRGALWSPSALIGSEERGSGILRNPIYAGRIVWNKVRMEKDPDTGKRVSRPNPSSEWQTAEAPELRIVSDELFESVQRQMQSRSYTKQEGNMAVQRRPKRLLSGLLLCAACGSGMSVAGVDKSGKTRLRCSAHTNSGACPDPKSFYLQDVEEMVISSLTKELASPDQIFSYAKAYMEKRHAEAVHENRRRTEIEARVKGIEKDNDRLLDWMLKGVGDGDALAAKMKAQGEEKKRLQVELQSMPEASKVVVHPAAISSFAQRLQAHRPKLEMALHMLDDMGELSRLIREVIKSITLDKSEDGAIKLAVEGWLTPFLESDDSRMKRGAVPLVAG

SEQ ID NO: 38957 - DNA, 50 bp, Shinella sp HZN7
  source 1..50: mol_type = genomic DNA
gggggctgttccgttggtagcgggagaccgaaacaaacgacacggcccca

SEQ ID NO: 38958 - DNA, 40 bp, Shinella sp HZN7
  source 1..40: mol_type = genomic DNA
aaggaaatttggtagcgggagagggactcgaacccccgac

SEQ ID NO: 38959 - DNA, 50 bp, Shinella sp HZN7
  source 1..50: mol_type = genomic DNA
gggggctgttccgttggtagcgggcgaccgaaacaaacgacacggcccca

SEQ ID NO: 38960 - DNA, 40 bp, Shinella sp HZN7; identical to SEQ ID NO: 11145
  source 1..40: mol_type = genomic DNA

SEQ ID NO: 38961 - protein, 527 aa, Intestinimonas butyriciproducens
MKITKFPIDLSMLTEEEIDQFRQDPSTLFEGDTDVCLYLRFSSERQREQSIEGQLRDCRAYCKLNSCRIVAIYVDRATTARKDVEKRVHFQEMIRDSEKRPWEYVVVWKLDRFARNRTDSALFKFRLRKNGVKVISATENISEKPEGIILEAVLEGMAEFYSADLSQKITRGMRESALKCHSIGGHVPLGYKIEDHKLVINPATAHIVQEAFELYANGETVADICRMFNTKGYRTAKGVEFNRNSFKSMFRNKRYIGVYTYKDIEVEGGVPAIIDKELFETVGRRLSKNAEAPARGKAKVDYLLAGKLFCGHCGGSMNGESGTSKTGAIHNYYTCYTRKRKHACEKKPLKKDWIEYIVAQDAMELLTDDTIQELADMAISQTEQDLRENTRIPELTDRMKETESGIANITKAIEKGIASDALMNRLVELEKEKKNLLRLLAEEEKYVCKIERSQIVYWLTEFKGGRIEDERYRRIIIDLMINSVTVWDEPDGFRITTAYNLTSCKSKTFRIAPSGEKGFGFEGSKST

SEQ ID NO: 38962 - DNA, 50 bp, Intestinimonas butyriciproducens
  source 1..50: mol_type = genomic DNA
aggggttcggatttgaggggtcaaagtccaccattgagcgcatatccgaa

SEQ ID NO: 38963 - DNA, 40 bp, Intestinimonas butyriciproducens
  source 1..40: mol_type = genomic DNA
gagggttcgaatcccttcaggtccaccaaaaaggaaggca

SEQ ID NO: 38964 - DNA, 50 bp, Intestinimonas butyriciproducens
  source 1..50: mol_type = genomic DNA
aggggttcggatttgaggggtcaaggtccaccattgagcgcatatccgaa

SEQ ID NO: 38965 - DNA, 40 bp, Intestinimonas butyriciproducens
  source 1..40: mol_type = genomic DNA
gaggtttcgaatccctacaggtcaagacgaatggaagaga

SEQ ID NO: 38966 - protein, 403 aa, Mycolicibacterium mengxianglii
MLDAMKAGEFDALLCWHTDRLYRNMKDLERVIELADANRIEIRTVQGGTLDLSTSAGRMVARILGSVARQESEHSSERRKRANVQRAASGEWVTSRRPFGYTQNGEPIEPEASAVRAAVADVLAGKSVRAVAREWNSLSLETTGSAKAWTSPMVRRVLMNPRYAALVVHQGKVVGPGNWEPIIDEDTHHGIVAYLKDPTRLNAGIGAERRYQGVGVYGCGVCSTKLVSYSAAGGKQHAYRCPNRSHVRRQSVALDAYVDAIILGRLVMPDAAQLCNALDKPGVDVAALHTQKSALQARQEELAALFAEGSILAPQLKRGTAELSRAMESVDRDLAASTQSSPVAAFMAAGRQGEQLKDRWVALAPDIRGKIIDQLLTVTVKPSPRGLRGFDPEYIGISWKVHS

SEQ ID NO: 38967 - DNA, 50 bp, Mycolicibacterium mengxianglii
  source 1..50: mol_type = genomic DNA
gggtgtatgaattacaccttcctcgacacaaaaagtcaatagttacacct

SEQ ID NO: 38968 - DNA, 40 bp, Mycolicibacterium mengxianglii
  source 1..40: mol_type = genomic DNA
aggcggcgccgccttcctcgatctcgaccgggcaccgcat

SEQ ID NO: 38969 - DNA, 50 bp, Mycolicibacterium mengxianglii
  source 1..50: mol_type = genomic DNA
gggtgtatgaattacaccttcctctgcacaaaaagtcaatagttacacct

SEQ ID NO: 38970 - DNA, 40 bp, Mycolicibacterium mengxianglii
  source 1..40: mol_type = genomic DNA
agccggcctgccctgcctctgcctcgtccgggcacctcag

SEQ ID NO: 38971 - protein, 540 aa, Mediterraneibacter faecis; identical to SEQ ID NO: 12131

SEQ ID NO: 38972 - DNA, 50 bp, Mediterraneibacter faecis; identical to SEQ ID NO: 2472
  source 1..50: mol_type = genomic DNA

SEQ ID NO: 38973 - DNA, 40 bp, Mediterraneibacter faecis
  source 1..40: mol_type = genomic DNA
agtttcaaaatgggaaaagggattatctattccggatgca

SEQ ID NO: 38974 - DNA, 50 bp, Mediterraneibacter faecis
  source 1..50: mol_type = genomic DNA
caatatctttaattaagggagacgagagtttcccatagttaaagatacca

SEQ ID NO: 38975 - DNA, 40 bp, Mediterraneibacter faecis
  source 1..40: mol_type = genomic DNA
aatttcaaaaggggaagaaagtttatctctttcatatgcc

SEQ ID NO: 38976 - protein, 540 aa, Mediterraneibacter faecis
MKQPYNTTIYNTALYLRLSRDDELQGESGSIQTQRMMLRQYAAEHGLTIVDEYIDDGWSGTNFERPSFQRMIDDIEDGKINCVVTKDLSRLGRNYILTGQYTEIYFPSKGVRYIAINDNVDTINGESELAPFLNILNEMHARQTSKKVKAAMHTRFANGAHYGAYAPLGYVKDPDKKGHLLIDPETRWIVEKIFDLAVHGRGAASITRILVEEKVPTPGWLNYERYGTFANIYAGAPAEKAYAWTIAQVKSILKEETYIGHSVHNKQSNISFKNKKKVRKPQEEWYRVENTHEAIISEEVFQKVQELIASRRRKRRNGTTQIFAGLIKCADCGWSLAYGENKQNKNPYGYYHCSKNGQGLRQCSMHYIRYDVLYAYVLARLQYWSMMVQKDEDKLLKRLLNASDRERNSAKKKQAAELKKAEKRKAEVDGLFAKMYEDWSAGRITEYNFNMLSEKYQNEQKELETKIRQLHETMEAAVQTAADAEKWIALMKQYVNPVELTAELLNTLIEKITVHEAVKGEDGSREQEVEIYYRFIGKID

SEQ ID NO: 38977 - DNA, 50 bp, Mediterraneibacter faecis; identical to SEQ ID NO: 3657
  source 1..50: mol_type = genomic DNA

SEQ ID NO: 38978 - DNA, 40 bp, Mediterraneibacter faecis; identical to SEQ ID NO: 38973
  source 1..40: mol_type = genomic DNA

SEQ ID NO: 38979 - DNA, 50 bp, Mediterraneibacter faecis
  source 1..50: mol_type = genomic DNA
caatatctttaattaagggaaacgagagtttcccatagttaaagatacca

SEQ ID NO: 38980 - DNA, 40 bp, Mediterraneibacter faecis; identical to SEQ ID NO: 38975
  source 1..40: mol_type = genomic DNA

SEQ ID NO: 38981 - protein, 545 aa, Clostridioides difficile
MEREKMNKEITALYCRLSKEDKQSGESMSISTQKEMLMDYARQNGFRNCRYYVDDGYSGTNSDREAFQEMLDDIRDGKVAVVITKDQSRLGRNYIETGTYMEIFFPEHGVRYIAINDGYDSDKDDHLGMMAPIRNIMNEMYARDTSKKIKSALHTRKMQGKYLCTTAPYGYKKDPTDSTHLIIDEEVAPVVRYIYDLAEEGLGLHCICKRLHDEKILKPSCHKKEMFERFVDDGKMYDWDNAYVSQLLHSPTYAGHLAVDCKPTISMKTKKRKYIAFADREIIRNTHEAIIPQAQWDRVQTIISSRSSSFNTEKTEYDNIFRGLLRCADCERTMLVKVEHKRIRDNVLDKTFYCCSTYRKYGRNACGAHNLEARMLHEAVLADIQRHAELAVTDREELVRHIAKSLDIKLSEGKEKHKRAIKQCKARINEIDDLYAQLYEDLSKGLIPERRFKMMTDRLDKEQEELLEKLEQYEREKNSGKEQLANIQDFIDEVSEYAGITELNFKMLHQLIDKILVFPAEEIDGEKVQKIQIHYKFIGALGMIE

SEQ ID NO: 38982 - DNA, 50 bp, Clostridioides difficile
  source 1..50: mol_type = genomic DNA
atcacctacgaaaactaaccaacagatgttggatagtgaaggtaggtgac

SEQ ID NO: 38983 - DNA, 40 bp, Clostridioides difficile
  source 1..40: mol_type = genomic DNA
tgaaatagttatagcaacagatgcaggtcgtgaaggagaa

SEQ ID NO: 38984 - DNA, 50 bp, Clostridioides difficile
  source 1..50: mol_type = genomic DNA
atcacctacgaaaactaaccaacaactgttggatagtgaaggtaggtgac

SEQ ID NO: 38985 - DNA, 40 bp, Clostridioides difficile
  source 1..40: mol_type = genomic DNA
tggaacatttttagcaataactgctggttgtcaatgacaa

SEQ ID NO: 38986 - protein, 556 aa, Yersinia pseudotuberculosis
MITKTAYCYCRVSSSQQADDNGGFGMTRQQATLIEYISSFGENKKLGYALSPDQVVFLRAEGESGFTGKNIEKGSILLNFIEDIKSKKIKNSVLLIENIDRFSRFNVNESTELFLSIVNNGCDIHECDGGVIHHRKSDTNLISAGLTRARAESYRKSKFSIKNWDKRFENTIKDKSVLTHHSPSWLNTDGGFYTIIESEAVVYRKIFEMFNNGYGQAAIRTYLNDNGMTINGNTIGTWMIHKVLKDDRLWGRLRTKSDLRKEHDGLLIYPVVVEREIVNTAALILSSKGKSIKINKRANNIFTGLMICGVCKNGHLLVNHDKRGSYLRCSNSLSSNTRCIARGFKYGIVEQALIKFIKNIDTKILDSNDDNILELDRLGEELKYYLDYMNQVQQDFNSVDIPDPNDRKLLKNLQSKVRVLEDEILKIKSFENSEADFEVIQVASINPDLLDPFNVDLRKEFNIKLRKIIQQIEAFRYDNNILIAIKYYAVKNQQWLLIDSKTGDMKSHTYIDEEHVVIEGVDQKPLRFDVKTKQYKLDGTQISVEYLISELKIISQ

SEQ ID NO: 38987 - DNA, 50 bp, Yersinia pseudotuberculosis
  source 1..50: mol_type = genomic DNA
aaccgtattatagctgctgccagcaccattgttagtgctataatacagtc

SEQ ID NO: 38988 - DNA, 40 bp, Yersinia pseudotuberculosis
  source 1..40: mol_type = genomic DNA
tgcaatgatagcaaccgcaaccatcaattcaattaatgta

SEQ ID NO: 38989 - DNA, 50 bp, Yersinia pseudotuberculosis
  source 1..50: mol_type = genomic DNA
aaccgtattatagctgctgccagcgccattgttagtgctataatacagtc

SEQ ID NO: 38990 - DNA, 40 bp, Yersinia pseudotuberculosis
  source 1..40: mol_type = genomic DNA
tgcaatgttttgagtggcagctatcaattccatttatgta

SEQ ID NO: 38991 - protein, 557 aa, Yersinia pseudotuberculosis
MITKTAYCYCRVSSSQQADDNGGFGMTRQQATLIEYISSFGENKELGYALSPDQVVFLRAEGESGFTGKNIEKGSILLNFIEDIKSKKIKNSVLLIENIDRFSRFNVNESTELFLSIVNNGCDIHECDGGVIHHRKSDTNLISAGLTRARAESYRKSKFSIKNWDKRFENTIKDKSVLTHHSPSWLNTDGGFYTIIESEAVVYRKIFEMFNNGYGQAAIRTYLNDNGMTINGNTIGTWMIHKVLKDDRLWGRLRTKSDLRKEHDGLLIYPVVVEREIVNTAALILSSKGKSIKINKRANNIFTGLMICGVCKNGHLLVNHDKRGSYLRCSNSLSSNTRCIARGFKYGIVEQALIKFIKNIDTKILDSNDDNILELDRLGEELKYYLDYMNQVQQDFNSVDIPDPNDRKLLKNLQSKVRVLEDEILKIKSFENSEADFEVIQVASINSDLLDPFNVDLRKEFNIKLRKIIQQIEAFRYDKSNILIIIKYYAVKNQQWLLIDSKTGDMKSHTYIDEEHVVIEGVDKKPLRFDVKTKQYKLDGTQISVEDLISELKIISQ

SEQ ID NO: 38992 - DNA, 50 bp, Yersinia pseudotuberculosis
  source 1..50: mol_type = genomic DNA
aactgtattatggctgctgccagcaccattgttagtgctataatacagtc

SEQ ID NO: 38993 - DNA, 40 bp, Yersinia pseudotuberculosis; identical to SEQ ID NO: 38988
  source 1..40: mol_type = genomic DNA

SEQ ID NO: 38994 - DNA, 50 bp, Yersinia pseudotuberculosis
  source 1..50: mol_type = genomic DNA
aactgtattatggctgctgccagcgccattgttagtgctataatacagtc

SEQ ID NO: 38995 - DNA, 40 bp, Yersinia pseudotuberculosis; identical to SEQ ID NO: 38990
  source 1..40: mol_type = genomic DNA

SEQ ID NO: 38996 - protein, 557 aa, Yersinia pseudotuberculosis; identical to SEQ ID NO: 38991

SEQ ID NO: 38997 - DNA, 50 bp, Yersinia pseudotuberculosis
  source 1..50: mol_type = genomic DNA
aactgtattatagctgctgccagcaccattgttagtgctataatacagtc

SEQ ID NO: 38998 - DNA, 40 bp, Yersinia pseudotuberculosis; identical to SEQ ID NO: 38988
  source 1..40: mol_type = genomic DNA

SEQ ID NO: 38999 - DNA, 50 bp, Yersinia pseudotuberculosis
  source 1..50: mol_type = genomic DNA
aactgtattatagctgctgccagcgccattgttagtgctataatacagtc

SEQ ID NO: 39000 - DNA, 40 bp, Yersinia pseudotuberculosis; identical to SEQ ID NO: 38990
  source 1..40: mol_type = genomic DNA

SEQ ID NO: 39001 - protein, 556 aa, Yersinia pseudotuberculosis
MITKTAYCYCRVSSSCQNDENGGFGMTRQQATLMDYLSLFGENEELGYALSPDQVFFLRAEGVSGFTGKNIEKGSVLLNFIEDIKSKKIKNSVLLIENIDRFSRFNVNESTELFLSIVNNGCDIHECDGGVIHHRKSDTNLISAGLTRARAESYRKSKLSIKNWDKRFKNTIKDKSVLSNHSPSWLNTDGGVYTIIESEAVIYRKIFEMFNNGYGQAAIRTYLNDNGMTINGRTIGTWMIHKVLNDDRLWGRLRTKSDLRKEHDGLLIYPVVVEREIFNTASLILSSKGKNIKINKRANNIFTGLMICGVCKNGHLLVNHDKRGSYLRCSNSLSSNTRCIARGFKYGIVEQALIKFIKNIDTKILDSNDDNILELDILGKELKYYLDYMNQVQQDFDSVDIPDPNDRKLLKNLQSKVRDLEDEILKIKSFENSEADFEAVGAAISPELLDPFNVDLRKDFNIKLRKIIQQIEAFRYDKSNILIIIKYYAVANQQWLLIDSKTGDMKSHTYIDEEYIVIEGIDQKTVRFDVKIKQYTLDGNQISVEELISELKIISQ

SEQ ID NO: 39002 - DNA, 50 bp, Yersinia pseudotuberculosis
  source 1..50: mol_type = genomic DNA
aactgtattatagctgctgccagcaccattggtggtgctataatacagtc

SEQ ID NO: 39003 - DNA, 40 bp, Yersinia pseudotuberculosis; identical to SEQ ID NO: 38988
  source 1..40: mol_type = genomic DNA

SEQ ID NO: 39004 - DNA, 50 bp, Yersinia pseudotuberculosis
  source 1..50: mol_type = genomic DNA
aactgtattatagctgctgccagcgccattggtggtgctataatacagtc

SEQ ID NO: 39005 - DNA, 40 bp, Yersinia pseudotuberculosis; identical to SEQ ID NO: 38990
  source 1..40: mol_type = genomic DNA

SEQ ID NO: 39006 - protein, 491 aa, Mycobacteroides abscessus
MGARVSVLSGPQKVSHEAQIDTATKWAKAHDYPVVGAFEDLGVSASVPPDERPDLGPWIRERSHEWEVIIWSKLDRAFRSMRHCSDFIKWAETNRKVVVFAEDSMTLNYLNPSTGIDSILGELFVQIAAAFAQIELNRFKSRAEDMHRAIRPTTRWAAGLPPLGYQVVDHPSGRGKGLAIDADAASLVREMADKLVDGWSFVRITEWLNESGKLTSQGRSRKARGLEPKGRWTTTNVIEILTGYRTLGIKTHKGQPVLDGDGEPVRLAPPLFTPERWDEVQRAAQLRKGKPRTPSETANPMLEVGFCAVCGSSLAQQFSKTRPRKSDGHVTFYRYYRCSRTPINCKAVFVVADDLDELLSEQFLLERGDRRVTERVFIPGEDNSYELDFINQRVELLREDRASGLFPSGEDEVVYRNQMKQLLARRDELASVPVRQPGYENVQLEKTYREVWPAATPEEKRKMLIDAEISIRLGESPGKSLRAELVIGTPY

SEQ ID NO: 39007 - DNA, 50 bp, Mycobacteroides abscessus
  source 1..50: mol_type = genomic DNA
cataggtgtacttctcgaccagcagtagcatacactcttgaaatatgtcc

SEQ ID NO: 39008 - DNA, 40 bp, Mycobacteroides abscessus
  source 1..40: mol_type = genomic DNA
cgatgctcctggatcaacagattccgatggaggttgcttt

SEQ ID NO: 39009 - DNA, 50 bp, Mycobacteroides abscessus
  source 1..50: mol_type = genomic DNA
cataggtgtacttctcgaccagcaaaagcatacactcttgaaatatgtcc

SEQ ID NO: 39010 - DNA, 40 bp, Mycobacteroides abscessus
  source 1..40: mol_type = genomic DNA
agattattttggatcaccaaattcagatagaagttgtttt

SEQ ID NO: 39011 - protein, 491 aa, Mycobacteroides abscessus
MGARVSVLSGPQKVSHEAQIDTATKWATAHDYPVVGAFEDLGVSASVPPDERPDLGPWIRERSHEWEVIIWSKLDRAFRSMRHCSDFIKWAETNRKVVVFAEDSMTLNYLNPSTGIDSILGELFVQIAAAFAQIELNRFKSRAEDMHRAIRPTTRWAAGLPPLGYQVVDHPSGRGKGLAIDSDAANLVREMADKLVDGWSFVRITEWLNESGKLTSQGRSRKARGLEPKGRWTTTNVIEILTGYRTLGIKTHKGQPVLDDNGEPIRLAPPLFTPERWDEVQRAAQLRKGKPRTPSDTSNPMLEVGFCAVCGSSLAQQFAKTRPRKSDGHVTHYRYYRCSRTPINCKTVFVVADDLDELLSEQFLLERGDRRVTERVFIPGEDNSYELDFINQRIELLREDRASGLFPSGEDELVYRNQMKQLLARRDELASVPVRQAGYENVELEKTYREVWPGATPEEKRKMLIDAEISIRLGESPGKSLRAELVIGTPY

SEQ ID NO: 39012 - DNA, 50 bp, Mycobacteroides abscessus
  source 1..50: mol_type = genomic DNA
cataggtgtacttctcgaccagcagtagcatacactcttgaaatatgtct

SEQ ID NO: 39013 - DNA, 40 bp, Mycobacteroides abscessus; identical to SEQ ID NO: 39008
  source 1..40: mol_type = genomic DNA

SEQ ID NO: 39014 - DNA, 50 bp, Mycobacteroides abscessus
  source 1..50: mol_type = genomic DNA
cataggtgtacttctcgaccagcaaaagcatacactcttgaaatatgtct

SEQ ID NO: 39015 - DNA, 40 bp, Mycobacteroides abscessus; identical to SEQ ID NO: 39010
  source 1..40: mol_type = genomic DNA

SEQ ID NO: 39016 - protein, 565 aa, Schaalia cardiffensis
MSPTNLDPFDAMSQALIPKRAISYIRVSTREQAARAGAAEGFSIPAQREANKRKAATLGALIVKEFVDRGESARSANRPQLQKMLTYIQETGDIDYCIVHKLDRLARNRADDVDINRVLDQAGVRLISTTENIDQTPGGILLHGIMSSIAEFYSRNLANEVVKGLTQKAKSGGTISRAPLGYLNKQGHDEQGREDRWVEVDPERGPLMALAFTEYATGQWTLSTLTDHLTARGLTTLATPSRPSHPLDHNKLLDLLRNPYYRGVVTYQGVEYPGKHQALVDDATWHQVQTVLNQHRYGERQRVHNHHLKTTVRCGQCGGRLIIHKCKSRSGQIYPYFVCSHRQRHRDACSFKAVLIDEVDARVTEIYERIHISAQDRRTIERYLTEELHRIYAHQHDHAKDLHDQQTKLQAEQTKLLHAHYADAIPLDLLKAEQARIARQLAVIDKDLRSLTADQDKVKEHLSQALDLLEDCHHLYTHAPDNLKKLLNMVFFDHIDIHPADDETSEPHRSATPHPAAPFDQLASPELLASANMATIRQTKTPSAYAEGATQDNLFDTGSCKSLMV

SEQ ID NO: 39017 - DNA, 50 bp, Schaalia cardiffensis
  source 1..50: mol_type = genomic DNA
gttcgtgtaagagcctgatggtggacctggcgggaggcttgtcgaaactt

SEQ ID NO: 39018 - DNA, 40 bp, Schaalia cardiffensis
  source 1..40: mol_type = genomic DNA
gccgcttctcttcttgtggagctaaggggattcgaacccc

SEQ ID NO: 39019 - DNA, 50 bp, Schaalia cardiffensis
  source 1..50: mol_type = genomic DNA
gttcgtgtaagagcctgatggtggggctggcgggaggcttgtcgaaactt

SEQ ID NO: 39020 - DNA, 40 bp, Schaalia cardiffensis
  source 1..40: mol_type = genomic DNA
gccccttctcttcctgtgtggaacctgggattcgaactgc

SEQ ID NO: 39021 - protein, 541 aa, Faecalibacterium prausnitzii
MEKDKKVTALYCRLSKDDGSNSESLSIRTQKSMLMEYATRNGFGNCQYYVDDGYSGTNSDRPAFQELLDDIREGKVATVITKDQSRLGRNHIETGTYMEIFFPEHGVRYIAINDGYDSNEQSQMDIAPFRNIINEMYAKDTSRKIKSALRTRKKSGKYISSGAPFGYQKDPADHNHLVIDPNTAPVVEYIYSMAEEGLGLHRIAKRLHDEKVLKPCYYKKEMFGRFIDDEKMYDWDSAYISQVLHSPVYAGHIIYEAKPTVSMKSKKRRYIPFEERAIVPNTHEAIIPQDRWENVQRILYSRSSSFMCDKTDYDNIFKGIVRCADCGRTMLVKVEHRRKRNSVLDQTFYCCSTYRKYGAKACDSHNLEARVLHEAVLADIQAHAKAAVSNREALVKKIANQMHLRVSSDRAQHKRDLKQCKARIAEIEDLYAKLYEDVSKGLLPEKRFQMLADRYDKEQAELTEKIEQYEREGRAEHDQLDKIQDFIDEVSKYAGITELNYKILHQLIDKILVSKAEKVDGEYVQKIQIFYRFIGPLDAIE

SEQ ID NO: 39022 - DNA, 50 bp, Faecalibacterium prausnitzii
  source 1..50: mol_type = genomic DNA
gtcacctccgagaactatcctacagatgcaggatagtgcggttgggtgac

SEQ ID NO: 39023 - DNA, 40 bp, Faecalibacterium prausnitzii
  source 1..40: mol_type = genomic DNA
tgagcttgtccatcatagagatcttggtaaagcgggtctt

SEQ ID NO: 39024 - DNA, 50 bp, Faecalibacterium prausnitzii
  source 1..50: mol_type = genomic DNA
gtcacctccgagaactatcctacacatgcaggatagtgcggttgggtgac

SEQ ID NO: 39025 - DNA, 40 bp, Faecalibacterium prausnitzii
  source 1..40: mol_type = genomic DNA
tgagcatggtgatcatagccatcctcttaaagagtgtctt

SEQ ID NO: 39026 - protein, 497 aa, Streptococcus agalactiae
MSKIALYIRLSVEDQMKKDESESIINQRYFLNDFLDRNDEFKSFQREEYIDDGYTGTNEKRPSFQRMLEEVKNGKINAIIVKDLSRFMRDYISLGDYLENIFPFLGIRFIAINDDYDSDKEKGNGTDLDIQFKGLLYDFYTKDISQKVKTVTTELKKQGKFLAWSPPFGYMKDPDDKHNIIIDEKTAWIVRKVYDLALTGLASRKIAAVMNEENIPTPNERKKELTNMDYEYNIVSSDTRDAPTWTNGTVVDILSNENYTGTYVFNMQEKSLLTPGSFKFNPKEEWGRVYNHHEAIISREEFDKVQEIKEKNSFLKGKNTDYPWRTKSPLQGFAKCPTCNHILGLTQSKFKRPDGSMRIHKYFHCRICKCNNVEHKNSRVDKLEKQVFTLIKEKYGEAEVKPKEKISIKNIEKKIEKLQAKKMADFEKYKLGKMTKVKFVERKSQIDKEIEKLEEKIKLSSNETEVVTDNELTRELMEKYVESVICEGSIVKKIIWK

SEQ ID NO: 39027 - DNA, 50 bp, Streptococcus agalactiae; identical to SEQ ID NO: 14077
  source 1..50: mol_type = genomic DNA

SEQ ID NO: 39028 - DNA, 40 bp, Streptococcus agalactiae; identical to SEQ ID NO: 34823
  source 1..40: mol_type = genomic DNA

SEQ ID NO: 39029 - DNA, 50 bp, Streptococcus agalactiae; identical to SEQ ID NO: 14079
  source 1..50: mol_type = genomic DNA

SEQ ID NO: 39030 - DNA, 40 bp, Streptococcus agalactiae
  source 1..40: mol_type = genomic DNA
gttcttagcttcttccatagcaacagggaagtagtttgag

SEQ ID NO: 39031 - protein, 497 aa, Streptococcus agalactiae
MSKIALYIRLSVEDQMKKDESESIINQRYFLNDFLDRNDEFKSFQREEYIDDGYTGTNEKRPSFQRMLEEVKNGKINAIIVKDLSRFMRDYISLGDYLENIFPFLGIRFIAINDGYDSDKEKGNGTDLDIQFKGLLYDFYTKDISQKVKTVTTELKKQGKFLAWSPPFGYMKDSDDKHNIIIDEKTAWIVRKVYDLALTGLASRKIAAVMNEENIPTPNERKKELTNMDYEYNIVSSDTRDAPTWTNGTVVDILSNENYTGTYVFNMQEKSVLTPGSFKFNPKEEWGRVYDHHEAIISREEFDKVQEIKEKNSFLKGKNTDYPWRKHSPLQGFARCPTCNHILGLTQSKFKRPDGSMRIHKYFHCRICKCNNVEHKNSRVDKLEEQVLALIKEKYGEAEVKPKEKISIKDIENKIEKLQAKKMSDFEKYKLGKMTKVKFVESKNQIDNEISKLEEKIKLSSNETEVVTDNELTRELMEKYVESVICEGSIVQKIIWK

SEQ ID NO: 39032 - DNA, 50 bp, Streptococcus agalactiae; identical to SEQ ID NO: 14077
  source 1..50: mol_type = genomic DNA

SEQ ID NO: 39033 - DNA, 40 bp, Streptococcus agalactiae; identical to SEQ ID NO: 34823
  source 1..40: mol_type = genomic DNA

SEQ ID NO: 39034 - DNA, 50 bp, Streptococcus agalactiae; identical to SEQ ID NO: 14079
  source 1..50: mol_type = genomic DNA

SEQ ID NO: 39035 - DNA, 40 bp, Streptococcus agalactiae; identical to SEQ ID NO: 39030
  source 1..40: mol_type = genomic DNA

SEQ ID NO: 39036 - protein, 497 aa, Streptococcus agalactiae
MSKIALYIRLSVEDQMKKDESESIINQRYFLNDFLDRNDEFKSFKREEYVDDGYTGTNEKRPSFQRMLEEVKHGKINAIIVKDLSRFMRDYITLGDYLENIFPFLGIRFIAINDGYDSDKEKGNGTDLDIQFKGLLYDFYTKDISQKVKTVTTELKKQGKFLAWSPPFGYMKDPDDKHNIIIDNKTAWIVRKVYDLALTGLASRKIAAVMNEENIPTPNERKKELTNMDYEYNIVSSDTRDAPTWTNGTVVDILSNENYTGTYVFNMQEKSVLNPSSFKFNPKEEWGRVYDHHEAIISREEFNKVQEIKEKNSFLKGKNTDYPWRTKSPLQGFARCPTCNHILGFTQTKHKRLDGSIRVHKYFSCRICKCNNVEHKNSRVNDLEEQVLVLIKEKYGEVEVKPKEKISIKDIEKKIEKLQAKKMSDFEKYKLGKMMKVKFVESKNQIDKEIDRLEEKIKLSSNETEVVTDNELTRELMEKYVESVICEGSIVQKIIWK

SEQ ID NO: 39037 - DNA, 50 bp, Streptococcus agalactiae; identical to SEQ ID NO: 14077
  source 1..50: mol_type = genomic DNA

SEQ ID NO: 39038 - DNA, 40 bp, Streptococcus agalactiae; identical to SEQ ID NO: 34823
  source 1..40: mol_type = genomic DNA

SEQ ID NO: 39039 - DNA, 50 bp, Streptococcus agalactiae; identical to SEQ ID NO: 14079
  source 1..50: mol_type = genomic DNA

SEQ ID NO: 39040 - DNA, 40 bp, Streptococcus agalactiae; identical to SEQ ID NO: 39030
  source 1..40: mol_type = genomic DNA

SEQ ID NO: 39041 - protein, 497 aa, Streptococcus agalactiae
MSKIALYIRLSVEDQMKKDESESIINQRYFLNDFLDRNDEFKSFKREEYVDDGYTGTNEKRPSFQRMLEEVKHGKINAIIVKDLSRFMRDYITLGDYLENIFPFLGIRFIAINDGYDSDKEKGNGTDLDIQFKGLLYDFYTKDISQKVKTVTTELKKQGKFLAWSPPFGYMKDPDDKHNIIIDNKTAWIVRKVYDLALTGLASRKIAAVMNEENIPTPNERKKELTNMDYEYNIVSSDTRDAPTWTNGTVVDILSNENYTGTYVFNMQEKSVLNPSSFKFNPKEEWGRVYDHHEAIISREEFNKVQEIKEKNSFLKGKNTDYPWRTKSPLQGFARCPTCNHILGFTQTKHKRLDGSIRVHKYFSCRICKCNNVEHKNSRVNDLEEQVLVLIKEKYGEVEVKPKEKISIKDIEKKIEKLQAKKMSDFEKYKLGKMTKVKFVESKNQIDKEIDRLEEKIKLSSNETEVVTDNELTRELMEKYVESVICEGSIVQKIIWK

SEQ ID NO: 39042 - DNA, 50 bp, Streptococcus agalactiae; identical to SEQ ID NO: 14077
  source 1..50: mol_type = genomic DNA

SEQ ID NO: 39043 - DNA, 40 bp, Streptococcus agalactiae; identical to SEQ ID NO: 34823
  source 1..40: mol_type = genomic DNA

SEQ ID NO: 39044 - DNA, 50 bp, Streptococcus agalactiae; identical to SEQ ID NO: 14079
  source 1..50: mol_type = genomic DNA

SEQ ID NO: 39045 - DNA, 40 bp, Streptococcus agalactiae; identical to SEQ ID NO: 39030
  source 1..40: mol_type = genomic DNA

SEQ ID NO: 39046 - protein, 497 aa, Streptococcus agalactiae
MSKIALYIRLSVEDQMKKDESESIINQRYFLNDFLDRNDEFKSFKREEYVDDGYTGTNEKRPSFQRMLEEVKNGKINAIIVKDLSRFMRDYITLGDYLENIFPFLGIRFIAINDGYDSDKEKGNGTDLDIQFKGLLYDFYTKDISQKVKTVTTELKKQGKFLAWSPPFGYMKDPDDKHNIIIDDKTAWIVRKVYDLALTGLASRKIAAVMNEENIPTPNERKKELTNMDYEYNIVSSDTRDAPTWTNGTVVDILSNENYTGTYVFNMQEKSVLTPGSFKFNPKEEWGRVYNHHEAIISREEFEKVQEIKEKNSFLKGKNTDYPWRTKSPLQGFVRCPTCNHILGFTQTKHKRLDGSIRVHKYFSCRICKCNNVEHKNSRVNDLEEQVLALIKEKYGELEVEPKEKISIKDLEKKIENLQAKKMSDFEKYKLGKITKVKFVESKNQIDNEIEKLEEKIKLSSNETEVVTDNELTRELMEKYVESVICEGSIVQKIIWK

SEQ ID NO: 39047 - DNA, 50 bp, Streptococcus agalactiae; identical to SEQ ID NO: 14077
  source 1..50: mol_type = genomic DNA

SEQ ID NO: 39048 - DNA, 40 bp, Streptococcus agalactiae; identical to SEQ ID NO: 34823
  source 1..40: mol_type = genomic DNA

SEQ ID NO: 39049 - DNA, 50 bp, Streptococcus agalactiae; identical to SEQ ID NO: 14079
  source 1..50: mol_type = genomic DNA

SEQ ID NO: 39050 - DNA, 40 bp, Streptococcus agalactiae; identical to SEQ ID NO: 39030
  source 1..40: mol_type = genomic DNA

SEQ ID NO: 39051 - protein, 497 aa, Streptococcus agalactiae; identical to SEQ ID NO: 18071

SEQ ID NO: 39052 - DNA, 50 bp, Streptococcus agalactiae; identical to SEQ ID NO: 14077
  source 1..50: mol_type = genomic DNA

SEQ ID NO: 39053 - DNA, 40 bp, Streptococcus agalactiae
  source 1..40: mol_type = genomic DNA
aatcttagatccttccatgggaacagggagtttctttgcg

SEQ ID NO: 39054 - DNA, 50 bp, Streptococcus agalactiae; identical to SEQ ID NO: 14079
  source 1..50: mol_type = genomic DNA

SEQ ID NO: 39055 - DNA, 40 bp, Streptococcus agalactiae; identical to SEQ ID NO: 39030
  source 1..40: mol_type = genomic DNA

SEQ ID NO: 39056 - protein, 576 aa, Streptomyces buecherae
MSVETFAAQQGGPRSLAGLRGGRYARKSAYRGKVTNKGRSVREQLDAGQGDADRLGVRLVEDFIDDDRSASTYRAREREEFERMIEWIEEKKLDIVFAWAATRLQRDITVYARLRDACAANGVLWCYGGKVYDLSNKDDRFRTGLDALLGEREVDEMRDNVLRSLRANAANGLPHGQRAYGYRRVYDPHTRKLVRTEKDPQEAKIVLEICKEVAAGKAYAQIAKSLNRRGVTPPAREWRKEHIRRLAEWREDHPWNAGLHPDWVQRIKDHANLRAEAAQRLSTGEDALDIARDFNERQEPLLLARWHPGTINDYARDPRYTGTRTHHGQVTSEDAWPAIVSKATHVQCVAIITERKGKSHNSRPGRAVNWLSGTLLCDVCSTRMGAGRNKYGPYYRCLQPPVEGLHGGKGYHVSAKTHQIDAFVEAKLFAWLSSPAFVAAFNHDDDATMRQIEEAEAQVQLLRDRLQSFQEQAIVGTLSAESLAAVEAGLLPKIQEADRKARSLKTPPIVRELIGATPEEVAEAWKGIAIAQRRLVAEALLDVRLKKGTRGGTVPIEERLLVQPRRQAQRSLAEAI

SEQ ID NO: 39057 - DNA, 50 bp, Streptomyces buecherae
  source 1..50: mol_type = genomic DNA
aatcatcatgaacttggggctaccttggtaagcccgagttagaggcatac

SEQ ID NO: 39058 - DNA, 40 bp, Streptomyces buecherae
  source 1..40: mol_type = genomic DNA
tcaggcgcgcggagcgaccttgctcagcccgttgatgatg

SEQ ID NO: 39059 - DNA, 50 bp, Streptomyces buecherae; identical to SEQ ID NO: 39057
  source 1..50: mol_type = genomic DNA

SEQ ID NO: 39060 - DNA, 40 bp, Streptomyces buecherae
  source 1..40: mol_type = genomic DNA
ccaggcctgcggggctagcttgcccagcccattgataatt

SEQ ID NO: 39061 - protein, 500 aa, Corynebacterium belfantii; identical to SEQ ID NO: 19461

SEQ ID NO: 39062 - DNA, 50 bp, Corynebacterium belfantii
  source 1..50: mol_type = genomic DNA
attttcaacatctcggagagtaatactttgccccttaagccccatcggcc

SEQ ID NO: 39063 - DNA, 40 bp, Corynebacterium belfantii
  source 1..40: mol_type = genomic DNA
aagattccgtccgcatccccctatgtctcgtttgtccact

SEQ ID NO: 39064 - DNA, 50 bp, Corynebacterium belfantii
  source 1..50: mol_type = genomic DNA
attttcaacatctcggagagtaatgctttgccccttaagccccatcggcc

SEQ ID NO: 39065 - DNA, 40 bp, Corynebacterium belfantii
  source 1..40: mol_type = genomic DNA
aagcttccgtctgtttcctgccatgtctcttttcttcatt

SEQ ID NO: 39066 - protein, 537 aa, Lentzea guizhouensis
MSRRTRAKKVGAAAAELDLDTVRVGIYTRRSTDDENQPYTLEAQDTRLEAYVQSQPGWKIVKKFSDDASGKNTDRPGLKKAMQWARSNMIDVLLVYRVDRFSRNLRDTVTLLDELESVGVAFRSATEPFDTSTPVGRMMLQLLSMFAQFERDLIVDRVTAGMEKKAEAGQWKGGYAPPGYMMDPVTHKLVVVEAEATVIRLMFDLYTKDRLGSRAIANELNERGYRTRSGGLWAFKRILTILENRVYLGEIHYRDVIKLDSHPGIIAPEQFDEAERIMDSRGDSHSRRASNSSDYMVTGRLPCPKCGRAMIGTSATGKTKTYRYYTCMKRMKYGTDACDQDRINADALDQAVLDSVASFYGNQHQLIRDAVGAARKVYESSHDTVAAELKTVKTKLTAVTAKIDKYLDAFEADTFDADDDTVKERMRGHRTTQKQLQAREAELLEDLENEPTMPDAATLTQVNNNIRTIINAGNPNQRKAVVETFVVKIKITGPGRMVPVFRVPQAATQADVVNAEGAESGRPDSAPLSVRACSSLV

SEQ ID NO: 39067 - DNA, 50 bp, Lentzea guizhouensis
  source 1..50: mol_type = genomic DNA
tgttcgtgcatgtagttctttggtggacctgactacacagcatgagaact

SEQ ID NO: 39068 - DNA, 40 bp, Lentzea guizhouensis
  source 1..40: mol_type = genomic DNA
ctcggccctcggaacgagtggagctgaggggaatcgaacc

SEQ ID NO: 39069 - DNA, 50 bp, Lentzea guizhouensis; identical to SEQ ID NO: 39067
  source 1..50: mol_type = genomic DNA

SEQ ID NO: 39070 - DNA, 40 bp, Lentzea guizhouensis
  source 1..40: mol_type = genomic DNA
ctcggctctcggaatgagaggaccagaggccaagggcacc

SEQ ID NO: 39071 - protein, 569 aa, Virgibacillus pantothenticus
MARVRKNTKVEKSRRQIWKVAVYIRLSKDDGNDESLSVTNQRKIIQEYLEHTFGEEYVLVDYYIDDGQSGTTDYERIDFQRMVHDVETGRVNCIICKTLSRAFRNYSDQGYFLERVFPLHGTRFISIGDPAIDTYLNPEVTQGLEVPMAGLLNDRYAARTSNDIRRTFDTKRRNGEFIGAFAPYGYKKNPKNKNHLIIDEEAAQIVQNIYHWFVYDGMSKAGIVKHLNELGVPTPSVYKQQKGLKHVTPNASKKDGMWSLGTVFRILTNRVYIGTMVQGQQRVVSYKIREKITPPEEEWFVVEHTHEPIIEPSLFEKAQSLGQRDTRTAPSKKKVYLFSGFLRCRDCGMYMTKKTNRKKTKSGLKEYTYYVCSTYSVKNKNKCTRHSMKLEDITEAVLRAIQAQIALVDDMTTIIEEINKRPIIKTKSKELERLYKAKQQQLERITVVTDNLYMDWKCGDITRAEYLRMKAKFEQQAEKLKQFIENLEFEMMNVQKDTGVNSPYLQTFLKYKNIKVLDRGLLVALIDHIYIHENNEITIQFNFKDQHKRMLEFIQENKKSHMVKESQVM

SEQ ID NO: 39072 - DNA, 50 bp, Virgibacillus pantothenticus
  source 1..50: mol_type = genomic DNA
tttcttctatatattcatgcaccattagatgcgtgtatatatagacaaac

SEQ ID NO: 39073 - DNA, 40 bp, Virgibacillus pantothenticus
  source 1..40: mol_type = genomic DNA
tgttgtttttccagccccattaggtgctaataaaccatag

SEQ ID NO: 39074 - DNA, 50 bp, Virgibacillus pantothenticus
  source 1..50: mol_type = genomic DNA
tttcttctatatattcatgcaccatgagatgcgtgtatatatagacaaac

SEQ ID NO: 39075 - DNA, 40 bp, Virgibacillus pantothenticus
  source 1..40: mol_type = genomic DNA
ttattattttccagcatcatgcagtgctaataaacccaag

SEQ ID NO: 39076 - protein, 581 aa, Streptomyces sp
MKATARQRAGGYIRQSQERQDKSEGSPRAQREACRAEATRRGYEYVGDYEDRDLSGYKIGVVRPEFERMLTDARSGRLDVIIVHYVSRFSRQRPEDAIPVVMELHRLGVTIVSANEGDFPPGDTMKLIMLIMRLDQAHEESANKSKAVKGTKKILRDAGSWVGGLPPYGYATEEVREGGLTLRKLVIVEDEAEVIRDVVHTILKHKDRPAEAGRRNPGSLAGVCADLNARGVPTKTARLNGKWRGAVTVSTPGRSKPPQWEVTTLKRILQDPRMIGHAVEPIYERKETKDGAIREQITGYRTIRDPETQEPVISHGAILEPADWHAVQAWLATRGRGRGLNRGSTLLSGLSVLFCECGFTMSSNGVKSATASYRCSRPKGSDEGHTGGNSIKREHVEDHVARAVLAKVSSADEDDPETLELIEEATRRFAATIASPELVTERAEVVMRKKDREAALNALYDDLDNDVYSGPIGRERFKEKKAELEREIERLESRITELSRVEMPALPIEQWVGGDEPDGDPIGPGSWWHSASHEEKRSFLRLFVDRIVVAKAESRGNRWEEYDAGKRVAIDWAKKPATSDA

SEQ ID NO: 39077 - DNA, 50 bp, Streptomyces sp
  source 1..50: mol_type = genomic DNA
catagggtggaagtgacagaagcattggcttccgatactttctccctatg

SEQ ID NO: 39078 - DNA, 40 bp, Streptomyces sp
  source 1..40: mol_type = genomic DNA
gaaaggggtcggcgtcttcttcgtcacccagaccccgaag

SEQ ID NO: 39079 - DNA, 50 bp, Streptomyces sp
  source 1..50: mol_type = genomic DNA
catagggtggaagtgacagaagcagaggcttccgatactttctccctatg

SEQ ID NO: 39080 - DNA, 40 bp, Streptomyces sp
  source 1..40: mol_type = genomic DNA
gaaaaggggcggctccctggacttgtccctgaccccgaag

SEQ ID NO: 39081 - protein, 533 aa, Clostridium butyricum
MIKIAIYSRKSVFTGKGESIENQIELCKNYCNTYVNSGSNLEYIIYEDEGFSGKNTNRPEFQHMIDDIKKNKIDTLICYRLDRISRNVADFSSTLELLQKYNVNFISIKERFDTSTPLGRAMIYIASVFAQLERETIAERVRDNMIQLAKSGRWLGGNIPYGFNIARKTYISDFKEKEFSILAPNKKELETVNFVYSYYIKTHSIRQVTRLLNVNSIIGKNGGSFDLTQIRRMLRNPLYVISDDKSHQYLIKKGLNVFGSPNGNGYITYNKSNQKNISADSNQWIVAVSNHKGIITSDNWLKVQYQLDNNKSKMPRIGTGKNHSLFSGILKCKKCGSNMIVKFSGKNKNNIPYEYYVCSGKQNKYLNKCTTKNIRVDKLDKLLTRKLKIHNKTALMKTLRDSIDNICCDFKNNQISSIEYEIHENKVSMDNLIKQLTKSASSTVSDRLMNEINLLDKNIVRLKKHLETIELEQSHDKKTNIDIKNIINVLNSFSDTIEYIDDTAQKRFLIQTLIKSAVWDSDNNNVEIIFNTH

SEQ ID NO: 39082 - DNA, 50 bp, Clostridium butyricum
  source 1..50: mol_type = genomic DNA
ttaagtattttgataactttagcaaagccatcacactacaaaatacatat

SEQ ID NO: 39083 - DNA, 40 bp, Clostridium butyricum
  source 1..40: mol_type = genomic DNA
ttacactgatgcaacaggaaatccatggacagcaacttat

SEQ ID NO: 39084 - DNA, 50 bp, Clostridium butyricum
  source 1..50: mol_type = genomic DNA
ttaagtattttgataactttagcaaggccatcacactacaaaatacatat

SEQ ID NO: 39085 - DNA, 40 bp, Clostridium butyricum
  source 1..40: mol_type = genomic DNA
ttatgatgatgaaacaggaagtttatggccaagaacatat

SEQ ID NO: 39086 - protein, 431 aa, Frankia casuarinae
  SITE 64: note = misc_feature - Xaa can be any naturally occurring amino acid
MAAVRRDEVKVIVIYMTGRFVRTRRERMETYELLAKHGVRLVCTKGPDLDFSTPAGRMVAGIMXEVDAHEVEQLATRVSDSHLQAAKEGRPIGGRCYGYRPDPTAPKHHKRRLIVSEEAAVIREMAARALRGETLYSIVQDFNERGVPTLHPGRSRTGGLWSVSVLRDILTNPAIAGRSVLLGVDYGEAEWEPIISYADHLKLVGMFSGRTAPEGWTNRHVHLLSGIALCGKCLAQGREITVTCRPGAKPTPSGYQPWPKSRGYICPDKQRGGCRGLRHAADPVDAYVEETVVRLLGEPGVIDNLVAAEAPDAEEVLKVATEIEACQARAAAVGVLMAKDDPMDEVTAIARRAALDQIRDDLTRHRQRQTALARSTVAEGLLDVEDIAHHWEHVMTLSQRRATISALVRITLLPIGRGKRGTTDHVVIDRR

SEQ ID NO: 39087 - DNA, 50 bp, Frankia casuarinae
  source 1..50: mol_type = genomic DNA
ttatgacacaagcgccccgacgtcatgacgtctgccccgctgtgtcacaa

SEQ ID NO: 39088 - DNA, 40 bp, Frankia casuarinae
  source 1..40: mol_type = genomic DNA
catcgtcctggtcgacgaaatcgccagcctcaccgcatat

SEQ ID NO: 39089 - DNA, 50 bp, Frankia casuarinae
  source 1..50: mol_type = genomic DNA
ttatgacacaagcgccccgacgtcacgacgtctgccccgctgtgtcacaa

SEQ ID NO: 39090 - DNA, 40 bp, Frankia casuarinae
  source 1..40: mol_type = genomic DNA
catggtcctggtcgtcgacacccccatccacacttctgat

SEQ ID NO: 39091 - protein, 502 aa, Enterocloster bolteae
MKKKILMAALYIRVSTEKQEELSPDSQKRLLLDYAKSHDMIVSEKHIYIENGISGRKADKRPKFQQMIATAKSSDHPFDVILLWKFSRFARNQEESIVYKSMLRNKYSVDVVSISEPLVDGPFGSLIERIIEWMDEFYSIRLSGDVTRGMTQKALNGGYQCRPPLGYRIPYHKATPEIVPDEAKIVRLIFEKYVYENMSIFAIVKHLNSLGHKTSHGKPFEKRSIEYILQNPGYAGDIRWNRTINETNEIRDPSEWIIRPGHHPAIIEKELFEKAQERYHSEYKRRNAKPSEISKHWLSGLLKCSKCGRSLSSCVVHRKTLPDSFYFQCYGYLKGKCNNDCYVREEEIGPTVIKALEEALRKGTVSYTIKKSYQNQSRGGELEVLYKNLDRLSFKEERAKEAYMDGIDTKEEYKANKLRLQKERQELQEMIDTIEHNSSDTVSNDSRMLISISNVLDIVQSDKFTMQEKNAALKSIVDQITYDKKTNHIDVDYYLIETPEAL

SEQ ID NO: 39092 - DNA, 50 bp, Enterocloster bolteae
  source 1..50: mol_type = genomic DNA
atgcatacgctcttgccatttggtcaaccagattgcatgtgcgtatgagt

SEQ ID NO: 39093 - DNA, 40 bp, Enterocloster bolteae
  source 1..40: mol_type = genomic DNA
agcatgacccccactgtgtcatccagttcggacactggac

SEQ ID NO: 39094 - DNA, 50 bp, Enterocloster bolteae
  source 1..50: mol_type = genomic DNA
atgcatacgctcttgccatttggttgaccagattgcatgtgcgtatgagt

SEQ ID NO: 39095 - DNA, 40 bp, Enterocloster bolteae
  source 1..40: mol_type = genomic DNA
agcatgacaccctcagtgttggcaaggcgggacaaaggac

SEQ ID NO: 39096 - protein, 522 aa, Ruminococcus gnavus
MIESKSRVAIYCRLSEEDRNKQSETDDSNSIQNQKSMLLQYSLEHGWEVYNIYSDDDYTGSDRRRPEFNRLLEDAKNRKFDIVLCKTQSRFTRELELVEKYIHGLFPIWGIRFISIVDNADTANKGNKKSRQINGLVNEWYLEDMSENIKSVLTDRRKNGHHIGAFALYGYKKDPDVKGHLIIDEEAAEVVREVFTLFSQGYGKTAIARMLNDRGIPNPTEYKRLHGLRYKQPKTKNSTLWKYFAISDMLVNEIYIGNMVQGKYGSVSYKTKQNKPRPKDEWYRVEGTHEPIIDRELWDRVQALVAQKAKPFTVGTIGLFARKARCMNCGYTMRSSKNRGKHYLQCSNRHVAKDACIGSFISVDKLEKAVIDELNKLSAEYLDKDELEQNVQFNNDLRGQKEALETEIAAYQKKIAEYTKGIRELYLDKVKGILSELDYLDLSKDFSTQKERLEKLVIDTQKQLDVIERKMLIGDNRRQLIEQYTNLEHLDRETVEKLIDYVLVGKKDPVTKEVPIEIHWNF

SEQ ID NO: 39097 - DNA, 50 bp, Ruminococcus gnavus; identical to SEQ ID NO: 12237
  source 1..50: mol_type = genomic DNA

SEQ ID NO: 39098 - DNA, 40 bp, Ruminococcus gnavus; identical to SEQ ID NO: 29428
  source 1..40: mol_type = genomic DNA

SEQ ID NO: 39099 - DNA, 50 bp, Ruminococcus gnavus
  source 1..50: mol_type = genomic DNA
tgttgtctttacacaatcgtaccaactggtgcgacctcgtaagaacaaca

SEQ ID NO: 39100 - DNA, 40 bp, Ruminococcus gnavus
  source 1..40: mol_type = genomic DNA
agtgtgaagggctttttgtactggagcagtgccttcatca

SEQ ID NO: 39101 - protein, 522 aa, Ruminococcus gnavus; identical to SEQ ID NO: 36056

SEQ ID NO: 39102 - DNA, 50 bp, Ruminococcus gnavus; identical to SEQ ID NO: 3427
  source 1..50: mol_type = genomic DNA

SEQ ID NO: 39103 - DNA, 40 bp, Ruminococcus gnavus; identical to SEQ ID NO: 29428
  source 1..40: mol_type = genomic DNA

SEQ ID NO: 39104 - DNA, 50 bp, Ruminococcus gnavus
  source 1..50: mol_type = genomic DNA
tgttgcacttatgtagttgcaccaactggggcgaccttgtaagtacaaca

SEQ ID NO: 39105 - DNA, 40 bp, Ruminococcus gnavus; identical to SEQ ID NO: 39100
  source 1..40: mol_type = genomic DNA

SEQ ID NO: 39106 - protein, 452 aa, Listeria monocytogenes
MKAAIYIRVSTQEQIENYSIQAQTEKLTALCRSKDWDVYDIFIDGGYSGSNMNRPALNEMLSKLHEIDAVVVYRLDRLSRSQRDTITLIEEYFLKNNVEFVSLSETLDTSSPFGRAMIGILSVFAQLERETIRDRMVMGKIKRIEAGLPLTTAKGRTFGYDVIDTKLYINEEEAKQLQMIYDIFEEEKSITSLQKRLKKLGFKVKSYSSYNNWLTNDLYCGYVSYADKVHTKGVHEPIISEEQFYRVQEIFSRMGKNPNMNRDSASLLNNLVVCSKCGLGFVHRRKDTVSRGKKYHYRYYSCKTYKHTHELEKCGNKIWRADKLEELIIDRVNNYSFASRNVDKEDELDNLNEKLKTEHTKKKRLFDLYISGSYEVSELDAMMADIDAQINYYEAQIEANEELKKNKKIQENLADLATVDFNSLEFREKQLYLKSLINKIYIDDEQVTIEWL

SEQ ID NO: 39107 - DNA, 50 bp, Listeria monocytogenes
  source 1..50: mol_type = genomic DNA
tttagtacctcgttatctctcgctggaagaagaagaaacgagataccaaa

SEQ ID NO: 39108 - DNA, 40 bp, Listeria monocytogenes; identical to SEQ ID NO: 1298
  source 1..40: mol_type = genomic DNA

SEQ ID NO: 39109 - DNA, 50 bp, Listeria monocytogenes
  source 1..50: mol_type = genomic DNA
tttagtacctcgttatctctcgctataagaagaagaaacgagataccaaa

SEQ ID NO: 39110 - DNA, 40 bp, Listeria monocytogenes
  source 1..40: mol_type = genomic DNA
ttttagattaagctatgtgataggcccagaagtaaataaa

SEQ ID NO: 39111 - protein, 452 aa, Listeria monocytogenes
MKAAIYIRVSTQEQVENYSIQAQTEKLTALCRSKDWDVYDTFIDGGYSGSNMNRPALNEMLSKLHEIDAVVVYRLDRLSRSQKDTITLIEEYFLKNNVEFVSLSETLDTSSPFGRAMIGILSVFAQLERETIRDRMVMGKIKRIEAGLPLTTAKGRTFGYDVIDTKLYINEEETKQLRLIYDIFEEEQSITFLQKRLKKLGFKVRTYNRYNNWLTNDLYCGYVSYKDKVHVKGIHEPIISEEQFYRVQEIFSRMGKNPNMNRDSASLLNNLVVCGKCGLGFVHRRKDTVSRGKKYHYRYYSCKTYKHTHELEKCGNKIWRADKLEELIIDRVNNYSFASRNVDKEDELDSLNEKLKIEHTKKKRLFDLYISGSYEVSELDAMMSDIDAQINYYEAQIEANEELKKNKKIQENLADLATVDFNSLEFREKQLYLKSLINKIYIDDEQVTIEWL

SEQ ID NO: 39112 - DNA, 50 bp, Listeria monocytogenes; identical to SEQ ID NO: 39107
  source 1..50: mol_type = genomic DNA

SEQ ID NO: 39113 - DNA, 40 bp, Listeria monocytogenes; identical to SEQ ID NO: 1298
  source 1..40: mol_type = genomic DNA

SEQ ID NO: 39114 - DNA, 50 bp, Listeria monocytogenes; identical to SEQ ID NO: 39109
  source 1..50: mol_type = genomic DNA

SEQ ID NO: 39115 - DNA, 40 bp, Listeria monocytogenes; identical to SEQ ID NO: 39110
  source 1..40: mol_type = genomic DNA

SEQ ID NO: 39116 - protein, 452 aa, Listeria monocytogenes
MKAAIYIRVSTQEQIENYSIQAQTEKLTALCRSKDWDVYDIFIDGGYSGSNMKRPALNEMLSKLHEIDAVVVYRLDRLSRSQRDTITLIEEYFLKNNVEFVSLSETLDTSSPFGRAMIGILSVFAQLERETIRDRMVMGKIKRIESGLPLTTAKGRTFGYDVVDTKLYINEEEAKQLQMIYDIFEEEKSITFLQKRLKKLGFKVKSYSSYNNWLTNDLYCGYVSYKDKVHTKGIHEPIISEEQFYRVQEIFSRMGKNPNMNKESASLLNNLVVCSKCGLSFVHRRKDTVSRGKKYHYRYYSCKTYKHTHELEKCGNKIWRADKLEELIIDRVNNYSFASRNVDKEDELDSLNEKLKTEHVKKKRLFDLYISGSYEVSELDAMMADIDAQINYYEAQIEANEELKKNKKIQENLADLATVDFNSLEFREKQLYLKSLINKIYIDDEQVTIEWL

SEQ ID NO: 39117 - DNA, 50 bp, Listeria monocytogenes
  source 1..50: mol_type = genomic DNA
tttagtacctcgttatctctcgctggaagaagaagaaacgagaaactaaa

SEQ ID NO: 39118 - DNA, 40 bp, Listeria monocytogenes; identical to SEQ ID NO: 1298
  source 1..40: mol_type = genomic DNA

SEQ ID NO: 39119 - DNA, 50 bp, Listeria monocytogenes
  source 1..50: mol_type = genomic DNA
tttagtacctcgttatctctcgctataagaagaagaaacgagaaactaaa

SEQ ID NO: 39120 - DNA, 40 bp, Listeria monocytogenes; identical to SEQ ID NO: 39110
  source 1..40: mol_type = genomic DNA

SEQ ID NO: 39121 - protein, 452 aa, Listeria monocytogenes
MKAAIYIRVSTQEQIENYSIQAQTEKLTALCRSKDWDVYDIFIDGGYSGSNMNRPALNEMLSKLHEIDAVVVYRLDRLSRSQRDTITLIEEYFLKNNVEFVSLSETLDTSSPFGRAMIGILSVFAQLERETIRDRMVMGKIKRIEAGLPLTTAKGRTFGYDVIDTKLYINEEEAKQLQMIYDIFEEEKSITTLQKRLKKIGFKVKSYSSYNNWLTNDLYCGYVSYADKVHTKGVHEPIISEEQFYRVQEIFSRMGKNPNMNRDSASLLNNLVVCGKCGLGFVHRRKDTVSRGKKYHYRYYSCKTYKHTHELEKCGNKIWRADKLEELIIDRVNNYSFASRNVDKEDELDSLNEKLKIEHTKKKRLFDLYISGSYEVSELDAMMSDIDAQINYYEAQIEANEELKKNKKIQENLADLATVDFKSLEFREKQLYLKSLINKIYIDDEQVTIEWL

SEQ ID NO: 39122 - DNA, 50 bp, Listeria monocytogenes; identical to SEQ ID NO: 39107
  source 1..50: mol_type = genomic DNA

SEQ ID NO: 39123 - DNA, 40 bp, Listeria monocytogenes; identical to SEQ ID NO: 1298
  source 1..40: mol_type = genomic DNA

SEQ ID NO: 39124 - DNA, 50 bp, Listeria monocytogenes; identical to SEQ ID NO: 39109
  source 1..50: mol_type = genomic DNA

SEQ ID NO: 39125 - DNA, 40 bp, Listeria monocytogenes; identical to SEQ ID NO: 39110
  source 1..40: mol_type = genomic DNA

SEQ ID NO: 39126 - protein, 452 aa, Listeria monocytogenes
MKAAIYIRVSTQEQIENYSIQAQTEKLTALCRSKDWDVYDIFIDGGYSGSNMKRPALNEMLSKLHEIDAVVVYRLDRLSRSQRDTITLIEEYFLKNNVEFVSLSETLDTSSPFGRAMIGILSVFAQLERETIRDRMVMGKIKRIEAGLPLTTAKGRTFGYDVIDTKLYINEEEAKQLRLIYDIFEEEQSITFLQKRLKKLGFKVRTYNRYNNWLTNDLYCGYVSYADKVHVRGIHEPIISEEQFYRVQEIFSRMGKNPNMNKESASLLNNLVVCSKCGLGFVHRRKDTVSRGKKYHYRYYSCKTYKHTHELEKCGNKIWRADKLEELIIDRVNNYSFASRNIDKEDELDSLNEKLKIEHAKKKRLFDLYINGSYEVSELDSMMNDIDAQINYYEAQIEANEELKKNKKIQENLADLATVDFNSLEFREKQLYLKSLINKIYIDGEQVTIEWL

SEQ ID NO: 39127 - DNA, 50 bp, Listeria monocytogenes
  source 1..50: mol_type = genomic DNA
tttagtatctcgttatctctcgttggagggagaagaaacgggataccaaa

SEQ ID NO: 39128 - DNA, 40 bp, Listeria monocytogenes; identical to SEQ ID NO: 1298
  source 1..40: mol_type = genomic DNA

SEQ ID NO: 39129 - DNA, 50 bp, Listeria monocytogenes
  source 1..50: mol_type = genomic DNA
tttagtatctcgttatctctcgttatagggagaagaaacgggataccaaa

SEQ ID NO: 39130 - DNA, 40 bp, Listeria monocytogenes; identical to SEQ ID NO: 39110
  source 1..40: mol_type = genomic DNA

SEQ ID NO: 39131 - protein, 452 aa, Listeria monocytogenes; identical to SEQ ID NO: 27006

SEQ ID NO: 39132 - DNA, 50 bp, Listeria monocytogenes; identical to SEQ ID NO: 39117
  source 1..50: mol_type = genomic DNA

SEQ ID NO: 39133 - DNA, 40 bp, Listeria monocytogenes; identical to SEQ ID NO: 1298
  source 1..40: mol_type = genomic DNA

SEQ ID NO: 39134 - DNA, 50 bp, Listeria monocytogenes; identical to SEQ ID NO: 39119
  source 1..50: mol_type = genomic DNA

SEQ ID NO: 39135 - DNA, 40 bp, Listeria monocytogenes; identical to SEQ ID NO: 39110
  source 1..40: mol_type = genomic DNA

SEQ ID NO: 39136 - protein, 452 aa, Listeria monocytogenes
MKAAIYIRVSTQEQIENYSIQAQTEKLTALCRSKDWDVYDIFIDGGYSGSNMNRPALNEMLSKLHEIDAVVVYRLDRLSRSQRDTITLIEEYFLKNNVEFVSLSETLDTSSPFGRAMIGILSVFAQLERETIRDRMVMGKIKRIEAGLPLTTAKGRTFGYDVIDTKLYINEEEAKQLQMIYDIFEEEKSITTLQKRLKKIGFKVKSYSSYNNWLTNDLYCGYVSYADKVHTKGVHEPIISEEQFYRVQEIFSRMGKNPNMNRDSASLLNNLVVCGKCGLGFVHRRKDTVSRGKKYHYRYYSCKTYKHTHELEKCGNKIWRADKLEELIIDRVNNYSFASRNVDKEDELDSLNEKLKIEHTKKKRLFDLYISGSYEVSELDAMMSDIDAQINYYEAQIEANEELKKNKKIQENLADLATVDFNSLEFREKQLYLKSLINKIYIDDEQVTIEWL

SEQ ID NO: 39137 - DNA, 50 bp, Listeria monocytogenes; identical to SEQ ID NO: 39107
  source 1..50: mol_type = genomic DNA

SEQ ID NO: 39138 - DNA, 40 bp, Listeria monocytogenes; identical to SEQ ID NO: 1298
  source 1..40: mol_type = genomic DNA

SEQ ID NO: 39139 - DNA, 50 bp, Listeria monocytogenes; identical to SEQ ID NO: 39109
  source 1..50: mol_type = genomic DNA

SEQ ID NO: 39140 - DNA, 40 bp, Listeria monocytogenes; identical to SEQ ID NO: 39110
  source 1..40: mol_type = genomic DNA

SEQ ID NO: 39141 - protein, 477 aa, Listeria monocytogenes
MVIKREPLGFSFYQKKERMCERRMEMKAAIYIRVSTQEQIENYSIQAQTEKLTALCRSKDWDVYDIFIDGGYSGSNMNRPALNEMLSKLHEIDAVVVYRLDRLSRSQRDTITLIEEYFLKNNVEFVSLSETLDTSSPFGRAMIGILSVFAQLERETIRDRMVMGKIKRIEAGLPLTTAKGRTFGYDVIDTKLYINEEEAKQLQMIYDIFEQEKSITSLQKRLKNLGFKVKSYSSYNNWLTNDLYCGYVSYADKVHTKGVHEPIISEEQFYRVQEIFSRMGKNPNMNRDSASLLNNLVVCSKCGLGFVHRRKDTVARGKKYYYRYYSCKTYKHTHELEKCGNKIWRADKLEELIIDRVNNYSFASRNVDKEDELDSLNEKLKTEHAKKKRLFDLYISGSYEVSELDAMMSDIDAQINYYEAQIEANEELKKNKKIQENLADLATVDFDSLEFREKQLYLKSLINKIYIDGEQVTIEWL

SEQ ID NO: 39142 - DNA, 50 bp, Listeria monocytogenes
  source 1..50: mol_type = genomic DNA
tttagtccctcgttttctctcgttggaagaagaagaaacgagatgccaaa

SEQ ID NO: 39143 - DNA, 40 bp, Listeria monocytogenes; identical to SEQ ID NO: 1298
  source 1..40: mol_type = genomic DNA

SEQ ID NO: 39144 - DNA, 50 bp, Listeria monocytogenes
  source 1..50: mol_type = genomic DNA
tttagtccctcgttttctctcgttataagaagaagaaacgagatgccaaa

SEQ ID NO: 39145 - DNA, 40 bp, Listeria monocytogenes; identical to SEQ ID NO: 39110
  source 1..40: mol_type = genomic DNA

SEQ ID NO: 39146 - protein, 477 aa, Listeria monocytogenes
MVIKREPLGFSFYPKKERMCERRMEMKAAIYIRVSTQEQIENYSIQAQTEKLTALCRSKDWDVYDIFIDGGYSGSNMNRPALNEMLSKLHEIDAVVVYRLDRLSRSQRDTITLIEEYFLKNNVEFVSLSETLDTSSPFGRAMIGILSVFAQLERETIRDRMVMGKIKRIEAGLPLTTAKGRTFGYDVIDTKLYINEEEAKQLQMIYDIFEQEKSITSLQKRLKNLGFKVKSYSSYNNWLTNDLYCGYVSYADKVHTKGVHEPIISEEQFYRVQEIFSRMGKNPNMNRDSASLLNNLVVCSKCGLGFVHRRKDTVARGKKYYYRYYSCKTYKHTHELEKCGNKIWRADKLEELIIDRVNNYSFASRNVDKEDELDSLNEKLKTEHAKKKRLFDLYISGSYEVSELDAMMSDIDAQINYYEAQIEANEELKKNKKIQENLADLATVDFDSLEFREKQLYLKSLINKIYIDGEQVTIEWL

SEQ ID NO: 39147 - DNA, 50 bp, Listeria monocytogenes; identical to SEQ ID NO: 39142
  source 1..50: mol_type = genomic DNA

SEQ ID NO: 39148 - DNA, 40 bp, Listeria monocytogenes; identical to SEQ ID NO: 1298
  source 1..40: mol_type = genomic DNA

SEQ ID NO: 39149 - DNA, 50 bp, Listeria monocytogenes; identical to SEQ ID NO: 39144
  source 1..50: mol_type = genomic DNA

SEQ ID NO: 39150 - DNA, 40 bp, Listeria monocytogenes; identical to SEQ ID NO: 39110
  source 1..40: mol_type = genomic DNA

SEQ ID NO: 39151 - protein, 452 aa, Listeria monocytogenes; identical to SEQ ID NO: 23466

SEQ ID NO: 39152 - DNA, 50 bp, Listeria monocytogenes; identical to SEQ ID NO: 39127
  source 1..50: mol_type = genomic DNA

SEQ ID NO: 39153 - DNA, 40 bp, Listeria monocytogenes; identical to SEQ ID NO: 1298
  source 1..40: mol_type = genomic DNA

SEQ ID NO: 39154 - DNA, 50 bp, Listeria monocytogenes; identical to SEQ ID NO: 39129
  source 1..50: mol_type = genomic DNA

SEQ ID NO: 39155 - DNA, 40 bp, Listeria monocytogenes; identical to SEQ ID NO: 39110
  source 1..40: mol_type = genomic DNA

SEQ ID NO: 39156 - protein, 452 aa, Listeria monocytogenes
MKAAIYIRVSTQEQIENYSIQAQTEKLTALCRSKDWDVYDIFIDGGYSGSNMNRPALNEMLSKLHEIDAVVVYRLDRLSRSQRDTITLIEEYFLKNNVEFVSLSETLDTSSPFGRAMIGILSVFAQLERETIRDRMVMGKIKRIEAGLPLTTAKGRTFGYDVIDTKLYINEEEAKQLQMIYDIFEEEKSITSLQKRLKKLGFKVKSYSSYNNWLTNDLYCGYVSYADKVHTKGVHEPIISEEQFYRVQEIFSRMGKNPNMNRDSASLLNNLVVCSKCGLGFVHRRKDTVSRGKKYHYRYYSCKTYKHTHELEKCGNKIWRADKLEELIIDRVNNYSFASRNVDKEDELDNLNEKLKTEHTKKKRLFDLYISGSYEVSELDAMMADIDAQINYYEAQIEANEELKKNKKIQENLADLATVDFNSLEFREKQLYLKSLINKIYIDGEQVTIEWL

SEQ ID NO: 39157 - DNA, 50 bp, Listeria monocytogenes; identical to SEQ ID NO: 39127
  source 1..50: mol_type = genomic DNA

SEQ ID NO: 39158 - DNA, 40 bp, Listeria monocytogenes; identical to SEQ ID NO: 1298
  source 1..40: mol_type = genomic DNA

SEQ ID NO: 39159 - DNA, 50 bp, Listeria monocytogenes; identical to SEQ ID NO: 39129
  source 1..50: mol_type = genomic DNA

SEQ ID NO: 39160 - DNA, 40 bp, Listeria monocytogenes; identical to SEQ ID NO: 39110
  source 1..40: mol_type = genomic DNA

SEQ ID NO: 39161 - protein, 452 aa, Listeria monocytogenes
MKAAIYIRVSTQEQIENYSIQAQTEKLTALCRSKDWDVYDIFIDGGYSGSNMNRPALNEMLSKLHEIDAVVVYRLDRLSRSQRDTITLIEEYFLKNNVEFVSLSETLDTSSPFGRAMIGILSVFAQLERETIRDRMVMGKIKRIEAGLPLTTAKGRTFGYDVIDTKLYINEEEAKQLQMIYDIFEEEKSITTLQKRLKKLGFKVKSYSSYNNWLTNDLYCGYVSYADKVHTKGVHEPIISEEQFYRVQEIFSRMGKNPNMNRDSASLLNNLIVCGKCGLGFVHRRKDTVSRGKKYHYRYYSCKTYKHTHELEKCGNKIWRADKLEELIIDRVNNYSFASRNVDKEDELDSLNEKLKTEHTKKKRLFDLYISGSYEVSELDGMMADIDARINYYEAQIEANEELKKNKKIQENLADLATVDFDSLEFREKQLYLKSLINKIYIDGEQVTIEWL

SEQ ID NO: 39162 - DNA, 50 bp, Listeria monocytogenes
  source 1..50: mol_type = genomic DNA
tttagtacctcgttttctctcgttggaagaagaataaacgagataccaaa

SEQ ID NO: 39163 - DNA, 40 bp, Listeria monocytogenes; identical to SEQ ID NO: 1298
  source 1..40: mol_type = genomic DNA

SEQ ID NO: 39164 - DNA, 50 bp, Listeria monocytogenes
  source 1..50: mol_type = genomic DNA
tttagtacctcgttttctctcgttataagaagaataaacgagataccaaa

SEQ ID NO: 39165 - DNA, 40 bp, Listeria monocytogenes; identical to SEQ ID NO: 39110
  source 1..40: mol_type = genomic DNA

SEQ ID NO: 39166 - protein, 452 aa, Listeria monocytogenes
MKAAIYIRVSTQEQVENYSIQAQTEKLTALCRSKDWDVYDIFIDGGYSGSNMNRPALNEMLSKLHEIDAVVVYRLDRLSRSQRDTITLIEEYFLKNNVEFVSLSETLDTSSPFGRAMIGILSVFAQLERETIRDRMVMGKIKRVESGLPLTTAKGRTFGYDVVDTKLYVNKEEAQHLQLIYDIFEEEKSITTLQKRLKKLGFKVKSYSSYNNWLTNDLYCGYVSYADKVHAKGVHEPIISEEQFYRVQEIFSRMGKNPNMNKESSSLLNNLIVCEKCGLGYVHRAKDTVSRGKKYHYRYYSCKTYKHTHELEKCGNKIWRADKLEELIIDRVNNYSFASRNVDKEDELDSLNEKLKIEHTKKKRLFDLYISGSYEVSELDAMMSDIDAQINYYEAQIEANEELKKNKKIQENLADLATVDFNSLEFREKQLYLKSLINKIYIDDEQVTIEWL

SEQ ID NO: 39167 - DNA, 50 bp, Listeria monocytogenes
  source 1..50: mol_type = genomic DNA
tttagtacctcgttatctctcgctggacggagaacaaacgagaaactaaa

SEQ ID NO: 39168 - DNA, 40 bp, Listeria monocytogenes; identical to SEQ ID NO: 1298
  source 1..40: mol_type = genomic DNA

SEQ ID NO: 39169 - DNA, 50 bp, Listeria monocytogenes
  source 1..50: mol_type = genomic DNA
tttagtacctcgttatctctcgctatacggagaacaaacgagaaactaaa

SEQ ID NO: 39170 - DNA, 40 bp, Listeria monocytogenes; identical to SEQ ID NO: 39110
  source 1..40: mol_type = genomic DNA

SEQ ID NO: 39171 - protein, 452 aa, Listeria monocytogenes
MKAAIYIRVSTQEQIENYSIQAQTEKLTALCRSKDWDVYDIFIDGGYSGSNMNRPALNEMLSKLHEIDAVVVYRLDRLSRSQRDTITLIEEYFLKNNVEFVSLSETLDTSSPFGRAMIGILSVFAQLERETIRDRMVMGKIKRIEAGLPLTTAKGRTFGYDVIDTKLYINEEEAKQLRLIYDIFEEEQSITFLQKRLKKLGFKVRTYNRYNNWLTNDLYCGYVSYKDKVHVKGIHEPIISEEQFYRVQEIFSRMGKNPNMNKESASLLNNLVVCSKCGLSFVHRRKDTVSRGKKYHYRYYSCKTYKHAHELEKCGNKIWRADKLEELIIDRVNNYSFASRNVDKEDELDSLNEKLKTEHVKKKRLFDLYISGSYEVSELDAMMADIDAQINYYEAQIEANEELKKNKKIQENLADLATVDFNSLEFREKQLYLKSLINKIYIDDEQVTIEWL

SEQ ID NO: 39172 - DNA, 50 bp, Listeria monocytogenes
  source 1..50: mol_type = genomic DNA
tttagtacctcgttatctctcgctggacggagacgaatcgagaaactaaa

SEQ ID NO: 39173 - DNA, 40 bp, Listeria monocytogenes; identical to SEQ ID NO: 1298
  source 1..40: mol_type = genomic DNA

SEQ ID NO: 39174 - DNA, 50 bp, Listeria monocytogenes
  source 1..50: mol_type = genomic DNA
tttagtacctcgttatctctcgctatacggagacgaatcgagaaactaaa

SEQ ID NO: 39175 - DNA, 40 bp, Listeria monocytogenes; identical to SEQ ID NO: 39110
  source 1..40: mol_type = genomic DNA

SEQ ID NO: 39176 - protein, 452 aa, Listeria monocytogenes
MKAAIYIRVSTQEQVENYSIQAQTEKLTALCRSKDWDVYDTFIDGGYSGSNMNRPALNEMLSKLHEIDAVVVYRLDRLSRSQRDTITLIEEYFLKNNVEFVSLSETLDTSSPFGRAMIGILSVFAQLERETIRDRMVMGKIKRIEAGLPLTTAKGRTFGYDVIDTKLYINEEEAKQLQMIYDIFEEEKSITTLQKRLKKIGFKVKSYSSYNNWLTNDLYCGYVSYADKVHTKGVHEPIISEEQFYRVQEIFSRMGKNPNMNRDSASLLNNLVVCGKCGLGFVHRRKDTVSRGKKYHYRYYSCKTYKHTHELEKCGNKIWRADKLEELIIDRVNNYSFASRNVDKEDELDSLNEKLKIEHTKKKRLFDLYISGSYEVSELDAMMSDIDAQINYYEAQIEANEELKKNKKIQENLADLATVDFNSLEFREKQLYLKSLINKIYIDDEQVTIEWL

SEQ ID NO: 39177 - DNA, 50 bp, Listeria monocytogenes; identical to SEQ ID NO: 39172
  source 1..50: mol_type = genomic DNA

SEQ ID NO: 39178 - DNA, 40 bp, Listeria monocytogenes; identical to SEQ ID NO: 1298
  source 1..40: mol_type = genomic DNA

SEQ ID NO: 39179 - DNA, 50 bp, Listeria monocytogenes; identical to SEQ ID NO: 39174
  source 1..50: mol_type = genomic DNA

SEQ ID NO: 39180 - DNA, 40 bp, Listeria monocytogenes; identical to SEQ ID NO: 39110
  source 1..40: mol_type = genomic DNA

SEQ ID NO: 39181 - protein, 452 aa, Listeria monocytogenes; identical to SEQ ID NO: 32311

SEQ ID NO: 39182 - DNA, 50 bp, Listeria monocytogenes
  source 1..50: mol_type = genomic DNA
tttagttcctcgtttcctctcgttggacggagaataaatgagatactaat

SEQ ID NO: 39183 - DNA, 40 bp, Listeria monocytogenes; identical to SEQ ID NO: 1298
  source 1..40: mol_type = genomic DNA

SEQ ID NO: 39184 - DNA, 50 bp, Listeria monocytogenes
  source 1..50: mol_type = genomic DNA
tttagttcctcgtttcctctcgttatacggagaataaatgagatactaat

SEQ ID NO: 39185 - DNA, 40 bp, Listeria monocytogenes; identical to SEQ ID NO: 39110
  source 1..40: mol_type = genomic DNA

SEQ ID NO: 39186 - protein, 452 aa, Listeria monocytogenes; identical to SEQ ID NO: 7756

SEQ ID NO: 39187 - DNA, 50 bp, Listeria monocytogenes
  source 1..50: mol_type = genomic DNA
tttagtgcctcatttcctctcgttggacggagacgaatcgagaaactaaa

SEQ ID NO: 39188 - DNA, 40 bp, Listeria monocytogenes; identical to SEQ ID NO: 1298
  source 1..40: mol_type = genomic DNA

SEQ ID NO: 39189 - DNA, 50 bp, Listeria monocytogenes
  source 1..50: mol_type = genomic DNA
tttagtgcctcatttcctctcgttatacggagacgaatcgagaaactaaa

SEQ ID NO: 39190 - DNA, 40 bp, Listeria monocytogenes; identical to SEQ ID NO: 39110
  source 1..40: mol_type = genomic DNA

SEQ ID NO: 39191 - protein, 452 aa, Listeria monocytogenes; identical to SEQ ID NO: 39136

SEQ ID NO: 39192 - DNA, 50 bp, Listeria monocytogenes
  source 1..50: mol_type = genomic DNA
tttagtacctcattatctctcgctggacggagaataaatgagatactaat

SEQ ID NO: 39193 - DNA, 40 bp, Listeria monocytogenes; identical to SEQ ID NO: 1298
  source 1..40: mol_type = genomic DNA

SEQ ID NO: 39194 - DNA, 50 bp, Listeria monocytogenes
  source 1..50: mol_type = genomic DNA
tttagtacctcattatctctcgctatacggagaataaatgagatactaat

SEQ ID NO: 39195 - DNA, 40 bp, Listeria monocytogenes; identical to SEQ ID NO: 39110
  source 1..40: mol_type = genomic DNA

SEQ ID NO: 39196 - protein, 452 aa, Listeria monocytogenes; identical to SEQ ID NO: 39136

SEQ ID NO: 39197 - DNA, 50 bp, Listeria monocytogenes; identical to SEQ ID NO: 39172
  source 1..50: mol_type = genomic DNA

SEQ ID NO: 39198 - DNA, 40 bp, Listeria monocytogenes; identical to SEQ ID NO: 1298
  source 1..40: mol_type = genomic DNA

SEQ ID NO: 39199 - DNA, 50 bp, Listeria monocytogenes; identical to SEQ ID NO: 39174
  source 1..50: mol_type = genomic DNA

SEQ ID NO: 39200 - DNA, 40 bp, Listeria monocytogenes; identical to SEQ ID NO: 39110
  source 1..40: mol_type = genomic DNA

SEQ ID NO: 39201 - protein, 452 aa, Listeria monocytogenes
MKAAIYIRVSTQEQIENYSIQAQTEKLTALCRSKDWDVYDIFIDGGYSGSNMNRPALNEMLSKLHEIDAVVVYRLDRLSRSQRDTITLIEEYFLKNNVEFVSLSETLDTSSPFGRAMIGILSVFAQLERETIRDRMVMGQIKRVESGLPLTTAKGRTFGYNVVDAKLYINEEEAKHLQLIYDIFEEEKSITFLQKKLKELGFKVKSYSSYNKWLMNDLYIGYVSYADKVHVKGIHEPIISEDQFYRVQEIFSRMGKNPNMNKESSSLLNNLIVCEKCGLGYVHRAKDTVSRGKKYHYRYYSCKTYKHTHELEKCGNKIWRADKLEEIIIDRVKNYSFATRNVDKEDELDSINAKLKVEHLKKKRLFDLYINGSYEVAELDKMMADIDAQINYYNSQIEANKELKRNKKVQESLAELATVDFDSLEFREKQIYLKSIINKIYIDGEQVTIEWI

SEQ ID NO: 39202 - DNA, 50 bp, Listeria monocytogenes; identical to SEQ ID NO: 18922
  source 1..50: mol_type = genomic DNA

SEQ ID NO: 39203 - DNA, 40 bp, Listeria monocytogenes; identical to SEQ ID NO: 1298
  source 1..40: mol_type = genomic DNA

SEQ ID NO: 39204 - DNA, 50 bp, Listeria monocytogenes
  source 1..50: mol_type = genomic DNA
tttagtacctcgtttcctctcgctatacggagacgaatcgagaaactaaa

SEQ ID NO: 39205 - DNA, 40 bp, Listeria monocytogenes; identical to SEQ ID NO: 39110
  source 1..40: mol_type = genomic DNA

SEQ ID NO: 39206 - protein, 452 aa, Listeria monocytogenes; identical to SEQ ID NO: 39116

SEQ ID NO: 39207 - DNA, 50 bp, Listeria monocytogenes; identical to SEQ ID NO: 39167
  source 1..50: mol_type = genomic DNA

SEQ ID NO: 39208 - DNA, 40 bp, Listeria monocytogenes; identical to SEQ ID NO: 1298
  source 1..40: mol_type = genomic DNA

SEQ ID NO: 39209 - DNA, 50 bp, Listeria monocytogenes; identical to SEQ ID NO: 39169
  source 1..50: mol_type = genomic DNA

SEQ ID NO: 39210 - DNA, 40 bp, Listeria monocytogenes; identical to SEQ ID NO: 39110
  source 1..40: mol_type = genomic DNA

SEQ ID NO: 39211 - protein, 452 aa, Listeria monocytogenes; identical to SEQ ID NO: 7751

SEQ ID NO: 39212 - DNA, 50 bp, Listeria monocytogenes
  source 1..50: mol_type = genomic DNA
tttagttcctcgtttcctctcgttggacggagaacaaacgagaaactaaa

SEQ ID NO: 39213 - DNA, 40 bp, Listeria monocytogenes; identical to SEQ ID NO: 1298
  source 1..40: mol_type = genomic DNA

SEQ ID NO: 39214 - DNA, 50 bp, Listeria monocytogenes
  source 1..50: mol_type = genomic DNA
tttagttcctcgtttcctctcgttatacggagaacaaacgagaaactaaa

SEQ ID NO: 39215 - DNA, 40 bp, Listeria monocytogenes; identical to SEQ ID NO: 39110
  source 1..40: mol_type = genomic DNA

SEQ ID NO: 39216 - protein, 452 aa, Listeria monocytogenes
MKAAIYIRVSTQEQIENYSIQAQTEKLTALCRSKDWDVYDIFIDGGYSGSNMNRPALNEMLSKLHEIDAVVVYRLDRLSRSQRDTITLIEEYFLKNNVEFVSLSETLDTSSPFGRAMIGILSVFAQLERETIRDRMVMGKIKRVESGLPLTTAKGRTYGYDVVDTKLYINEEEAQHLQLIYDIFEEEKSITFLQKRLKKLGFKVKSYSSYNKWLMNDLYIGYVSYSDKVHAKGIHEPIISEDQFYRVQEIFSRMGKNPNMNKESSSLLNNLIVCEKCGLGYVHRAKDTVSRGKKYHYRYYSCKTYKHTHELEKCGNKIWRADKLEEIIISRVKNYSFATRNLDKEDELDSITEKLKTEHSKKKRLFDLYINGTYEVAELDKMMADIDAQINYYNSQIEANKELKRNKKVQESLAELATVDFDSLEFREKQIYLKSIINKIYIDGEQVTIEWI

SEQ ID NO: 39217 - DNA, 50 bp, Listeria monocytogenes
  source 1..50: mol_type = genomic DNA
tttagtacctcaatttctctcgctggacggagacgaatcgagaaactaaa

SEQ ID NO: 39218 - DNA, 40 bp, Listeria monocytogenes; identical to SEQ ID NO: 1298
  source 1..40: mol_type = genomic DNA

SEQ ID NO: 39219 - DNA, 50 bp, Listeria monocytogenes
  source 1..50: mol_type = genomic DNA
tttagtacctcaatttctctcgctatacggagacgaatcgagaaactaaa

SEQ ID NO: 39220 - DNA, 40 bp, Listeria monocytogenes; identical to SEQ ID NO: 39110
  source 1..40: mol_type = genomic DNA

SEQ ID NO: 39221 - protein, 452 aa, Listeria monocytogenes
MKAAIYIRVSTQEQVENYSIQAQTEKLTALCRSKDWDVYDTFIDGGYSGSNMNRPALNEMLSKLHEIDAVVVYRLDRLSRSQRDTITLIEEYFLKNNVEFVSLSETLDTSSPFGRAMIGILSVFAQLERETIRDRMVMGKIKRVESGLPLTTAKGRTFGYDVVDTKLYVNKEEAQHLQLIYDIFEEEKSITFLQKRLKKLGFKVKSYSSYNKWLMNDLYIGYVSYGDKVHVKGVHEPIISEEQFYRVQEVFSRMGKNPNMNKESSSLLNNLIVCEKCGLGFVHRVKDTVSRGKKYHYRYYSCKTYKHTHELEKCGNKIWRADKLEEMITDRVKNYSFATRNLDKEDELDSLNAKLQVEHSKKKRLFDLYINGSYEVAELDKMMADIDAQINYYNSQIEANEELKRDKKVQESLAELATVDFDALEFREKQIYLKSIINKIYIDGEQVTIEWI

SEQ ID NO: 39222 - DNA, 50 bp, Listeria monocytogenes
  source 1..50: mol_type = genomic DNA
tttagtacctcgatttctctcactggacggagacgaatcgagaaactaaa

SEQ ID NO: 39223 - DNA, 40 bp, Listeria monocytogenes; identical to SEQ ID NO: 1298
  source 1..40: mol_type = genomic DNA

SEQ ID NO: 39224 - DNA, 50 bp, Listeria monocytogenes
  source 1..50: mol_type = genomic DNA
tttagtacctcgatttctctcactatacggagacgaatcgagaaactaaa

SEQ ID NO: 39225 - DNA, 40 bp, Listeria monocytogenes; identical to SEQ ID NO: 39110
  source 1..40: mol_type = genomic DNA

SEQ ID NO: 39226 - protein, 452 aa, Listeria monocytogenes; identical to SEQ ID NO: 39176

SEQ ID NO: 39227 - DNA, 50 bp, Listeria monocytogenes; identical to SEQ ID NO: 39192
  source 1..50: mol_type = genomic DNA

SEQ ID NO: 39228 - DNA, 40 bp, Listeria monocytogenes; identical to SEQ ID NO: 1298
  source 1..40: mol_type = genomic DNA

SEQ ID NO: 39229 - DNA, 50 bp, Listeria monocytogenes; identical to SEQ ID NO: 39194
  source 1..50: mol_type = genomic DNA

SEQ ID NO: 39230 - DNA, 40 bp, Listeria monocytogenes; identical to SEQ ID NO: 39110
  source 1..40: mol_type = genomic DNA

SEQ ID NO: 39231 - protein, 452 aa, Listeria monocytogenes
MKAAIYIRVSTQEQIENYSIQAQTEKLTALCRSKDWDVYDIFIDGGYSGSNMNRPALNEMLSKLHEIDAVVVYRLDRLSRSQRDTITLIEEYFLKNNVEFVSLSETLDTSSPFGRAMIGILSVFAQLERETIRDRMVMGKIKRIEAGLPLTTAKGRTFGYDVIDTKLYINEEEAKQLQMIYDIFEEEKSITTLQKRLKKIGFKVKSYSSYNNWLTNDLYCGYVSYADKVHTKGVHEPIISEEQFYRVQEIFSRMGKNPNMNRDSASLLNNLVVCSKCGLGFVHRRKDTVSRGKKYHYRYYSCKTYKHTHELEKCGNKIWRADKLEELIIDRVNNYSFASRNVDKEDELDNLNEKLKTEHTKKKRLFDLYISGSYEVSELDAMMADIDAQINYYEAQIEANEELKKNKKIQENLADLATVDFDSLEFREKQLYLKSLINKIYIDGEQVTIEWL

SEQ ID NO: 39232 - DNA, 50 bp, Listeria monocytogenes
  source 1..50: mol_type = genomic DNA
tttagttcctcgtttcctctcgttggacggagacgaatcgagaaactaaa

SEQ ID NO: 39233 - DNA, 40 bp, Listeria monocytogenes; identical to SEQ ID NO: 1298
  source 1..40: mol_type = genomic DNA

SEQ ID NO: 39234 - DNA, 50 bp, Listeria monocytogenes
  source 1..50: mol_type = genomic DNA
tttagttcctcgtttcctctcgttatacggagacgaatcgagaaactaaa

SEQ ID NO: 39235 - DNA, 40 bp, Listeria monocytogenes; identical to SEQ ID NO: 39110
  source 1..40: mol_type = genomic DNA

SEQ ID NO: 39236 - protein, 478 aa, Listeria monocytogenes
MRKYKREPPGFSFYRKKERMCERRMRMKAAIYIRVSTQEQVENYSIQAQTEKLTALCRSKDWDVYDIFIDGGYSGSNMNRPALNEMLSKLHEIDAVVVYRLDRLSRSQKDTITLIEEYFLKNNVEFVSLSETLDTSSPFGRAMIGILSVFAQLERETIRDRMVMGQIKRVESGLPLTTAKGRTFGYDVVDTKLYINEEEAKHLQLIYDIFEEEKSITFLQKRLKELGFIVKSYSSYNKWLMNDLYIGYVSYSDKVHVKGIHEPIISEDQFYRVQEIFSRMGKNPNMNKESSSLLNNLIVCEKCGLGYVHRAKDTVSRGKKYHYRYYSCKTYKHTHELEKCGNKIWRADKLEEIIISRVKNYSFATRNLDKEDELDSITEKLKTEHSKKKRLFDLYINGSYEVAELDKMMADIDAQINYYNSQIEANKELKRNKKVQESLAELATVDFDSLEFREKQIYLKSIINKIYIDGEQVTIEWI

SEQ ID NO: 39237 - DNA, 50 bp, Listeria monocytogenes
  source 1..50: mol_type = genomic DNA
tttagtacctcgatttctctcgctggacggagacgaatcgagaaactaaa

SEQ ID NO: 39238 - DNA, 40 bp, Listeria monocytogenes; identical to SEQ ID NO: 1298
  source 1..40: mol_type = genomic DNA

SEQ ID NO: 39239 - DNA, 50 bp, Listeria monocytogenes
  source 1..50: mol_type = genomic DNA
tttagtacctcgatttctctcgctatacggagacgaatcgagaaactaaa

SEQ ID NO: 39240 - DNA, 40 bp, Listeria monocytogenes; identical to SEQ ID NO: 39110
  source 1..40: mol_type = genomic DNA

SEQ ID NO: 39241 - protein, 452 aa, Listeria monocytogenes
MKAAIYIRVSTQEQIENYSIQAQTEKLTALCRSKDWDVYDIFIDGGYSGSNMNRPALNEMLSKLHEIDAVVVYRLDRLSRSQRDTITLIEEYFLKNNVEFVSLSETLDTSSPFGRAMIGILSVFAQLERETIRDRMVMGQIKRVESGLPLTTAKGRTFGYNVVDAKLYINEEEAKHLQLIYDIFEEEKSITTLQKRLKKIGFKVKSYSSYNNWLTNDLYCGYVSYADKVHTKGVHEPIISEEQFYRVQEIFSRMGKNPNMNRDSASLLNNLVVCGKCGLGFVHRRKDTVSRGKKYHYRYYSCKTYKHTHELEKCGNKIWRADKLEELIIDRVNNYSFASRNVDKEDELDSLNEKLKIEHTKKKRLFDLYISGSYEVSELDAMMSDIDAQINYYEAQIEANEELKKNKKIQENLADLATVDFNSLEFREKQLYLKSLINKIYIDDEQVTIEWL

SEQ ID NO: 39242 - DNA, 50 bp, Listeria monocytogenes
  source 1..50: mol_type = genomic DNA
tttagtacctcattatctctcgctggacggagacgaatcgagaaactaaa

SEQ ID NO: 39243 - DNA, 40 bp, Listeria monocytogenes; identical to SEQ ID NO: 1298
  source 1..40: mol_type = genomic DNA

SEQ ID NO: 39244 - DNA, 50 bp, Listeria monocytogenes
  source 1..50: mol_type = genomic DNA
tttagtacctcattatctctcgctatacggagacgaatcgagaaactaaa

SEQ ID NO: 39245 - DNA, 40 bp, Listeria monocytogenes; identical to SEQ ID NO: 39110
  source 1..40: mol_type = genomic DNA

SEQ ID NO: 39246 - protein, 452 aa, Listeria monocytogenes
MKAAIYIRVSTQEQVENYSIQAQTEKLTALCRSKDWDVYDIFVDGGYSGSNMNRPALNEMLSKLHEIDAVVVYRLDRLSRSQKDTITLIEEYFLKNNVEFVSLSETLDTSSPFGRAMIGILSVFAQLERETIRDRMVMGKIKRVESGLPLTTAKGRTFGYDVVDTKLYVNKEEAQHLQLIYDIFEEEKSITFLQKRLKELGFKVKSYSSYNKWLMNDLYIGYVSYSDKVHVKGVHEAIISEEQFYRVQEIFSRMGKNPNMNRDSSSLLNNLIACEKCGLSFVHRVKDTASRGKKYRYRYYSCKTYKHTHELEKCGNKIWRADKLEEIIIDRVKNYSFATRNLDKEDELDSINAKLQVEHSKKKRLFDLYMNGSYEVAELDKMMADIDAQINYYNSQIEANEELKRNKKVQESLAELATVDFDSLEFREKQIYLKSIINKIYISDEQVTIEWI

SEQ ID NO: 39247 - DNA, 50 bp, Listeria monocytogenes
  source 1..50: mol_type = genomic DNA
tttagttcctcgttttctctcgctggacggagaataaatgagaaactaaa

SEQ ID NO: 39248 - DNA, 40 bp, Listeria monocytogenes; identical to SEQ ID NO: 1298
  source 1..40: mol_type = genomic DNA

SEQ ID NO: 39249 - DNA, 50 bp, Listeria monocytogenes
  source 1..50: mol_type = genomic DNA
tttagttcctcgttttctctcgctatacggagaataaatgagaaactaaa

SEQ ID NO: 39250 - DNA, 40 bp, Listeria monocytogenes; identical to SEQ ID NO: 39110
  source 1..40: mol_type = genomic DNA

SEQ ID NO: 39251 - protein, 452 aa, Listeria monocytogenes
MKAAIYIRVSTQEQIENYSIQAQTEKLTALCRSKDWDVYDIFIDGGYSGSNMNRPALNEMLSKLHEIDAVVVYRLDRLSRSQRDTITLIEEYFLKNNVEFVSLSETLDTSSPFGRAMIGILSVFAQLERETIRDRMVMGKIKRIEAGLPLTTAKGRTFGYDVIDTKLYINEEEAKQLRLIYDIFEEEQSITFLQKRLKKLGFKVRTYNRYNNWLTNDLYCGYVSYKDKVHVKGIHEPIISEEQFYRVQEIFSRMGKNPNMNKESASLLNNLVVCSKCGLGFVHRRKDTVSRGKKYHYRYYSCKTYKHTHELEKCGNKIWRADKLEELIIDRVNNYSFASRNIDKEDELDSLNEKLKIEHTKKKRLFDLYISGSYEVSELDAMMSDIDAQINYYEAQIEANEELKKNKKIQENLADLATVDFNSLEFREKQLYLKSLINKIYIDDEQVTIEWL

SEQ ID NO: 39252 - DNA, 50 bp, Listeria monocytogenes; identical to SEQ ID NO: 39172
  source 1..50: mol_type = genomic DNA

SEQ ID NO: 39253 - DNA, 40 bp, Listeria monocytogenes; identical to SEQ ID NO: 1298
  source 1..40: mol_type = genomic DNA

SEQ ID NO: 39254 - DNA, 50 bp, Listeria monocytogenes; identical to SEQ ID NO: 39174
  source 1..50: mol_type = genomic DNA

SEQ ID NO: 39255 - DNA, 40 bp, Listeria monocytogenes; identical to SEQ ID NO: 39110
  source 1..40: mol_type = genomic DNA

SEQ ID NO: 39256 - protein, 452 aa, Listeria monocytogenes; identical to SEQ ID NO: 5116

SEQ ID NO: 39257 - DNA, 50 bp, Listeria monocytogenes
  source 1..50: mol_type = genomic DNA
tttagttcctcgttttctctcgttggacggagaacaaacgagaaactaaa

SEQ ID NO: 39258 - DNA, 40 bp, Listeria monocytogenes; identical to SEQ ID NO: 1298
  source 1..40: mol_type = genomic DNA

SEQ ID NO: 39259 - DNA, 50 bp, Listeria monocytogenes
  source 1..50: mol_type = genomic DNA
tttagttcctcgttttctctcgttatacggagaacaaacgagaaactaaa

SEQ ID NO: 39260 - DNA, 40 bp, Listeria monocytogenes; identical to SEQ ID NO: 39110
  source 1..40: mol_type = genomic DNA

SEQ ID NO: 39261 - protein, 452 aa, Listeria monocytogenes
MKAAIYIRVSTQEQIENYSIQAQTEKLTALCRSKDWDVYDIFIDGGYSGSNMNRPALNEMLSKLHEIDAVVVYRLDRLSRSQRDTITLIEEYFLKNNVEFVSLSETLDTSSPFGRAMIGILSVFAQLERETIRDRMVMGKIKRIEAGLPLTTAKGRTFGYNVIDTKLYINEEEAKQLQLIYDIFEEEKSITTLQKRLKKLGFKVKSYSSYNNWLTNDLYCGYVSYADKVHTKGVHEPIISEEQFYRVQEIFSRMGKNPNMNRDSASLLNNLVVCSKCGLGFVHRRKDTVSRGKKYHYRYYSCKTYKHTHELEKCGNKIWRADKLEELIIDRVNNYSFASRNVDKEDELDNLNEKLKTEHTKKKRLFDLYISGSYEVSELDAMMADIDAQINYYEAQIEANEELKKNKKIQENLADLATVDFDSLEFREKQLYLKSLINKIYIDGEQVTIEWL

SEQ ID NO: 39262 - DNA, 50 bp, Listeria monocytogenes; identical to SEQ ID NO: 39182
  source 1..50: mol_type = genomic DNA

SEQ ID NO: 39263 - DNA, 40 bp, Listeria monocytogenes; identical to SEQ ID NO: 1298
  source 1..40: mol_type = genomic DNA

SEQ ID NO: 39264 - DNA, 50 bp, Listeria monocytogenes; identical to SEQ ID NO: 39184
  source 1..50: mol_type = genomic DNA

SEQ ID NO: 39265 - DNA, 40 bp, Listeria monocytogenes; identical to SEQ ID NO: 39110
  source 1..40: mol_type = genomic DNA

SEQ ID NO: 39266 - protein, 452 aa, Listeria monocytogenes
MKAAIYIRVSTQEQVENYSIQAQTEKLTALCRSKDWDVYDIFIDGGYSGSNMNRPALNEMLSKLHEIDAVVVYRLDRLSRSQRDTITLIEEYFLKNNVEFVSLSETLDTSSPFGRAMIGILSVFAQLERETIRDRMVMGKIKRIEAGLPLTTAKGRTFGYDVIDTKLYINEEEAKQLRLIYDIFEEEQSITFLQKRLKKLGFKVRTYNRYNNWLTNDLYCGYVSYKDKVHVKGIHEPIISEEQFYRVQEIFTRMGKNPNMNRDSASLLNNLVVCGKCGLGFVHRRKDTVSRGKKYHYRYYSCKTYKHTHELEKCGNKIWRADKLEELIIDRVNNYSFASRNVDKEDELDYLNEKLKIEHAKKKRLFDLYINGSYEVSELDSMMNDIDAQINYYEAQIEANEELKKNKEIQENLADLATVDFDSLEFREKQLYLKSLINKIYIDDEQVTIEWL

SEQ ID NO: 39267 - DNA, 50 bp, Listeria monocytogenes
  source 1..50: mol_type = genomic DNA
tttagtacttcgttttctctcgttggacggaggataaatgagaaactaaa

SEQ ID NO: 39268 - DNA, 40 bp, Listeria monocytogenes; identical to SEQ ID NO: 1298
  source 1..40: mol_type = genomic DNA

SEQ ID NO: 39269 - DNA, 50 bp, Listeria monocytogenes
  source 1..50: mol_type = genomic DNA
tttagtacttcgttttctctcgttatacggaggataaatgagaaactaaa

SEQ ID NO: 39270 - DNA, 40 bp, Listeria monocytogenes; identical to SEQ ID NO: 39110
  source 1..40: mol_type = genomic DNA

SEQ ID NO: 39271 - protein, 452 aa, Listeria monocytogenes
MKAAIYIRVSTQEQIENYSIQAQTEKLTALCRSKDWDVYDIFIDGGYSGSNMNRPALNEMLSKLHEIDAVVVYRLDRLSRSQRDTITLIEEYFLKNNVEFVSLSETLDTSSPFGRAMIGILSVFAQLERETIRDRMVMGKIKRIEAGLPLTTAKGRTFGYDVIDTKLYINEEEAKQLQMIYDIFEEEKSITTLQKRLKKIGFKVKSYSSYNNWLTNDLYCGYVSYADKVHTKGVHEPIISEEQFYRVQEIFSRMGKYPNMNRDSASLLNNLVVCGKCGLGFVHRRKDTVSRGKKYHYRYYSCKTYKHTHELEKCGNKIWRADKLEELIIDRVNNYSFASRNVDKEDELDSLNEKLKIEHTKKKRLFDLYISGSYEVSELDAMMSDIDAQINYYEAQIEANEELKKNKKIQENLADLATVDFNSLEFREKQLYLKSLINKIYIDDEQVTIEWL

SEQ ID NO: 39272 - DNA, 50 bp, Listeria monocytogenes; identical to SEQ ID NO: 39172
  source 1..50: mol_type = genomic DNA

SEQ ID NO: 39273 - DNA, 40 bp, Listeria monocytogenes; identical to SEQ ID NO: 1298
  source 1..40: mol_type = genomic DNA

SEQ ID NO: 39274 - DNA, 50 bp, Listeria monocytogenes; identical to SEQ ID NO: 39174
  source 1..50: mol_type = genomic DNA

SEQ ID NO: 39275 - DNA, 40 bp, Listeria monocytogenes; identical to SEQ ID NO: 39110
  source 1..40: mol_type = genomic DNA

SEQ ID NO: 39276 - protein, 452 aa, Listeria monocytogenes
MKAAIYIRVSTQEQVENYSIQAQTEKLTALCRSKDWDVYDIFIDGGYSGSNMNRPALNEMLSKLHEIDAVVVYRLDRLSRSQRDTITLIEEYFLKNNVEFVSLSETLDTSSPFGRAMIGILSVFAQLERETIRDRMVMGKIKRIEAGLPLTTAKGRTFGYDVIDTKLYINEEEAKQLQMIYDIFEEEKSITTLQKRLKKLGFKVKSYSSYNNWLTNDLYCGYVSYADKVHTKGVHEPIISEEQFYRVQEIFSRMGKNPNMNRDSASLLNNLVVCGKCGLGYVHRRKDTVSRGKKYHYRYYSCKTYKHTHELEKCGNKIWRADKLEKLIIDRVNNYSFASRNVDKEDELDNLNEKLKTEHTKKKRLFDLYISGSYEVSELDAMMADIDAQINYYEAQIEANEELKKNKKIQENLADLATVDFDSLEFREKQLYLKSLINKIYIDGEQVTIEWL

SEQ ID NO: 39277 - DNA, 50 bp, Listeria monocytogenes
  source 1..50: mol_type = genomic DNA
tttagttcctcattttctctcgttggacggagacgaatcgagaaactaaa

SEQ ID NO: 39278 - DNA, 40 bp, Listeria monocytogenes; identical to SEQ ID NO: 1298
  source 1..40: mol_type = genomic DNA

SEQ ID NO: 39279 - DNA, 50 bp, Listeria monocytogenes
  source 1..50: mol_type = genomic DNA
tttagttcctcattttctctcgttatacggagacgaatcgagaaactaaa

SEQ ID NO: 39280 - DNA, 40 bp, Listeria monocytogenes; identical to SEQ ID NO: 39110
  source 1..40: mol_type = genomic DNA

SEQ ID NO: 39281 - protein, 452 aa, Listeria monocytogenes; identical to SEQ ID NO: 39176

SEQ ID NO: 39282 - DNA, 50 bp, Listeria monocytogenes; identical to SEQ ID NO: 39242
  source 1..50: mol_type = genomic DNA

SEQ ID NO: 39283 - DNA, 40 bp, Listeria monocytogenes; identical to SEQ ID NO: 1298
  source 1..40: mol_type = genomic DNA

SEQ ID NO: 39284 - DNA, 50 bp, Listeria monocytogenes; identical to SEQ ID NO: 39244
  source 1..50: mol_type = genomic DNA

SEQ ID NO: 39285 - DNA, 40 bp, Listeria monocytogenes; identical to SEQ ID NO: 39110
  source 1..40: mol_type = genomic DNA

SEQ ID NO: 39286 - protein, 452 aa, Listeria monocytogenes; identical to SEQ ID NO: 5116

SEQ ID NO: 39287 - DNA, 50 bp, Listeria monocytogenes
  source 1..50: mol_type = genomic DNA
tttagttcctcgttttctctcgttggacggagacgaatcgagaaactaaa

SEQ ID NO: 39288 - DNA, 40 bp, Listeria monocytogenes; identical to SEQ ID NO: 1298
  source 1..40: mol_type = genomic DNA

SEQ ID NO: 39289 - DNA, 50 bp, Listeria monocytogenes
  source 1..50: mol_type = genomic DNA
tttagttcctcgttttctctcgttatacggagacgaatcgagaaactaaa

SEQ ID NO: 39290 - DNA, 40 bp, Listeria monocytogenes; identical to SEQ ID NO: 39110
  source 1..40: mol_type = genomic DNA

SEQ ID NO: 39291 - protein, 452 aa, Listeria monocytogenes
MKAAIYIRVSTQEQIENYSIQAQTEKLTALCRSKDWDVYDIFIDGGYSGSNMNRPALNEMLSKLHEIDAVVVYRLDRLSRSQRDTITLIEEYFLKNNVEFVSLSETLDTSSPFGRAMIGILSVFAQLERETIRDRMVMGKIKRIEAGLPLTTAKGRTFGYDVIDTKLYINEEEAKQLRLIYDIFEEEQSITFLQKRLKKLGFKVRTYNRYNNWLTNDLYCGYVSYKDKVHVKGIHEPIISEEQFYRVQEIFSRMGKNPNMNRDSASLLNNLVVCGKCGLGFVHRRKDTVSRGKKYHYRYYSCKTYKHTHELEKCGNKIWRADKLEELIIDRVNNYSFASRNIDKEDELDSLNEKLKIEHTKKKRLFDLYISGSYEVSELDAMMSDIDAQINYYEAQIEANEELKKNKKIQENLADLATVDFNSLEFREKQLYLKSLINKIYIDDEQVTIEWL

SEQ ID NO: 39292 - DNA, 50 bp, Listeria monocytogenes; identical to SEQ ID NO: 39172
  source 1..50: mol_type = genomic DNA

SEQ ID NO: 39293 - DNA, 40 bp, Listeria monocytogenes; identical to SEQ ID NO: 1298
  source 1..40: mol_type = genomic DNA

SEQ ID NO: 39294 - DNA, 50 bp, Listeria monocytogenes; identical to SEQ ID NO: 39174
  source 1..50: mol_type = genomic DNA

SEQ ID NO: 39295 - DNA, 40 bp, Listeria monocytogenes; identical to SEQ ID NO: 39110
  source 1..40: mol_type = genomic DNA

SEQ ID NO: 39296 - protein, 452 aa, Listeria monocytogenes
MKAAIYIRVSTQEQIENYSIQAQTEKLTALCRSKDWDVYDIFIDGGYSGSNMNRPALNEMLSKLHEIDAVVVYRLDRLSRSQRDTITLIEEYFLKNNVEFVSLSETLDTSSPFGRAMIGILSVFAQLERETIRDRMVMGKIKRIEAGLPLTTAKGRTFGYDVIDTKLYINEEEAKQLQMIYDIFEEEKSITTLQKRLKKLGFKVKSYSSYNNWLTNDLYCGYVSYADKVHTKGVHEPIISEEQFYRVQEIFSRMGKNPNMNRDSASLLNNLVVCGKCGLGFVHRRKDTISRGKKYHYRYYSCKTYKHTHELEKCGNKIWRADKLEELIIDRVNNYSFASRNVDKEDELDNLNEKLKTEHKKKKRLFDLYISGSYEVSELDAMMADIDAQINYYEAQIEANEELKKNKKIQENLADLATVDFDSLEFREKQLYLKSLINKIYIDGEQVTIEWL

SEQ ID NO: 39297 - DNA, 50 bp, Listeria monocytogenes
  source 1..50: mol_type = genomic DNA
tttagtccctcgttttctctcgttggacggagacgaatcgagaaactaaa

SEQ ID NO: 39298 - DNA, 40 bp, Listeria monocytogenes; identical to SEQ ID NO: 1298
  source 1..40: mol_type = genomic DNA

SEQ ID NO: 39299 - DNA, 50 bp, Listeria monocytogenes
  source 1..50: mol_type = genomic DNA
tttagtccctcgttttctctcgttatacggagacgaatcgagaaactaaa

SEQ ID NO: 39300 - DNA, 40 bp, Listeria monocytogenes; identical to SEQ ID NO: 39110
  source 1..40: mol_type = genomic DNA

SEQ ID NO: 39301 - protein, 452 aa, Listeria monocytogenes; identical to SEQ ID NO: 7851

SEQ ID NO: 39302 - DNA, 50 bp, Listeria monocytogenes
  source 1..50: mol_type = genomic DNA
tttagttcctcgtttcctctcgttggacggagaagaaacgagatgcaaaa

SEQ ID NO: 39303 - DNA, 40 bp, Listeria monocytogenes; identical to SEQ ID NO: 1298
  source 1..40: mol_type = genomic DNA

SEQ ID NO: 39304 - DNA, 50 bp, Listeria monocytogenes
  source 1..50: mol_type = genomic DNA
tttagttcctcgtttcctctcgttatacggagaagaaacgagatgcaaaa

SEQ ID NO: 39305 - DNA, 40 bp, Listeria monocytogenes; identical to SEQ ID NO: 39110
  source 1..40: mol_type = genomic DNA

SEQ ID NO: 39306 - protein, 452 aa, Listeria monocytogenes
MKAAIYIRVSTQEQIENYSIQAQTEKLTALCRSKDWDVYDIFIDGGYSGSNMNRPALNEMLSKLHEIDAVVVYRLDRLSRSQRDTITLIEEYFLKNNVEFVSLSETLDTSSPFGRAMIGILSVFAQLERETIRDRMVMGKIKRIEAGLPLTTAKGRTFGYDVIDTKLYINEEEAKQLQMIYDIFEEEKSITSLQKRLKKLGFKVKSYSSYNNWLTNDLYCGYVSYADKVHTKGVHEPIISEEQFYRVQEIFSRMGKNPNMNRDSASLLNNLVVCGKCGLGFVHRRKDTVSRGKKYHYRYYSCKTYKHTHELEKCGNKIWRADKLEELIIDRVNNYSFASRNVDKEDELDSLNEKLKIEHTKKKRLFDLYISGSYEVSELDAMMSDIDAQINYYEAQIEANEELKKNKKIQENLADLATVDFNSLEFREKQLYLKSLINKIYIDDEQVTIEWL

SEQ ID NO: 39307 - DNA, 50 bp, Listeria monocytogenes; identical to SEQ ID NO: 39172
  source 1..50: mol_type = genomic DNA

SEQ ID NO: 39308 - DNA, 40 bp, Listeria monocytogenes; identical to SEQ ID NO: 1298
  source 1..40: mol_type = genomic DNA

SEQ ID NO: 39309 - DNA, 50 bp, Listeria monocytogenes; identical to SEQ ID NO: 39174
  source 1..50: mol_type = genomic DNA

SEQ ID NO: 39310 - DNA, 40 bp, Listeria monocytogenes; identical to SEQ ID NO: 39110
  source 1..40: mol_type = genomic DNA

SEQ ID NO: 39311 - protein, 452 aa, Listeria monocytogenes
MKAAIYIRVSTQEQVENYSIQAQTEKLTALCRSKDWDVYDIFIDGGYSGSNMNRPALNEMLSKLHEIDAVVVYRLDRLSRSQRDTITLIEEYFLKNNVEFVSLSETLDTSSPFGRAMIGILSVFAQLERETIRDRMVMGKIKRVESGLPLTTAKGRTFGYDVVDTKLYVNKEEAQHLQLIYDIFEEEKSITFLQKRLKKLGFKVKSYSSYNKWLMNDLYIGYVSYSDKVHVKGIHEPIISEDQFYRVQEIFSRMGKNPNMNKESSSLLNNLIVCEKCGLGYVHRAKDTVSRGKKYHYRYYSCKTYKHTHELEKCGNKTWRADKLEEIIIDRVKNYSFATRNVDKEDELDSINAKLKVEHLKKKRLFDLYINGSYEVAELDKMMADIDAQINYYNSQIEANKELKRNKKVQESLAELATVDFDSLEFREKQIYLKSIINKIYIDGEQVTIEWI

SEQ ID NO: 39312 - DNA, 50 bp, Listeria monocytogenes
  source 1..50: mol_type = genomic DNA
tttagtacctcaatttctctcgctggacggagaacaaacgagaaactaaa

SEQ ID NO: 39313 - DNA, 40 bp, Listeria monocytogenes; identical to SEQ ID NO: 1298
  source 1..40: mol_type = genomic DNA

SEQ ID NO: 39314 - DNA, 50 bp, Listeria monocytogenes
  source 1..50: mol_type = genomic DNA
tttagtacctcaatttctctcgctatacggagaacaaacgagaaactaaa

SEQ ID NO: 39315 - DNA, 40 bp, Listeria monocytogenes; identical to SEQ ID NO: 39110
  source 1..40: mol_type = genomic DNA

SEQ ID NO: 39316 - protein, 452 aa, Listeria monocytogenes
MKAAIYIRVSTQEQIENYSIQAQTEKLTALCRSKDWDVYDIFIDGGYSGSNMNRPALNEMLSKLHEIDAVVVYRLDRLSRSQRDTITLIEEYFLKNNVEFVSLSETLDTSSPFGRAMIGILSVFAQLERETIRDRMVMGKIKRIEAGLPITTAKGRTFGYDVIDTKLYINEEEAKQLRLIYDIFEEEQSITFLQKRLKKLGFKVRTYNRYNNWLTNDLYCGYVSYKDKVHVKGIHEPIISEEQFYRVQEIFSRMGKNPNMNRDSASLLNNLVVCGKCGLGFVHRRKDTVSRGKKYHYRYYSCKTYKHTHELEKCGNKIWRADKLEELIIDRVNNYSFASRNVDKEDELDSLNEKLKIEHTKKKRLFDLYISGSYEVSELDAMMSDIDAQINYYEAQIEANEELKKNKKIQENLADLATVDFNSLEFREKQLYLKSLINKIYIDDEQVTIEWL

SEQ ID NO: 39317 - DNA, 50 bp, Listeria monocytogenes; identical to SEQ ID NO: 39172
  source 1..50: mol_type = genomic DNA

SEQ ID NO: 39318 - DNA, 40 bp, Listeria monocytogenes; identical to SEQ ID NO: 1298
  source 1..40: mol_type = genomic DNA

SEQ ID NO: 39319 - DNA, 50 bp, Listeria monocytogenes; identical to SEQ ID NO: 39174
  source 1..50: mol_type = genomic DNA

SEQ ID NO: 39320 - DNA, 40 bp, Listeria monocytogenes; identical to SEQ ID NO: 39110
  source 1..40: mol_type = genomic DNA

SEQ ID NO: 39321 - protein, 452 aa, Listeria monocytogenes; identical to SEQ ID NO: 39136

SEQ ID NO: 39322 - DNA, 50 bp, Listeria monocytogenes
  source 1..50: mol_type = genomic DNA
tttagtacctcgttatctctcgctggacggagacaaatcgagaaactaaa

SEQ ID NO: 39323 - DNA, 40 bp, Listeria monocytogenes; identical to SEQ ID NO: 1298
  source 1..40: mol_type = genomic DNA

SEQ ID NO: 39324 - DNA, 50 bp, Listeria monocytogenes
  source 1..50: mol_type = genomic DNA
tttagtacctcgttatctctcgctatacggagacaaatcgagaaactaaa

SEQ ID NO: 39325 - DNA, 40 bp, Listeria monocytogenes; identical to SEQ ID NO: 39110
  source 1..40: mol_type = genomic DNA

SEQ ID NO: 39326 - protein, 452 aa, Listeria monocytogenes; identical to SEQ ID NO: 39136

SEQ ID NO: 39327 - DNA, 50 bp, Listeria monocytogenes; identical to SEQ ID NO: 39242
  source 1..50: mol_type = genomic DNA

SEQ ID NO: 39328 - DNA, 40 bp, Listeria monocytogenes; identical to SEQ ID NO: 1298
  source 1..40: mol_type = genomic DNA

SEQ ID NO: 39329 - DNA, 50 bp, Listeria monocytogenes; identical to SEQ ID NO: 39244
  source 1..50: mol_type = genomic DNA

SEQ ID NO: 39330 - DNA, 40 bp, Listeria monocytogenes; identical to SEQ ID NO: 39110
  source 1..40: mol_type = genomic DNA

SEQ ID NO: 39331 - protein, 452 aa, Listeria monocytogenes; identical to SEQ ID NO: 32256

SEQ ID NO: 39332 - DNA, 50 bp, Listeria monocytogenes; identical to SEQ ID NO: 39287
  source 1..50: mol_type = genomic DNA

SEQ ID NO: 39333 - DNA, 40 bp, Listeria monocytogenes; identical to SEQ ID NO: 1298
  source 1..40: mol_type = genomic DNA

SEQ ID NO: 39334 - DNA, 50 bp, Listeria monocytogenes; identical to SEQ ID NO: 39289
  source 1..50: mol_type = genomic DNA

SEQ ID NO: 39335 - DNA, 40 bp, Listeria monocytogenes; identical to SEQ ID NO: 39110
  source 1..40: mol_type = genomic DNA

SEQ ID NO: 39336 - protein, 452 aa, Listeria monocytogenes; identical to SEQ ID NO: 39296

SEQ ID NO: 39337 - DNA, 50 bp, Listeria monocytogenes; identical to SEQ ID NO: 39172
  source 1..50: mol_type = genomic DNA

SEQ ID NO: 39338 - DNA, 40 bp, Listeria monocytogenes; identical to SEQ ID NO: 1298
  source 1..40: mol_type = genomic DNA

SEQ ID NO: 39339 - DNA, 50 bp, Listeria monocytogenes; identical to SEQ ID NO: 39174
  source 1..50: mol_type = genomic DNA

SEQ ID NO: 39340 - DNA, 40 bp, Listeria monocytogenes; identical to SEQ ID NO: 39110
  source 1..40: mol_type = genomic DNA

SEQ ID NO: 39341 - protein, 452 aa, Listeria monocytogenes
MKAAIYIRVSTQEQIENYSIQAQTEKLTALCRSKDWDVYDIFIDGGYSGSNMKRPALNEMLSKLHEIDAVVVYRLDRLSRSQRDTITLIEEYFLKNNVEFVSLSETLDTSSPFGRAMIGILSVFAQLERETIRDRMVMGKIKRIEAGLPLTTAKGRTFGYDVIDTKLYINEEEAKQLQMIYDIFEEEKSITFLQKRLKKLGFKVKSYSSYNNWLTNDLYCGYVSYKDKVHTKGIHEPIISEEQFYRVQEIFSRMGKNPNMNKESASLLNNLVVCSKCGLSFVHRRKDTVSRGKKYHYRYYSCKTYKHTHELEKCGNKIWRADKLEELIIDRVNNYSFASRNVDKEDELDNLNEKLKTEHTKKKRLFDLYISGSYEVSELDAMMADIDAQINYYEAQIEANEELKKNKKIQENLADLATVDFDSLEFREKQLYLKSLINKIYIDGEQVTIEWL

SEQ ID NO: 39342 - DNA, 50 bp, Listeria monocytogenes; identical to SEQ ID NO: 39302
  source 1..50: mol_type = genomic DNA

SEQ ID NO: 39343 - DNA, 40 bp, Listeria monocytogenes; identical to SEQ ID NO: 1298
  source 1..40: mol_type = genomic DNA

SEQ ID NO: 39344 - DNA, 50 bp, Listeria monocytogenes; identical to SEQ ID NO: 39304
  source 1..50: mol_type = genomic DNA

SEQ ID NO: 39345 - DNA, 40 bp, Listeria monocytogenes; identical to SEQ ID NO: 39110
  source 1..40: mol_type = genomic DNA

SEQ ID NO: 39346 - protein, 452 aa, Listeria monocytogenes
MKAAIYIRVSTQEQIENYSIQAQTEKLTALCRSKDWDVYDIFIDGGYSGSNMNRPALNEMLSKLHEIDAVVVYRLDRLSRSQRDTITLIEEYFLKNNVEFVSLSETLDTSSPFGRAMIGILSVFAQLERETIRDRMVMGKIKRIEAGLPLTTAKGRTFGYDVIDTKLYINEEEAKQLQMIYDIFEEEKSITSLQKRLKKLGFKVKSYSSYNNWLTNDLYCGYVSYADKVHTKGVHEPIISEEQFYRVQEIFSRMGKNPNMNRDSASLLNNLVVCSKCGLSFVHRRKDTVSRGKKYHYRYYSCKTYKHTHELEKCGNKIWRADKLEELIIDRVNNYSFASRNVDKEDELDNLNEKLKTEHTKKKRLFDLYISGSYEVSELDAMMADIDAQINYYEAQIEANEELKKNKKIQENLADLATVDFDSLEFREKQLYLKSLINKIYIDGEQVTIEWL

SEQ ID NO: 39347 - DNA, 50 bp, Listeria monocytogenes; identical to SEQ ID NO: 39302
  source 1..50: mol_type = genomic DNA

SEQ ID NO: 39348 - DNA, 40 bp, Listeria monocytogenes; identical to SEQ ID NO: 1298
  source 1..40: mol_type = genomic DNA

SEQ ID NO: 39349 - DNA, 50 bp, Listeria monocytogenes; identical to SEQ ID NO: 39304
  source 1..50: mol_type = genomic DNA

SEQ ID NO: 39350 - DNA, 40 bp, Listeria monocytogenes; identical to SEQ ID NO: 39110
  source 1..40: mol_type = genomic DNA

SEQ ID NO: 39351 - protein, 452 aa, Listeria monocytogenes; identical to SEQ ID NO: 39136

SEQ ID NO: 39352 - DNA, 50 bp, Listeria monocytogenes
  source 1..50: mol_type = genomic DNA
tttagtacctcgttttctctcgttggacggagacgaatcgagaaactaaa

SEQ ID NO: 39353 - DNA, 40 bp, Listeria monocytogenes; identical to SEQ ID NO: 1298
  source 1..40: mol_type = genomic DNA

SEQ ID NO: 39354 - DNA, 50 bp, Listeria monocytogenes
  source 1..50: mol_type = genomic DNA
tttagtacctcgttttctctcgttatacggagacgaatcgagaaactaaa

SEQ ID NO: 39355 - DNA, 40 bp, Listeria monocytogenes; identical to SEQ ID NO: 39110
  source 1..40: mol_type = genomic DNA

SEQ ID NO: 39356 - protein, 452 aa, Listeria monocytogenes; identical to SEQ ID NO: 7861

SEQ ID NO: 39357 - DNA, 50 bp, Listeria monocytogenes; identical to SEQ ID NO: 39287
  source 1..50: mol_type = genomic DNA

SEQ ID NO: 39358 - DNA, 40 bp, Listeria monocytogenes; identical to SEQ ID NO: 1298
  source 1..40: mol_type = genomic DNA

SEQ ID NO: 39359 - DNA, 50 bp, Listeria monocytogenes; identical to SEQ ID NO: 39289
  source 1..50: mol_type = genomic DNA

SEQ ID NO: 39360 - DNA, 40 bp, Listeria monocytogenes; identical to SEQ ID NO: 39110
  source 1..40: mol_type = genomic DNA

SEQ ID NO: 39361 - protein, 452 aa, Listeria monocytogenes
MKAAIYIRVSTQEQIENYSIQAQTEKLTALCRSKDWDVYDIFIDGGYSGSNMNRPALNEMLSKLHEIDAVVVYRLDRLSRSQRDTITLIEEYFLKNNVEFVSLSETLDTSSPFGRAMIGILSVFAQLERETIRDRMVMGQIKRVESGLPLTTAKGRTFGYNVVDAKLYINEEEAKHLQLIYDIFEEEKSITFLQKKLKELGFKVKSYSSYNKWLMNDLYIGYVSYSDKVHVKGIHEPIISEDQFYRVQEIFSRMGKNPNMNKESSSLLNNLIVCEKCGLGYVHRAKDTVSRGKKYHYRYYSCKTYKHTHELEKCGNKIWRADKLEEIIISRVKNYSFATRNLDKEDELDSITEKLKTEHSKKKRLFDLYINGTYEVAELDKMMADIDAQINYYNSQIEANKELKRNKKVQESLAELATVDFDSLEFREKQIYLKSIINKIYIDGEQVTIEWI

SEQ ID NO: 39362 - DNA, 50 bp, Listeria monocytogenes; identical to SEQ ID NO: 39217
  source 1..50: mol_type = genomic DNA

SEQ ID NO: 39363 - DNA, 40 bp, Listeria monocytogenes; identical to SEQ ID NO: 1298
  source 1..40: mol_type = genomic DNA

SEQ ID NO: 39364 - DNA, 50 bp, Listeria monocytogenes; identical to SEQ ID NO: 39219
  source 1..50: mol_type = genomic DNA

SEQ ID NO: 39365 - DNA, 40 bp, Listeria monocytogenes; identical to SEQ ID NO: 39110
  source 1..40: mol_type = genomic DNA

SEQ ID NO: 39366 - protein, 452 aa, Listeria monocytogenes; identical to SEQ ID NO: 39121

SEQ ID NO: 39367 - DNA, 50 bp, Listeria monocytogenes; identical to SEQ ID NO: 39172
  source 1..50: mol_type = genomic DNA

SEQ ID NO: 39368 - DNA, 40 bp, Listeria monocytogenes; identical to SEQ ID NO: 1298
  source 1..40: mol_type = genomic DNA

SEQ ID NO: 39369 - DNA, 50 bp, Listeria monocytogenes; identical to SEQ ID NO: 39174
  source 1..50: mol_type = genomic DNA

SEQ ID NO: 39370 - DNA, 40 bp, Listeria monocytogenes; identical to SEQ ID NO: 39110
  source 1..40: mol_type = genomic DNA

SEQ ID NO: 39371 - protein, 452 aa, Listeria monocytogenes
MKAAIYIRVSTQEQIENYSIQAQTEKLTALCRSKDWDVYDIFIDGGYSGSNMNRPALNEMLSKLHEIDAVVVYRLDRLSRSQRDTITLIEEYFLKNNVEFVSLSETLDTSSPFGRAMIGILSVFAQLERETIRDRMVMGKIKRIEAGLPLTTAKGRTFGYDVIDTKLYINEEEAKQLQMIYDIFEEEKSITTLQKRLKKLGFKVKSYSSYNNWLTNDLYCGYVSYADKVHTKGVHEPIISEEQFYRVQEIFSRMGKNPNMNRDSASLLNNLVVCGKCGLGFVHRRKDTVSRGKKYHYRYYSCKTYKHTHELEKCGNKIWRADKLEELIIDRVNNYSFASRNVDKEDELDNLNEKLKTEHTKKKRLFDLYISGSYEVSELDAMMADIDAQINYYEAQIEANEELKKNKKIQENLADLATVDFDSLEFREKQLYLKSLINKIYIDGEQVTIEWL

SEQ ID NO: 39372 - DNA, 50 bp, Listeria monocytogenes; identical to SEQ ID NO: 39182
  source 1..50: mol_type = genomic DNA

SEQ ID NO: 39373 - DNA, 40 bp, Listeria monocytogenes; identical to SEQ ID NO: 1298
  source 1..40: mol_type = genomic DNA

SEQ ID NO: 39374 - DNA, 50 bp, Listeria monocytogenes; identical to SEQ ID NO: 39184
  source 1..50: mol_type = genomic DNA

SEQ ID NO: 39375 - DNA, 40 bp, Listeria monocytogenes; identical to SEQ ID NO: 39110
  source 1..40: mol_type = genomic DNA

SEQ ID NO: 39376 - protein, 452 aa, Listeria monocytogenes; identical to SEQ ID NO: 39136

SEQ ID NO: 39377 - DNA, 50 bp, Listeria monocytogenes; identical to SEQ ID NO: 39167
  source 1..50: mol_type = genomic DNA

SEQ ID NO: 39378 - DNA, 40 bp, Listeria monocytogenes; identical to SEQ ID NO: 1298
  source 1..40: mol_type = genomic DNA

SEQ ID NO: 39379 - DNA, 50 bp, Listeria monocytogenes; identical to SEQ ID NO: 39169
  source 1..50: mol_type = genomic DNA

SEQ ID NO: 39380 - DNA, 40 bp, Listeria monocytogenes; identical to SEQ ID NO: 39110
  source 1..40: mol_type = genomic DNA

SEQ ID NO: 39381 - protein, 452 aa, Listeria monocytogenes
MKAAIYIRVSTQEQVENYSIQAQTEKLTALCRSKDWDVYDIFVDGGYSGSNMNRPALNEMLSKLHEIDAVVVYRLDRLSRSQKDTITLIEEYFLKNNVEFVSLSETLDTSSPFGRAMIGILSVFAQLERETIRDRMVMGKIKRVESGLPLTTAKGRTFGYDVVDTKLYVNKEEAQHLQLIYDIFEEEKSITFLQKRLKKLGFKVKSYSSYNKWLMNDLYIGYVSYGDKVHVKGVHEAIISEEQFYRVQEIFSRMGKNPNMNRDSASLLNNLIVCEKCGLSFVHRVKDTVSRGKKYRYRYYSCKTYKHTHELEKCGNKIWRADKLEEIVIDRVKNYSFATRNLDKEDELDSINAKLQVEHSKKKRLFDLYINGSYEVAELDKMMADIDAQINYYNSQIKTNEELKRNKKVQESLAELATVDFDVLEFREKQIYLKSIINKIYIDGEQVTIEWI

SEQ ID NO: 39382 - DNA, 50 bp, Listeria monocytogenes
  source 1..50: mol_type = genomic DNA
tttagtccctcattttctctcactggacggagaataaatgagaaactaaa

SEQ ID NO: 39383 - DNA, 40 bp, Listeria monocytogenes; identical to SEQ ID NO: 1298
  source 1..40: mol_type = genomic DNA

SEQ ID NO: 39384 - DNA, 50 bp, Listeria monocytogenes
  source 1..50: mol_type = genomic DNA
tttagtccctcattttctctcactatacggagaataaatgagaaactaaa

SEQ ID NO: 39385 - DNA, 40 bp, Listeria monocytogenes; identical to SEQ ID NO: 39110
  source 1..40: mol_type = genomic DNA

SEQ ID NO: 39386 - protein, 452 aa, Listeria monocytogenes
MKAAIYIRVSTQEQVENYSIQAQTEKLTALCRSKDWDVYDTFIDGGYSGSNMNRPALNEMLSKLHEIDAVVVYRLDRLSRSQKDTITLIEEYFLKNNVEFVSLSETLDTSSPFGRAMIGILSVFAQLERETIRDRMVMGQIKRVESGLPLTTAKGRTFGYDVIDTKLYINEEEAKQLQMIYDIFEEEKSITTLQKRLKKIGFKVKSYSSYNNWLTNDLYCGYVSYADKVHTKGVHEPIISEEQFYRVQEIFSRMGKNPNMNRDSASLLNNLVVCGKCGLGFVHRRKDTVSRGKKYHYRYYSCKTYKHTHELEKCGNKIWRADKLEELIIDRVNNYSFASRNVDKEDELDSLNEKLKIEHTKKKRLFDLYISGSYEVSELDAMMSDIDAQINYYEAQIEANEELKKNKKIQENLADLATVDFNSLEFREKQLYLKSLINKIYIDDEQVTIEWL

SEQ ID NO: 39387 - DNA, 50 bp, Listeria monocytogenes; identical to SEQ ID NO: 39172
  source 1..50: mol_type = genomic DNA

SEQ ID NO: 39388 - DNA, 40 bp, Listeria monocytogenes; identical to SEQ ID NO: 1298
  source 1..40: mol_type = genomic DNA

SEQ ID NO: 39389 - DNA, 50 bp, Listeria monocytogenes; identical to SEQ ID NO: 39174
  source 1..50: mol_type = genomic DNA

SEQ ID NO: 39390 - DNA, 40 bp, Listeria monocytogenes; identical to SEQ ID NO: 39110
  source 1..40: mol_type = genomic DNA

SEQ ID NO: 39391 - protein, 452 aa, Listeria monocytogenes
MKAAIYIRVSTQEQIENYSIQAQTEKLTALCRSKDWDVYDIFIDGGYSGSNMNRPALNEMLSKLHEIDAVVVYRLDRLSRSQRDTITLIEEYFLKNNVEFVSLSETLDTSSPFGRAMIGILSVFAQLERETIRDRMVMGKIKRIEAGLPLTTAKGRTFGYDVIDTKLYINEEEAKQLQMIYDIFEEEKSITTLQKRLKKIGFKVKSYSSYNNWLTNDLYCGYVSYADKVHTKGVHEPIISEEQFYRVQEIFSRMGKNPNMNRDSASLLNNLVVCGKCGLGFVHRRKDTVSRGKKYHYRYYSCKTYKHTHELEKCGNKIWRADKLEELIIDRVNNYSFASRNVDKEDELDNLNEKLKTEHKKKKRLFDLYISGSYEVSELDAMMADIDAQINYYEAQIEANEELKKNKKIQENLADLATVDFDSLEFREKQLYLKSLINKIYIDGEQVTIEWL

SEQ ID NO: 39392 - DNA, 50 bp, Listeria monocytogenes; identical to SEQ ID NO: 39297
  source 1..50: mol_type = genomic DNA

SEQ ID NO: 39393 - DNA, 40 bp, Listeria monocytogenes; identical to SEQ ID NO: 1298
  source 1..40: mol_type = genomic DNA

SEQ ID NO: 39394 - DNA, 50 bp, Listeria monocytogenes; identical to SEQ ID NO: 39299
  source 1..50: mol_type = genomic DNA

SEQ ID NO: 39395 - DNA, 40 bp, Listeria monocytogenes; identical to SEQ ID NO: 39110
  source 1..40: mol_type = genomic DNA

SEQ ID NO: 39396 - protein, 452 aa, Listeria monocytogenes
MKAAIYIRVSTQEQIENYSIQAQTEKLTALCLSKDWDVYDIFIDGGYSGSNMNRPALNEMLSKLHEIDAVVVYRLDRLSRSQRDTITLIEEYFLKNNVEFVSLSETLDTSSPFGRAMIGILSVFAQLERETIRDRMVMGKIKRIEAGLPLTTAKGRTFGYDVIDTKLYINEEEAKQLRLIYDIFEEEQSITFLQKRLKKLGFKVRTYNRYNNWLTNDLYCGYVSYKDKVHVKGIHEPIISEEQFYRVQEIFSRMGKNPNMNKESASLLNNLVVCSKCRLGFVHRRKDTVSRGKKYHYRYYSCKTYKHTHELEKCGNKIWRADKLEELIIDRVNNYSFASRNIDKEDELDSLNEKLKIEHAKKKRLFDLYINGSYEVSELDSMMNDIDAQINYYEARIEANEELKKNKKIQENLADLATVDFNSLEFREKQLYLKSLINKIYIDGEQVTIEWL

SEQ ID NO: 39397 - DNA, 50 bp, Listeria monocytogenes
  source 1..50: mol_type = genomic DNA
tttagtatctcattatctctcgttggacggagacgaatcgagaaactaaa

SEQ ID NO: 39398 - DNA, 40 bp, Listeria monocytogenes; identical to SEQ ID NO: 1298
  source 1..40: mol_type = genomic DNA

SEQ ID NO: 39399 - DNA, 50 bp, Listeria monocytogenes
  source 1..50: mol_type = genomic DNA
tttagtatctcattatctctcgttatacggagacgaatcgagaaactaaa

SEQ ID NO: 39400 - DNA, 40 bp, Listeria monocytogenes; identical to SEQ ID NO: 39110
  source 1..40: mol_type = genomic DNA

SEQ ID NO: 39401 - protein, 452 aa, Listeria monocytogenes; identical to SEQ ID NO: 27006

SEQ ID NO: 39402 - DNA, 50 bp, Listeria monocytogenes; identical to SEQ ID NO: 39172
  source 1..50: mol_type = genomic DNA

SEQ ID NO: 39403 - DNA, 40 bp, Listeria monocytogenes; identical to SEQ ID NO: 1298
  source 1..40: mol_type = genomic DNA

SEQ ID NO: 39404 - DNA, 50 bp, Listeria monocytogenes; identical to SEQ ID NO: 39174
  source 1..50: mol_type = genomic DNA

SEQ ID NO: 39405 - DNA, 40 bp, Listeria monocytogenes; identical to SEQ ID NO: 39110
  source 1..40: mol_type = genomic DNA

SEQ ID NO: 39406 - protein, 452 aa, Listeria monocytogenes
MKAAIYIRVSTQEQVENYSIQAQTEKLTALCRSKDWDVYDTFIDGGYSGSNMNRPALNEMLSKLHEIDAVVVYRLDRLSRSQKDTITLIEEYFLKNNVEFVSLSETLDTSSPFGRAMIGILSVFAQLERETIRDRMVMGQIKRVESGLPLTTAKGRTFGYNVVDAKLYINEEEAKHLQLIYDIFEEEKSITFLQKKLKELGFKVKSYSSYNKWLMNDLYIGYVSYSDKVHVKGIHEPIISEDQFYRVQEIFSRMGKNPNMNKESSSLLNNLIVCEKCGLGYVHRAKDTVSRGKKYHYRYYSCKTYKHTHELEKCGNKIWRADKLEEIIISRVKNYSFATRNLDKEDELDSITEKLKTEHSKKKRLFDLYINGTYEVAELDKMMADIDAQINYYNSQIEANKELKRNKKVQESLAELATVDFDSLEFREKQIYLKSIINKIYIDGEQVTIEWI

SEQ ID NO: 39407 - DNA, 50 bp, Listeria monocytogenes; identical to SEQ ID NO: 39217
  source 1..50: mol_type = genomic DNA

SEQ ID NO: 39408 - DNA, 40 bp, Listeria monocytogenes; identical to SEQ ID NO: 1298
  source 1..40: mol_type = genomic DNA

SEQ ID NO: 39409 - DNA, 50 bp, Listeria monocytogenes; identical to SEQ ID NO: 39219
  source 1..50: mol_type = genomic DNA

SEQ ID NO: 39410 - DNA, 40 bp, Listeria monocytogenes; identical to SEQ ID NO: 39110
  source 1..40: mol_type = genomic DNA

SEQ ID NO: 39411 - protein, 452 aa, Listeria monocytogenes; identical to SEQ ID NO: 39176

SEQ ID NO: 39412 - DNA, 50 bp, Listeria monocytogenes
  source 1..50: mol_type = genomic DNA
tttagtacctcgttatctctcgctggacggagaataaatgagatactaat

SEQ ID NO: 39413 - DNA, 40 bp, Listeria monocytogenes; identical to SEQ ID NO: 1298
  source 1..40: mol_type = genomic DNA

SEQ ID NO: 39414 - DNA, 50 bp, Listeria monocytogenes
  source 1..50: mol_type = genomic DNA
tttagtacctcgttatctctcgctatacggagaataaatgagatactaat

SEQ ID NO: 39415 - DNA, 40 bp, Listeria monocytogenes; identical to SEQ ID NO: 39110
  source 1..40: mol_type = genomic DNA

SEQ ID NO: 39416 - protein, 452 aa, Listeria monocytogenes
MKAAIYIRVSTQEQIENYSIQAQTEKLTALCRSKDWDVYDIFIDGGYSGSNMKRPALNEMLSKLHEIDAVVVYRLDRLSRSQRDTITLIEEYFLKNNVEFVSLSETLDTSSPFGRAMIGILSVFAQLERETIRDRMVMGKIKRIEAGLPLTTAKGRTFGYDVIDTKLYINEEEAKQLQLIYDIFEEEQSITFLQKRLKKLGFKVRTYNRYNNWLTNDLYCGYVSYKDKVHVKGIHEPIISEEQFYRVQEIFTRMGKNPNMNRDSASLLNNLVVCSKCGLGFVHRRKDTMSRGKKYHYRYYSCKTYKHTHELEKCGNKIWRADKLEELIIDRVNNYSFASRNIDKEDELDSLNEKLKIEHTKKKRLFDLYISGSYEVSELDAMMSDIDAQINYYEAQIEANEELKKNKKIQENLADLATVDFNSLEFREKQLYLKSLINKIYIDDEQVTIEWL

SEQ ID NO: 39417 - DNA, 50 bp, Listeria monocytogenes; identical to SEQ ID NO: 39107
  source 1..50: mol_type = genomic DNA

SEQ ID NO: 39418 - DNA, 40 bp, Listeria monocytogenes; identical to SEQ ID NO: 1298
  source 1..40: mol_type = genomic DNA

SEQ ID NO: 39419 - DNA, 50 bp, Listeria monocytogenes; identical to SEQ ID NO: 39109
  source 1..50: mol_type = genomic DNA

SEQ ID NO: 39420 - DNA, 40 bp, Listeria monocytogenes; identical to SEQ ID NO: 39110
  source 1..40: mol_type = genomic DNA

SEQ ID NO: 39421 - protein, 452 aa, Listeria monocytogenes; identical to SEQ ID NO: 39291

SEQ ID NO: 39422 - DNA, 50 bp, Listeria monocytogenes; identical to SEQ ID NO: 39107
  source 1..50: mol_type = genomic DNA

SEQ ID NO: 39423 - DNA, 40 bp, Listeria monocytogenes; identical to SEQ ID NO: 1298
  source 1..40: mol_type = genomic DNA

SEQ ID NO: 39424 - DNA, 50 bp, Listeria monocytogenes; identical to SEQ ID NO: 39109
  source 1..50: mol_type = genomic DNA

SEQ ID NO: 39425 - DNA, 40 bp, Listeria monocytogenes; identical to SEQ ID NO: 39110
  source 1..40: mol_type = genomic DNA

SEQ ID NO: 39426 - protein, 452 aa, Listeria monocytogenes
MKAAIYIRVSTQEQIENYSIQAQTEKLTALCRSKDWDVYDIFIDGGYSGSNMNRPALNEMLSKLHEIDAVVVYRLDRLSRSQRDTITLIEEYFLKNNVEFVSLSETLDTSSPFGRAMIGILSVFAQLERETIRDRMVMGKIKRIEAGLPLTTAKGRTFGYDVIDTKLYINEEEAKQLQMIYDIFEEEKSITTLQKRLKKLGFKVKSYSSYNNWLTNDLYCGYVSYADKVHTKGVHEPIISEEQFYRVQEIFSRMGKNPNMNRDSASLLNNLVVCGKCGLGFVHRRKDTVSRGKKYHYRYYSCKTYKHTHELEKCGNKIWRADKLEELIIDRVNNYSFASRNVDKEDELDSLNEKLKIEHTKKKRLFDLYISGSYEVSELDAMMSDIDAQINYYEAQIEANEELKKNKKIQENLADLATVDFNSLEFREKQLYLKSLINKIYIDDEQVTIEWL

SEQ ID NO: 39427 - DNA, 50 bp, Listeria monocytogenes; identical to SEQ ID NO: 39107
  source 1..50: mol_type = genomic DNA

SEQ ID NO: 39428 - DNA, 40 bp, Listeria monocytogenes; identical to SEQ ID NO: 1298
  source 1..40: mol_type = genomic DNA

SEQ ID NO: 39429 - DNA, 50 bp, Listeria monocytogenes; identical to SEQ ID NO: 39109
  source 1..50: mol_type = genomic DNA

SEQ ID NO: 39430 - DNA, 40 bp, Listeria monocytogenes; identical to SEQ ID NO: 39110
  source 1..40: mol_type = genomic DNA

SEQ ID NO: 39431 - protein, 452 aa, Listeria monocytogenes
MKAAIYIRVSTQEQIENYSIQAQTEKLTALCRSKDWDVYDIFIDGGYSGSNMNRPALNEMLSKLHEIDAVVVYRLDRLSRSQRDTITLIEEYFLKNNVEFVSLSETLDTSSPFGRAMIGILSVFAQLERETIRDRMVMGKIKRIEAGLPLTTAKGRTFGYDVIDTKLYINEEEAKQLRLIYDIFEEEQSITFLQKRLKKLGFKVRTYNRYNNWLTNDLYCGYVSYKDKVHVKGIHEPIISEEQFYRVQEIFSRMGKNPNMNKESASLLNNLVVCSKCGLGFVHRRKDTVSRGKKYHYRYYSCKTYKHTHELEKCGNKIWRADKLEELIIDRVNNYSFASRNIDKEDELDSLNEKLKIEHAKKKRLFDLYINGSYEVSELDSMMNDIDAQINYYEAQIEANEELKKNKKIQENLADLATVDFNSLEFREKQLYLKSLINKIYIDDEQVTIEWL

SEQ ID NO: 39432 - DNA, 50 bp, Listeria monocytogenes; identical to SEQ ID NO: 39117
  source 1..50: mol_type = genomic DNA

SEQ ID NO: 39433 - DNA, 40 bp, Listeria monocytogenes; identical to SEQ ID NO: 1298
  source 1..40: mol_type = genomic DNA

SEQ ID NO: 39434 - DNA, 50 bp, Listeria monocytogenes; identical to SEQ ID NO: 39119
  source 1..50: mol_type = genomic DNA

SEQ ID NO: 39435 - DNA, 40 bp, Listeria monocytogenes; identical to SEQ ID NO: 39110
  source 1..40: mol_type = genomic DNA

SEQ ID NO: 39436 - protein, 452 aa, Listeria monocytogenes
MKAAIYIRVSTQEQIENYSIQAQTEKLTALCRSKDWDVYDIFIDGGYSGSNMNRPALNEMLSKLHEIDAVVVYRLDRLSRSQRDTITLIEEYFLKNNVEFVSLSETLDTSSPFGRAMIGILSVFAQLERETIRDRMVMGKIKRIEAGLPLTTAKGRTFGYDVIDTKLYINEEEAKQLQMIYDIFEEEKSITTLQKRLKKIGFKVKSYSSYNNWLTNDLYCGYVSYADKVHTKGVHEPIISEEQFYRVQEIFSRMGKNPNMNRDSASLLNNLVVCGKCGLGFVHRRKDTVSRGKKYHYRYYSCKTYKHTHELEKCGNKIWRADKLEELIIDRVNNYSFASRNVDKEDELDSLNEKLKTEHTKKKRLFDLYISGSYEVSELDAMMSDIDAQINYYEAQIEANEELKKNKKIQENLADLATVDFDSLEFREKQLYLKSLINKIYIDGEQVTIEWL

SEQ ID NO: 39437 - DNA, 50 bp, Listeria monocytogenes; identical to SEQ ID NO: 39187
  source 1..50: mol_type = genomic DNA

SEQ ID NO: 39438 - DNA, 40 bp, Listeria monocytogenes; identical to SEQ ID NO: 1298
  source 1..40: mol_type = genomic DNA

SEQ ID NO: 39439 - DNA, 50 bp, Listeria monocytogenes; identical to SEQ ID NO: 39189
  source 1..50: mol_type = genomic DNA

SEQ ID NO: 39440 - DNA, 40 bp, Listeria monocytogenes; identical to SEQ ID NO: 39110
  source 1..40: mol_type = genomic DNA

SEQ ID NO: 39441 - protein, 452 aa, Listeria monocytogenes; identical to SEQ ID NO: 39426

SEQ ID NO: 39442 - DNA, 50 bp, Listeria monocytogenes; identical to SEQ ID NO: 39172
  source 1..50: mol_type = genomic DNA

SEQ ID NO: 39443 - DNA, 40 bp, Listeria monocytogenes; identical to SEQ ID NO: 1298
  source 1..40: mol_type = genomic DNA

SEQ ID NO: 39444 - DNA, 50 bp, Listeria monocytogenes; identical to SEQ ID NO: 39174
  source 1..50: mol_type = genomic DNA

SEQ ID NO: 39445 - DNA, 40 bp, Listeria monocytogenes; identical to SEQ ID NO: 39110
  source 1..40: mol_type = genomic DNA

SEQ ID NO: 39446 - protein, 452 aa, Listeria monocytogenes
MKAAIYIRVSTQEQIENYSIQAQTEKLTALCRSKDWDVYDIFIDGGYSGSNMNRPALNEMLSKLHEIDAVVVYRLDRLSRSQRDTITLIEEYFLKNNVEFVSLSETLDTSSPFGRAMIGILSVFAQLERETIRDRMVMGKIKRIEAGLPLTTAKGRTFGYDVIDTKLYINEEEAKQLQMIYDIFEEEKSITTLQKRLKKIGFKVKSYSSYNNWLTNDLYCGYVSYADKVHTKGVHEPIISEEQFYRVQEIFSRMGKNPNMNRDSASLLNNLVVCGKCGLGFVHRRKDTVSRGKKYHYRYYSCKTYKHTHELEKCGNKIWRADKLEELIIDRVNNYSFASRNVDKEDELDSLNEKLKIEHTKKKRLFDLYISGSYEVSELDAMMSDIDAQINYYEAQIEANEELKKNKKIQENLADLATVDFNSLEFREKQIYLKSLINKIYIDDEQVTIEWL

SEQ ID NO: 39447 - DNA, 50 bp, Listeria monocytogenes; identical to SEQ ID NO: 39172
  source 1..50: mol_type = genomic DNA

SEQ ID NO: 39448 - DNA, 40 bp, Listeria monocytogenes; identical to SEQ ID NO: 1298
  source 1..40: mol_type = genomic DNA

SEQ ID NO: 39449 - DNA, 50 bp, Listeria monocytogenes; identical to SEQ ID NO: 39174
  source 1..50: mol_type = genomic DNA

SEQ ID NO: 39450 - DNA, 40 bp, Listeria monocytogenes; identical to SEQ ID NO: 39110
  source 1..40: mol_type = genomic DNA

SEQ ID NO: 39451 - protein, 452 aa, Listeria monocytogenes
MKAAIYIRVSTQEQIENYSIQAQTEKLTALCRSKDWDVYDIFIDGGYSGSNMNRPALNEMLSKLHEIDAVVVYRLDRLSRSQKDTITLIEEYFLKNNVEFVSLSETLDTSSPFGRAMIGILSVFAQLERETIRDRMVMGQIKRVESGLPLTTAKGRTFGYDVVDTKLYINEEEAKHLQLIYDIFEEEKSITFLQKKLKELGFKVKSYSSYNKWLMNDLYIGYVSYSDKVHVKGIHEPIISEDQFYRVQEIFSRMGKNPNMNKESSSLLNNLIVCEKCGLGYVHRAKDTVSRGKKYHYRYYSCKTYKHTHELEKCGNKIWRADKLEEIIISRVKNYSFATRNLDKEDELDSITEKLKTEHSKKKRLFDLYINGTYEVAELDKMMADIDAQINYYNSQIEANKELKRNKKVQESLAELATVDFDSLEFREKQIYLKSIINKIYIDGEQVTIEWI

SEQ ID NO: 39452 - DNA, 50 bp, Listeria monocytogenes; identical to SEQ ID NO: 39217
  source 1..50: mol_type = genomic DNA

SEQ ID NO: 39453 - DNA, 40 bp, Listeria monocytogenes; identical to SEQ ID NO: 1298
  source 1..40: mol_type = genomic DNA

SEQ ID NO: 39454 - DNA, 50 bp, Listeria monocytogenes; identical to SEQ ID NO: 39219
  source 1..50: mol_type = genomic DNA

SEQ ID NO: 39455 - DNA, 40 bp, Listeria monocytogenes; identical to SEQ ID NO: 39110
  source 1..40: mol_type = genomic DNA

SEQ ID NO: 39456 - protein, 452 aa, Listeria monocytogenes
MKAAIYIRVSTQEQIENYSIQAQTEKLTALCRSKDWDVYDIFIDGGYSGSNMNRPALNEMLSKLHEIDAVVVYRLDRLSRSQRDTITLIEEYFLKNNVEFVSLSETLDTSSPFGRAMIGILSVFAQLERETIRDRMVMGKIKRIEAGLPLTTAKGRTFGYDVIDTKLYINEEEAKQLRLIYDIFEEEQSITFLQKRLKKLGFKVRTYNRYNNWLTNDLYCGYVSYKDKVHVKGIHEPIISEEQFYRVQEIFSRMGKNPNMNRDSASLLNNLVVCGKCGLGFVHRRKDTVSRGKKYHYRYYSCKTYKHTHELEKCGNKIWRADKLEELIIDRVNNYSFASRNVDKEDELDSLNEKLKIEHTKKKRLFDLYISGSYEVSELDAMMSDIDAQINYYEAQIEANEELKKNKKIQENLADLATVDFNSLEFREKQLYLKSLINKIYIDDEQVTIEWL

SEQ ID NO: 39457 - DNA, 50 bp, Listeria monocytogenes; identical to SEQ ID NO: 39172
  source 1..50: mol_type = genomic DNA

SEQ ID NO: 39458 - DNA, 40 bp, Listeria monocytogenes; identical to SEQ ID NO: 1298
  source 1..40: mol_type = genomic DNA

SEQ ID NO: 39459 - DNA, 50 bp, Listeria monocytogenes; identical to SEQ ID NO: 39174
  source 1..50: mol_type = genomic DNA

SEQ ID NO: 39460 - DNA, 40 bp, Listeria monocytogenes; identical to SEQ ID NO: 39110
  source 1..40: mol_type = genomic DNA

SEQ ID NO: 39461 - protein, 452 aa, Listeria monocytogenes
MKAAIYIRVSTQEQVENYSIQAQTEKLTALCRSKDWDVYDIFIDGGYSGSNMNRPALNEMLSKLHEIDAVVVYRLDRLSRSQRDTITLIEEYFLKNNVEFVSLSETLDTSSPFGRAMIGILSVFAQLERETIRDRMVMGKIKRVESGLPLTTAKGRTYGYDVVDTKLYINEEEAQHLQLIYDIFEEEKSITTLQKRLKKLGFKVKSYSSYNNWLTNDLYCGYVSYADKVHAKGVHEPIISEEQFYRVQEIFSRMGKNPNMNKESSSLLNNLIVCEKCGLGYVHRAKDTVSRGKKYHYRYYSCKTYKHTHELEKCGNKIWRADKLEELIIDRVNNYSFASRNVDKEDELDSLNEKLKIEHTKKKRLFDLYISGSYEVSELDAMMSDIDAQINYYEAQIEANEELKKNKKIQENLADLATVDFNSLEFREKQLYLKSLINKIYIDDEQVTIEWL

SEQ ID NO: 39462 - DNA, 50 bp, Listeria monocytogenes; identical to SEQ ID NO: 39242
  source 1..50: mol_type = genomic DNA

SEQ ID NO: 39463 - DNA, 40 bp, Listeria monocytogenes; identical to SEQ ID NO: 1298
  source 1..40: mol_type = genomic DNA

SEQ ID NO: 39464 - DNA, 50 bp, Listeria monocytogenes; identical to SEQ ID NO: 39244
  source 1..50: mol_type = genomic DNA

SEQ ID NO: 39465 - DNA, 40 bp, Listeria monocytogenes; identical to SEQ ID NO: 39110
  source 1..40: mol_type = genomic DNA

SEQ ID NO: 39466 - protein, 501 aa, Paeniclostridium sordellii
MKCAIYIRVSTNKEEQKTSLQNQKNLFFKYISDKGWDIWKIYIDIESGTNDKREQFQQMISDAKNRNFDIILAKELSRIARNGKLSYEIKTLAENNNIHIITLDNAINTIEGNPHMFGMYAWMHEQESQRISDRVKYALKSRAEKGIFKGSVAPYGYYCKDGTLFIKNDFTPDIVRRIFDEYISGIGFDAIARNLYNDDVPTPRQVAGIKNASPKWHGSSVRYILENPHFIGDLVQGRTTTKNVTSAKRNIVPIEELVIVENTHEAIISKEDFNAVQQLIASRKRKRTAPSPHLFSNILICADCGHGMHFKKNRKGYICGNFNKHGYKACTSHIIRENSLKNLIMSDIKFILDTIKKKSLFNSINSSLNKKCKSSKKSLETIEAKISKLILRKNNALSKFIDDYISKDDYDNIIKIINSEISELKTKKLLLENQMSTKLAHDLSSGMYYFKSIASSINDLTPDVVNRLIDKIEVSEDGTPRIYYRFSESSICLSDFINQTS

SEQ ID NO: 39467 - DNA, 50 bp, Paeniclostridium sordellii
  source 1..50: mol_type = genomic DNA
actatcttcgcacagcactcaacatgccttgagtgctgagtgtagacaaa

SEQ ID NO: 39468 - DNA, 40 bp, Paeniclostridium sordellii
  source 1..40: mol_type = genomic DNA
tttagctacacactcaacatgcatagtatgagggaacata

SEQ ID NO: 39469 - DNA, 50 bp, Paeniclostridium sordellii
  source 1..50: mol_type = genomic DNA
actatcttcgcacagcactcaacactccttgagtgctgagtgtagacaaa

SEQ ID NO: 39470 - DNA, 40 bp, Paeniclostridium sordellii
  source 1..40: mol_type = genomic DNA
ttttaccacacacttaacacttatagtttttggcaacaga

SEQ ID NO: 39471 - protein, 600 aa, Ruminococcus bromii
MNTAVNEYNYRFKLTDYSLFDRNRARKVAIYGRVSTEHEAQLSALENQLQWYDDQVKYHPNWTVCERYIDEGITGTQAKKRPAFLKMIEDAKQGKFDLIVTREVCRFARNVVDTLVVTRELKGIGVEVFFIDDNIWTMDGDGELRLSLMATLAQEESRKTSERVKAGQKISRDNGVLYGNGNILGYDRVGDTYVINEEQAETVRMIYDLYLQGYGSMKIAKILTERKRKTASGLIKWSVSNIMRAIKNATYTGTKCYNKSRSNNFLEQKRINNLDMSTYEYVEGDFPSIISQEIWNKAQAIRESRVKPVCVSAGKNTHSKRDSRDIWVNKLRCSCGSSYRKNKWHTKLDGKTSYGYQCYNQLNNGIKRKRAEIGLDTEGYCDSRMITDWKLDFMAKALLEHLWTERKESVLIALDLIKYYYKEEKSNETQSDTVTIQAKLDKANSRLTNLIAMRADGEISKDEYQAMRSPVDEEIKKLQKALDEIPQEKSNPKGLDIEGIRSTLNSFIDFSGSTISHDVVNQFVYLITPTSDTTFDWYVNLNGTADVKATFTAEGRKKNCIIKLEEIEKISSVHREKNEDNAHFIKNPHIFTYLHRLLSQ

SEQ ID NO: 39472 - DNA, 50 bp, Ruminococcus bromii; identical to SEQ ID NO: 36102
  source 1..50: mol_type = genomic DNA

SEQ ID NO: 39473 - DNA, 40 bp, Ruminococcus bromii
  source 1..40: mol_type = genomic DNA
tgctcgtcttgctgctgctcaggctgctatcgcaaacaag

SEQ ID NO: 39474 - DNA, 50 bp, Ruminococcus bromii
  source 1..50: mol_type = genomic DNA
cccccatatttttacctatctgcaatggctgctattgcaaataggtagga

SEQ ID NO: 39475 - DNA, 40 bp, Ruminococcus bromii
  source 1..40: mol_type = genomic DNA
tgtgactattgctgctgctatggatgctaagacaaagaag

SEQ ID NO: 39476 - protein, 576 aa, Anaerotruncus rubiinfantis
MLIKNAGADTIDTSNPVLADCPPIKEEHSMLRQSDKITALYCRLSRDDELQGDSNSIVNQKAILSKYAKENGFKNILFFVDDGYSGANFDRPSWCELVEKIENGEVATLIVKDMSRLGRDYLRVGLYTDVLFPEKGVRFIAISNGVDSANQQENDFTPFLNIINEWYCRDTSKKIRAVMKSKGEAGEHLCTNPPYGYIKDPDNKKRWIVDETAAEVVKRIFALCLEGYGPSQIARILKDGKVITPTIHFQRTGRATRNTPPDNPYNWTGDTIADILERPEYQGHTVNFKTSKQSYKSKKTCYNPKEKQLVFENTHEAIIDADTWERVQDLRKNKRRPTRTGKTNLFSGIVRCADCGEKLYYCTSRNFEARQDHFVCSTSRLKGKEVCPTHFIRAVVLEQGVLAHMRLVIACVSTHEERFRKAMGAKQKVEAKRELTAKRRQLTQAERRIKELDRLFKRIYEDNANGKLSDSRFQMLSDDYEQEQEELREKLLQLNEEIIQQEEQAENIDRFIGKVRKYLDLDELTPAILNDMVKAVYVHAPDKSSGHREQQIDISYDLVGILPATLLYDLSNGETA

SEQ ID NO: 39477 - DNA, 50 bp, Anaerotruncus rubiinfantis
  source 1..50: mol_type = genomic DNA
atgctgttttatgagtgctgccctaatggtagctactcataaaacagtat

SEQ ID NO: 39478 - DNA, 40 bp, Anaerotruncus rubiinfantis
  source 1..40: mol_type = genomic DNA
tggtaaaaaaaggacggccaacggccgtccttttttccat

SEQ ID NO: 39479 - DNA, 50 bp, Anaerotruncus rubiinfantis
  source 1..50: mol_type = genomic DNA
atgctgttttatgagtgctgcccttctggtagctactcataaaacagtat

SEQ ID NO: 39480 - DNA, 40 bp, Anaerotruncus rubiinfantis
  source 1..40: mol_type = genomic DNA
tggtatacagaggaaggcctccttcctacttcttttccat

SEQ ID NO: 39481 - protein, 496 aa, Bacillus cereus
MIANENIKNVAIYLRLSRDEENKGIESILENHRNKLTELCQQNKWKYEIFQEIASSRTIELREQLVDMLEHVKRNQYDAVVVMDVDRLSRNEFDAPQIFKVLSDSNTVIVTPTKTYDWSRDEDNLLLGIQSLVAAQEYKQIKKRMTAGKRSASEKGLWVHGIPPLGYDKDPDTRKLVPNEDAKHVKYIFDSIVNGKTVSEVYHELNMMKVKTRTNSVFAFNSVVRIVNNEAYKGTIVSNKYLDKNAMRPKDEWHYVKNVHPAIVDEATWEKANKIVNTYSFSAPRSRNKIYPTTKLIFCGNCGKVQGAQMAGTGKMYLKVCQRCKNRTFLYEPILRAIKDKVRARIPKILEQITTIEQNDNSSEIEYKKQQIQKQMKAIERAIEKIKEAYELDEYTIAEFKDRKAKRENELKQLKAELDHVEQQDPQDKIADLNEIKQRIEYLLQTWQCLDGEGLTDEEVNRNLHFIIERIEWTYGKNGKEPNLNFVWKTDESYAQ

SEQ ID NO: 39482 - DNA, 50 bp, Bacillus cereus
  source 1..50: mol_type = genomic DNA
aaatagtccctaaattcgtaacaaactggttgagaacttagggactacgt

SEQ ID NO: 39483 - DNA, 40 bp, Bacillus cereus
  source 1..40: mol_type = genomic DNA
actcgtgtttactggaccgactggatctgggaagacaacg

SEQ ID NO: 39484 - DNA, 50 bp, Bacillus cereus
  source 1..50: mol_type = genomic DNA
aaatagtccctaaattcgtaacaagctggttgagaacttagggactacgt

SEQ ID NO: 39485 - DNA, 40 bp, Bacillus cereus
  source 1..40: mol_type = genomic DNA
attggtttatactggacctgctagatcaggaaggacaagg

SEQ ID NO: 39486 - protein, 526 aa, Paraclostridium bifermentans
MKIAIYSRKSVFTGKGESIENQIQLCSDYAKSHFGASQSDIFVYEDEGFSGKNLDRPEFQKLLHDAKNKKFDILICYRLDRVSRNIADFSSLIEDLQKYNISFVSIREQFDTSTPMGRAMMFIASVFAQLERETIAERVRDNMLELAKSGRWLGGTAPLGFNSENISYIDDELKERKMSKLIPNKEELEIIRLIYRKYLELGSITQVVAFMYTTNFTGKRNKEFSASSISKILRNPIYVKSDESVLNYLKNKGINMSGDPNGCGILTYNKKSKGVKQDKSEWIAAVCNSKGVIDGNDWLLVQQLLDKNKDNTKSLRLGTSKKGLLTGIIRCSKCGSPMRVTYGRNYHYYTCTKKVNSKGVACDNKNVKGPDIEKVIIESIMDIDTNMLLSNLNEGESSASSREKDITDIQSKIKSKKIQLNSLFERMVDFDDELSDLFKEKINELGKEIKELNKKYSDLVNEVDNNKRDFRNVELVINAVNEFKGYFDCIEDFNKKKFMLGVIVDKINWDGEKQEVDIEFWGSKKK

SEQ ID NO: 39487 - DNA, 50 bp, Paraclostridium bifermentans; identical to SEQ ID NO: 12587
  source 1..50: mol_type = genomic DNA

SEQ ID NO: 39488 - DNA, 40 bp, Paraclostridium bifermentans
  source 1..40: mol_type = genomic DNA
tggtgccattagttttgcatgacctgtatctataagaatt

SEQ ID NO: 39489 - DNA, 50 bp, Paraclostridium bifermentans
  source 1..50: mol_type = genomic DNA
tgtcgcaatacatacaatcatgcagcacctcggttgttagtattgcaact

SEQ ID NO: 39490 - DNA, 40 bp, Paraclostridium bifermentans
  source 1..40: mol_type = genomic DNA
tggtgatcttagtatatgagcacctgtatacataagaata

SEQ ID NO: 39491 - protein, 526 aa, Paraclostridium bifermentans
MKIAIYSRKSVFTGKGESIENQIQLCSDYAKSHFGASQSDIFVYEDEGFSGKNLDRPEFQKLLHDAKNKKFDILICYRLDRVSRNIADFSSLIEDLQKYNISFVSIREQFDTSTPMGRAMMFIASVFAQLERETIAERVRDNMLELAKSGRWLGGTAPLGFNSENISYIDDELKERKMSKLIPNKEELEIIQLIYRKYLELGSITQVVAFMYTTNFTGKRNKEFSASTISKILRNPIYVKSDESVLNYLKNKGINVSGDPNGCGILTYNKKSKGVKQDKSEWIAAVCNSKGIINGNDWLLVQQLLDKNKDNTKSLRLGTSKKGLLTGIIRCSKCGSPMRVTYGRNYHYYTCTKKVNSKGVACDNKNVKGPDIEKVIIESIMDIDTNMLLSNLNDGESSTSSREKDITDIQSKIKSKKIQLNSLFERMVDFDDELSDLFKEKINELGKEIKELNKKYSDLVNEIDNNKRDFRNVELVINAVNEFKSYFNCIEDFHKRKFMLGVIVDKINWDGEKQEVDIEFWGSKKK

SEQ ID NO: 39492 - DNA, 50 bp, Paraclostridium bifermentans; identical to SEQ ID NO: 12587
  source 1..50: mol_type = genomic DNA

SEQ ID NO: 39493 - DNA, 40 bp, Paraclostridium bifermentans; identical to SEQ ID NO: 39488
  source 1..40: mol_type = genomic DNA

SEQ ID NO: 39494 - DNA, 50 bp, Paraclostridium bifermentans; identical to SEQ ID NO: 39489
  source 1..50: mol_type = genomic DNA

SEQ ID NO: 39495 - DNA, 40 bp, Paraclostridium bifermentans; identical to SEQ ID NO: 39490
  source 1..40: mol_type = genomic DNA

SEQ ID NO: 39496 - protein, 526 aa, Paraclostridium bifermentans
MKIAIYSRKSVFTGKGESIENQIQLCSDYAKSHFGASQSDIFVYEDEGFSGKNLDRPEFQKLLSDAKNKKFDILICYRLDRVSRNIADFSSLIEDLQKYNISFVSIREQFDTSTPMGRAMMFIASVFAQLERETIAERVRDNMLELAKSGRWLGGTAPLGFNSENISYIDDELKERKMSKLIPNKEELEIIQLIYRKYLELGSITQVVAFMYTTNFTGKRNKEFSASTISKILRNPIYVKSDESVLNYLKNKGINVSGDPNGCGILTYNKKSKGVKQDKSEWIAAVCNSKGIINGNDWLLVQQLLDKNKDNTKSLRLGTSKKGLLTGIIRCSKCGSPMRVTYGRNYHYYTCTKKVNSKGVACDNKNVKGPDIEKVIIESIMDIDTNMLLSNLNDGESSASSREKDISDIQAKIKSKKIQLNSLFERMVDFDDELSDLFKEKINELGKEIKELNKKYSDLVNEVDNNKRDFRNVELVINAVNEFKGYFDCIEDFHKRKFMLGVIVDKINWDGEKQEVDIEFWGSKKK

SEQ ID NO: 39497 - DNA, 50 bp, Paraclostridium bifermentans; identical to SEQ ID NO: 36352
  source 1..50: mol_type = genomic DNA

SEQ ID NO: 39498 - DNA, 40 bp, Paraclostridium bifermentans; identical to SEQ ID NO: 39488
  source 1..40: mol_type = genomic DNA

SEQ ID NO: 39499 - DNA, 50 bp, Paraclostridium bifermentans
  source 1..50: mol_type = genomic DNA
tatcgcaatacatacaatcatgcagcacctcggttgttagtattgcaact

SEQ ID NO: 39500 - DNA, 40 bp, Paraclostridium bifermentans; identical to SEQ ID NO: 39490
  source 1..40: mol_type = genomic DNA

SEQ ID NO: 39501 - protein, 587 aa, Rhodococcus erythropolis
MTTTHSNSRPAELSGEDSTAAVIYLRVSSRRQMDTAIDIDPDGLSIATQREECTAKAQQIGASIAREPFVEPGVSAKTITDRPVFRELLTYLHEQPDIKYVITYNRARAFRNQFDAAIVQIQLQKLGVRLVTVKDDFGEGPHAVAMEGMLDIMNGLQNTLQGLDIQTKMLHKAMNGGTNGATKVGYLNVRVEHEGKQINTVQLDPVRAPLVLKAWELYATGDYTLERIEATMADVGLTIRGNSRWPERPISLKLFHRMFTDLYYVGYVTFKGEVYPGRHEPIVTQELFNRVQDVKNLRSNNGQRDRVHQHLLKGMLFCARCEQHGRSTRLIYTEASGRGGRYSYFLCRGRQDGVCDLPYLPAADVENAVAEHYRTLELPTEFLQTVRELLDATLADDQTSTRELHARLQRHLKELDDKEERLIDLAADGMLNQDRIKSRLRNLQADRASTQASLGSTSAELATGAKLLNDALDFAADPYQMYLRSASVPAARRSMNQTFYKSFHLDQAGVTADVKNPPFDDFDNAAQVFRHLATRSSDQRANASPPSEPTKKDPRIAEVLDHLRQSSSEPTLAGVLSVQGSSTDSLV

SEQ ID NO: 39502 - DNA, 50 bp, Rhodococcus erythropolis
  source 1..50: mol_type = genomic DNA
ccaaggttcgagtacggactctctggtgggcctcatgaggtggtactcga

SEQ ID NO: 39503 - DNA, 40 bp, Rhodococcus erythropolis
  source 1..40: mol_type = genomic DNA
ctttttgctggtaattcttggtggagctgaggggaatcga

SEQ ID NO: 39504 - DNA, 50 bp, Rhodococcus erythropolis
  source 1..50: mol_type = genomic DNA
ccaaggttcgagtacggactctctgttgggcctcatgaggtggtactcga

SEQ ID NO: 39505 - DNA, 40 bp, Rhodococcus erythropolis
  source 1..40: mol_type = genomic DNA
ctttgtggtggtggttgttgttccagctgagagtaatcta

SEQ ID NO: 39506 - protein, 506 aa, Streptococcus agalactiae
MNRIAIYLRLSEEDYDKADESVSIVNQRDYIRNYIVNEKSLIDYEIKEYVDDGYSATNTNRPSFLRLIDDIKAGGINTIIVKDMSRFSRDYILLGDYLSNIFPFFRIRFIAINDNYDSINEDGNGIDTDTQFKTLYYDLFSKELSEKVRSSVKQIKSKGKNTNWAAPFGYIKDPKDKYHIIIDKKTAFIVKEVFDLMLEGYSCIQIANIFNEKGYITRSERKEELKLSDYTKNLITGSKVKKRAWTSVCISQITRNELYTGDYVYNKYKETRIGGRKRILLPEEEWKVIHNTHEAIISREIFDEIKKIKEKRKFYVYTGKKNRSIFSDKIFCKECGRHMGFRSDSRQKKNKDKVYKYRNYYCYFCKTSRTPNNVKERKIVEFIKPKLERFKIKNGVNEERMIYPENSREDLLKEIDLLNSNLQIIYENYKKHILSKERYLQEKALIQNKKEQLENKLEEVKSDGNYSQKEFSANSLDEDSLLKAYVDSCIDRIIVSRSGEIEIIEK

SEQ ID NO: 39507 - DNA, 50 bp, Streptococcus agalactiae; identical to SEQ ID NO: 12242
  source 1..50: mol_type = genomic DNA

SEQ ID NO: 39508 - DNA, 40 bp, Streptococcus agalactiae
  source 1..40: mol_type = genomic DNA
tgtaggagcgacaggttctggaaaatcatctattattaat

SEQ ID NO: 39509 - DNA, 50 bp, Streptococcus agalactiae
  source 1..50: mol_type = genomic DNA
tatagcaattgcttgacattgtaggtggataatgctataatgatgacagt

SEQ ID NO: 39510 - DNA, 40 bp, Streptococcus agalactiae
  source 1..40: mol_type = genomic DNA
tgtagaaacaaaaagttaagtaaaatcctctcttattaaa

SEQ ID NO: 39511 - protein, 521 aa, Clostridium paraputrificum
MNTIAIYTRKSKFTGKGESIENQIEKCKKFIEFKFNIDSENVNIFIDEGFSGKNENRPQYQLMMEKIKKKQINSIVIYQLNRLGRNARDIHNTMQLCDDLGVIIYSATEGFDSSTSFGRAVIGILASLAQLEREQLAERVKDNMYTLAKMGRWLGGQSPLGFDGSREYYIDETGKERSITKLKKNEEELKLVKLLYDKYLEEKSLSQVGKWALINHLTGKNGGNLNKNAINVILQNPVYVKSSKEVFEYLSNEGYEVCGEPNGNGLLRYGKDDEPIVATAKHKGVIPSDQWIEVQKILKDNAYKAPRMGKTNTALLTGLLRCKCGSTMRISYGQKRKDGTKPFYYICNMKINSGGARCNLKNLNGNLFEKNFIKFLKNYSKETLFAELQKLLNNSKDLESTISSNKIDVEIEKSNKAIKQILNKLKLTDDDELSKILLQEIKVENNKLKALSKQKEELLNDQSEVVITQSEVLAILDDLDNFQKTFDDLNLEDKQKALKSLIESITLTDDKFIVDFNIKKN

SEQ ID NO: 39512 - DNA, 50 bp, Clostridium paraputrificum; identical to SEQ ID NO: 19097
  source 1..50: mol_type = genomic DNA

SEQ ID NO: 39513 - DNA, 40 bp, Clostridium paraputrificum
  source 1..40: mol_type = genomic DNA
tctttttgttggacatacagaagctatatgtacaggcacc

SEQ ID NO: 39514 - DNA, 50 bp, Clostridium paraputrificum
  source 1..50: mol_type = genomic DNA
catcgcaattaagacatccatgcaaaagctcgtcattccaaattgcgatg

SEQ ID NO: 39515 - DNA, 40 bp, Clostridium paraputrificum
  source 1..40: mol_type = genomic DNA
actttttcaaggtcatccaaaagaaatttgtacaggcact

SEQ ID NO: 39516 - protein, 577 aa, Coprococcus catus
MSVNKNITNETPKKAALYVRVSTSYQADKDSLPMQRQELIAYAKLMFGIEDYVIFEDAGYSGKNTDRPEFQNMMRRVRAGEFTHLLCWKIDRVSRNLLDFASMYQELKDLGVTFVSKNEQFDTSTAIGEAMLKIILVFAELERNMTSERVTATMLSRAQNGLWNGGRVHYGYDYDKESKTHSINEHEALVVHKMADLYEEHKSLLVVSRILNEEGCRTRAGNEWSPVTICTILSNPFYTGRYRYNHYKFPGVRIEKAPSEWIVIPDHHQRILSDDQFEKINRILRTNSRLQRKPGQQHTSQNTHIFGGLLYCGTCGCQYVSTPSRMQASGYRPSKYACPNLRKTKTCNTKSVSDPVIGEFIINYVLNMMHARRDFSKIHNPSDLQDALLKGGTFEDVDRIGKDGLDSCFNMFTTTPLEGKRFRKPKTVNTIDPELKRLRAEKRKTERALDRLMNMYLYDDNPIGEKDFIIRKQALDDYLKEINESLGMIDRGHGIETISDENFIKRASYFIMGKELADKDYIYFKKLAMDIDSEILRDFFHEIIDSIIMEGSNVREIVFKNGLSHIFFYKNKKEPGA

SEQ ID NO: 39517 - DNA, 50 bp, Coprococcus catus
  source 1..50: mol_type = genomic DNA
tgggtatcattctataaacatcgcatccccggttgatacagtaacgcagc

SEQ ID NO: 39518 - DNA, 40 bp, Coprococcus catus
  source 1..40: mol_type = genomic DNA
attattttataaacatcgcatccccgaagctgaagaaacg

SEQ ID NO: 39519 - DNA, 50 bp, Coprococcus catus
  source 1..50: mol_type = genomic DNA
tgggtatcattctataaacatcgcctccccggttgatacagtaacgcagc

SEQ ID NO: 39520 - DNA, 40 bp, Coprococcus catus
  source 1..40: mol_type = genomic DNA
atttctctataaacataccctgcctgaagctgcaaaaatg

SEQ ID NO: 39521 - protein, 558 aa, Blautia faecis; identical to SEQ ID NO: 76

SEQ ID NO: 39522 - DNA, 50 bp, Blautia faecis; identical to SEQ ID NO: 77
  source 1..50: mol_type = genomic DNA

SEQ ID NO: 39523 - DNA, 40 bp, Blautia faecis
  source 1..40: mol_type = genomic DNA
ttcaaatcccggtcggtcaaaatttgttccggtttttccc

SEQ ID NO: 39524 - DNA, 50 bp, Blautia faecis; identical to SEQ ID NO: 77
  source 1..50: mol_type = genomic DNA

SEQ ID NO: 39525 - DNA, 40 bp, Blautia faecis
  source 1..40: mol_type = genomic DNA
tttaaaatcctgttcttcaaaatttgttcacctttttccc

SEQ ID NO: 39526 - protein, 606 aa, Agrobacterium tumefaciens
MKQSEIRQTAYSYIRMSSQQQMKGDSLRRQLELSRQYAAANNLVLDESLTDIGISAWTGANVQDGALGRFLQLIQSGLIKRGSYLLVESLDRLSRQQVRNAIGPFIDIINAGVTIVTLADKQVYSETTVDENWTQLMMSLAIMSRAHEESQTKSKRLKEAHANKKKLAAQGIGRYSHNMWGWIDQIEVAANKFKYQLNQHAATVRKIYEMADAGLGQLVITRKLNDEGIATFRRSKKGWQQPNVGGILRNEAVIGTYQPTHAINGKATPNGPPIKNYLPAAIPEELFWRVQRNKQRRASSGRKGKQLTNLFTSLCVCQHCNGPIRVRLAGTGGKTHRHLHCDNRYRAAGCPSVGGGFRYDILEAAILDKIKEFDIEIGTGRQTADREVLLHEIMTKEIQLDEMEKRKTKLLRALELSDDDAAMSDILSKLSERRTTVEQLTTQIAEMKGDLARIDAEATTIASAVERLQLERLIWSTGSDDEVYASRSRVSAMMHSYIDVIAFDFNRKTYRVSIGGHLVLYEFYRDGRLLQKIDNRSRVRKHGVPVIWKDKDESGHAVEGTGKKVIPMGWSVETLTTTIPQSRQDPNAHLVDKRKRIVGTLINKKH

SEQ ID NO: 39527 - DNA, 50 bp, Agrobacterium tumefaciens
  source 1..50: mol_type = genomic DNA
aatgctgtaatgcaatagttgtacaaaatggaaatttgtattacagcagt

SEQ ID NO: 39528 - DNA, 40 bp, Agrobacterium tumefaciens; identical to SEQ ID NO: 22553
  source 1..40: mol_type = genomic DNA

SEQ ID NO: 39529 - DNA, 50 bp, Agrobacterium tumefaciens
  source 1..50: mol_type = genomic DNA
aatgctgtaatgcaatagttgtactgaatggaaatttgtattacagcagt

SEQ ID NO: 39530 - DNA, 40 bp, Agrobacterium tumefaciens
  source 1..40: mol_type = genomic DNA
aaatgattaagtcctcatttgccagggtcatttattaata

SEQ ID NO: 39531 - protein, 545 aa, Agrobacterium tumefaciens
MQDEFLGNQHSSGPVRAYSYVRMSTRKQLRGDSLRRQLERSKTFADEHSLLLDDSLQDLGVSAWRGRNFKTGALGRFLSMVESGEIPKGSYLLIESLDRLSREAVPDALTLFMAIINAGIIIATLGEDRQIYSRDRLNGDWTKLIIGLAVMSRGHEESQTKSERISAVAKRKREQAREGKGHITSITPAWIDAKRIDANRYEFTLNQHAETVRAIYEMATRGLGATVIARKLNVDGVPAFKSKDGWYQSIIKALLTRHDVIGTFQPHRMQDGKRVPDGDPIEGYFPAAIEKDLFLRVQAMRSNPGRPGRKGDTFANLFTGLCHCTHCGGPMTMKLSRVKGNENGRYLVCANYVRRHRCTEGKRHFRYEPLEAVILDHVKEIDLADALQAVRFDTVLDAIDETIAALTLQLEGLRRKEQRLASAIEDDSQPPDAILNLLKARQSERQAVEAELRHQQAERQRQSIRHDNSADMGDRIAKLRVAWEQAEEATRYELRSEAHAAIRELITEVSFDSSSYTAVVVIENGVSAYKVKDGRISGLFRVFAA

SEQ ID NO: 39532 - DNA, 50 bp, Agrobacterium tumefaciens; identical to SEQ ID NO: 39527
  source 1..50: mol_type = genomic DNA

SEQ ID NO: 39533 - DNA, 40 bp, Agrobacterium tumefaciens; identical to SEQ ID NO: 22553
  source 1..40: mol_type = genomic DNA

SEQ ID NO: 39534 - DNA, 50 bp, Agrobacterium tumefaciens; identical to SEQ ID NO: 39529
  source 1..50: mol_type = genomic DNA

SEQ ID NO: 39535 - DNA, 40 bp, Agrobacterium tumefaciens; identical to SEQ ID NO: 39530
  source 1..40: mol_type = genomic DNA

SEQ ID NO: 39536 - protein, 500 aa, Bacillus subtilis; identical to SEQ ID NO: 18376

SEQ ID NO: 39537 - DNA, 50 bp, Bacillus subtilis
  source 1..50: mol_type = genomic DNA
caccccccttttgtaattacaatctcattattcattacaaaaaggggggg

SEQ ID NO: 39538 - DNA, 40 bp, Bacillus subtilis; identical to SEQ ID NO: 29013
  source 1..40: mol_type = genomic DNA

SEQ ID NO: 39539 - DNA, 50 bp, Bacillus subtilis
  source 1..50: mol_type = genomic DNA
caccccccttttgtaattacaatcgtattattcattacaaaaaggggggg

SEQ ID NO: 39540 - DNA, 40 bp, Bacillus subtilis
  source 1..40: mol_type = genomic DNA
gcttatatgtatgtggattgtatttttaatgtaccttgat

SEQ ID NO: 39541 - protein, 500 aa, Bacillus subtilis; identical to SEQ ID NO: 18376

SEQ ID NO: 39542 - DNA, 50 bp, Bacillus subtilis
  source 1..50: mol_type = genomic DNA
caccccccttttgtaattacaatctcattattaattacaaaaggggggcg

SEQ ID NO: 39543 - DNA, 40 bp, Bacillus subtilis; identical to SEQ ID NO: 29013
  source 1..40: mol_type = genomic DNA

SEQ ID NO: 39544 - DNA, 50 bp, Bacillus subtilis
  source 1..50: mol_type = genomic DNA
caccccccttttgtaattacaatcgtattattaattacaaaaggggggcg

SEQ ID NO: 39545 - DNA, 40 bp, Bacillus subtilis; identical to SEQ ID NO: 39540
  source 1..40: mol_type = genomic DNA

SEQ ID NO: 39546 - protein, 500 aa, Bacillus subtilis
MIAIYVRVSTEEQAIKGSSIDSQIEACIKKAGTKDVLKYADEGFSGELLERPALNRLREDASKGLISQVICYDPDRLSRKLMNQLIIDDELRKRNIPLIFVNGEYANSPEGQLFFAMRGAISEFEKAKIKERTSSGRLQKMKKGMIIKDSKLYGYKFVKEKRTLEILEEEAKIIRMIFNYFTDHKSPFFGRVNGIALHLTQMGVKTKKGAKVWHRQVVRQILMNSSYKGEHKQYKYDTEGSYVSKQAGNKSIIKIRPEEEQITVAIPAIVPAEQWDYAQELLGQSKRKHLSICPHNYLLSGLVRCGKCGNTMTGKKRKSHGKDYYVYTCRKNYSGAKDRGCGKEMSENKLNRHVWGEIFKFITNPQKYASFKEIEQSNHLSDELELIQKEIEKTKKGRKRLLTLISLSDDDDLDIDEIKAQIIELQKKQKQLTEKCNEIQLKMKVMDDTSSSENALKRAIDYFQSIGADNLTLEDKKTIVNFIVKEVTVVDSDTVYIETY

SEQ ID NO: 39547 - DNA, 50 bp, Bacillus subtilis; identical to SEQ ID NO: 12727
  source 1..50: mol_type = genomic DNA

SEQ ID NO: 39548 - DNA, 40 bp, Bacillus subtilis; identical to SEQ ID NO: 29013
  source 1..40: mol_type = genomic DNA

SEQ ID NO: 39549 - DNA, 50 bp, Bacillus subtilis
  source 1..50: mol_type = genomic DNA
caccccccttttgtaattacaatcgtattattaattacaaaaggggggtg

SEQ ID NO: 39550 - DNA, 40 bp, Bacillus subtilis; identical to SEQ ID NO: 39540
  source 1..40: mol_type = genomic DNA

SEQ ID NO: 39551 - protein, 500 aa, Bacillus subtilis; identical to SEQ ID NO: 18376

SEQ ID NO: 39552 - DNA, 50 bp, Bacillus subtilis; identical to SEQ ID NO: 12727
  source 1..50: mol_type = genomic DNA

SEQ ID NO: 39553 - DNA, 40 bp, Bacillus subtilis; identical to SEQ ID NO: 29013
  source 1..40: mol_type = genomic DNA

SEQ ID NO: 39554 - DNA, 50 bp, Bacillus subtilis; identical to SEQ ID NO: 39549
  source 1..50: mol_type = genomic DNA

SEQ ID NO: 39555 - DNA, 40 bp, Bacillus subtilis; identical to SEQ ID NO: 39540
  source 1..40: mol_type = genomic DNA

SEQ ID NO: 39556 - protein, 490 aa, Bacillus subtilis
MIAIYVRVSTEEQAIKGSSIDSQIEACIKKAGTKDVLKYADEGFSGELLERPALNRLREDASKGLISQVICYDPDRLSRKLMNQLIIDDELRKRNIPLIFVNGEYANSPEGQLFFAMRGAISEFEKAKIKERTSSGRLQKMKKGMIIKDSKLYGYKFVKEKRTLEILEEEAKIIRMIFNYFTDHKSPFFGRVNGIALHLTQMGVKTKKGAKVWHRQVVRQILMNSSYKGEHRQYKYDTEGSYVSKQAGNKSIIKIRPEEEQITVTIPAIVPAEQWDYAQELLGQSKRKHLSISPHNYLLSGLVRCGKCGNTMTGKKRKSHGKDYYVYTCRKNYSGAKDRGCGKEMSENKLNRHVWGEIFKFITNPQKYVSFKEAEQSNHLSDELELIEKEIEKTKKGRKRLLTLISLSDDDDIELQKKQNQLTEKCNEIQSKMKVLDDTSSSENALKRAIDYFQSIGADNLTLEDKKTIVNFIVKEVTIVDSDTIYIETY

SEQ ID NO: 39557 - DNA, 50 bp, Bacillus subtilis; identical to SEQ ID NO: 39537
  source 1..50: mol_type = genomic DNA

SEQ ID NO: 39558 - DNA, 40 bp, Bacillus subtilis; identical to SEQ ID NO: 29013
  source 1..40: mol_type = genomic DNA

SEQ ID NO: 39559 - DNA, 50 bp, Bacillus subtilis; identical to SEQ ID NO: 39539
  source 1..50: mol_type = genomic DNA

SEQ ID NO: 39560 - DNA, 40 bp, Bacillus subtilis; identical to SEQ ID NO: 39540
  source 1..40: mol_type = genomic DNA

SEQ ID NO: 39561 - protein, 500 aa, Bacillus subtilis; identical to SEQ ID NO: 29016

SEQ ID NO: 39562 - DNA, 50 bp, Bacillus subtilis
  source 1..50: mol_type = genomic DNA
caccccccttttgtaattacaatctcattattaattacaaaaaggggggg

SEQ ID NO: 39563 - DNA, 40 bp, Bacillus subtilis; identical to SEQ ID NO: 29013
  source 1..40: mol_type = genomic DNA

SEQ ID NO: 39564 - DNA, 50 bp, Bacillus subtilis
  source 1..50: mol_type = genomic DNA
caccccccttttgtaattacaatcgtattattaattacaaaaaggggggg

SEQ ID NO: 39565 - DNA, 40 bp, Bacillus subtilis; identical to SEQ ID NO: 39540
  source 1..40: mol_type = genomic DNA

SEQ ID NO: 39566 - protein, 565 aa, Streptococcus suis; identical to SEQ ID NO: 17926

SEQ ID NO: 39567 - DNA, 50 bp, Streptococcus suis
  source 1..50: mol_type = genomic DNA
ggactgctgggtgtaagcctcgcttaaagagagtatgacacttagcagtc

SEQ ID NO: 39568 - DNA, 40 bp, Streptococcus suis
  source 1..40: mol_type = genomic DNA
gaatataaaaaatccgctcaaaggcggattttttgtttat

SEQ ID NO: 39569 - DNA, 50 bp, Streptococcus suis
  source 1..50: mol_type = genomic DNA
ggactgctgggtgtaagcctcgctaaaagagagtatgacacttagcagtc

SEQ ID NO: 39570 - DNA, 40 bp, Streptococcus suis
  source 1..40: mol_type = genomic DNA
gaataataaaaatcagtacaaagggttattatttatttat

SEQ ID NO: 39571 - protein, 500 aa, Bacillus velezensis; identical to SEQ ID NO: 12731

SEQ ID NO: 39572 - DNA, 50 bp, Bacillus velezensis; identical to SEQ ID NO: 12727
  source 1..50: mol_type = genomic DNA

SEQ ID NO: 39573 - DNA, 40 bp, Bacillus velezensis
  source 1..40: mol_type = genomic DNA
gcgcagatgcattaaaatctcattttcaatacatcgtgca

SEQ ID NO: 39574 - DNA, 50 bp, Bacillus velezensis
  source 1..50: mol_type = genomic DNA
caccccccttttgtaattacaatccaattattaattacaaaaggggggtg

SEQ ID NO: 39575 - DNA, 40 bp, Bacillus velezensis
  source 1..40: mol_type = genomic DNA
tcacagttgtattaaaagtcaattttatattcattgtgca

SEQ ID NO: 39576 - protein, 500 aa, Bacillus velezensis
MIAIYVRVSTEEQAIKGSSIDSQIEACIKKAGTKDVLKYADEGFSGELLERPALNRLREDASKGLISQVICYDPDRLSRKLMNQLIIDDELRKRNIPLIFVNGEYANSPEGQLFFAMRGAISEFEKAKIKERTSSGRLQKMKKGMIIKDSKLYGYKFVKEKRTLEIFEEEAKIIRMIFNYFTDHKSPFFGRVNGIALHLTQMGVKTKRGAKVWHRQVVRQILMNSSYKGEHRQYKYDTEGSYVSKQAGNKSIIKIRPEEEQITVAIPAIVPAEQWVYAQELLGQSKRKHLNISPHNYLLSGLVRCGKCGNTMTGKKRKSHGKDYYVYTCRKNYSGAKDRGCGKEMSENKLNRHVWDEIFKFITNPQKYASFKEIEQSNHLSDELELIQKEIEKTKKGRKRLLTLISLSDDDDLDINEIKVQIIELQKKQNQLTEKCNEIQSKMKVLDDTSSSENALKRAIDYFQSIGADNLTLEDKKKIVNFIVKEVTVVDSDTVYIETY

SEQ ID NO: 39577 - DNA, 50 bp, Bacillus velezensis; identical to SEQ ID NO: 12727
  source 1..50: mol_type = genomic DNA

SEQ ID NO: 39578 - DNA, 40 bp, Bacillus velezensis; identical to SEQ ID NO: 39573
  source 1..40: mol_type = genomic DNA

SEQ ID NO: 39579 - DNA, 50 bp, Bacillus velezensis; identical to SEQ ID NO: 39574
  source 1..50: mol_type = genomic DNA

SEQ ID NO: 39580 - DNA, 40 bp, Bacillus velezensis; identical to SEQ ID NO: 39575
  source 1..40: mol_type = genomic DNA

SEQ ID NO: 39581 - protein, 588 aa, Shewanella algae
MGTSDVACGILCQTPSRRIRHATMTSPKQPTSTPLAHSYIRFSSIAQEKGDSINRQIASATSWSEKRGIPLSDVVYRDLGISAFKKVDRPGLRQLTESIRAGIIRQGDYILLERLDRLSRKDLDIAQEEVKSMLRLGVNIIAIEDGLELTPDSLNDPSALIRIIILAENAHRQSREKSERIKAAYASARQRARDGKAVRRRLPCWLEVKEDVYTFHTVYLPIVQRIIELRHAGRGYSSIAKTLNAEGLPGRMGKSGSGTSKGWTGGSVREIVTSRALYGFYQPHITVEKERDDGTTKRVLQPDGDPIVDHYPPVIGYREWLAIQPDTTATAKNRVPAGGYNKTDRLSGVARCAVCGGRAALRIYRRPSKKEGVKEYRHWVCVAGYASGACSVTRAFPDLDLMIIKAIGHLEVDVATPAPSTCSSSGAVDTIQATIDANRERAEQLKSLLVDPEGGDVGFVYNALSTLQNRIKDLEAELEQLEKVEVSGGNTTQEDIDRLGSLVDDVELFNHELRRIVSAIRVQHFGKKGFSGVIEQVNGRRVGFVSTAPANPRRGHAKERIEFFARGLGIPEPGDVEDLYPWETEDQD

SEQ ID NO: 39582 - DNA, 50 bp, Shewanella algae
  source 1..50: mol_type = genomic DNA
ttttcccatttcaaccgaatcacaaagctgttttcaccaaaatgggaaca

SEQ ID NO: 39583 - DNA, 40 bp, Shewanella algae; identical to SEQ ID NO: 23513
  source 1..40: mol_type = genomic DNA

SEQ ID NO: 39584 - DNA, 50 bp, Shewanella algae
  source 1..50: mol_type = genomic DNA
ttttcccatttcaaccgaatcacatggctgttttcaccaaaatgggaaca

SEQ ID NO: 39585 - DNA, 40 bp, Shewanella algae
  source 1..40: mol_type = genomic DNA
attgacagtttagaacacttgacctatcaatagcagaata

SEQ ID NO: 39586 - protein, 515 aa, Bacillus thuringiensis
MKTAIYLRKSRADLEAEARGEGETLAKHRTTLLKIAKEMNLNVLAVREEIVSGESLVKRPEMLALLEEIEDNKYDVVLCMDMDRLGRGGMKEQGIILETFKRSNTKIMTPRKTYDLNDEWDEEYSEFEAFMARKELKIITRRMQRGRVASVEAGNYLGTHAPFGYDIHRLNKRERTLTINPEEASVVRMIFDWYANEDMGASAIRNKLNDLGYKSKLGNDWNPYSILDILKNNIYIGKVTWQKRKEVKRPDAVKRSCARQDKSDWIIADGKHEPIIPESLFEQAQEKLNSRYHVPYNTNGIKNPLAGIIKCSKCGYSMVQRYPKNRKETMDCKHRGCENKSSYTELIEKRLLEALKEWYINYKADFEKHKQGDKLRETQVIQMNEAALRKLEKELVDVQKQKNNLHDLLERGVYTVEIFLERSKAVSDRINEITSTMENLKKEIKTEVKKEKVKKDTIPQVEHVLDLYFKTDDPKKKNSLLKSVLEKAVYKKEKWQRLDDFELVLYPKLPQDGDI

SEQ ID NO: 39587 - DNA, 50 bp, Bacillus thuringiensis
  source 1..50: mol_type = genomic DNA
tcgtcaccttgttggtgtaattaggttgacgccaacaaggtgataacaaa

SEQ ID NO: 39588 - DNA, 40 bp, Bacillus thuringiensis
  source 1..40: mol_type = genomic DNA
tggccattaggcgcatgagatttaccccgtttaatcctaa

SEQ ID NO: 39589 - DNA, 50 bp, Bacillus thuringiensis
  source 1..50: mol_type = genomic DNA
tcgtcaccttgttggtgtaattagtgtgacgccaacaaggtgataacaaa

SEQ ID NO: 39590 - DNA, 40 bp, Bacillus thuringiensis
  source 1..40: mol_type = genomic DNA
tggctattagacacattagtgataatcactttattcctaa

SEQ ID NO: 39591 - protein, 532 aa, Clostridioides difficile
MKAAIYSRKSRFTGKGDSIENQIQLCMDYSKSIGIEDFYIYEDEGFSGSNIDRPQFKKMMQDAKDKKFNYLICYRLDRISRNVSDFSTLIEKLNKLDISFISIKEQFDTSTPMGRAMMFISSVFAQLERETIAERVKDNMYELARSGRWLGGKTPHGFNSEKITFLDENLKERSMYKLQVNDEQMEIVKLIYNKYLEFRSLSKLYKYVYHNSIRGPHGGKFDPSSLSRILRNPAYVKANDEILKYLRDNGMEVIGTPDGKCGILTYAKNTSDSIAAIAKHLGVIEPEIWLKTQNQLDKNRDKTPRIATGKTALLSGLIKCGKCGANMRITYKGKKTDKDLKYYYVCGTKKTLGVDGCNCKNLNGPLVESLVVDKIKNCDLESIISAFDSNKIKIDYAFNDLHSEIDLLKNKVLEKEKLINNLIKELAKNTGSIASDYIISQVESLNNEISILKSKIDDLESSDINTSSDCFNLDIIVSNLKKFNDEVDNASLDDKRLLLSTIIDSIIWDSSLGDLNIIYMGAEIDDSVSLNN

SEQ ID NO: 39592 - DNA, 50 bp, Clostridioides difficile
  source 1..50: mol_type = genomic DNA
agttgcactttcttagtgatagtagaagcactatgtataaaagtgcaaca

SEQ ID NO: 39593 - DNA, 40 bp, Clostridioides difficile
  source 1..40: mol_type = genomic DNA
ggttacgcatgatattggtgaagcaataagcatatcagat

SEQ ID NO: 39594 - DNA, 50 bp, Clostridioides difficile
  source 1..50: mol_type = genomic DNA
agttgcactttcttagtgatagtaacagcactatgtataaaagtgcaaca

SEQ ID NO: 39595 - DNA, 40 bp, Clostridioides difficile
  source 1..40: mol_type = genomic DNA
gaaacagtatgattttggtacagaaataagcacaacagat

SEQ ID NO: 39596 - protein, 532 aa, Clostridioides difficile
MKAAIYSRKSRFTGKGDSIENQIQLCIDYAKSIGVKDFLIYEDEGFSGSNIDRPQFKKMMQDAKDKKFSYLVCYRLDRISRNVSDFSTLIEKLNELNISFISIKEQFDTSTPMGRAMMFISSVFAQLERETIAERIKDNMYELARSGRWLGGNTPHGFNSEKTTFLDENLKERSMYKLQVNDEQMEIVKLIYNKYLELRSLSKLYKYVYNNGIRGPRGGKFDPSSLSRILRNPAYVKANDEILDYLKNSGMDVVGTSDRKCGILTYAKNTSNSIAAIAKHHGVIEPEIWLEVQNQLDKNRDKTPRISTGKTALLSGLIKCGKCGSNMRITYKGKKTDKDLKYYYICGTKKTLGSDSCNCKNLNGPLVESLVIDKIKNCKEESIISAFNSNNIKTDNVFNIFKSETNLLKNQILDKERLIKNLVIELAKNTGSTASDYIVSQIESLNNEISILKDKINTLESSNINISSDSINIDIIVSNLKRFNDEVDNASLDDKRLLLSTIINSIVWDSSLGNLNIVYMGAEVDNSISLNN

SEQ ID NO: 39597 - DNA, 50 bp, Clostridioides difficile
  source 1..50: mol_type = genomic DNA
agttgcacttttttagctatagcagaagcaaggtgtataaaagtgcaaca

SEQ ID NO: 39598 - DNA, 40 bp, Clostridioides difficile; identical to SEQ ID NO: 39593
  source 1..40: mol_type = genomic DNA

SEQ ID NO: 39599 - DNA, 50 bp, Clostridioides difficile
  source 1..50: mol_type = genomic DNA
agttgcacttttttagctatagcaacagcaaggtgtataaaagtgcaaca

SEQ ID NO: 39600 - DNA, 40 bp, Clostridioides difficile; identical to SEQ ID NO: 39595
  source 1..40: mol_type = genomic DNA

SEQ ID NO: 39601 - protein, 532 aa, Clostridioides difficile
MKAAIYSRKSRFTGKGDSIENQIQLCMDYAKSIGIEDFYIYEDEGFSGSNIDRPQFKKMMQDAKDKKFNYLICYRLDRISRNVSDFSTLIEKLNKLDISFISIKEQFDTSTPMGRAMMFISSVFAQLERETIAERVKDNMYELARSGRWLGGKTPHGFNSEKITFLDENLKERSMYKLQVNDEQMEIVKLIYNKYLEFRSLSKLYKYVYHNSIRGPHGGKFDPSSLSRILRNPAYVKANDEILKYLRDNGMEVIGTPDGKCGILTYAKNTSDSIAAIAKHLGVIEPEIWLKTQNQLDKNRDKAPRIATGKTALLSGLIKCSKCGANMRITYKGKKTDKDLKYYYVCGTKKTLGVDGCNCKNLNGPLVESLVVDKIKNCDLESIISAFDSNKIKIDYAFNDLHSEANLLKNKILEKEKLINNLIKELAKNTGSIASDYIISQVESLNNEISILKSKIDDLESSDINTSSDCFNLDIIVSNLKKFNNEVDNASLEDKRLLLSTIIDSIIWDSSLGDLNIIYMGAEIDDSVSLNN

SEQ ID NO: 39602 - DNA, 50 bp, Clostridioides difficile; identical to SEQ ID NO: 39592
  source 1..50: mol_type = genomic DNA

SEQ ID NO: 39603 - DNA, 40 bp, Clostridioides difficile; identical to SEQ ID NO: 39593
  source 1..40: mol_type = genomic DNA

SEQ ID NO: 39604 - DNA, 50 bp, Clostridioides difficile; identical to SEQ ID NO: 39594
  source 1..50: mol_type = genomic DNA

SEQ ID NO: 39605 - DNA, 40 bp, Clostridioides difficile; identical to SEQ ID NO: 39595
  source 1..40: mol_type = genomic DNA

SEQ ID NO: 39606 - protein, 532 aa, Clostridioides difficile
MKAAIYSRKSRFTGKGDSIENQIQLCMDYSKSIGIEDFYIYEDEGFSGSNIDRPQFKKMMQDAKDKKFNYLICYRLDRISRNVSDFSTLIEKLNKLDISFISIKEQFDTSTPMGRAMMFISSVFAQLERETIAERVKDNMYELARSGRWLGGKTPHGFNSERITFLDENLKERSMYKLQVNDEQMEIVKLIYNKYLEFRSLSKLYKYVYHNSIRGPHGGKFDPSSLSRILRNPAYVKANDEILKYLRDNGMEVIGTPDGKCGILTYAKNTSDSIAAIAKHLGVIEPEIWLKTQNQLDKNRDKTPRIATGKTALLSGLIKCGKCGANMRITYKGKKTDKDLKYYYVCGTKKTLGVDGCNCKNLNGPLVESLVVDKIKNCDLESIISAFDSNKIKIDYAFNDLHSETDLLKNKVLEKEKLINNLIKELAKNTGSIASDYIISQVESLNNEISILKSKIDDLESSDINTSSDCFNLDIIVSNLKKFNNEVDNASLDDKRLLLSTIIDSIIWDSSLGDLNIIYMGAEIDDSVSLNN

SEQ ID NO: 39607 - DNA, 50 bp, Clostridioides difficile
  source 1..50: mol_type = genomic DNA
agttgcactttcttagtgatagtagaatcactatgtataaaagtgcaaca

SEQ ID NO: 39608 - DNA, 40 bp, Clostridioides difficile; identical to SEQ ID NO: 39593
  source 1..40: mol_type = genomic DNA

SEQ ID NO: 39609 - DNA, 50 bp, Clostridioides difficile
  source 1..50: mol_type = genomic DNA
agttgcactttcttagtgatagtaacatcactatgtataaaagtgcaaca

SEQ ID NO: 39610 - DNA, 40 bp, Clostridioides difficile; identical to SEQ ID NO: 39595
  source 1..40: mol_type = genomic DNA

SEQ ID NO: 39611 - protein, 614 aa, Burkholderia multivorans
MPQATTPKAYSYIRFSTPEQQFGDSERRQTELSQKYAEAHGLTLDENLKYRDLGVSAFDKSNVTSGQLGAFLSAVDSGAVEPGSYLLVESLDRLSRAKITDAFEIFMRIINRGVRIVTLADGMEYSKEKANQQFTDLIISIAVMSRAHEESQTKSKRLKEAWQAKRGRIGDTKLTEMAPAWLKLNKDRTAYSLMPDRVELVQRMFQWSKDGVGSETIARRLNQQGLPTWGTRKADQWHASYIKKVLDNRAVLGEFQPHVLVNGKRVPEGDPAPDYFPRIISDEDFVLAKTARQSRRTNSVGRKGQTFSNVFSGILRCGYCNGSMVYVNKGHSGPRAKLLVCARAKAGKGCHYVPWEYPQFERSVLTYCKGLDFDAFLQTRDTVKSELAALSARIAVLESSITDNEQKQANILEAIESGAKFQQFEARMVELEQNRMKFNAELDETRQKYDVRANAKVDVTAVRASIDELLQRLSELEGGELYDVRARLSQHIKRLIVRIVMYPGGYIEKPFFVERLRAHLVSKGTDTKAADEYIASRLKLTPNVSERFFTMISRSDAVRTIRPELDNPEILHLQPGEGGQGLAAFAETIGSMLEKLSEIAPKSSGSAEALPDNR

SEQ ID NO: 39612 - DNA, 50 bp, Burkholderia multivorans
  source 1..50: mol_type = genomic DNA
gcgggtctaattggccacaagttaagaacctagggccaaataaaccctct

SEQ ID NO: 39613 - DNA, 40 bp, Burkholderia multivorans
  source 1..40: mol_type = genomic DNA
gccgggcgggccgaccatcagcatgtggtgtccgcccgcg

SEQ ID NO: 39614 - DNA, 50 bp, Burkholderia multivorans
  source 1..50: mol_type = genomic DNA
gcgggtctaattggccacaagttaccaacctagggccaaataaaccctct

SEQ ID NO: 39615 - DNA, 40 bp, Burkholderia multivorans
  source 1..40: mol_type = genomic DNA
gcagagcggggcgaccacccccggctggagtccgcctccg

SEQ ID NO: 39616 - protein, 540 aa, Qipengyuania flava
MDCVIYIRWSSAEQAKGSSLERQRQDCRQHAADNGWRVVDELVDDGISAFKGEHASTGALGSFVASVEAGRFPDGVILLCEKIDRLSRQEPGKVFLWMMNLTEAGVVVATVDGSRRYSKGNFDMASIIEVVVKAQLSHEESDKKSQRLAAAWAAKRRRLNAGEKFVMTRRAPAWLEVVGTPPVFIPIPARAEIVRRIFEDTVAGLGKQHIARNLNLEGVPTFGRAEAWHASYVQKILRNPAVIGELHTARKARGTKRSMTGEVVLDYYPVIVDADLHRRAMNAMRERSRTSTGRGRKLVNLFSGLARCEACSSKMTFRGKGRKQRADGSWVNEDYLVCDGYQRGRGCENGVHYNYAIWERGILDPIIYEALHEDHAASQSEVRDLEIEVARLERVWDLAKARAESALRIAIESGRHEAQAAWAEMAEGVDRAQSALDEARERLLELVHTPSREEQWARINRLRESLHDEDEDLRFEARSKIRSAVHALVTQLSFHGPKIIGVTMTVADEWSVVIDYNDIQGDTEWIRGRIDPIRETPQGK

SEQ ID NO: 39617 - DNA, 50 bp, Qipengyuania flava
  source 1..50: mol_type = genomic DNA
tcgagtgtaggcatatccaacctgctaaggtaatatatacctacaccgcg

SEQ ID NO: 39618 - DNA, 40 bp, Qipengyuania flava
  source 1..40: mol_type = genomic DNA
cgcaggcgggcacaatctgctgatgatcggtccaccaggt

SEQ ID NO: 39619 - DNA, 50 bp, Qipengyuania flava
  source 1..50: mol_type = genomic DNA
tcgagtgtaggcatatccaacctgtgaaggtaatatatacctacaccgcg

SEQ ID NO: 39620 - DNA, 40 bp, Qipengyuania flava
  source 1..40: mol_type = genomic DNA
cgcaggcaggcacaatcgttggctgcccggatcacgagtt

SEQ ID NO: 39621 - protein, 673 aa, Vibrio cholerae; identical to SEQ ID NO: 11806

SEQ ID NO: 39622 - DNA, 50 bp, Vibrio cholerae; identical to SEQ ID NO: 1977
  source 1..50: mol_type = genomic DNA

SEQ ID NO: 39623 - DNA, 40 bp, Vibrio cholerae; identical to SEQ ID NO: 33963
  source 1..40: mol_type = genomic DNA

SEQ ID NO: 39624 - DNA, 50 bp, Vibrio cholerae
  source 1..50: mol_type = genomic DNA
gtgttggtaaacataggtttatctgtagataaagacattattaccaacac

SEQ ID NO: 39625 - DNA, 40 bp, Vibrio cholerae
  source 1..40: mol_type = genomic DNA
gttatggagtttaatatctgtcaaagtacaaatcccaggg

SEQ ID NO: 39626 - protein, 544 aa, Clostridium gasigenes
MIKIAIYSRKSKFTGKGDSIENQVQMCKDYANTHFNDKNLEFDIYEDEGFTGENLNRPKFKMLMSKLKEYDVLICYRLDRISRTVSDFSSTLEILDSHNCDFVSIKEQFDTSTPMGRAMIYIASVFAQLERETIAERVKDNMLELAKNGRWSGGRTPLGYKSEYESYIDAEGNERKVVKLIKSDKELELVNLIYKTYLEQGSLHKTEVWFTQKGIKSNADILLEKTSLKVILQNPVYVKANKEVVDFMKKEQWNVYGEPDGVHSLLSYNKTEAVRVNGKKTKRAKEKSLWIAAVSSCEGVIDPEMWLAVQRQFSKNKDTFPHLGKTHNGILTGRLKCKNCGSNMIIQHGTVSVKTGQKLFYYICSMKKRSKGEVCNTKNLRAFDIEESTINELESLAERKLNFLSTLKKKNNYTLSTKNIKSKKLLLEKQLLEKQKQIDNLVNKLSLDDDIADILIVKIKSLKKETASISEDLEKLNNDIKISDTEEFNISFIESVLNRCVNIRDLSKEEQKQIIDVLIIDILYDGSIGEAEMNLIGSDTGKKK

SEQ ID NO: 39627 - DNA, 50 bp, Clostridium gasigenes
  source 1..50: mol_type = genomic DNA
tgttgcactcttgtccacctagcacatgcaggttgtcccaaagtgcaaca

SEQ ID NO: 39628 - DNA, 40 bp, Clostridium gasigenes
  source 1..40: mol_type = genomic DNA
aattttattagacacagggcatgctaagcttatgacaaca

SEQ ID NO: 39629 - DNA, 50 bp, Clostridium gasigenes
  source 1..50: mol_type = genomic DNA
tgttgcactcttgtccacctagcatgtgcaggttgtcccaaagtgcaaca

SEQ ID NO: 39630 - DNA, 40 bp, Clostridium gasigenes
  source 1..40: mol_type = genomic DNA
aagtttgttaagaaaagggtgtgagaagcttaagacagca

SEQ ID NO: 39631 - protein, 544 aa, Clostridium gasigenes
MIKIAIYSRKSKFTGKGDSIENQVQMCKDYANTHFNDKNLEFDIYEDEGFTGENLNRPKFKMLMSKLKEYDVLICYRLDRISRTVSDFSSTLEILDSHNCDFVSIKEQFDTSTPMGRAMIYIASVFAQLERETIAERVKDNMLELAKNGRWSGGRTPLGYKSEYESYIDAEGNERKVVKLIKSDKELELVNLIYKTYLEQGSLHKTEVWFTQKGIKSNADILLEKTSLKVILQNPVYVKANKEVVDFMKKEQWNVYGEPDGVHSLLSYNKTEAVRVNGKKTKRAKEKSLWIAAVSSCEGVIDPEMWLAVQRQFSKNKDTFPHLGKTHNGILTGRLKCKNCGSNMIIQHGTVSVKTGQKLFYYICSMKKRSKGEVCNTKNLRAFDIEESTINELESLAERKLNFLSTLKKKNNYTLSTKNIKSKKLLLEKQLLEKQKQIDNLVNKLSLDDDIADILIVKIKSLKKETASISEDLEKLNNDIKISDTEEFNISFIESVLNRCVNIRDLSKEEQKQIIDVLVIDILYDGSIGEAEMNLIGSDTGKKK

SEQ ID NO: 39632 - DNA, 50 bp, Clostridium gasigenes; identical to SEQ ID NO: 39627
  source 1..50: mol_type = genomic DNA

SEQ ID NO: 39633 - DNA, 40 bp, Clostridium gasigenes; identical to SEQ ID NO: 39628
  source 1..40: mol_type = genomic DNA

SEQ ID NO: 39634 - DNA, 50 bp, Clostridium gasigenes; identical to SEQ ID NO: 39629
  source 1..50: mol_type = genomic DNA

SEQ ID NO: 39635 - DNA, 40 bp, Clostridium gasigenes; identical to SEQ ID NO: 39630
  source 1..40: mol_type = genomic DNA

SEQ ID NO: 39636 - protein, 548 aa, Peptoniphilus harei
MKNKKAYVYTRVSTSMQIDGYSLDAQEERIKQYAKAYGIEIIETYKDAGKSGTSISGRNEFIAMLNDIEAEKDKVDYVMVFKLSRFGRNAADVLQSLQVMENHNVNLICVDDSLDSSKDSGKLVITILSAVAEMERENILSQTMEGRKQKAREGKWNGGFAPIGYSLDNGELVVNEDEAKAVRMIFDLYANSDMGANGVSKYLVSLGINKPIRQNGKNPYFSASLIRQILDNPVYNGKIAYGRRKTIKDKTTGKIKLEKSDHYIIAQGNHEALIDDELWNTVQEKRKSQAKKYEKINRGKDERVHILSNLIKCPYCGAGLYGNKSRKRNKNKEGEHYKDYYYYGCKHRQMMNGHKCTFNKQIRAELIEKEVETIITQVVSNPTFAKKIEEKINIQIDTKEIDEVINKHLAKIRQLTGTKASLINQIDSLNFEDKHYDRKYTDLNLRLDAIYDQLEYAEMQLNDSRKRKEAILEEKITSDNIYKILVNFNSLYTVLSDIDKKRLLNEMIEEIQIYDEKTEKDTWIKSVVFKLPLIDNEIDFGLDNKDNV

SEQ ID NO: 39637 - DNA, 50 bp, Peptoniphilus harei
  source 1..50: mol_type = genomic DNA
tggtttggacaataaagataatgtcgagaatgcagttttgatagctatca

SEQ ID NO: 39638 - DNA, 40 bp, Peptoniphilus harei
  source 1..40: mol_type = genomic DNA
tccccataaccttaggggttgaagccctaaccctattggt

SEQ ID NO: 39639 - DNA, 50 bp, Peptoniphilus harei
  source 1..50: mol_type = genomic DNA
tggtttggacaataaagataatgttgagaatgcagttttgatagctatca

SEQ ID NO: 39640 - DNA, 40 bp, Peptoniphilus harei
  source 1..40: mol_type = genomic DNA
tccccttaaactcatatgttgaagccctaaccctaaatat

SEQ ID NO: 39641 - protein, 457 aa, Roseburia intestinalis
MKKKELCPAVIRVALYIRVSGEEQKIKGLSLEAQQERLETYAKEHGWIITGTYIDAAKTARKNLHKRTEFQRMMESVKRNEVDILLFARLDRWFRSVADYYKVMEILQAHNCNWKTTDEEYDTTTANGRLYINVKLSIAQNEADIDGERIDVVFDSKIAHGTVVSGSCPYGFRVNNEKRLEIIPDDAAIVQDAFCYFESSVSQRATTKYIREKYGINWCYATFHRMLTEELYTGVYNRGGRYNANFCPSIINRDQFDRVQALLKKNVHTAPSGRIYLFTSILVCDECSHKLNGYLSQGIVYYRCAQHMQRGRCIHNHSIREDYVEQWLFDHLSEEFNRVKLDWEIQAAKRKRSSSSKGKAVLKRKLNKLKELYVNDLIDIEEYRKDYEIYTSALKQMPNDKEMEQPPNFKAVERLLQSDFKNLYNTLTREEKRTLWRSAIKEIRIDNDYNITGIIFE

SEQ ID NO: 39642 - DNA, 50 bp, Roseburia intestinalis
  source 1..50: mol_type = genomic DNA
tgttgtactatttatatagtacccgtgggtagtgtactgttagtacaaac

SEQ ID NO: 39643 - DNA, 40 bp, Roseburia intestinalis
  source 1..40: mol_type = genomic DNA
attgtaatcaagtgctccggtcggctcatcacagagcagg

SEQ ID NO: 39644 - DNA, 50 bp, Roseburia intestinalis
  source 1..50: mol_type = genomic DNA
tgttgtactatttatatagtaccctcgggtagtgtactgttagtacaaac

SEQ ID NO: 39645 - DNA, 40 bp, Roseburia intestinalis
  source 1..40: mol_type = genomic DNA
atggtaatctagttctctgtccaactcaacatttagcagg

SEQ ID NO: 39646 - protein, 618 aa, Eubacterium rectale; identical to SEQ ID NO: 11111

SEQ ID NO: 39647 - DNA, 50 bp, Eubacterium rectale; identical to SEQ ID NO: 11112
  source 1..50: mol_type = genomic DNA

SEQ ID NO: 39648 - DNA, 40 bp, Eubacterium rectale
  source 1..40: mol_type = genomic DNA
ttattcatactgtaggaccgatatggaatggtggaaggaa

SEQ ID NO: 39649 - DNA, 50 bp, Eubacterium rectale
  source 1..50: mol_type = genomic DNA
actgtccgcaaaaaatgaccgacttatgtaggacggattttgcggacatt

SEQ ID NO: 39650 - DNA, 40 bp, Eubacterium rectale
  source 1..40: mol_type = genomic DNA
tttctcatactatattacctataatatatggtgtaaggaa

SEQ ID NO: 39651 - protein, 604 aa, Streptomyces rimosus
MVASVLVRDESGSSPLSTESMETASLQRNPLAGTVYTETLRGVRCVRLSVLTDETTSPERQREADDLAAAAHNISFGEGDQLREAVDLDVSASKTSPFDRPALGQWLARPDEFDALVWWRFDRAIRSMADMHDLAKWAREHRKVLVFAEGIGGGRLVFDFRNPMDPMAEFQMMMLAFAAQVEAQSIKDRVTGAMAALRKMPLRWRGSKPPYGYMPAPMPEEYGGVGWTLIPDPEAVKVIERIVRELLEGKAVSAIAGGLNADKVPTPRDHWSITKGRKTGGKTGGLAGLKKDAFHWKPIVISRLLRNPVLIGWKMHNDKPVRDAQGNPIMATETPILTREEFDRIGAALDARSRDKRDRSDTNALLLRVIHCDSCGGRMYLNRQESKPNQAPIYKCNPYSRGTKCEAPANIRGDWTDEYVETEFLRRVGSIQTTHVVEIPGYDPEPELRATLAEFEEHQEQKGRQKSKHAARAWQERADALDARIADLETREKREPQRVVTPTGKTFADEWAEKDTAGRRAMLIEAGVHLNVRRGTRGGWRKLDTRRLDFTMSGELDPAAEALAGEASALESEVRGDSPTPGSKVRVANPAPASTEPAGELVAA

SEQ ID NO: 39652 - DNA, 50 bp, Streptomyces rimosus
  source 1..50: mol_type = genomic DNA
aactggtaattagaagtgttgggaccccccaacactccgatctagcagtt

SEQ ID NO: 39653 - DNA, 40 bp, Streptomyces rimosus
  source 1..40: mol_type = genomic DNA
gtattgaagcagcgtcgatccgccgtacgtaaaagagttc

SEQ ID NO: 39654 - DNA, 50 bp, Streptomyces rimosus
  source 1..50: mol_type = genomic DNA
aactggtaattagaagtgttgggataccccaacactccgatctagcagtt

SEQ ID NO: 39655 - DNA, 40 bp, Streptomyces rimosus
  source 1..40: mol_type = genomic DNA
taattgaagcagagtagattaggcgtatgtaaaagtatag

SEQ ID NO: 39656 - protein, 591 aa, Buttiauxella noackiae
MTKLYSYIRWSSAKQSLGSSQARQTKKAQEFAILKGLEYTEIFDRGVSAFRGKNIRSTAALGHFIKEVESKSIPADSWLYVENLDRLSRDDVTNANELFLRLLNLGLTIVTGMDNKVYTRESVNLNPADLMFSIMMFMRANEESRTKSARVIGHVNKLLESHKQGLPVNIKSAGNCPWWIDDSGLQNESPKPHPIYFDIAREVIRLFLDGHGSYRIAKMLNRDREKYPAPSGWSKKISRTWSVRKLEYMRRSKALTGEYVITVRGVKHTLAKYYPAVCTETEFARLQDSVRNNRITQSEDRERIALLSGMNMLRCANCGGAMSFYLMEGKIRYCCGQARNQAEDGCSFWSVAGAPIEHAAFYALMYAAFDYEMGNSRVVDTEALNHDQDARRLRLQKIDRDLAYFTEAISLGTGPLITLVEKIQELEQQKSCLLLDIDNGNNQLLLAEQDDVGSRITDIIELLRSEVLTDITHPIRLKVREIVRRTIQHIAVAKREDKSIIAIFCLPNGEYFIANGIKHEVNGSIAKDVGVFKGALDENGAPLELKARTKADAKVIIKLLDAEKSLRRKIDAIAEQLKIPPLNGKDFFAQR

SEQ ID NO: 39657 - DNA, 50 bp, Buttiauxella noackiae
  source 1..50: mol_type = genomic DNA
aatgctactcgtatgtaaaaacgaaacgggaagccgaaacgtaaaatact

SEQ ID NO: 39658 - DNA, 40 bp, Buttiauxella noackiae
  source 1..40: mol_type = genomic DNA
tttatactaagttgagcgaaacgggaagccgattgtgcaa

SEQ ID NO: 39659 - DNA, 50 bp, Buttiauxella noackiae
  source 1..50: mol_type = genomic DNA
aatgctactcgtatgtaaaaacgaggcgggaagccgaaacgtaaaatact

SEQ ID NO: 39660 - DNA, 40 bp, Buttiauxella noackiae
  source 1..40: mol_type = genomic DNA
tttataacaatttgagcggggcgagaagcctcctgggcag

SEQ ID NO: 39661 - protein, 434 aa, Ruminococcus bicirculans
MTDKITALYCRLSQDDMLQGESNSITNQKAILKKYAEDNGFSNPVYYVDDGVSGTTFERDGFKAMMADVEAGKAGTIITKDLSRLGRDYLKTGEYIEIIFPDYDVRYIAINDNVDTLKSENELMDFKNIFNDWYARDTSKKIRAVFKAKGQSGKPLSLPIYGYKASEEDKHKWIFDDEPAAVVRKIYKLCISGYGPTQIARKLTEEGIQNPTAYAISQGRNPANKNSRLDRWCTETVIDILEHPEYIGHTVNFRTRRKSYKNKRKIENPKEDWLIFENTHEPIVTQQEFDLVQEMRKNKRRNQKQETVKPFSGICFCADCGKKLYLCRSRSLSEDQEHLKCSTHSADKDRCSAHYIRTVVLKELVLNALNKLLDNVKDNEAEFVQTAMDNSASKHSSDVFKAKKALNQAEKRIAELDRLFARLYEDNISGKISD

SEQ ID NO: 39662 - DNA, 50 bp, Ruminococcus bicirculans
  source 1..50: mol_type = genomic DNA
aaactgctttatgcgccccgaccgaaagtgcggcgctgatatagcagtat

SEQ ID NO: 39663 - DNA, 40 bp, Ruminococcus bicirculans
  source 1..40: mol_type = genomic DNA
tgaaaaaaagccccgaccgaagtcagggcttttttcatca

SEQ ID NO: 39664 - DNA, 50 bp, Ruminococcus bicirculans
  source 1..50: mol_type = genomic DNA
aaactgctttatgcgccccgaccgttagtgcggcgctgatatagcagtat

SEQ ID NO: 39665 - DNA, 40 bp, Ruminococcus bicirculans
  source 1..40: mol_type = genomic DNA
tgaaaaacagtggctactgttgttagcatttttttcatca

SEQ ID NO: 39666 - protein, 434 aa, Ruminococcus bicirculans
MTDKITALYCRLSQDDMLQGESNSITNQKAILKKYAEDNGFSNPVYYVDDGVSGTTFERDGFKAMMADVEAGKAGTIITKDLSRLGRDYLKTGEYIEIIFPDYDVRYIAINDNVDTLKSENELMDFKNIFNDWYARDTSKKIRAVFKAKGQSGKPLSLPIYGYKASEEDKHKWIFDDEPAAVVRKIYKLCISGYGPTQIARKLTEEGIQNPTAYAISQGRNPANKNSRLDRWCTETVIDILEHPEYIGHTVNFRTRRKSYKNKRKIENPKEDWLIFENTHEPIVTQQEFDLVQEMRKNKRRNQKQETVKPFSGICFCADCGKKLYLCRSRSLSEDQEHLKCSTHSADKDRCSAHYIRTVVLKELVLNALNKLLDNVKDNEAEFVQTAIDNSASKHSSDVFKAKKALNQAEKRIAELDRLFARLYEDNISGKISD

SEQ ID NO: 39667 - DNA, 50 bp, Ruminococcus bicirculans; identical to SEQ ID NO: 39662
  source 1..50: mol_type = genomic DNA

SEQ ID NO: 39668 - DNA, 40 bp, Ruminococcus bicirculans; identical to SEQ ID NO: 39663
  source 1..40: mol_type = genomic DNA

SEQ ID NO: 39669 - DNA, 50 bp, Ruminococcus bicirculans; identical to SEQ ID NO: 39664
  source 1..50: mol_type = genomic DNA

SEQ ID NO: 39670 - DNA, 40 bp, Ruminococcus bicirculans; identical to SEQ ID NO: 39665
  source 1..40: mol_type = genomic DNA

SEQ ID NO: 39671 - protein, 522 aa, Blautia wexlerae; identical to SEQ ID NO: 36056

SEQ ID NO: 39672 - DNA, 50 bp, Blautia wexlerae
  source 1..50: mol_type = genomic DNA
tgttgcacttatgcagttgcaccatctggggcgaccttataagtacaaca

SEQ ID NO: 39673 - DNA, 40 bp, Blautia wexlerae; identical to SEQ ID NO: 29413
  source 1..40: mol_type = genomic DNA

SEQ ID NO: 39674 - DNA, 50 bp, Blautia wexlerae
  source 1..50: mol_type = genomic DNA
tgttgcacttatgcagttgcaccaactggggcgaccttataagtacaaca

SEQ ID NO: 39675 - DNA, 40 bp, Blautia wexlerae
  source 1..40: mol_type = genomic DNA
agtagaacaggcctgtggcactacggccagatcctttaaa

SEQ ID NO: 39676 - protein, 522 aa, Blautia wexlerae; identical to SEQ ID NO: 39096

SEQ ID NO: 39677 - DNA, 50 bp, Blautia wexlerae; identical to SEQ ID NO: 12237
  source 1..50: mol_type = genomic DNA

SEQ ID NO: 39678 - DNA, 40 bp, Blautia wexlerae; identical to SEQ ID NO: 29413
  source 1..40: mol_type = genomic DNA

SEQ ID NO: 39679 - DNA, 50 bp, Blautia wexlerae; identical to SEQ ID NO: 39099
  source 1..50: mol_type = genomic DNA

SEQ ID NO: 39680 - DNA, 40 bp, Blautia wexlerae; identical to SEQ ID NO: 39675
  source 1..40: mol_type = genomic DNA

SEQ ID NO: 39681 - protein, 447 aa, Micrococcus luteus
MRAAMYLRISLDRYGDGLAVDRQQQDCERLIEARGWELVETYTDNSISASDSSKARPAYNRMVDDWKRGRFDALVCWDLDRLTRQPRQLEDWIDAAEQRGLRIVTANGEADLGTDAGRMFARIKAAVARQEVDRKSARQKRAAQQRAERGQSWGSRRPFGFMADQTTHHPVEAEIVRGMYDDFLNGVGQREIVRRLTARGVKTTMGNDWSQPVLRNFLLNPRNAGLRAYKGEVVSEAAWEPLVDEATWRATVDRLEGRGGPTYSRARKHLLVGVATCGVCGEGMRTNYTVAGARQYVCPKHHVARRADLVDDLVVSTALAILKRTPDVGRRDDAEGRDLLAQAAALRARLESLATEFADGVLTGQQLRTATERTRSNLAAVEGQIARAAEGKALGALAGASDLHGTWERLGVERQRSAIEALMTVTIHPTARGHVFSADDVEITPRD

SEQ ID NO: 39682 - DNA, 50 bp, Micrococcus luteus
  source 1..50: mol_type = genomic DNA
ttacgtgctcacggtaggtgtatggacctgtacaagtcaacaccacgtag

SEQ ID NO: 39683 - DNA, 40 bp, Micrococcus luteus
  source 1..40: mol_type = genomic DNA
ctgcctgcacgcggggatggacctgtacaagtgggcgtac

SEQ ID NO: 39684 - DNA, 50 bp, Micrococcus luteus
  source 1..50: mol_type = genomic DNA
ttacgtgctcacggtaggtgtatgaccctgtacaagtcaacaccacgtag

SEQ ID NO: 39685 - DNA, 40 bp, Micrococcus luteus
  source 1..40: mol_type = genomic DNA
ctgcctgcaggtggggagcaccctgatcgagtgggctgag

SEQ ID NO: 39686 - protein, 450 aa, Micrococcus luteus; identical to SEQ ID NO: 38256

SEQ ID NO: 39687 - DNA, 50 bp, Micrococcus luteus
  source 1..50: mol_type = genomic DNA
atatgtggggagcgtaggcatagcgacccatagaagtcaacatcgcttag

SEQ ID NO: 39688 - DNA, 40 bp, Micrococcus luteus; identical to SEQ ID NO: 39683
  source 1..40: mol_type = genomic DNA

SEQ ID NO: 39689 - DNA, 50 bp, Micrococcus luteus
  source 1..50: mol_type = genomic DNA
atatgtggggagcgtaggcatagcaccccatagaagtcaacatcgcttag

SEQ ID NO: 39690 - DNA, 40 bp, Micrococcus luteus; identical to SEQ ID NO: 39685
  source 1..40: mol_type = genomic DNA

SEQ ID NO: 39691 - protein, 597 aa, Enterobacter ludwigii
MGHADLLTLDQWRGILMSSKQKLYSYVRWSSEKQSTGTSSERQTSRAMRFAEENELEYVEIKDAGVSAFKGKNTTQGKLGVFISEVDKGVIPRDSWLYVENLDRLTREDVLTANELFLRLLRMGLTIVTGMDNRVFTRESVNNNPMDLMASILMFMRAHEESKTKSDRVTSHVLALLERQRKGLPVNIKAIGKHPFWIDDSGSAHEKVKKHPDFWLPAQEAVRLFLEGHGAFYVTDYLNQNYPVPPAFKKTQRREGGWPLQAIKKMRANMALVGTRIFNLSGKEYRLENYYPPLCTLGEFAQLQDIKANNKRYSGKTSTAINLLGGMKILRCGHCKGTMTAFLQRGQLRYICEYGRSGGNCTAWSLKASIVERCLMPVLITGFLIGAYKTHSDLSLLDKQTNELKEQLKKVQSQQDNVIDAIADLGRTPKLDAKFKALENEEQKVSGKLQQLHQAKSLYASTKDFSENIVDFVAGQCHWMIVSDVHNPKREALRERIRSVINEAIVTKDNRCIRIEFRFPTGETFVFAGSRPGEYEVFLPRKVHDIPPDATEQEINEWERSDYEYNKNFLKLWYEVVNKNLLSHYPAIDGKDFWPKR

SEQ ID NO: 39692 - DNA, 50 bp, Enterobacter ludwigii; identical to SEQ ID NO: 36002
  source 1..50: mol_type = genomic DNA

SEQ ID NO: 39693 - DNA, 40 bp, Enterobacter ludwigii; identical to SEQ ID NO: 27898
  source 1..40: mol_type = genomic DNA

SEQ ID NO: 39694 - DNA, 50 bp, Enterobacter ludwigii
  source 1..50: mol_type = genomic DNA
aatgtattatttttgactttcgggttgcctaaagatataaatcctacttt

SEQ ID NO: 39695 - DNA, 40 bp, Enterobacter ludwigii
  source 1..40: mol_type = genomic DNA
atccatcagttttttggggttgcacaggaagtctcatctg

SEQ ID NO: 39696 - protein, 545 aa, Coprococcus catus; identical to SEQ ID NO: 15191

SEQ ID NO: 39697 - DNA, 50 bp, Coprococcus catus
  source 1..50: mol_type = genomic DNA
tcctacacctatttgggtatgaaacagctcatggctaattagatgtaata

SEQ ID NO: 39698 - DNA, 40 bp, Coprococcus catus
  source 1..40: mol_type = genomic DNA
aaaatcccagggaattaagcagctgatgagcggtggtggt

SEQ ID NO: 39699 - DNA, 50 bp, Coprococcus catus
  source 1..50: mol_type = genomic DNA
tcctacacctatttgggtatgaaattgctcatggctaattagatgtaata

SEQ ID NO: 39700 - DNA, 40 bp, Coprococcus catus
  source 1..40: mol_type = genomic DNA
aaaatcccaggatatgaagttgttgatgtgctctgattga

SEQ ID NO: 39701 - protein, 554 aa, Comamonas kerstersii
MGESNKGLVYSYLRFSDPKQSAGGSTDRQLAYAAQWAAEHGLALDTRLSLRDEGLSAYHQQHIKTGALGVFLRAVEDGRVPSGSVLIVEGLDRLSRAEPLQAQAQLGQIVNAGITVVTASDGKTYSRARLKENPMDLVYSLLVMIRAHEESDTKSKRVKASIRRLCEKWLDGTYRGRINQGHDPLWLRETENGWEFNQEQAKAVLRTVELYKQGWGGLRIAAQLDSEGLSLHRDQSNNSSQRIYKLIKMPQLAGHKPVKVEDTEYLLRNYYPGLLTEAEYEDLQRIANDNGRRRIKGDLPHIITGIGICVCGYCGKPMAGQNLATKPRLPDGRIRDGYRRLLCASAASYGEGCSVPGSCSVAPIERAIMNYCSDLANLQSLYGPDRTAGPRRRVKEAADTVAAIRSQLDQLANAMLQTGAESVPMIFLRKARELEQQLADAERHKESMERDLVAISHANHKNAHQEWRALSEGVEAQDTATRLKARQLVADTFERITVYHHGIRPAPHNFDKNDCIDVVLVAKGGTSRLLHIDKTGNWIASEDLYPITNCINNN

SEQ ID NO: 39702 - DNA, 50 bp, Comamonas kerstersii
  source 1..50: mol_type = genomic DNA
cgtatatatgcagtgactcatgggcagcctagcgacaccatacctatacg

SEQ ID NO: 39703 - DNA, 40 bp, Comamonas kerstersii
  source 1..40: mol_type = genomic DNA
gtcagtcagtgccttggggcagcccagagacacaaagccc

SEQ ID NO: 39704 - DNA, 50 bp, Comamonas kerstersii
  source 1..50: mol_type = genomic DNA
cgtatatatgcagtgactcatgggatgcctagcgacaccatacctatacg

SEQ ID NO: 39705 - DNA, 40 bp, Comamonas kerstersii
  source 1..40: mol_type = genomic DNA
ggcacccagaaccttggagatgcccagaaccacagagtcc

SEQ ID NO: 39706 - protein, 544 aa, Vibrio splendidus
MKTAYSYIRFSSSRQADGDSIRRQTELARSYADKNGLDLQDVSISDFGVSAFRGSNATEGALGAFLRLVDEQKIDSDCHLLVESFDRLSRQAVEDALALLMQVVNRGITLVTLSDSHEYKRGELDMTKLILSIVTMSRANEESEMKSQRTSAAWNKARLDAIEGKKAKNSRLPDWLSWNDDKTDFVVNQSAKEIIQRVFELSAGGSGIEIIARSLNEEGCRTFKKSKEWRSSGVSKLLRNRAVIGEFQFYKKDTQGKRSPIGEPIVDYYPRVITKPLFLAVQQGMDLRNKRGSGNRSGQFTNLFTGLIRCGECGAAVVTSSQTSKTPQGYLKCTLRCESQARMNYKYTEPQVLSALSSLQSVIEKYRSPISDETASLELDIRALSDKLSSLESLLDNAFTPRIAERLQEAELQLADAKALLSAEQLRVSTQQNREQIVLGLEPLESIGDRRAFNSKLRTVIDRIEMIEHPHRKGSALVYFISDRPVMEQHFTKLKGAHGTGSEVYELHVDDVPTYLGRTNSKKQLEFIIDETEDILSFMPTQLV

SEQ ID NO: 39707 - DNA, 50 bp, Vibrio splendidus
  source 1..50: mol_type = genomic DNA
gcacacggaagggtctaaaaggtctcgcaatttgcgggggttccgtacat

SEQ ID NO: 39708 - DNA, 40 bp, Vibrio splendidus
  source 1..40: mol_type = genomic DNA
ctttgcttttttaatggtgtcgcagttcggaatgccaaac

SEQ ID NO: 39709 - DNA, 50 bp, Vibrio splendidus
  source 1..50: mol_type = genomic DNA
gcacacggaagggtctaaaaggtctggcaatttgcgggggttccgtacat

SEQ ID NO: 39710 - DNA, 40 bp, Vibrio splendidus
  source 1..40: mol_type = genomic DNA
ctttacttttttaatggggtgacaacttccaatgccagat

SEQ ID NO: 39711 - protein, 544 aa, Vibrio splendidus
MKTAYSYIRFSSSRQADGDSIRRQTELARSYADKNGLDLQDVSISDFGVSAFRGSNATEGALGAFLRLVDEQKIDSDCHLLVESFDRLSRQAVEDALALLMQVVNRGITLVTLSDSHEYKRGELDMTKLILSIVTMSRANEESEMKSQRTSAAWNKARLDAIEGKKAKNSRLPDWLSWNDDKTDFVVNQSAKEIIQRVFELSAGGSGIEIIARTLNDEGCRTFKKSKEWRSSGVSKLLRNRAVIGEFQFYKKDTQGKRSPIGEPIVDYYPRVITKPLFLAVQQGMDLRNKRGSGNRSGQFTNLFTGLIRCGECGAAVVTSSQTSKTPQGYLKCTLRCESQARMNYKYTEPQVLSALSSLQSVIEKYRSPISDETASLELDIRALSDKLSSLESLLDNAFTPRIAERLQEAELQLADAKALLSAEQLRVSSQQNREQIVLGLEPLESISDRRAFNSKLRTVIDRIEMIEHPHRKGSALVYFISDRPVMEQHFTKLKGAHGSGSEAYELHVDDVPTYLGRTSSKKPLEFIIDETEDILSFMPTQLV

SEQ ID NO: 39712 - DNA, 50 bp, Vibrio splendidus
  source 1..50: mol_type = genomic DNA
acacacggaagggtctaaaaggtctcgcaatttgcgggggttccgtacat

SEQ ID NO: 39713 - DNA, 40 bp, Vibrio splendidus; identical to SEQ ID NO: 39708
  source 1..40: mol_type = genomic DNA

SEQ ID NO: 39714 - DNA, 50 bp, Vibrio splendidus
  source 1..50: mol_type = genomic DNA
acacacggaagggtctaaaaggtctggcaatttgcgggggttccgtacat

SEQ ID NO: 39715 - DNA, 40 bp, Vibrio splendidus; identical to SEQ ID NO: 39710
  source 1..40: mol_type = genomic DNA

SEQ ID NO: 39716 - protein, 568 aa, Bacteroides cellulosilyticus
MEKRVIGYARVSTEKQDLERQKNLIKEYCTDRGYELTKIISEKVSGIKKNRQSISELLSMDSSVADMVVVSELSRISRQKELMSVLYTINEILDNGLDVLFLDDTSKVYSAHAELKLVDIITLTVKAHSAAEERDKIATRMRTGKLTKVNSNPYAYAGGIVPYGFKVIDNPNYSGQKNNIPAKKLMVIDELKVKDIHLIYQLVLNGTTLRDAAKKMNSMGLVTQHNKPFCETSISKIIKNPIYNGRRRFKRLDLQLEKIISDEDWNRAQVCVSENQLFKEKSTKNFNPLKGLVFCPCGYALMLHKMVRRDGSSYFVLACCKKNDKAYRLKCRNTGIISDILFKSVWACVKSTLLLSEYEVRNKTEITRIAGIIDTLNNKIESYLDEIDTYRADMGKLAKTITLVSAKGLIEQYQSEYIGLESKVNQLQDNIKSVKKDIALYNSEIKLISDVEKNSVLAGLTDRGKSEVYKKVLSRVVYYSEDIFRGFIVISYKNGLENIVAVKKTRMGYASFLPSTFSFDIKKRKILVPIHQLEMDLKSISISNVINSEYSFKELERVYDLIQWDIAK

SEQ ID NO: 39717 - DNA, 50 bp, Bacteroides cellulosilyticus
  source 1..50: mol_type = genomic DNA
aaagcaggcacatttgagaacttagccgaggcgatattttcaaatgtgct

SEQ ID NO: 39718 - DNA, 40 bp, Bacteroides cellulosilyticus
  source 1..40: mol_type = genomic DNA
gcagcatcaccatgcattagctgacgctgaggcctgcgcc

SEQ ID NO: 39719 - DNA, 50 bp, Bacteroides cellulosilyticus
  source 1..50: mol_type = genomic DNA
aaagcaggcacatttgagaacttacccgaggcgatattttcaaatgtgct

SEQ ID NO: 39720 - DNA, 40 bp, Bacteroides cellulosilyticus
  source 1..40: mol_type = genomic DNA
gcagcatcaaccttcaaaacctgaggtccaggcctgctcc

SEQ ID NO: 39721 - protein, 676 aa, Phocaeicola dorei
MDKKILIYCRVSTQQQTTDRQKEELLKFAEDNHWNVAEEDIFIDVISGFKKGEFRPEYAKMLERVEYGDIDIILFSEFSRLARNATELLEQIKLFIDKGINLYFDKQKLWVKDTNKDVGSLILLHVLAVMSSYEIELFVERSLSGKITKVQAGHGGGDERAYGYMHNENKQIVINPIESKIVARIFEMYVGGYSSIQISEILNAEKVPAPYVRKLNEYKKNREAKGLEVKEYKFDTDNLKWRISTINRLMHNELYKGNRRITFYKPDPTNPLPLSERQDREIVYEYSEHVEGLRIVSDELFQQAQDKLSKAHYNKNNAVRHENLLKHLMVCGECGANFSVGKSNETSKNYISGGRTYKCYGRVNRKDKPRTCTNGAELRQWKLDGLVLQLSIQMFAEINIQQTNILKIENLGKEIEELVQIKSSKNTELVEAENLYKKTLKRLIAIEDDEVAKNLISDAKHKYDETKNMLNKTMDKLSREIITKRITIDNLKRLNANPLLINKMDEIRKDRNLVKTMVDEYIDKITIFRLHELWLLVVVSYKGGEEMWGTIKCARYKKEEMFYDELHCHYGVEFQGWLLNNTERCFSYDKSTHIITYNGESKIYVEFKSGEYDYDTFNQMIQKTGWMGCFPFYAYEDSGKDLSVPSNEDFGKSLQENRIDWKAHNEKVLERLLSKS

SEQ ID NO: 39722 - DNA, 50 bp, Phocaeicola dorei
  source 1..50: mol_type = genomic DNA
aaggatgtgttcatttcgactatatgcataggtgcaattgacacatcctg

SEQ ID NO: 39723 - DNA, 40 bp, Phocaeicola dorei
  source 1..40: mol_type = genomic DNA
tatgacatgctctgtggtatgcatgggagggtactcctgt

SEQ ID NO: 39724 - DNA, 50 bp, Phocaeicola dorei; identical to SEQ ID NO: 39722
  source 1..50: mol_type = genomic DNA

SEQ ID NO: 39725 - DNA, 40 bp, Phocaeicola dorei
  source 1..40: mol_type = genomic DNA
aatgaactgatctgtgctgtgcatggtggtgtgctcctgt

SEQ ID NO: 39726 - protein, 568 aa, Bacillus paralicheniformis
MAAKLRVWASYRVSTDRQGAEGDDIPLQKSQCHAFAEKNGWEITKELTEKISGYKTAIEDRNTLKVIKQGALEGEFDILLLYHSDRLGRQMEYSLYVASLYELGVQVWTVKEGEIKNQNHTDSLMNFIRYWQSEGESKKTSMRVSDAMRQLNEEGAYLGGTIPYGYMLEDTGKKRNSKKDKTIKKLVVNPDEAKIVKMIFDMVTEKSLGSALIAQELNKMKVEKRGKQWRHNTITRMLRNPIYMGYKRYNTSKEVGNRGGTRKEVKRDDWLLQPFNPELVVISKEQFKEVQGIMDKRNKSGEDSVEESKNTEVITVQKNRVPTSSKLLLSGMAVCGYCGKKLKADFSVKKNKRKDGTVNQYRTYKYTCHNAKNNPAGHNQRAFGAVTIDQQVEDKVLSTISTINLDAFDAEKDSFDFEELDSRKIQLKELEGQYAEVSKALINVESLFDDVMSGKSSMSLDFVSKKMEEYGSKKIELLGKIDVLNKEIQEAEVKSTDLEKLKHQLDNWVETYKNCISLERRKTMLSKVVDEVVISKESIVIRFNITVEKALEGAYNPVNQGRVNDPLP

SEQ ID NO: 39727 - DNA, 50 bp, Bacillus paralicheniformis
  source 1..50: mol_type = genomic DNA
gggcgggttaatgacccactacccactggtaaagagtcaaatacccaccc

SEQ ID NO: 39728 - DNA, 40 bp, Bacillus paralicheniformis
  source 1..40: mol_type = genomic DNA
aggaggctgcccgcacggcaccggaacaggcggacctgga

SEQ ID NO: 39729 - DNA, 50 bp, Bacillus paralicheniformis
  source 1..50: mol_type = genomic DNA
gggcgggttaatgacccactaccccctggtaaagagtcaaatacccaccc

SEQ ID NO: 39730 - DNA, 40 bp, Bacillus paralicheniformis
  source 1..40: mol_type = genomic DNA
cggagcctgcccgcgcgcccccggaacccgcgcccccggc

SEQ ID NO: 39731 - protein, 492 aa, Paenibacillus elgii
MVVKARQQEKIKAIGYIRQSDEREDKEDISEQTQLLKIQQFCEFNDWDLVAVFKDIDYSGFRISFKKRPGFMEAMEYLKNTPEIQKFVAFNLSRITRRKKDFLAIKDIMGQLEVDICSTAEKLDFGSATGRMVANILADFNEYYSDNLSDITTDNKETNAIKGRWNGGPPPIGLKKQGDIFVEDGDKAIWVKTGFELAKQGYGPYRVAKHLLKKYGVDWDPRRVRYILTNPTYAAMQKWKGKLYPLKGGYHKLVEWEDFLYIQKTLFGKEKAWKGKDDRQLLSSILRCPVCGGKMHSRWTLSKKTRRYMCSRKNLPGGCSSPIVDLPTMNDVVISEIALMAKSRYQSDEILSKLDDDQNDSTKSIQKLRDEFSKLESAKQNVFDDYYLYNKRTEDEFNALIKRYETRQKEIERLLEKVPFPVKNKYGDFDDILNEVGNTILELSTQDQRKLIELLIDRIVPGTPTKLTFRWGEIKEIPVAKTKYSGAGVYFY

SEQ ID NO: 39732 - DNA, 50 bp, Paenibacillus elgii
  source 1..50: mol_type = genomic DNA
gcaaacaggattcggataggagtggagagtcttatcctttaactgtatgc

SEQ ID NO: 39733 - DNA, 40 bp, Paenibacillus elgii
  source 1..40: mol_type = genomic DNA
cattattcggataggagtggagagaaaccatactgtactt

SEQ ID NO: 39734 - DNA, 50 bp, Paenibacillus elgii
  source 1..50: mol_type = genomic DNA
gcaaacaggattcggataggagtggtgagtcttatcctttaactgtatgc

SEQ ID NO: 39735 - DNA, 40 bp, Paenibacillus elgii
  source 1..40: mol_type = genomic DNA
tactatttgaataggagtggtgagagagcatccttgtctt

SEQ ID NO: 39736 - protein, 506 aa, Rhizobium leguminosarum
MNPFQTQKAVLYCRVSSAKQRIEGDGLASQERRCRDYAAMKGYEVVEVFRDDVSGGHANRPAMMAMVKFLKSHRKEGYIAIIDDISRFSRDIRGHWDLRDLLREAGGKLESPTIEFGEDSDSILVENLLASVSQHQRQKNAEQTRNRMRARLQNGYWPFRCPIGFRVERQAGHGKMLVRDEPYATIIADVLEGFASGRFEAIFEVKRYLEAQPAWPKDHKGEVHPERIFELFSRPVYAGYVSSEDWGVEPIKGRHEGLVSFETWLAVQERRKGNAKVPARKNLSESFPLRGFVCCASCGEPLTACWSKGRSALYPYYLCDTKGCRDHRKSIRKEKIEGAFEALLATLKPSEGLFHLAFEMVRDLWDGRTANAKMQGRSLEGEIRAIEKKVDSLLERIVDASSDSVVKAYERKIKELETQKTLMQEKIASCGKPLKSFSETYRTAFDFLSDPCKLWHSPRLEDRRAVLKLVFANRLAYARNEGYRTAKISTPFKMLGDMNMSKNGMV

SEQ ID NO: 39737 - DNA, 50 bp, Rhizobium leguminosarum
  source 1..50: mol_type = genomic DNA
ggagacatgaacatgtctaaaaatggaatggtgcgcctgtcaggcgacga

SEQ ID NO: 39738 - DNA, 40 bp, Rhizobium leguminosarum
  source 1..40: mol_type = genomic DNA
ataagaatgcttcagagattgaatggtgcccaggaccgga

SEQ ID NO: 39739 - DNA, 50 bp, Rhizobium leguminosarum
  source 1..50: mol_type = genomic DNA
ggagacatgaacatgtctaaaaatgaaatggtgcgcctgtcaggcgacga

SEQ ID NO: 39740 - DNA, 40 bp, Rhizobium leguminosarum
  source 1..40: mol_type = genomic DNA
gtaggaattctccaaaaatgaaaaggaggccaggacctga

SEQ ID NO: 39741 - protein, 655 aa, Vibrio parahaemolyticus; identical to SEQ ID NO: 24001

SEQ ID NO: 39742 - DNA, 50 bp, Vibrio parahaemolyticus
  source 1..50: mol_type = genomic DNA
gacagtacaattgtttcaccaatggagatggttgaactatttgtgcagta

SEQ ID NO: 39743 - DNA, 40 bp, Vibrio parahaemolyticus
  source 1..40: mol_type = genomic DNA
tacggcaccaagcccaatggaaatggtgctaatggccgct

SEQ ID NO: 39744 - DNA, 50 bp, Vibrio parahaemolyticus
  source 1..50: mol_type = genomic DNA
gacagtacaattgtttcaccaatgaggatggttgaactatttgtgcagta

SEQ ID NO: 39745 - DNA, 40 bp, Vibrio parahaemolyticus
  source 1..40: mol_type = genomic DNA
tagggcaccaaggacaatgaggaaaatgctattggaggct

SEQ ID NO: 39746 - protein, 513 aa, Chryseobacterium indologenes
MIADLYIRVSTDEQADKGYSQRDQEERLRLHCDRLAITIDRVIFEDHSAKSFDRPEWKNYLQSFKRSRGYREERLILFTKWDRFSRNTSEAYQMIGHLKKNNILPQAIEQPLDLSIPENKVLLAIYLSTPEVENDRRALNVTNGMRRAIKEGRLMGIAPYGYVNKCTEDGRKYVAVKQPEASNIIWAFEQVAKGHLPTAKVRVEMNKREGKNISSNAFMVALRNVTYCGKIYVRAYKNEEEDIVPGKHEALISEELFLKVQHVLKKKGTKDLRLPGGRIINEERYPLRGLLLCPNCGKNLTASSSKGHTKHYYYYHCTTACGFRHHSDKVNKLFKEELSKYDFPAGILEILKKIIVKNTKSTSENFDGERSTLKSRISELNDRISKARDMYLSDKIDEEDFRDIKNRYKGELDDLEYKLSLLVKSERKEGVEDKIGKALKIVGNISERYINASPIDKRAIVSLIYPEKIIFDGSDFQTSKINSFVDIIFLIRRELSKQKKGDLNSKNLNPRLV

SEQ ID NO: 39747 - DNA, 50 bp, Chryseobacterium indologenes
  source 1..50: mol_type = genomic DNA
aaaaatttaaacccccgtcttgtgaactcgctggtaggctatccaaacta

SEQ ID NO: 39748 - DNA, 40 bp, Chryseobacterium indologenes
  source 1..40: mol_type = genomic DNA
atagttgtctccttaagtgacctcgacaggattcaaacct

SEQ ID NO: 39749 - DNA, 50 bp, Chryseobacterium indologenes; identical to SEQ ID NO: 39747
  source 1..50: mol_type = genomic DNA

SEQ ID NO: 39750 - DNA, 40 bp, Chryseobacterium indologenes
  source 1..40: mol_type = genomic DNA
atagttataccattaagtgaactaatcagaattcaaatat

SEQ ID NO: 39751 - protein, 537 aa, Anaerobutyricum hallii
MLKQQTKLRVRLYARLSKDDGDADKESNSITNQLQMLRYNAKEKGFEVIGEYVDDGYSGTTFNRPDLNRMIKDAMDDPEPSGIMVKDMSRFGRNNAMFMYYVEEIFPNNDILFIALNDDVDTRFDENEMMPFKSIMNEYYARDTSKKIRSVKKTTALSGGFCGSFAPYGYVVDPENKRKLLVDSDTAPIVKRIFELSKQGNSVHQIARTLCEDGVLIPRAYRAMKNGTLETSTGFKFPTDWVAKNVKMILENQVYLGHMVSHKTQTKSFKNKKPVAVPKEEWIIVRNTHEAIIDEETFELVQKFISVKKQPNKTGRPNIFVGLVKCPDCGRNMAFSNPNGREPRFRCRTYVRNSNLCTTHAISYEALQQIVMSDIQKHIKNMEALGDQFIQEMHELSEKGGSKKIKQFEKDLEVAEKRIAEIDSVIMKLFEQNALGKISDERFEKMSSAYESEQKELAQKRDELRTKIRAEEKKTQSTNQFLETIRKYETVTELNRSMLVELIDSIYVYQAEGTGKDRKQRVEINYRFLAGSQCGIA

SEQ ID NO: 39752 - DNA, 50 bp, Anaerobutyricum hallii; identical to SEQ ID NO: 18217
  source 1..50: mol_type = genomic DNA

SEQ ID NO: 39753 - DNA, 40 bp, Anaerobutyricum hallii
  source 1..40: mol_type = genomic DNA
atgtattcatccattcaatgacggaaatggaagaatgagt

SEQ ID NO: 39754 - DNA, 50 bp, Anaerobutyricum hallii
  source 1..50: mol_type = genomic DNA
cggggtctcaatgtggtatcgccttttggaaaggtaacattgagatacca

SEQ ID NO: 39755 - DNA, 40 bp, Anaerobutyricum hallii
  source 1..40: mol_type = genomic DNA
gtttagttttccatgtaattttggaaatgaaagaatgact

SEQ ID NO: 39756 - protein, 487 aa, Bacillus cereus
MKYAVYVRVSTDKDEQVSSIQNQIEICRYWIEKNGFEWDENSIYKDEAVSGTAWLERRAMQLILGKARKKELDTVVFKSIHRLGRDLRDALEIKEILLGHGVRLVTIEEGYDSYYEGKNDLKFEMYAMFASQLPKTLSVSISAALAAKVRRGEYTGGTVPYGYKIVDKKYVINQEEAEIVREMYELYDNGLGYLRISNALNDVGKYKRSGKLWTYSAVKLIITNPMYKGDYVMGRSTEVKVDGRKKRIQEPREKWAVFENHHPAIIERPLWDKINNPKINKKIKRRVAVTNELRGIARCIHCGSPFVLHTYKYKNKEGEELNYGYLTCGTYKLTGGRGCVKHSGLRYERLRSLVLRKLKEKERDLEKVFKLNDKDKHQEKQKKLRKEKKELEIKRERLLDLYLDGGSIDKATFTKRDANFAKNIKEKELEILKLDDVKALIVEQQKVKDAFKLLEDSENLYPVFKKLIARIDISQNGAIDIRYRFEE

SEQ ID NO: 39757 - DNA, 50 bp, Bacillus cereus
  source 1..50: mol_type = genomic DNA
ttttgtctatataggctgtcggcatctgcggtatgcttatatggacaaaa

SEQ ID NO: 39758 - DNA, 40 bp, Bacillus cereus
  source 1..40: mol_type = genomic DNA
cttctctcgaatttcagcatctgcgtgtctcatcacgtat

SEQ ID NO: 39759 - DNA, 50 bp, Bacillus cereus
  source 1..50: mol_type = genomic DNA
ttttgtctatataggctgtcggcatgtgcggtatgcttatatggacaaaa

SEQ ID NO: 39760 - DNA, 40 bp, Bacillus cereus
  source 1..40: mol_type = genomic DNA
catcccttgattttgagcctgtgtgtgtctcttcacataa

SEQ ID NO: 39761 - protein, 636 aa, Clostridioides difficile
MECIILSVKEAYMDAQEVMHMTDYSKITALYSRLSVGDEDRDGGESNSIQNQKIFLENYARGQHLTNIRHYIDDDESGRFFDRSAYSRMMDDVENGKIGVCIMKDLTRWGRDYLQVGNAMEIFRRNNVRFIAVNNGIDSEKPDTLEFAPFINIMSEWYAKDISKKVKTGIKTKGMSGKPIATEAPYGYVKSPDNKDFWIIDEEAAGVVRLIFRLFLDGKNRNQIAVYLTQAQIPTPTFYMKERGRGTCKNRALNEANRYKWNKATLTHILTRQEYCGDVVNFKTTKHFRDKRNHYVDRSQWQITENVHEPIIDRTDFETVQRILENAPVKRPNGDGEIHPLSGLLFCKDCGAKMHIRIDYRNGGKRHVAYCSEYHKGKAKNPKCNSPHIIDADLLMQTIAEVLKKIEDYSISNWAEFEALVKKNLAMQQTDKTKKQQKRIPQITTRLEQIDKVLNKLYEDNALGTIPQDRYEQMSQKYSEEYYALKAELAELQEQLSAFENAGGRAQKFLKLTERYAAFTDLTPAILNEFISRIEVHERDKKRAKQAIQHIGIYFNYIGKFENEVTQLTEPTEQEIRQMREKIEEAQKEKSRAYHRQYSREYRARNLEKQREYDRIKAREYRARRKAQTAAAQPAQ

SEQ ID NO: 39762 - DNA, 50 bp, Clostridioides difficile; identical to SEQ ID NO: 18457
  source 1..50: mol_type = genomic DNA

SEQ ID NO: 39763 - DNA, 40 bp, Clostridioides difficile
  source 1..40: mol_type = genomic DNA
agagtatggctcggcaagatggggaactagaaaagatatt

SEQ ID NO: 39764 - DNA, 50 bp, Clostridioides difficile
  source 1..50: mol_type = genomic DNA
aatagcacttgacaaaacgcttcacagagtgcataattttaagtgtaaag

SEQ ID NO: 39765 - DNA, 40 bp, Clostridioides difficile
  source 1..40: mol_type = genomic DNA
agagtatggaaagacaagacacagactaagaaaaaatatt

SEQ ID NO: 39766 - protein, 506 aa, Empedobacter falsenii
MGYIADIYIRVSTDEQADKGYSQRNQEEMLRKYCLNQSIEIRDVIYEDHSAKTFNRPQWKNLITTLKKKKNHVNLILFTKWDRFSRNTGDAYQMINILRGLGVEPQAIEQPLDLSIPENKMMLAFYLAAPEVENDRRALNVFYGMRRAKKEGRYMGLAPVAYENKTSENGKKFIAPKEPDASVLRYAFKEIAKGIFNTEQVFKQAKEKGLKCSKNAFWQVIRNPLYCGKIFVPQFKDEESCFVDGQHEGIISESLYYEVQDVLDGRGRNYRPKIKTIDEFPVRGYLVCPECSKLLTGSKSKGRSRYYAYYHCIGGCTHRVNAEKVNAAIVEDLIEFLPKIQNRSFYEETISKDYLGGTLEVQLEKKEILAEIKDYEDRLSHTRDLLATRQIEAEDYREMKSVYSSKISALEAKLNRVNYDSDNIQDLIKQGINKIIEIEKNVMKGELAEISKDIGSIYPEKIIFSESQVRTARRNDFIQHINLINKKLYTKKNGTKVDFSTLSREV

SEQ ID NO: 39767 - DNA, 50 bp, Empedobacter falsenii
  source 1..50: mol_type = genomic DNA
tttttctactttgtcccgtgaagtcgtcctgtcgggacaattttcgaacc

SEQ ID NO: 39768 - DNA, 40 bp, Empedobacter falsenii
  source 1..40: mol_type = genomic DNA
ttctattactaaaattcgtcggggtggcaggattcgaacc

SEQ ID NO: 39769 - DNA, 50 bp, Empedobacter falsenii
  source 1..50: mol_type = genomic DNA
tttttctactttgtcccgtgaagtggtcctgtcgggacaattttcgaacc

SEQ ID NO: 39770 - DNA, 40 bp, Empedobacter falsenii
  source 1..40: mol_type = genomic DNA
ttctactactaacatttatggaggttgcattattctaagc

SEQ ID NO: 39771 - protein, 558 aa, Pseudoalteromonas shioyasakiensis
MSDDKLSGNVYLYQRFSSQAQEGNSSLYRQGEAQREWLRNHPDCEVVELEGKPLIDAGVSAFSGKHLSSGSLGRLVAAIESKVVPRGSIILVEHFSRLSRMTITETGKLLDKIWDNDISIVTARDQSVYSPSKRNDLSTRMRLIVEIDKAHSDSKWRSEKVKSSWSRREYNAKENKIAPKMRMPFWLDKKGNLNEYADVVRDIFKLHAEGFGQVLIERSLRKKYGDIKPLKNINPTKIIRIIQNPKCIGLVYNEKLYESVVSDKDYYNAQRICKERLFTSVRPDRKWPLHGLVKCGHCGSGMSIQQSAKSLPLLRCSRKQRSGGESCDAPTTFPYVVAYHFFSVYVEHLILAKITDLKRSSANHEQKVKLIHKLKELQVKQADLKEHYRKSEKVSVTIFSLMEDLDAEINDIEAQLSVIQSKIEKSLNLAAISKKIVKLSHSDPLQYNLELNRIGNKIFLKDKELSFSLEENQVIARLKFTNYDRKSKAYKCIFYGSKDYYKESEFVTEVRTCDWDVDRLLKPNRDRAFSAKDAARIFNYSNLYSESSNLDILLQDDE

SEQ ID NO: 39772 - DNA, 50 bp, Pseudoalteromonas shioyasakiensis
  source 1..50: mol_type = genomic DNA
tatatgcacatatttacattcagtgagcttaatgataatatgtgcatata

SEQ ID NO: 39773 - DNA, 40 bp, Pseudoalteromonas shioyasakiensis
  source 1..40: mol_type = genomic DNA
aattgaccacttaatttgtgaattaaaggccgcgcaaagt

SEQ ID NO: 39774 - DNA, 50 bp, Pseudoalteromonas shioyasakiensis
  source 1..50: mol_type = genomic DNA
tatatgcacatatttacattcagtaagcttaatgataatatgtgcatata

SEQ ID NO: 39775 - DNA, 40 bp, Pseudoalteromonas shioyasakiensis
  source 1..40: mol_type = genomic DNA
aattgaaaaaatattttggaaagtaaaggctgagcacagt

SEQ ID NO: 39776 - protein, 538 aa, Mycobacteroides abscessus; identical to SEQ ID NO: 18756

SEQ ID NO: 39777 - DNA, 50 bp, Mycobacteroides abscessus
  source 1..50: mol_type = genomic DNA
cgcctctatggtggagctaaggggaacactctcgaaccccgaaacggccc

SEQ ID NO: 39778 - DNA, 40 bp, Mycobacteroides abscessus
  source 1..40: mol_type = genomic DNA
ttattgtggggctaaggggactcgaacccctgacccccac

SEQ ID NO: 39779 - DNA, 50 bp, Mycobacteroides abscessus
  source 1..50: mol_type = genomic DNA
cgcctctatggtggagctaaggggcccactctcgaaccccgaaacggccc

SEQ ID NO: 39780 - DNA, 40 bp, Mycobacteroides abscessus
  source 1..40: mol_type = genomic DNA
tttttgtgcggcaaaggtccctggagccattgacctccac

SEQ ID NO: 39781 - protein, 479 aa, Plantibacter flavus
MKAGIYARISQDSEGQGQGVRRQIEDCEARAQQLDWTVIDRYVDNDISATRSRSRPEYQRLMADLRNGRIEGLIVWAIDRLTRTPRELEDIIDLAERRGLKLVNLRGDIDLATSQGRGMARMLGTFARMETEAMSTRLQRKYEDKARKGEPHGYPPYGFERRFVSQDDARRPGAVKLDFVVPEQADVIREAAARVLARESLRSIAGDLNRRAIASPKGGQWSSTILKQILVRPANAGLRVHRGQVIGKSASEAIYSPDLHDQLCSLLKDSSRKSNHVGPSPKYLLSGLARCGLCDGTLRRQVGRAVKPTRPDGATRQAPSYACSNCFRLRCAQEPLDDLISSLVVRRLSQSDARETFVTRDSAAAGSASDEIARLQLRLDALSEMYADDAINPETFRNSAAKLERRLEVAKAQLSASTPSDSVLNLVTARSVREEWDGLPVSARREVLQSLMEVVILPAGSGKRFSPDRVQVRWRTSTR

SEQ ID NO: 39782 - DNA, 50 bp, Plantibacter flavus
  source 1..50: mol_type = genomic DNA
gtgtatccgattcacgtactcgtaggtacgaacagtcaaataggatgctt

SEQ ID NO: 39783 - DNA, 40 bp, Plantibacter flavus
  source 1..40: mol_type = genomic DNA
caggatgaggaagacgaggggcacgagcatcgcgacctcc

SEQ ID NO: 39784 - DNA, 50 bp, Plantibacter flavus
  source 1..50: mol_type = genomic DNA
gtgtatccgattcacgtactcgtacctacgaacagtcaaataggatgctt

SEQ ID NO: 39785 - DNA, 40 bp, Plantibacter flavus
  source 1..40: mol_type = genomic DNA
caggctccggaaggcgaggccccagagcgcagcggcctcc

SEQ ID NO: 39786 - protein, 646 aa, Scandinavium goeteborgense
MLRPICYERVSSFDQVVTGAGLDDQRSIIEQYLDDNADKFTRDRIYITDEGVSAFKNANISPESNLGKFLQDVRNRKYGKGDALIVTSLDRLSRRSSWTENTIQFIVVSGIVIYDISTGLVLRDDDSFSKILMEIILQRSHNESLMKSVRAKVAWQNKVMRAAANGEVVSNRMPFWLENIDNKYSVIEEQAALVVQCFEWYKAGFSTGEIVKRIGDPKWQMVKVSRLIRDRRLLGEHKRYNDEVISNVYPKIIDDELFITANRMMDTVMADKKKPAEDLLLEPDVVKQIFELSESGLGSGAIVKRLPVGWSTVNVLRVLRDKKVVEQKIIDNLTFERVNEKLTKSGVANRIRKDVTIAQNDYITNLFPRILKCGFCGGNIAIHYNHVRAKYVICRTREEKKRCDAKSIQYTRIEKNILNTVMQVDFSKLMNDGAADNNDGLETLKLELLALKSQEKQYLEKITKRKDEGKKTSMPLMEGLTDVQDSIDELQDRINSYSHKKEIPIFDYDIDAVLDPMNVELRAKVRKELKLVLSRVSYWVFDKLIFVDLKYFTDVLSHALLIDNKRGGGELLQEIAITQQGKERTYRVQEKGNTVFKVVSDGDVWTLEASRSKTIDELYSFMRLLEGREPETFESGINEDQIDWID

SEQ ID NO: 39787 - DNA, 50 bp, Scandinavium goeteborgense
  source 1..50: mol_type = genomic DNA
taatgttcccattgattacggtatgcgtcctgttgtaaactgtgggaaca

SEQ ID NO: 39788 - DNA, 40 bp, Scandinavium goeteborgense
  source 1..40: mol_type = genomic DNA
cgaatatattcatggcatgccgtcctttcgttttttagca

SEQ ID NO: 39789 - DNA, 50 bp, Scandinavium goeteborgense
  source 1..50: mol_type = genomic DNA
taatgttcccattgattacggtatttgtcctgttgtaaactgtgggaaca

SEQ ID NO: 39790 - DNA, 40 bp, Scandinavium goeteborgense
  source 1..40: mol_type = genomic DNA
agaaaatattcttggcattttgttttatggttttttacaa

SEQ ID NO: 39791 - protein, 487 aa, Bacillus tropicus
MAYAVYVRVSSDKDEQVSSVENQIDICRYWLENNGFEWDENAVYFDDGISGTAWLERHAIQLVLEKARKKEIDTVVFKSIHRLARDLKDALEIKEILLGHGVRLITIEEGYDSHYEGKNDMKFEMYAMFASQLPKTLSVSITAALAAKVRRGGYTGGFVPYGYEIIDGKYAINEEEAALVREIFELYAQGFGYIKIANTINDKGARTRKGAPWTFSTLSKMIKNPAYKGTYIMQKYGTVKVNGRKKKVINPKEKWVIFEDHHPAIISHELWEKVNNKDPNKFKKKRRVSTTNELRGITVCAHCGTAMSKRNSINISKNGTETEYSYMICNWSRITARRECVRHVPIHYKDLRALVLSKLKEKEKDLDKEFGSDENQLQVKLRKLKKDINDLKFKRERLLDLYLEDERIDKDTFTIRNAKIEKEIGLKEMEIRKASNIEIQMKEKQEVRDAFALLEESKDLHSVFQKLIKRIEVAQDGAIDIYYRFEE

SEQ ID NO: 39792 - DNA, 50 bp, Bacillus tropicus
  source 1..50: mol_type = genomic DNA
tttttgccatattgacatactgcaagtgcggtgtataattaaggcataaa

SEQ ID NO: 39793 - DNA, 40 bp, Bacillus tropicus
  source 1..40: mol_type = genomic DNA
tatagcgtttgagggagcaagtgcggttggtaagagcaca

SEQ ID NO: 39794 - DNA, 50 bp, Bacillus tropicus
  source 1..50: mol_type = genomic DNA
tttttgccatattgacatactgcaaatgcggtgtataattaaggcataaa

SEQ ID NO: 39795 - DNA, 40 bp, Bacillus tropicus
  source 1..40: mol_type = genomic DNA
gagagccttcgagggagacaatgccttggataagagcaca

SEQ ID NO: 39796 - protein, 540 aa, Hungatella hathewayi
MKQPYNTTVYNTALYLRLSRDDELQGESGSIQTQRMMLRQYAAEHGLTVVDEYIDDGWSGTNFDRPSFQRMIDDIEDGKINCVVTKDLSRLGRNYILTGQYTEIYFPSKGVRYIAINDNVDTLNGESELAPFLNILNEMHARQTSKKVKAAMRTRFANGAHYGAYAPLGYIKDPDKTGHLLVDTETRWIIEKIFDLAVHGRGAASITRILVEAKVPTPGWLNFQRYGTFANIYAGAPEEKAYAWTIAQVKSILKEETYIGHSVHNKQSNISFKNKKKVRKPKEEWYRVENTHEAIISEDVFRQVQEQIASRRRRQKDGTTQIFSGLVKCADCGWSLAYGENKQNKTPYGYYHCSKNGQGLRQCSMHYIRYDVLYAYVLSRLQYWSQQAQQDEDKLLKRLLNASDKERSSAREKQASELKKAEKRKAEVDGLFAKMYEDWAAGRITEYNFNMLSEKYQGEQKELDEKIQQLHEAMEAVAQTAVDAEKWVGLMRQYVNPTELTAELLNTLIEKIFVHEAVKGEDGSREQEVEIFYRFIGKID

SEQ ID NO: 39797 - DNA, 50 bp, Hungatella hathewayi
  source 1..50: mol_type = genomic DNA
caatatctttaactaagggaaaatggagtttcccatagttaaagataccg

SEQ ID NO: 39798 - DNA, 40 bp, Hungatella hathewayi
  source 1..40: mol_type = genomic DNA
ggtatccaaatgggagagggggctgagtcttcctgatata

SEQ ID NO: 39799 - DNA, 50 bp, Hungatella hathewayi
  source 1..50: mol_type = genomic DNA
caatatctttaactaagggaaaatgaagtttcccatagttaaagataccg

SEQ ID NO: 39800 - DNA, 40 bp, Hungatella hathewayi
  source 1..40: mol_type = genomic DNA
gggatcagaatggcacagggagatgattcttcctgtttca

SEQ ID NO: 39801 - protein, 497 aa, Butyricicoccus pullicaecorum
MPDDCAVIYARYSSHAQRDVSIEDQVADCRIYAERLGLTVLEVYADHATTGRSDDRCQFQRMIQDAKKGRWKTVLTWKTDRFARNRYDSAVYKARLKRYGVHVQYAKESIPDGPEGILMEGMLESYAEYFSANLAQNVRRGLNSNAQKCKLNGPAPLGYRRGSDGGYEIVESEAAVVRRIYQSITQGTGYAELVRELNAAGIKTKRGSSWTKNSFHKILRNEAYIGVYQYGEHRTEDAIPPIITKEEFAAVQNKLETYKKHNAHTGEIREYLLTGKLFCGNCGEGMVGICGTSKSGVRHYYYMCKGHQAHRCDLKNVKAAQLEDQVVSYTMQYVLQDDVIAELVDKLLEYQAQQQDSGMLEALRAELADVQGRLDNLMEAIEAGIITKTTKARLSELESEQERLTHSITVETCRNTGLSREQLIFLFDMFRAGDMRDLDFRRRLIDTFVNAVFVYDDGRLKIVYNFREGNETVTKEFVDSVESGAVDSVRMVVNSVY

SEQ ID NO: 39802 - DNA, 50 bp, Butyricicoccus pullicaecorum
  source 1..50: mol_type = genomic DNA
gtatggtggtaaattcagtgtaccaaaatacatccgtacgaacaacgctt

SEQ ID NO: 39803 - DNA, 40 bp, Butyricicoccus pullicaecorum
  source 1..40: mol_type = genomic DNA
gaatcccttccggcgtaccacggacatccgaaaggatgtc

SEQ ID NO: 39804 - DNA, 50 bp, Butyricicoccus pullicaecorum; identical to SEQ ID NO: 39802
  source 1..50: mol_type = genomic DNA

SEQ ID NO: 39805 - DNA, 40 bp, Butyricicoccus pullicaecorum
  source 1..40: mol_type = genomic DNA
gaattcctcaaggaatgccaagtacatcctaaagaatgtc

SEQ ID NO: 39806 - protein, 599 aa, Klebsiella oxytoca
MKKKLYSYIRWSSAQQTAGTSLERQTAAAREYAKAHDLEFVEILDAGVSAFRGKNATDGALAEFIAAVENGAIPSDSWLYVENLDRLSRATVRNALKLLLHITDLGVTVVTGMDGKIYSAETMDKDFTDLMISLLLFSRANEESKTKSDRVKEASMKALARVQAGLPATIKGGGADPFWIQRGDRETSPTQHPTHWLAIKKIVELSLQGVGCNRIRQVLNDDPTLYPPPRQKDTPRRRALLDAGLAPTGWNIHRIEDARRQPSLYGLKTITLSGHTYSLEGYYPAVCSEEEFHLIQNISASNRIKSGDIRNTITLLSGLNLCKCGSCGGWVTTFRKNGKLTYRCDAGHRKIHHCPTRWSLNARIIESATVRALIAGVAHNIIEDSQDLESVAGEIDNRRAEVADIDRKRERLAARIAEEDDDLLMQQLRQYNARKRDLLTEIGALTQREALRREGQNVAERLAEAQRLLTADMVNDIFTSDRLAVRELIRKSMRQVTIWKRQDKSLKVECEFISGWRYTFEGVMKEGKKSFIEYRTSPDGINMMEIYDKLNAITAKAFKHVLDVDDNVMPPTLSHVQAYHDMAVRLGHSPLTGSQFFWR

SEQ ID NO: 39807 - DNA, 50 bp, Klebsiella oxytoca; identical to SEQ ID NO: 2022
  source 1..50: mol_type = genomic DNA

SEQ ID NO: 39808 - DNA, 40 bp, Klebsiella oxytoca
  source 1..40: mol_type = genomic DNA
ttcccgcccctgctcaagccaggtgtaccaggtgacgccg

SEQ ID NO: 39809 - DNA, 50 bp, Klebsiella oxytoca; identical to SEQ ID NO: 2024
  source 1..50: mol_type = genomic DNA

SEQ ID NO: 39810 - DNA, 40 bp, Klebsiella oxytoca; identical to SEQ ID NO: 2020
  source 1..40: mol_type = genomic DNA

SEQ ID NO: 39811 - protein, 564 aa, Klebsiella pneumoniae
MRSPKAYSYVRFSTPKQAQGDSYRRQLQQARDYCTTHNLVLDDKTIEDFGVSAFRGSNRTDGALGRFIDAVKSGEIEKGSYLLIESVDRLSRQAIEEALTQFLEIVREGIVIVTLSDNQVFRSGEVDFTKLIVSIVYMARANDESEMKSRRSRAAWSNGRQQARENNKVIANSRLPSWLTLEGDKIVPIPERVAIVNEMFQMARSGQGYQQIAKAFRDKDYKTFGQGKAWRPAGIQSVVKSRAVIGEFQPHIIYEGKRVPDGDPLFGYYPTVVSPAIFAEVQHIVDKRNNHSGSYRKGLYNNLFSGVIRCQCGELLRFHNKGSKGQVRNYLVCPMEGVTGCELPYLPYNRIEPQLLQALSRLSSVMEQRQPKTGRVSALKDDLAVLQNELEAEGKKRVKAAQLVLDFDDDAAFRVLFEESKNACHALEEKIVQIEGEIMALELSTRTIARFLSPEDLNSTEQRQQFNSQLKSAITIEFIHENAGLVAVIKNMEGQVMLEQAFGPKLMSSIVHDYEGHICVRTIAEAPYVDPVWVEEERVEYEKGKLVEFDECGDYSVDNLNKIS

SEQ ID NO: 39812 - DNA, 50 bp, Klebsiella pneumoniae
  source 1..50: mol_type = genomic DNA
tgtggcctttgtattgaaaactgctcgcatactttaggagaaaggccgta

SEQ ID NO: 39813 - DNA, 40 bp, Klebsiella pneumoniae
  source 1..40: mol_type = genomic DNA
gcgggcttttttaatggtatcgcagtttttaattccgtac

SEQ ID NO: 39814 - DNA, 50 bp, Klebsiella pneumoniae
  source 1..50: mol_type = genomic DNA
tgtggcctttgtattgaaaactgcttgcatactttaggagaaaggccgta

SEQ ID NO: 39815 - DNA, 40 bp, Klebsiella pneumoniae
  source 1..40: mol_type = genomic DNA
gacggcacttttaatggtattgtcgtttttaattacctct

SEQ ID NO: 39816 - protein, 494 aa, Klebsiella pneumoniae
MKSGEIEKGSYLLIESVDRLSRQAIEEALTQFLEIVREGIVIVTLSDNQVFRSGEVDFTKLIVSIVYMARANDESEMKSRRSRAAWSNGRQQARENNKVIANSRLPSWLTLEGDKIVPIPERVAIVNEMFQMARSGQGYQQIAKAFRDKDYKTFGQGKAWRPAGIQSVVKSRAVIGEFQPHIIYEGKRVPDGDPLFGYYPTVVSPAIFAEVQHIVDKRNNHSGSYRKGLYNNLFSGVIRCQCGELLRFHNKGSKGQVRNYLVCPMEGVTGCELPYLPYNRIEPQLLQALSRLSSVMEQRQPKTGRVSALKDDLAVLQNELEAEGKKRVKAAQLVLDFDDDAAFRVLFEESKNACHALEEKIVQIEGEIMALELSTRTIARFLSPEDLNSTEQRQQFNSQLKSAITIEFIHENAGLVAVIKNMEGQVMLEQAFGPKLMSSIVHDYEGHLCVRTIAEAPYVDPVWVEEERVEYEKGKLVEFDECGDYSVDNLNKIS

SEQ ID NO: 39817 - DNA, 50 bp, Klebsiella pneumoniae
  source 1..50: mol_type = genomic DNA
tgtggcctttttattgaaaactgctcgcatactttaggagaaaggccgta

SEQ ID NO: 39818 - DNA, 40 bp, Klebsiella pneumoniae; identical to SEQ ID NO: 39813
  source 1..40: mol_type = genomic DNA

SEQ ID NO: 39819 - DNA, 50 bp, Klebsiella pneumoniae
  source 1..50: mol_type = genomic DNA
tgtggcctttttattgaaaactgcttgcatactttaggagaaaggccgta

SEQ ID NO: 39820 - DNA, 40 bp, Klebsiella pneumoniae; identical to SEQ ID NO: 39815
  source 1..40: mol_type = genomic DNA

SEQ ID NO: 39821 - protein, 494 aa, Klebsiella pneumoniae
MKSGEIEKGSYLLIESVDRLSRQAIEEALTQFLEIVREGIVIVTLSDNQVFRSGEVDFTKLIVSIVYMARANDESEMKSRRSRAAWSNGRQQARENNKVIANSRLPSWLTLEGDKIVPIPERVAIVNEMFQMARSGQGYQQIAKAFRDKDYKTFGQGKAWRPAGIQSVVKSRAVIGEFQPHIIYEGKRVPDGDPLFGYYPTVVSPAIFAEVQHIVDKRNNHSGSYRKGLYNNLFSGVIRCQCGELLRFHNKGSKGQVRNYLVCPMEGVTGCELPYLPYNRIEPQLLQALSRLSSVMEQRQPMTGRVSALKDDLAVLQNELEAEGKKRVKAAQLVLDFDDDAAFRVLFEESKNACHALEEKIVQIEGEIMALELSTRTIARFLSPEDLNSTEQRQQFNSQLKSAITIEFIHENAGLVAVIKNMEGQVMLEQAFGPKLMSSIVHDYEGHLCVRTIAEAPYVDPVWVEEERVEYEKGKLVEFDECGDYSVDNLNKIS

SEQ ID NO: 39822 - DNA, 50 bp, Klebsiella pneumoniae; identical to SEQ ID NO: 39817
  source 1..50: mol_type = genomic DNA

SEQ ID NO: 39823 - DNA, 40 bp, Klebsiella pneumoniae; identical to SEQ ID NO: 39813
  source 1..40: mol_type = genomic DNA

SEQ ID NO: 39824 - DNA, 50 bp, Klebsiella pneumoniae; identical to SEQ ID NO: 39819
  source 1..50: mol_type = genomic DNA

SEQ ID NO: 39825 - DNA, 40 bp, Klebsiella pneumoniae; identical to SEQ ID NO: 39815
  source 1..40: mol_type = genomic DNA

SEQ ID NO: 39826 - protein, 556 aa, Enterobacter hormaechei
MGQSNNEKITALYCRLSRDDEQLGESNSIKNQKSILSKYAKDNHFINTQFFVDDGYSGTSFTRPAFMKLMELAEQGIIETIIVKDHSRLGRNRLIVGQLLEEDFVRLNVRYIAIMDNIDTNEGLNDFLPIQDWFNEMHAKNTSQKVRAVMKNKGNSGIPLTTNPPFGYKKDENDKNKWIIDEPAAKIIKRVFALFIQGFSPSQIAKKFTEEGIMNPTEYHQSLGMKTQNPLSEVKHYWYPITVTKILDRQEYIGDTINFRYTTRSFKDKTKIKLPKDQWKIFKNTHEAIIDEETWNTAQRLRDNKQRPTRTGKISIFSGHLFCRDCGAKLYYCTANNFTPDKDFYRCSNYKNNSTKSCTSHNIKDYILKELVLDNIKQVISYISSYEDLFIKEKLENSLEEQRKKDILNKKLLSQYEKRVKDIDNLIQHIYEDNISGKITDDRFATLSLNYEREQKDLKEKISHLANTIDKTKQQELDLTTFIDKVKKYTEIKELTPEIINELIDKIYVYQQTKLNGKKYQQIDIYYTGVGIIAIPLTEYELENAFQQSVKNTKTA

SEQ ID NO: 39827 - DNA, 50 bp, Enterobacter hormaechei
  source 1..50: mol_type = genomic DNA
aaatgtccttattgaaagtactccttgggagaagtaaaataaggacaaaa

SEQ ID NO: 39828 - DNA, 40 bp, Enterobacter hormaechei
  source 1..40: mol_type = genomic DNA
caaaaataacattgaccgtttagagcgatttcattctttg

SEQ ID NO: 39829 - DNA, 50 bp, Enterobacter hormaechei
  source 1..50: mol_type = genomic DNA
aaatgtccttattgaaagtactccatgggagaagtaaaataaggacaaaa

SEQ ID NO: 39830 - DNA, 40 bp, Enterobacter hormaechei
  source 1..40: mol_type = genomic DNA
gaaaaataacactgaaactatgtagagatttcattctata

SEQ ID NO: 39831 - protein, 532 aa, Clostridioides difficile
MKAAIYSRKSRFTGKGDSIENQIQLCLDYTKSIGIKDFLIYEDEGFSGSNIDRPQFKKMMQDAKDKKFNYLVCYRLDRISRNVSDFSTLIEKLNELNISFISIKEQFDTSTPMGRAMMFISSVFAQLERETIAERIKDNMYELARSGRWLGGNTPHGFNSEKITFLDENLKERSMYKLQVNNEQMEVVKLIYNKYLEFRSLSKLYKYVYHNGIRGPRGGKFDPSSLSRILRNPAYVKANDEVLEYLRNNGMDVIGTSDRKCGILTYAKNTSDSIAAIAKHHGVIEPEIWLEVQSQLDKNRDKTPRIATGKTALLSGLIKCGKCGANMRITYKGKKTDKDLKYYYVCGTKKTLGADTCNCKNLNGQLVESLVIDKIKNCKVESIISEFNSNNIKNGNIFNVLKSETNLLKNQILNKERLIKNLIIELAKNTGSTASDYIVSQIESLNSEISILKDKLNTLETSNVNISSDSINLDIIVSNLKRFNDEVDNASLDDKRLLLSTIINSIVWDSSLGNLNIIYMGAEMDNSVSLSN

SEQ ID NO: 39832 - DNA, 50 bp, Clostridioides difficile
  source 1..50: mol_type = genomic DNA
agttgcacttttttagttatagtagatgctctatgtataaaagtgcgaca

SEQ ID NO: 39833 - DNA, 40 bp, Clostridioides difficile
  source 1..40: mol_type = genomic DNA
agttacgcatgatattggtgaagcaataagcatatcagat

SEQ ID NO: 39834 - DNA, 50 bp, Clostridioides difficile
  source 1..50: mol_type = genomic DNA
agttgcacttttttagttatagtaattgctctatgtataaaagtgcgaca

SEQ ID NO: 39835 - DNA, 40 bp, Clostridioides difficile
  source 1..40: mol_type = genomic DNA
aaataagtatgatattggcatagcaataggcaaaacattt

SEQ ID NO: 39836 - protein, 535 aa, Dorea formicigenerans
MSDGKCIVKYLRLSLEDEDMLDESNSITNQRIVIGQYIASKQEFKNAEVLEFKDDGYSGTNFERPGFQSMMELVRNGQVSTIIVKDLSRFGRNHIEVDTYLEQIFPFLNVRFIAINDNVDSMKYESGMPGIDVGFRNIINEHHSIDTSVKVKKTLLQRQKAGKYMGARAPYGYLKPDEDVTSLVINPETAPVVRMIFQKYLEGMNITQLARYLNEQKIMSPGQYKREVLKTGVKKTTEKYIWYPVTVRLILMTETYTGTTIGGKWKVASVGSNKHLKTKEEDWIVVEGTHEAIVSKETFDAAQKKLELNSRKKSKTHNNNYPLKGLVKCGGCGQNLQHVTRCNPHFKCPRKFNTANEDCVTDNLYDDEFNEMIFRAIKLFAKVSDDAEPVLELQKAELKSKVNEAAKNIRNSKDSISRYKHQKTELYMRYAMEEISEEEFTRKNDRLDKQIEKETLAIAQIEIEQSEAAERLFELPPDGRQCLTDLIEGNEQLTRKIAVTFIRGIKVYNDKRIEIEWNFADELVKYVEQAQKICS

SEQ ID NO: 39837 - DNA, 50 bp, Dorea formicigenerans
  source 1..50: mol_type = genomic DNA
tgtgtcattagcttgacacaagggggtgcttgtgttattataatgacaca

SEQ ID NO: 39838 - DNA, 40 bp, Dorea formicigenerans
  source 1..40: mol_type = genomic DNA
gatgaatattatgaacggtggcaggcatgccgacaacact

SEQ ID NO: 39839 - DNA, 50 bp, Dorea formicigenerans
  source 1..50: mol_type = genomic DNA
tgtgtcattagcttgacacaagggagtgcttgtgttattataatgacaca

SEQ ID NO: 39840 - DNA, 40 bp, Dorea formicigenerans
  source 1..40: mol_type = genomic DNA
aatcagtatgatgaacgctagcaggcatggtgatcacagt

SEQ ID NO: 39841 - protein, 519 aa, Anaerotruncus colihominis
MLIKNAGADKIGVSNPVLADCPPMKGAETMLRQSDKITALYCRLSRDDELQGDSNSIVNQKAILSKYAKENHFSNTAFFVDDGYSGTNFNRPSWSELLERIENGEVATLIVKDMSRLGRDYLKVGFYTEVLFVEKGVRFIAINNGIDSANQQDSDFTPFLNIINEWYAKDTSKKIRAVMKSKGEAGEYLCTNPPYGYMKDPDNRKRWIVDGEAAEVVKRIFALCLDGYGPSQIARILKEDKVITPTIHFQQTGRATRNTSPDNPYNWTGDTIADILERPEYQGHTVNFKTYKQSYKSKKTCYNPEEKWLVFENTHEAIIDADTWKRVQELRKNKRRPTRTGKTNMFSGIVRCADCGEKLYYCTSKNFEARQDHFVCSTSRLKGKEVCSTHFIRAVVLEQGVLAHMRLTIACVANHEEQFRKAMGAKQKAEAKKELAAKRRQLTQAERRIEELDRLFKRIYEDNVGRKLSDSRFQMLSGDYEQEQEELREKLLRLNEEINEQRTLTGSSAKYRNILIWTN

SEQ ID NO: 39842 - DNA, 50 bp, Anaerotruncus colihominis; identical to SEQ ID NO: 36327
  source 1..50: mol_type = genomic DNA

SEQ ID NO: 39843 - DNA, 40 bp, Anaerotruncus colihominis
  source 1..40: mol_type = genomic DNA
caacataaaaacggccccttttggggccgttttttttcct

SEQ ID NO: 39844 - DNA, 50 bp, Anaerotruncus colihominis; identical to SEQ ID NO: 19117
  source 1..50: mol_type = genomic DNA

SEQ ID NO: 39845 - DNA, 40 bp, Anaerotruncus colihominis
  source 1..40: mol_type = genomic DNA
caacataaaaagggtcccttatgttacccttttataacca

SEQ ID NO: 39846 - protein, 576 aa, Anaerostipes hadrus
MEIKFIKGNKVALGAFRKTVRKLRVAAYCRVSTDSEDQIKSYNSMIKYYTDLIEKNDEWEFVGIYADKAITGTNVKKRNDFKRLIEDCTNGEIDMIITKSIPRFARNTLDTLKYVRMLKEMNVAVYFEVEKINTLKDGEFLTTILSSVAQQEVENTSAYVKKGLKMKMKRGEMVGSHRCFGYEVDKETRQLKIVEEEATAVRYIFNRYLEGAGGRVIANELNKKGIFTINNVEWSAPTVLGIIKNEKYKGDMLQGKTFTIDPISKRRLHNNGEEDKYYVIDHHEPIVSKEIFDKAQKLRKAKSTKKLANGTDQVVINRRYAFSSMLKCGYCGKNLVRKQWHSNSKYSKAVWYCSEPCRKGVKYCPNAKAISESVLEEAFVESYNRLCDNKQDVLEDLLAKIKTILKKEKIEEAIKQTDESIQKIKVRRNKLLNEYLNGTIPQDIYEENERLLKTTLLNKKNELKYLKKQLDEKDNISNRISEFRKNIMNNPILEEFDRVVFESIVEKAIVGGFDENGNKDPYKITFIYKTGIQDEIKEAKKKFVAKAYEQKEKDTEMYSFSSNDQNNMCTNDNGNI

SEQ ID NO: 39847 - DNA, 50 bp, Anaerostipes hadrus
  source 1..50: mol_type = genomic DNA
tgtgtacaaatgataatggcaacatccgtcgagattacaatgggaacaaa

SEQ ID NO: 39848 - DNA, 40 bp, Anaerostipes hadrus
  source 1..40: mol_type = genomic DNA
gtgctgttttatttctacatcaataggaacatccatggga

SEQ ID NO: 39849 - DNA, 50 bp, Anaerostipes hadrus
  source 1..50: mol_type = genomic DNA
tgtgtacaaatgataatggcaacaaacgtcgagattacaatgggaacaaa

SEQ ID NO: 39850 - DNA, 40 bp, Anaerostipes hadrus
  source 1..40: mol_type = genomic DNA
gtgatgatttatttcttaaaaaaaagaaacaaacatgaca

SEQ ID NO: 39851 - protein, 540 aa, Clostridium innocuum
MKQPYNTTIYNTALYLRLSRDDELQGESGSIQTQRMMLRQYAAEHGLTVVDEYIDDGWSGTNFERPSFQRMIDDIEDGKINCVVTKDLSRLGRNYILTGQYTEIYFPSKGVRYIAINDNVDTINGESELAPFLNILNEMHARQTSKKVKAAMHTRFANGAHYGAYAPLGYVKDPDKKGHLLIDPETRWIVEKIFDLAVHGRGAASITRILVEEKVPTPGWLNYERYGTFANIYAGAPAEKAYAWTIAQVKSILKEETYIGHSVHNKQSNISFKNKKKVRKPQEEWYRVENTHEAIISEEVFQKVQELIASRRRKRRNGTTQIFAGLIKCADCGWSLAYGENKQNKNPYGYYHCSKNGQGLRQCSMHYIRYDVLYAYVLARLQYWSMMVQKDEDKLLKRLLNASDRERNSAKKKQAAELKKAEKRKAEVDGLFAKMYEDWSAGRITEYNFNMLSEKYQNEQKELETKIRQLHEMMEAAVQTAADAEKWIALMKQYVNPVELTAELLNTLIEKVTVHEAVKGEDGSREQEVEIYYRFIGKID

SEQ ID NO: 39852 - DNA, 50 bp, Clostridium innocuum; identical to SEQ ID NO: 3657
  source 1..50: mol_type = genomic DNA

SEQ ID NO: 39853 - DNA, 40 bp, Clostridium innocuum; identical to SEQ ID NO: 32953
  source 1..40: mol_type = genomic DNA

SEQ ID NO: 39854 - DNA, 50 bp, Clostridium innocuum
  source 1..50: mol_type = genomic DNA
caatatctttaattaagggaaacggaagtttcccatagttaaagatacca

SEQ ID NO: 39855 - DNA, 40 bp, Clostridium innocuum
  source 1..40: mol_type = genomic DNA
agtaagtaaatctgagctagacctgagctgtccagatatg

SEQ ID NO: 39856 - protein, 476 aa, Virgibacillus dokdonensis
MEVAAYLRVSTDEQAESGHSLLEQQERLKAYAKVMGWDKPTFYIDDGYSAGSLKRPQLQKLIRDIENRKVSILMTTKLDRLSRNLLDLLQIIKFMETHDCNYVSATESFDTSTAAGRMVLHLLGVFAEFERGRTSERVKDNMTSLARNTNIALSGPCFGFDIIDKQYVLNKKEAKYGLKMVEMTEAGHGTRSIAQWLNSMNVKTKRGKQWDSTTVRRLLRTETICGTRVINKRKKVNGKTVMRPKEEWIIKENNHEGFISPERFKNLQNILDSRKINKQHENETYLLTGILKCGYCGGTMKGSSARVSRGDKKYEYYRYICSSYVKGSGCKHHAAHREDIENAVIIQIESITNSSNKELQLKVVTSNEDEDVFELKRALESLNKQMMRQIEAYGKGLIEEEDLERSNKHVKEQRQLLRNQLDSLEQFNTPKALKEKAKILLPDIKSLDRKKAKTTIAQLIDSLVLTDGELDIVWRI

SEQ ID NO: 39857 - DNA, 50 bp, Virgibacillus dokdonensis
  source 1..50: mol_type = genomic DNA
tttgtgtttttaaaagcaataggatctccttttgcttttaaagacataac

SEQ ID NO: 39858 - DNA, 40 bp, Virgibacillus dokdonensis
  source 1..40: mol_type = genomic DNA
atacaaatcggcaataggatctccttttgcctggatataa

SEQ ID NO: 39859 - DNA, 50 bp, Virgibacillus dokdonensis
  source 1..50: mol_type = genomic DNA
tttgtgtttttaaaagcaataggatgtccttttgcttttaaagacataac

SEQ ID NO: 39860 - DNA, 40 bp, Virgibacillus dokdonensis
  source 1..40: mol_type = genomic DNA
atacaaatcagcaatggcatgatctgatgactgaatagaa

SEQ ID NO: 39861 - protein, 503 aa, Roseburia hominis
MNNRIDAIYARQSVDKKDSISIESQIEFCKYELKGGNCKEYTDKGYSGKNTDRPKFQELVRDIKRGLIAKVVVYKLDRISRSILDFANMMELFQQYNVEFVSSTEKFDTSTPMGRAMLNICIVFAQLERETIQKRVTDAYYSRSQRGFKMGGKAPYGFHTEPIKMDGINTKKLVVNPDEAANIRLMFEMYAQPTTSYGDITRYFAEQGILFHGKELIRPTLAQMLRNPVYVQADLDVYEFFKSQGTVIVNDAADFTGMNGCYLYQGRDVKPSKKNDLKDQILVLAPHEGIVPSDIWLTCRKKLMNNMKIQSARKATHTWLAGKIKCGNCGYALMSIFNPSGKQYLRCTKRLDNKSCPGCGKIITSELEAVVYQQMVKKLASYKTLTGRKKAAKANPKIAALQVDLAHVDSEIEKLVDSLTGANNVLLSYVNVKIAELDGRKQELLARIAELTVEAISPEQVSQISGYLDTWDNVSFDDKRRGGDLMITTIAATSDSLNITWKI

SEQ ID NO: 39862 - DNA, 50 bp, Roseburia hominis; identical to SEQ ID NO: 12
  source 1..50: mol_type = genomic DNA

SEQ ID NO: 39863 - DNA, 40 bp, Roseburia hominis
  source 1..40: mol_type = genomic DNA
gtacatattgtgttgcaatttacaggagttgtaataacaa

SEQ ID NO: 39864 - DNA, 50 bp, Roseburia hominis
  source 1..50: mol_type = genomic DNA
gtgtagtcccttgtaaactgtactagaggtcagtttacaaggaactacac

SEQ ID NO: 39865 - DNA, 40 bp, Roseburia hominis
  source 1..40: mol_type = genomic DNA
ggtaatattgttatgcaatagataatagtattaataacaa

SEQ ID NO: 39866 - protein, 503 aa, Roseburia intestinalis
MNNRIDAIYARQSVDKKDSISIESQIEFCKYELKGGNCKEYTDKGYSGKNTDRPKFQELVRDIKRGLIAKVVVYKLDRISRSILDFANMMELFQQYNVEFVSSTEKFDTSTPMGRAMLNICIVFAQLERETIQKRVTDAYYSRSQRGFKMGGKAPYGFHTEPIKMDGINTKKLVVNPDEAANIRLMFEMYAQPTTSYGDITRYFAEQGILFHGKELIRPTLAQMLRNPVYVQADLDVYEFFKSQGTVIVNDAADFTGMNGCYLYQGRDVKPSKKNDLKDQILVLAPHEGIVPSDIWLTCRKKLMNNMKIQSARKATHTWLAGKIKCGNCGYALMSIFNPSGKQYLRCTKRLDNKSCPGCGKIITSELEAVVYQQMVKKLASYKTLTGRKKAAKANPKIAALQVDLAHVDSEIEKLVDSLTGANNVLLSYVNVKIAELDGRKQELLARIAELTVEAISPEQVSQISGYLDTWDNVSFDDKRRVVDLMITTIAATSDSLNITWKI

SEQ ID NO: 39867 - DNA, 50 bp, Roseburia intestinalis; identical to SEQ ID NO: 12
  source 1..50: mol_type = genomic DNA

SEQ ID NO: 39868 - DNA, 40 bp, Roseburia intestinalis; identical to SEQ ID NO: 39863
  source 1..40: mol_type = genomic DNA

SEQ ID NO: 39869 - DNA, 50 bp, Roseburia intestinalis; identical to SEQ ID NO: 39864
  source 1..50: mol_type = genomic DNA

SEQ ID NO: 39870 - DNA, 40 bp, Roseburia intestinalis; identical to SEQ ID NO: 39865
  source 1..40: mol_type = genomic DNA

SEQ ID NO: 39871 - protein, 571 aa, Rhizobium favelukesii; identical to SEQ ID NO: 29491

SEQ ID NO: 39872 - DNA, 50 bp, Rhizobium favelukesii
  source 1..50: mol_type = genomic DNA
ttcgtaggtatgtacgcagatggcgggagaagcggaacaataatacgaac

SEQ ID NO: 39873 - DNA, 40 bp, Rhizobium favelukesii
  source 1..40: mol_type = genomic DNA
ggttaggaagccagatggcggacagggtgggattcgaacc

SEQ ID NO: 39874 - DNA, 50 bp, Rhizobium favelukesii
  source 1..50: mol_type = genomic DNA
ttcgtaggtatgtacgcagatggcgtgagaagcggaacaataatacgaac

SEQ ID NO: 39875 - DNA, 40 bp, Rhizobium favelukesii
  source 1..40: mol_type = genomic DNA
ggtcacgcagccagtaggcgtcagggctgggatttgaacc

SEQ ID NO: 39876 - protein, 536 aa, Clostridium botulinum
MKAAIYSRKSVFTGKGESIENQINLCKDYGKKNLGVEDYLIYEDEGFSGGNTNRPKFKQLIKDAKNKKFDVLICYRLDRISRNVADFSSTLELLQENNISFVSIKEQFDTSSPMGKAMVYIASVFAQLERETIAERVRDNMLELAKTGRWLGGQTPLGFESEKISYFDAEMKERTMYKLSPVKEELDKVKLIYKKYLELKSLRKVTQYLLENNFKTKLGANWHTSVVSDLLQNPTYVKSSQDVFNYLRESGITCVGTPDGIHGLLTYNKKKGTKKQRDKTDWIATVAKHKGIIDSDIWLQIQSKMNCNKAKAPKLGRTHNALLTGLLRCEKCGSPMSVIHGPKDKNGNKTYFYGCSMKIYSKGTRCDNSNIRTTEMETVVINKLKSVTKNNGLLLKELNAVKEQLAPSKEETNELTLLNSKIKSNKQAIENLVKQLSLNSSSTASKYIIEEIEKKEEEIKQTESKMESLKEDKMEMNKLEIDLDLIISNLKNFYDTIDNVDIEKKKYLISVLVDKITWNGSTGEVDIKLWGSSKKK

SEQ ID NO: 39877 - DNA, 50 bp, Clostridium botulinum
  source 1..50: mol_type = genomic DNA
acttgcagtttgctatgtcaagcagacgcttgaactaccaaactgcaagt

SEQ ID NO: 39878 - DNA, 40 bp, Clostridium botulinum; identical to SEQ ID NO: 29253
  source 1..40: mol_type = genomic DNA

SEQ ID NO: 39879 - DNA, 50 bp, Clostridium botulinum; identical to SEQ ID NO: 39877
  source 1..50: mol_type = genomic DNA

SEQ ID NO: 39880 - DNA, 40 bp, Clostridium botulinum
  source 1..40: mol_type = genomic DNA
tttgcttgtagagctcactgaagccctgactacaggaaga

SEQ ID NO: 39881 - protein, 479 aa, Mycolicibacterium neoaurum; identical to SEQ ID NO: 35836

SEQ ID NO: 39882 - DNA, 50 bp, Mycolicibacterium neoaurum; identical to SEQ ID NO: 35837
  source 1..50: mol_type = genomic DNA

SEQ ID NO: 39883 - DNA, 40 bp, Mycolicibacterium neoaurum
  source 1..40: mol_type = genomic DNA
ggggtagaaagagctcaccaacgacagctgcctgtagttc

SEQ ID NO: 39884 - DNA, 50 bp, Mycolicibacterium neoaurum
  source 1..50: mol_type = genomic DNA
gggacgtattaacgacttgtcaccgggcttaggtgctagtaaactaccct

SEQ ID NO: 39885 - DNA, 40 bp, Mycolicibacterium neoaurum
  source 1..40: mol_type = genomic DNA
ggagtagagctagcacacaggccacagctacttgttgttc

SEQ ID NO: 39886 - protein, 538 aa, Eubacterium siraeum; identical to SEQ ID NO: 13576

SEQ ID NO: 39887 - DNA, 50 bp, Eubacterium siraeum
  source 1..50: mol_type = genomic DNA
gcttctttatcacacataagcaaacgctcatgtacggtaaggaagcaagc

SEQ ID NO: 39888 - DNA, 40 bp, Eubacterium siraeum
  source 1..40: mol_type = genomic DNA
aatgaaagccctgagcaaatgctcagggctttttgtgtcg

SEQ ID NO: 39889 - DNA, 50 bp, Eubacterium siraeum
  source 1..50: mol_type = genomic DNA
gcttctttatcacacataagcaaaggctcatgtacggtaaggaagcaagc

SEQ ID NO: 39890 - DNA, 40 bp, Eubacterium siraeum
  source 1..40: mol_type = genomic DNA
aatgtaggccctggtgggaggctcagggctctttgcgtag

SEQ ID NO: 39891 - protein, 473 aa, Enterocloster lavalensis
MVKKVLRCAIYIRVSTAEQAMHGKSLEAQLSYLTQYAKDHDMVVAGVYADQGKTARKNLRDRKEIKNLLSSVKRNEIDVIIFWKMDRWFRNVGDFYKVQDILDAHGARWIATAEPNMNMETREGRLNVNIMLSINQNETDTTSERICFVNEASVRLGKAISGAQPYGYKVVRNESGAKVVVKDPERELYVEEFFRHFLVHQSKRGAFLYLTEKYGPVITMSQVITMCKNTMYFGAYRENPNYCPAYITFDQYIQIREINRKNIKVYQSNLGTGEVYLFCGLIHCPICGRPMSANRITKNSHTGKPLKDPLRYYRCQNWCYKKSCTYSKIASEATIEKYLLGHIDEEKERYRQREEILLTRISAQAPVEKKKPSKEKLLAELDRLNNMYQKGRISDEKYDSEYERISSDIKAMSIETLPAPKRSYKELETVLHSGWHEMYEHLSRQNKQAFWRSIIKEIHLNADNSFVNFIDFL

SEQ ID NO: 39892 - DNA, 50 bp, Enterocloster lavalensis
  source 1..50: mol_type = genomic DNA
gtttgtattaactttcgctcccccaaccgtgaatatatattaatacaaac

SEQ ID NO: 39893 - DNA, 40 bp, Enterocloster lavalensis
  source 1..40: mol_type = genomic DNA
tccagcgctgtcctaccccaaccgcgagtgggggtatggc

SEQ ID NO: 39894 - DNA, 50 bp, Enterocloster lavalensis
  source 1..50: mol_type = genomic DNA
gtttgtattaactttcgctcccccctccgtgaatatatattaatacaaac

SEQ ID NO: 39895 - DNA, 40 bp, Enterocloster lavalensis
  source 1..40: mol_type = genomic DNA
tagagcgctcgcctcgcccctccgcgagcagggctctggc

SEQ ID NO: 39896 - protein, 548 aa, Enterococcus faecium
MNREGKKCVLYPRVSTEMQVDGYSLEGQKNGLKRFADREEMEIVGIYEDAGKSGKSIEGRPAFKKMLSDIKNGLEIDYILVYKLSRFGRNAADILNSLEFVQSYGINLICIEEGIDSSQTSGKLLISVLSAVAEIERENIIEQTMNGRREKARQGGWNGGFAPYGYYLKDNQLLIEETEAEAIRIIFDKFANSDIGLGGVAKYLNLQGIKKIPRQNGTLETWSSHFIRLILDNPVYCGKIAYGRRTREKVKGTKNEYKQVHAEDYILEDGQHEGIISEELWQKVHAKRMATGIKQPSKIGKDRSHLLTGILKCPLCGSSMYTNKHAWTNKDGTYKEVYYYICGRNKQERGHHCDYKASLRKTDIEPLVIEAVKELVSDKYFAKEIEKRIGVQTDTTAIDKELANYESKLKEVDLNKARLEREIDNLPIDARFRERKIHDMTLRLDALYDTIVELEERIEDAKLRKSSIEMETITLDNIYKLMLNFGKLYDIISDEEKKSLITYLIKEIQIYPNGESEQPLKSIEFNFPIYRDGQEVRRLLWEKGNTVE

SEQ ID NO: 39897 - DNA, 50 bp, Enterococcus faecium
  source 1..50: mol_type = genomic DNA
ttgtgggaaaaaggtaataccgttgagacggtagtacttctttcccacaa

SEQ ID NO: 39898 - DNA, 40 bp, Enterococcus faecium
  source 1..40: mol_type = genomic DNA
gtcccctacttatctcgtggagacagctgttccactacat

SEQ ID NO: 39899 - DNA, 50 bp, Enterococcus faecium
  source 1..50: mol_type = genomic DNA
ttgtgggaaaaaggtaataccgttttgacggtagtacttctttcccacaa

SEQ ID NO: 39900 - DNA, 40 bp, Enterococcus faecium
  source 1..40: mol_type = genomic DNA
gtcccctccaaatctcttgttgacatgtgatccccaacgt

SEQ ID NO: 39901 - protein, 519 aa, Dehalogenimonas alkenigignens
MTIAAVYCRVSTEDQEREGTSLDTQEALCLEKAAQIGYDVPAEFIFREAASGLTTNRPRLTELRAAAAVAGKFKAIIVLKPDRLARNGEDILSLFKEFKIGGVKLVFVKEEFEDSPAGKMLAFAMGWAAEMYVHATKEATKRGKAARMAEGKIAQGTGPGIYGYTWDKLNKQRVIDEAQAAVVRGIFDLISQGKDCFTVAKEINGRGIPALKGGPWHARTIRNVATNPAYMGVTYYGRTHREGKKTIRLPESEWKTIAGATPPIVSPAAFKAAQDALQRPKGRTGKLKYAPYLLTGFLRCGECGSPIVGGAMDRGRYRYYRCRGTFPRETGDTAICRARYIKADETDAAVWAQVKEILKHPDVHAAILKRKMDAAKDAGSIESLEKTIKKLEGQLRAFGGQHQRLMSLFSKFSTGEIDTSDALLDQINQVKKDREKAEKDLATARYALEQLREMEQVELQLPAFCAQILPNIENATFEDKRAALSLLKFAGTVTNGHVDGETIIPFRIQSKATHHWTNI

SEQ ID NO: 39902 - DNA, 50 bp, Dehalogenimonas alkenigignens
  source 1..50: mol_type = genomic DNA
gctactcaccattggacaaacatcggtataacgtgccaaatgtgcgtaga

SEQ ID NO: 39903 - DNA, 40 bp, Dehalogenimonas alkenigignens
  source 1..40: mol_type = genomic DNA
ttaccactgcacaaacatcggcatcactacgtgaacgtaa

SEQ ID NO: 39904 - DNA, 50 bp, Dehalogenimonas alkenigignens
  source 1..50: mol_type = genomic DNA
gctactcaccattggacaaacatcaatataacgtgccaaatgtgcgtaga

SEQ ID NO: 39905 - DNA, 40 bp, Dehalogenimonas alkenigignens
  source 1..40: mol_type = genomic DNA
ttaccagttcacaaacatcaagtgcaaaacttgcacgtac

SEQ ID NO: 39906 - protein, 500 aa, Flavonifractor plautii
MNVVIYARYSSHSQTEQSIEGQLHTCYEYAKNNGYLVVGEYIDRAQSGTSDSRAEFQRMIADSDKHTFEGVLVYQLDRFARNRYDSAINKAKLKKNGVRVISARENISDDASGILVEGVLESMAEYYSAELSQKIRRGMDINAEKCLSNGSNPGLGYRVDEDRRFHIDPEGAAVVREIFEQYASGKTVTEIIQSLNARQIKTSQGKAFNKNSLHRLLRNRRYIGYYIYKGVETPNGMPRILEDELFERVQHILDRNKKAPARARGREEYLLTTKLFCGYCREMMTGYGGTGKSGKAYHYYACNNFKRRKCKKKVISKEKIENRVVLECRKLLTDSNIEHIAASVAAVCESDRDIVSIKRIKAAIQEADTAIENLWKALEKGQAADMITERIEKRQKEKEELQAQLAIEMNKQVRLSAPDIRAYLYALKHGDKNDENTKRGIINIFLRAVYLFDETFTLILNGSDKPIVIDDILLDEIEEGLDDDLANHNLCSPLVADAPP

SEQ ID NO: 39907 - DNA, 50 bp, Flavonifractor plautii
  source 1..50: mol_type = genomic DNA
ccgttggttgcggacgctccaccaaatggacattacacgaacacctactt

SEQ ID NO: 39908 - DNA, 40 bp, Flavonifractor plautii
  source 1..40: mol_type = genomic DNA
actccccccgcctccaccagaaagaaagacacgactttcg

SEQ ID NO: 39909 - DNA, 50 bp, Flavonifractor plautii
  source 1..50: mol_type = genomic DNA
ccgttggttgcggacgctccaccacctggacattacacgaacacctactt

SEQ ID NO: 39910 - DNA, 40 bp, Flavonifractor plautii
  source 1..40: mol_type = genomic DNA
tctacccccaccaccaccaccaagaaggagctgcctttcc

SEQ ID NO: 39911 - protein, 488 aa, Pedobacter hiemivivus
MEEKKRVGIWIRVSTEMQVKDDSPEHHEQRARYYVQSRDWHIEEVYRLEAVSGKSVMDHPEAQRMLKDLRSGRITGLIFSKLARLARNTKELLEFGDIFRKANADMVSLAEQIDTSSPAGRLLFTILAALSEWEREEISSRVLASVPIRARMGKPLGGQASFGYKWQDKILMIDQKEAPVRKLMYEIFLECQRKKTTSDRLNSLGYRTRNGARFSDTTVDRLLRDTTAKGQRLANHTKSLGDGKQWITKPEHEWVVLPCPAIIDEHLWQQCNSILDEQTTKRTKIGRKSEYLLAGFVKCSCGKSMYVTSTAKKFTCKVCKNNISVEDMDDIYQGLLKGYLNDMRPEMYIDEIDTQLKEKEQLLSSTIKKRAQLRKKMDDLVTLRLNGELDKDHLAELYKPYETQVHQLDKSVPELQSEIDLKRAQMTSSEFVLTEAKALYEEWHNMLFPQKRAIVETVTEYITIGQDSVNVGLAYLPTTTPQTSQHDF

SEQ ID NO: 39912 - DNA, 50 bp, Pedobacter hiemivivus
  source 1..50: mol_type = genomic DNA
tccgcaaacaagtcaacacgacttcatagatgcattgccttgtttgcgat

SEQ ID NO: 39913 - DNA, 40 bp, Pedobacter hiemivivus
  source 1..40: mol_type = genomic DNA
gttaaaaaagccacatggacaagggttcattgaggcaatt

SEQ ID NO: 39914 - DNA, 50 bp, Pedobacter hiemivivus
  source 1..50: mol_type = genomic DNA
tccgcaaacaagtcaacacgacttcttagatgcattgccttgtttgcgat

SEQ ID NO: 39915 - DNA, 40 bp, Pedobacter hiemivivus
  source 1..40: mol_type = genomic DNA
gttaaaagtatcagaagtactaggattcattgaaccaatt

SEQ ID NO: 39916 - protein, 528 aa, Photobacterium damselae
METTTRRRAVTYQRFSSVRQVGNSSLERQNEETKNWLLRNPDVEVIDSFVDKAMSGWSGKHLKDGSLGQLMNAIDDGIITSGTLILVEHFSRLSRQNITDAEKLMHRIWDAGITLVTVRDGTEYTPEAANDMVLRIRLLVEMEQAFKESEWRSAKVKASYVNRENKAKNGIVPKMRKPFWLNADGTLNELHEAVKDMFHLYKNGYGQQRIIVTLREKYANTAIQKLNPSTVMRWIQADVTRGYWRGNRVYEAAIDDETFFEVQTIHKNRLYENVKPDRNWPLSGLMKCGVCGRGMSIQKSGTSNPVVRCSSKQRDKSCNRKTTFPYFIVHQYMMTVVKKYALRKYTNVTSNKELRHELLIVERDLLKARQELSELKAFYKQQKAEGKKTFATLEILEEERENVENLQNKEKELKSSLEAFANGGASIESRKLVLDGRNFNLEMHKLNFKIIVGEEEVSAEGFDEEIPTLKYIGYSRKTRSYEWTQGSHRFIQSWPSSDVTEQALMLDDYRQNLYAKNFFEKQLSKLKD

SEQ ID NO: 39917 - DNA, 50 bp, Photobacterium damselae
  source 1..50: mol_type = genomic DNA
catatgcacacctcagctttacgtgagcaattggcataggtgtgcatatt

SEQ ID NO: 39918 - DNA, 40 bp, Photobacterium damselae
  source 1..40: mol_type = genomic DNA
agtcgatcactgtaactgtgaacttaaagcaagccaaacc

SEQ ID NO: 39919 - DNA, 50 bp, Photobacterium damselae
  source 1..50: mol_type = genomic DNA
catatgcacacctcagctttacgttagcaattggcataggtgtgcatatt

SEQ ID NO: 39920 - DNA, 40 bp, Photobacterium damselae
  source 1..40: mol_type = genomic DNA
ttttaataactgtatctgttatctttaagcaaaccaaatc

SEQ ID NO: 39921 - protein, 563 aa, Anaerotruncus colihominis; identical to SEQ ID NO: 17561

SEQ ID NO: 39922 - DNA, 50 bp, Anaerotruncus colihominis
  source 1..50: mol_type = genomic DNA
ggttttcttattattcatggagccaccggaccaatcataataagaaaacg

SEQ ID NO: 39923 - DNA, 40 bp, Anaerotruncus colihominis
  source 1..40: mol_type = genomic DNA
aaccgggccgactggtccaacgggaccaaccgggccgacg

SEQ ID NO: 39924 - DNA, 50 bp, Anaerotruncus colihominis
  source 1..50: mol_type = genomic DNA
ggttttcttattattcatggagccagcggaccaatcataataagaaaacg

SEQ ID NO: 39925 - DNA, 40 bp, Anaerotruncus colihominis
  source 1..40: mol_type = genomic DNA
gaccggacccacacggccgaggggaccgagcgggccgagg

SEQ ID NO: 39926 - protein, 537 aa, Ruminococcus bicirculans
MSDTNKITALYCRLSHEDELAGESNSISNQKDILQKYADEHGFYNTAFYIDDGYTGVDFERPAFKRMIDDVDNGRIGTIITKDLSRLGRNHLHVGLYTEEYFPRRNVRYIAINNNIDSDNPDSSAVDMAAFYNIFNEFHVKDTSRKIKASCVIKSERGQRVASRPPYGYMKSQEDHNKILPNPETALVVKYIFQLCADGLGPAQIAHRLEEEQIYTPAMYEYSQTGNVISNFDTSYPYRWNPTAVANILEDVSYLGHTCNFRFGRASYKDHRKLKLPKSEHKLIENTHEPIIDINIWEIVQRLRQSKRRFTRSGEKSIFAGIVFCADCKQKLYFHRHAREKSENWKFICSSYRKNSREQCTMHGIKESHLKEIVLHEIRNVTAFARERTDDFAEYISRESNTAAKKELSEANKKLKKSEKRLAEVGIIFRKLYEDHVLGTIDDDQFRMLSQGYTDEQNQLKAEISDLKHTMQELQSQTANTARFAALAKKYTDITELTQEILHTFVSRIEVHEKLKDDNGSITQEIDIYFTHIGIVK

SEQ ID NO: 39927 - DNA, 50 bp, Ruminococcus bicirculans
  source 1..50: mol_type = genomic DNA
gtcgttccctatttgtgccgcgataaatcggggctgcaataaggaacgta

SEQ ID NO: 39928 - DNA, 40 bp, Ruminococcus bicirculans
  source 1..40: mol_type = genomic DNA
agcatgaaaaaagcccgtaaatacgggcttttaagggtga

SEQ ID NO: 39929 - DNA, 50 bp, Ruminococcus bicirculans; identical to SEQ ID NO: 39927
  source 1..50: mol_type = genomic DNA

SEQ ID NO: 39930 - DNA, 40 bp, Ruminococcus bicirculans
  source 1..40: mol_type = genomic DNA
agaatcaaaatagcgagtaaatactggatttcaaaagtga

SEQ ID NO: 39931 - protein, 591 aa, Paraburkholderia phymatum
MPTVKRARLKAAEAAPSRPPRAYTYARYSSPQQGGGSSIARQDAYAERWAKENGLTLDRSLRMADLGKSAFSGEHLKPGSALAAFMLQIKNKDVLPGDALIVENLDRLSRAEPIDSQGLFGDIVRAGVAIVTSNDNQVYSRETLRQNRALLLVVDALWMRAHEESDSKSVRIRAAYRDKVKKWNDGERDILFGAPRHMKDNGKGELVLVPGTDPSWVLYNREAKRFELDQPQADAMVRMIELYRAGYGAVEITRRLAAEGLSVSEKYPTNRIQRVISYPALKGDKVVISDGKEFVLRGYYPPLMNESEWDELQLLVGKRGHRKGKGDVPAILTGLKTSYCGYCRMLLVGQTVTKKLADGTERKSRRLRCGTYYHLAQKCEGGDSWRAEPVERALLTVCADQANLDYLFSGNDKADPLMKQLTAKRAALAKLELRIKGIKDALRNSDESPETFLETSRELEAEKRDLTKVVEQLERELKVHTCAKPSTGDAWAALTEEAMALDYDARMKARLLVSETFERIDVFAKGLEPKAKHGLEVGARTMHLRLTSKRGVVLGFDFDRRTGELLNTPAKVPNRERIATGKHSTRSARTK

SEQ ID NO: 39932 - DNA, 50 bp, Paraburkholderia phymatum
  source 1..50: mol_type = genomic DNA
ggtatacttagccctacagcgtccaaggacgctgtaacctaaagtaaacc

SEQ ID NO: 39933 - DNA, 40 bp, Paraburkholderia phymatum
  source 1..40: mol_type = genomic DNA
cgggtattacgcggcttccaagcacgccgtcgagggcttc

SEQ ID NO: 39934 - DNA, 50 bp, Paraburkholderia phymatum
  source 1..50: mol_type = genomic DNA
ggtatacttagccctacagcgtccggggacgctgtaacctaaagtaaacc

SEQ ID NO: 39935 - DNA, 40 bp, Paraburkholderia phymatum
  source 1..40: mol_type = genomic DNA
cgcgcatcacgccgcggccggggacgcgggcgagggctgc

SEQ ID NO: 39936 - protein, 538 aa, Intestinimonas butyriciproducens; identical to SEQ ID NO: 13576

SEQ ID NO: 39937 - DNA, 50 bp, Intestinimonas butyriciproducens; identical to SEQ ID NO: 13577
  source 1..50: mol_type = genomic DNA

SEQ ID NO: 39938 - DNA, 40 bp, Intestinimonas butyriciproducens
  source 1..40: mol_type = genomic DNA
ccaggataaccccgcggccaaatcgcagggcgtcaagcag

SEQ ID NO: 39939 - DNA, 50 bp, Intestinimonas butyriciproducens; identical to SEQ ID NO: 35759
  source 1..50: mol_type = genomic DNA

SEQ ID NO: 39940 - DNA, 40 bp, Intestinimonas butyriciproducens
  source 1..40: mol_type = genomic DNA
tgaggcaaaccccgcggccgtgcagcagggcgtgcagcgg

SEQ ID NO: 39941 - protein, 522 aa, Burkholderia cenocepacia
MRVAIYARFSTDKQKETSVTDQISVCVRRAESLGDFEIVARHSDEGVSGKTPVEARVGGKKLMADAMAGRFDMLIVESLDRLSRDQVEQERIMRRLEFRGLRVIGVCDGYDSDSSSRKVQRTVRGLVNELYIDDLRAKTLRGQTGQVERGFVAGGRSYGYELVRTEKGTDYRVDENEAKWVRFIFEKFAAGWSTFRICDELNRRNVPSPRKSTWMRSALYGSPRKGSGILNNSAYIGRYIWNRSQWLKDPDTGKRIRQDRPESEWKVVQRDHYRIVSDEVWQAVRNRMGKDRLNGGTSGIGHPLRTLFGGYLRCAQCGGAMIAINALYYGCATRKERGVHACRGMYISRTQTDEQLLNVLRSELLSDKAQADIDAAARRYFASEMGDASESIRQVRAKIAEREKEIENLTQALASMGVSQAIMDRLKKAESEKAELSQALARTKITAEHFDSIIVKAKAKTIALKDALTREGTDEARQIIGTLMGRIEVERKDDGFFASFDDVSEQLMLYAAGNSRGPVVAG

SEQ ID NO: 39942 - DNA, 50 bp, Burkholderia cenocepacia
  source 1..50: mol_type = genomic DNA
aattctagaggtccagtggttgcgggggcagcctctgtcaccagtagaag

SEQ ID NO: 39943 - DNA, 40 bp, Burkholderia cenocepacia
  source 1..40: mol_type = genomic DNA
gcttcggcatttggttgcgggggtaggatttgaacctacg

SEQ ID NO: 39944 - DNA, 50 bp, Burkholderia cenocepacia
  source 1..50: mol_type = genomic DNA
aattctagaggtccagtggttgcgcgggcagcctctgtcaccagtagaag

SEQ ID NO: 39945 - DNA, 40 bp, Burkholderia cenocepacia
  source 1..40: mol_type = genomic DNA
actgagggacttgggtgctcgggtgggatttgaacccgcg

SEQ ID NO: 39946 - protein, 523 aa, Agrobacterium tumefaciens
MKRAAIYARYSTDLQNDKSVEDQIRLCEAHAQRIGAQIVKTFHDRAKSGASMFGRAGLSQLMQDAETGTFEVLISESPDRVSRDIADLAHIHKTLKFRGVEMNCVNGGVMDTMQIGMYGVVGQMQREEGAKKVKRGMVGVVRSGRSAGGRAYGYEPVPGQPGELRIVPDEAQIIVRIFKQYSAGTSPRTIAGALNEEGITPPRGDKWNASTINGSGTRGYGILRNPIYDGRMIWNRVRMVKDPSTGRRVSRANDASEHETIGVPHLRIVDEWLFQKVLERKAATGGEHKMMQPRSKRLLSGLLRCGACGGGMVIVGPDRGGNRIQCSTYRESGTCDNRRRFYIDRIEEQVIDSLRMAFADTSVIEAYVKTYEEELKRRRGNAFKSRAAAQRGLNDAKDGITKIIEKIVKGLIEDDEAAVLLTGLREERSRYQAILDTVDEPVNVIELQPKALRSFRASIESLAKILRSSDGNVPIELGETFRQLVAAVVVEPTPAGEAYSVSLKAYLSSLVSSDLSVIKLVAG

SEQ ID NO: 39947 - DNA, 50 bp, Agrobacterium tumefaciens
  source 1..50: mol_type = genomic DNA
gtcggtgataaagttggtagcgggagaccgtcttaatctttatcacctac

SEQ ID NO: 39948 - DNA, 40 bp, Agrobacterium tumefaciens; identical to SEQ ID NO: 20338
  source 1..40: mol_type = genomic DNA

SEQ ID NO: 39949 - DNA, 50 bp, Agrobacterium tumefaciens
  source 1..50: mol_type = genomic DNA
gtcggtgataaagttggtagcgggacaccgtcttaatctttatcacctac

SEQ ID NO: 39950 - DNA, 40 bp, Agrobacterium tumefaciens
  source 1..40: mol_type = genomic DNA
gaagaggaagcggaccgggacagggacctcaagcacagac

SEQ ID NO: 39951 - protein, 523 aa, Agrobacterium tumefaciens
MKRAAIYARYSTDLQNDKSVEDQIRLCEAHAQRIGAQIVKTFHDRAKSGASMFGRAGLSQLMQDAENGTFDVLISESPDRVSRDIADLAHIHKTLKFRGVEMNCVNGGVMDTMQIGMYGVVGQMQREEGAKKVKRGMVGVVRSGRHAGGRAYGYEPVPGKPGELRILPDEAQIIVRIFKQYAAGTSPRTIAGALNEEGIAPPRGEKWNASTINGSGTRGYGILRNPIYDGRMIWNRVSMVKDPSTGRRVSRTNDASEHETIDVPHLRIVDEWLFQKVQERKAATGGEHKMMQPRSKRLLSGLLRCGACGGGMVIVGPDRGGNRIQCSTYRESGTCDNRRRFYIDRIEEQVIDSLRMAFSDTSVIEAYVKTYEEELKRRRGNAFKSRAAAQRGLNDAKDGITKIIDKISKGLIEDDEAAVLLTGLRENRNKYQAILDSVEEPVNVIELQPKALMRFRASIESLAKILRSSDGNVPMELGETFRQLVAAVVVEPTPAGEAYSVSLKAYLSSLMSSDLSVIKLVAG

SEQ ID NO: 39952 - DNA, 50 bp, Agrobacterium tumefaciens
  source 1..50: mol_type = genomic DNA
gtcggtgataaagttggtagcgggagaccgtctcaacctttatcacctac

SEQ ID NO: 39953 - DNA, 40 bp, Agrobacterium tumefaciens; identical to SEQ ID NO: 20338
  source 1..40: mol_type = genomic DNA

SEQ ID NO: 39954 - DNA, 50 bp, Agrobacterium tumefaciens
  source 1..50: mol_type = genomic DNA
gtcggtgataaagttggtagcgggacaccgtctcaacctttatcacctac

SEQ ID NO: 39955 - DNA, 40 bp, Agrobacterium tumefaciens; identical to SEQ ID NO: 39950
  source 1..40: mol_type = genomic DNA

SEQ ID NO: 39956 - protein, 699 aa, Rhizobium lentis
MNVHLKVQSHHRERSAYLYIRQSSMRQVIDNTESAMRQYALRGRAIALGWREEQIIIIDNDQGESGASAVWREGFQRLVSDVGMGHAGIVMGLEVSRLARNNADWQRLLEICALADTLILDEDGVYDPASFNDRLLLGLKGTMSEAELHVIKARLRGGILNKARRGEFRCPLPTGLIYDHSGNVTLDPDIQVRETIVHFFETFSRVGSASQTVKAFRQEGILFPSRMHDSQTVFRPLTPSAAMRVLHNPRYAGAYVYGRRRYRRTIDGKKLVREQASDDWTACIPDAHPGYISWEQHQENLRILKSNICHKWNAGVASPPREGPALLQGRAVCGQCGRHFHMRYAARRGRQEAWYVCDRARTNCGEPLCQAIAAPPVDEAIGMLIAEQMTPAAVELAIEVRKEIEARHEEADRLRCRAIERAQTEADLAQRRFMLVDPNNRLVADTLEGEWNEKLRILANAREERERGRGHDQFILDKAVHERLVAMTADFKKLWTNPETPNRERKRLLAQIIEDVTLLKLPKRGTTKAHIRFKGGKTQTLVTISPKSPSQQIKTNPDVIQLIDKLLDDHIFSEIAKILNNQGYRPGSVTRRDQRNARFTTKRVTYLVREYKLRSRYDRLRDRGMLTKKEAAAHLNIHEHTLARWAEHGLVTSHAYNGHYYLYELPKTDLPQKQCSRWNQLVDRVVAQKENARHAKTFN

SEQ ID NO: 39957 - DNA, 50 bp, Rhizobium lentis
  source 1..50: mol_type = genomic DNA
gagatgcagtatgaatgcagatcgttgtaccttatctgagaatgcagccg

SEQ ID NO: 39958 - DNA, 40 bp, Rhizobium lentis
  source 1..40: mol_type = genomic DNA
ccgccccttctgcaagatcttgtaatacaggcagaagccc

SEQ ID NO: 39959 - DNA, 50 bp, Rhizobium lentis
  source 1..50: mol_type = genomic DNA
gagatgcagtatgaatgcagatcgtggtaccttatctgagaatgcagccg

SEQ ID NO: 39960 - DNA, 40 bp, Rhizobium lentis
  source 1..40: mol_type = genomic DNA
cctcggcctctgaaagagctgggattacaggcatgagccc

SEQ ID NO: 39961 - protein, 547 aa, Nocardia farcinica
MCDYWSMGTNAQLEAIVYARVSDNRGGRSRSVDQQLAAGRRECERRGWVISKEIIDDDKGASRYSRAKRTGYEALLEQELRPGRVLVTWESSRAQRDLRAYIRLREICEETGALWCYDGQVYDMRDPRDRHRTGQDALDDELEVEKTRKRVLRDMRANAEAGRPHGKVAYGYRIVRDPRSGRAIDRVPDELTAPIVREIAERVLAGEAIRSIATDLNRRGIPAPRPIRKGPRAGQPGQWITQTITSLIKSPTYAGLRTVRGEVVREGTWQPILTREQHERIVALLSDPSRRTQRGTSPRWLLSYIATCGECGGTIARLKPRGHDMYTCITNQCVGRAVSYVDKLVEEAIIQRLESPDVLALLSSDDQAASEAYEEARTLRERLDSFIDQAAEGALSAQALARIEAKLRPQIAAAERRARAAISSPLVAELAGPHARSTWQTLTMPQKREVVRALVEIRIWKARKGMRRVNPRYIHLRWIGSDEPVPTGPVPPLPLAEGGDPLDYTIAEVLAHMSSADAAERQRILDAERAGYARGRILRLNPNPTRR

SEQ ID NO: 39962 - DNA, 50 bp, Nocardia farcinica
  source 1..50: mol_type = genomic DNA
aagtattcctaacgagcaatgagcggactcatcactttttaggagtactt

SEQ ID NO: 39963 - DNA, 40 bp, Nocardia farcinica
  source 1..40: mol_type = genomic DNA
acacctctgcgtggtcagcggggcgaatttcacgatcgtg

SEQ ID NO: 39964 - DNA, 50 bp, Nocardia farcinica
  source 1..50: mol_type = genomic DNA
aagtattcctaacgagcaatgagcgaactcatcactttttaggagtactt

SEQ ID NO: 39965 - DNA, 40 bp, Nocardia farcinica
  source 1..40: mol_type = genomic DNA
acagctctgcatggctggggaggcaaaattcacaatcatg

SEQ ID NO: 39966 - protein, 540 aa, Faecalibacterium prausnitzii; identical to SEQ ID NO: 12131

SEQ ID NO: 39967 - DNA, 50 bp, Faecalibacterium prausnitzii
  source 1..50: mol_type = genomic DNA
ggtcttgcggttcatttgcgtactccatgcagaaaccgtcctgcagtaca

SEQ ID NO: 39968 - DNA, 40 bp, Faecalibacterium prausnitzii
  source 1..40: mol_type = genomic DNA
tgccgctcacaggcatcctccttttcgctgatatataaaa

SEQ ID NO: 39969 - DNA, 50 bp, Faecalibacterium prausnitzii; identical to SEQ ID NO: 39967
  source 1..50: mol_type = genomic DNA

SEQ ID NO: 39970 - DNA, 40 bp, Faecalibacterium prausnitzii
  source 1..40: mol_type = genomic DNA
tgccactcacacccactgtccttttggccgacatgtaaaa

SEQ ID NO: 39971 - protein, 576 aa, Enterocloster bolteae
MLIKNAGADKIGVSNPVLADCPPMKGAETMLRQSDKITALYCRLSRDDELQGDSNSIVNQKAILSKYAKENHFSNTAFFVDDGYSGTNFNRPSWSELLERIENGEVATLIVKDMSRLGRDYLKVGFYTEVLFVEKGVRFIAINNGIDSANQQDSDFTPFLNIINEWYAKDTSKKIRAVMKSKGEAGEYLCTNPPYGYMKDPDNRKRWIVDGEAAEVVKRIFALCLDGYGPSQIARILKEDKVITPTIHFQQTGRATRNTPPDNPYNWTGDTIADILERPEYQGHTVNFKTYKQSYKSKKTCYNPEEKWLVFENTHEAIIDADTWARVQELRKNKRRPTRTGKTNMFSGIVRCADCGEKLYYCTSKNFEARQDHFVCSTSRLKGKEICSTHFIRAVVLEQGVLAHMRLTIACVANHEEQFRKAMGAKQKAEAKKELAAKRRQLTQAERRIEELDRLFKRIYEDNANGKLSDSRFQMLSDDYEQEQEELRKKLLRLNEEISEQEEQTENIDRFISKVRKYLDLDELTPSVLNDMVKAVYVHAPDKSKGHREQQIDISYDLVGILPASLLNDLQNGETA

SEQ ID NO: 39972 - DNA, 50 bp, Enterocloster bolteae
  source 1..50: mol_type = genomic DNA
atactgtcttatgagtgccgcccgtgaggtagctactcataaaacagtat

SEQ ID NO: 39973 - DNA, 40 bp, Enterocloster bolteae
  source 1..40: mol_type = genomic DNA
attcataaaagcggctcaatgggcctgactgcttaagttg

SEQ ID NO: 39974 - DNA, 50 bp, Enterocloster bolteae
  source 1..50: mol_type = genomic DNA
atactgtcttatgagtgccgcccgctaggtagctactcataaaacagtat

SEQ ID NO: 39975 - DNA, 40 bp, Enterocloster bolteae
  source 1..40: mol_type = genomic DNA
attcatatcaccttttcaactggccttcctgcctaagttc

SEQ ID NO: 39976 - protein, 496 aa, Chryseobacterium indologenes; identical to SEQ ID NO: 29931

SEQ ID NO: 39977 - DNA, 50 bp, Chryseobacterium indologenes
  source 1..50: mol_type = genomic DNA
atagttgtctccttcagtgacctcgacaggacgctattcaaactcttttt

SEQ ID NO: 39978 - DNA, 40 bp, Chryseobacterium indologenes
  source 1..40: mol_type = genomic DNA
tcttgttgtgtgtgaacttgacaggattcaaacctgtaac

SEQ ID NO: 39979 - DNA, 50 bp, Chryseobacterium indologenes
  source 1..50: mol_type = genomic DNA
atagttgtctccttcagtgacctcggcaggacgctattcaaactcttttt

SEQ ID NO: 39980 - DNA, 40 bp, Chryseobacterium indologenes
  source 1..40: mol_type = genomic DNA
ttgtcttctgtgtgaatttggaaggatgcaaatcagtacc

SEQ ID NO: 39981 - protein, 518 aa, Enterocloster bolteae
MTDGNFGISGYQGKAPVWRRGEPPRKIREEVQKMKAVIYARYSSDNQREESIEGQLRECKEYAEKNSITILSTYIDRALSAKTDNRPEFQHMIKDSAKGLFDIVLVWKLDRFARNRYDSAHYKATLRKNGVKVVSATEAIAEDSTGILLESLLEGYAEFYSAELSEKVIRGRTENALKCKFNGGGLPIGYIVDSEQYLQIDPLTAPIVVEAFQRYDKGATIKQLVDFLNSKGIQSYRKKPLRIDCVKRLLKNRRYIGEYKYRDIVTPNGVPAIVPQDLFDRVGERLEKNKKAPARAKAKDEMYLLTTKLFCGCCGAYMCGESGTSHTGVTHHYYKCVTAKYKKACHKKTVKKDWIENLVIEHIVRLLFDDKLMNDITDYVMVLQKRENTALPLLKQQLADTTRGIENIINAIQQGIFTQSTKQRLDELEERKSQLEVEILQEEMQKPLLTREQVLFWLHRFRTLDITDPDHRQRLVDSFVNSICLYDDKIILMFNYKEGSKTISLADIESSSLCAGGA

SEQ ID NO: 39982 - DNA, 50 bp, Enterocloster bolteae
  source 1..50: mol_type = genomic DNA
agttcgagtttatgtgcgggtggtgcactaaacgcacataacccgaaccc

SEQ ID NO: 39983 - DNA, 40 bp, Enterocloster bolteae
  source 1..40: mol_type = genomic DNA
ggttcgagtcctgttagccgcatacgtaagagtcctgtat

SEQ ID NO: 39984 - DNA, 50 bp, Enterocloster bolteae
  source 1..50: mol_type = genomic DNA
agttcgagtttatgtgcgggtggtaaactaaacgcacataacccgaaccc

SEQ ID NO: 39985 - DNA, 40 bp, Enterocloster bolteae
  source 1..40: mol_type = genomic DNA
ggtcctagttgtgttagaaaaaaaggcaagaggcctgtat

SEQ ID NO: 39986 - protein, 463 aa, Eubacterium maltosivorans
MKHVGLYIRVSTEEQTENYSIPEQRERLENFCKAKDWLVVDEYIDGGYSGAKLDRPAVQKMITDAGTGTIDTVLVWKLDRLSRSQKDMLYLIEDVFIPNSVDFVSLNESLDTGTAFGRAMIGILSAFAQLEREQIKERTMMGRIARAKSGLVMGPTAPYGYRYVDGQLIVDEYEASIVREIYDLYLQGYGMEKVSNMLYEKMQLTSASGYAAVRRILSRPTYAGLVHYSGEVYPGQHEKIIDVDMWKRVQEKREHSRNYQRGKRQKHLLTGMIYCKRCGAKYAYHVHSGNNYYDRYMCYSVCRSRKELIKDPHCDNTKYLAAELEQLIIAQIKELALDESKFNKVIQKRIEAPDPTQAMQKQIKEIDKQINNFMDLYQYGKVPVETINERIEKLTQEKSAIEKSIRELNIKPIPKREDYEPTLSRVDSIFETGSADEQRAAVRNLIDHIDIDGENVVIHWVFE

SEQ ID NO: 39987 - DNA, 50 bp, Eubacterium maltosivorans
  source 1..50: mol_type = genomic DNA
cgagtgcgaatagtgacacttctcctgaaagacgttactattcgcaataa

SEQ ID NO: 39988 - DNA, 40 bp, Eubacterium maltosivorans
  source 1..40: mol_type = genomic DNA
gaaaagccagccgggcgtcctgcaggctgtcctcaaagct

SEQ ID NO: 39989 - DNA, 50 bp, Eubacterium maltosivorans
  source 1..50: mol_type = genomic DNA
cgagtgcgaatagtgacacttctcaggaaagacgttactattcgcaataa

SEQ ID NO: 39990 - DNA, 40 bp, Eubacterium maltosivorans
  source 1..40: mol_type = genomic DNA
gaaataccagctgggcatcagtcctgctgtcctcaaatag

SEQ ID NO: 39991 - protein, 628 aa, Aeromonas sp ASNIH7
MPKPKPMIYPYSRISSAKQAKGQGLAMQQEEELLEKLKERYGMEIYGGRMVDSGKSAFHGKHIADGQLGWFLAAVQSGEVAPGSILVVSSLDRFSRQQVRRASRDLVNVLDAEVGVYSVYEGRCFCDPKGNRGNDSADIQYATAVLDRANNESATKQARTHKIRDLAIARHLRGERHESGFAYSIKVVGNDVWWVDNSDGVVRPHEQYAPLAKQIALRLIARESPLNVTKWLNTEGITCPINRSDKKAKGAWSHHVIRRFHLNRALMGEKRINQTVLDGYYPAVLTEDEYLRLVHARTCSMRPKSSGRAKVISLFAGVEQVQCRHCGAGVHLNSEAGGYVNYRCSGFKTELACPGWSKRARDIESALLSVCLAETWKDPEQLPSSRVPVIQGEIYRLQASLDNLVEMARDKGFPKILISEIADLEAKIERLDSELEQARVEEVAKQVHSAASIRERWKAITDNVLDPTNDESRHHMRELLRDSIKSFRIGRPSYMGVEDRENALKAREMLDAAARGAIVLEEDERKFLEGVRNSLFNDEGKSKGHERFTVVLEMEFINGTRRVVTIGRNGPIAVAGIEREQLPSEVKAQLGEAPASLFNTYAPISLDDEAWLQEEFKGFPTNRETSDQ

SEQ ID NO: 39992 - DNA, 50 bp, Aeromonas sp ASNIH7; identical to SEQ ID NO: 35412
  source 1..50: mol_type = genomic DNA

SEQ ID NO: 39993 - DNA, 40 bp, Aeromonas sp ASNIH7
  source 1..40: mol_type = genomic DNA
atcttccagcgcaccgggctggccgtaggcgccgttgttg

SEQ ID NO: 39994 - DNA, 50 bp, Aeromonas sp ASNIH7
  source 1..50: mol_type = genomic DNA
tacccccgacaaagtaactatggcaagccgtagtgtctatgttagatgga

SEQ ID NO: 39995 - DNA, 40 bp, Aeromonas sp ASNIH7
  source 1..40: mol_type = genomic DNA
accttgcagggcaccgagcaaatagtaggcgcagttgtgt

SEQ ID NO: 39996 - protein, 628 aa, Aeromonas caviae; identical to SEQ ID NO: 35411

SEQ ID NO: 39997 - DNA, 50 bp, Aeromonas caviae; identical to SEQ ID NO: 35412
  source 1..50: mol_type = genomic DNA

SEQ ID NO: 39998 - DNA, 40 bp, Aeromonas caviae; identical to SEQ ID NO: 39993
  source 1..40: mol_type = genomic DNA

SEQ ID NO: 39999 - DNA, 50 bp, Aeromonas caviae; identical to SEQ ID NO: 39994
  source 1..50: mol_type = genomic DNA

SEQ ID NO: 40000 - DNA, 40 bp, Aeromonas caviae; identical to SEQ ID NO: 39995
  source 1..40: mol_type = genomic DNA

SEQ ID NO: 40001 - protein, 606 aa, Aeromonas caviae
MNGPKIYPYSRISSSKQAKGQGLTIQQEDSLLQELSERYQLPVYEHRMVDSGKSAFHGDHIKDGQLGWFLNAVRSGEVAEGSILVVSSLDRFSRQEIRKATSDLAGVLSCNIGIYSAIEQRMFCDPYGDKSSNVLDIQLAVMILERAHGESRTKQARTLKLRDLAIGRHLNGERHPSGYAYSIKVVGNDVWWVDNSDGVVRPHPVYIHVARQIALRLMAGHSPRKVTDWLNREGPDCPIERFDKRAPKVWSHHVIRRFHLSRALVGEKQINDIILEGYYPPVLTENEYAALVDARTRRKRPRTTGKATAISLFAELPQATCRHCGASIHMNRETGGALNYRCSGFREEYRCLGWSKRAAVIEKALLDICLDKVWKDPETLPLSRVPALQAQIDKINGHIHNLMEQAREKGFPKILTLEIGRLESQLNELSTQMESAKAEEVALQARTCASLVPRWGAISDRVLDTKNDDARIELRELLRDSIASLTIGRPGLISLRDRLALLSDPSKSIDEKKSLLAEEVPRGPERFIFVMDVTFNDGAHRCVTMDRHGVTAIVGTDRSSLGTDVAAKLGSVPTRIFNAYAPDEIDEELMAELETLRRSDRNAIPE

SEQ ID NO: 40002 - DNA, 50 bp, Aeromonas caviae; identical to SEQ ID NO: 14947
  source 1..50: mol_type = genomic DNA

SEQ ID NO: 40003 - DNA, 40 bp, Aeromonas caviae; identical to SEQ ID NO: 39993
  source 1..40: mol_type = genomic DNA

SEQ ID NO: 40004 - DNA, 50 bp, Aeromonas caviae
  source 1..50: mol_type = genomic DNA
aacatctgacattgatgatacggcaagccgtagactcaatgtcagatgtt

SEQ ID NO: 40005 - DNA, 40 bp, Aeromonas caviae; identical to SEQ ID NO: 39995
  source 1..40: mol_type = genomic DNA

SEQ ID NO: 40006 - protein, 489 aa, Anaerobutyricum hallii; identical to SEQ ID NO: 18206

SEQ ID NO: 40007 - DNA, 50 bp, Anaerobutyricum hallii; identical to SEQ ID NO: 3657
  source 1..50: mol_type = genomic DNA

SEQ ID NO: 40008 - DNA, 40 bp, Anaerobutyricum hallii
  source 1..40: mol_type = genomic DNA
ggtttcaaagtgggaaaatggacgatctataccagatgta

SEQ ID NO: 40009 - DNA, 50 bp, Anaerobutyricum hallii; identical to SEQ ID NO: 12689
  source 1..50: mol_type = genomic DNA

SEQ ID NO: 40010 - DNA, 40 bp, Anaerobutyricum hallii
  source 1..40: mol_type = genomic DNA
ggtttcaaaattgcaccaagtaggatttatacaagatgca

SEQ ID NO: 40011 - protein, 550 aa, Gardnerella vaginalis; identical to SEQ ID NO: 1606

SEQ ID NO: 40012 - DNA, 50 bp, Gardnerella vaginalis; identical to SEQ ID NO: 1607
  source 1..50: mol_type = genomic DNA

SEQ ID NO: 40013 - DNA, 40 bp, Gardnerella vaginalis
  source 1..40: mol_type = genomic DNA
ccccaaaaagcatgcttgaaaagcactggccttacatttg

SEQ ID NO: 40014 - DNA, 50 bp, Gardnerella vaginalis; identical to SEQ ID NO: 2059
  source 1..50: mol_type = genomic DNA

SEQ ID NO: 40015 - DNA, 40 bp, Gardnerella vaginalis; identical to SEQ ID NO: 11585
  source 1..40: mol_type = genomic DNA

SEQ ID NO: 40016 - protein, 609 aa, Blautia obeum; identical to SEQ ID NO: 38886

SEQ ID NO: 40017 - DNA, 50 bp, Blautia obeum; identical to SEQ ID NO: 38887
  source 1..50: mol_type = genomic DNA

SEQ ID NO: 40018 - DNA, 40 bp, Blautia obeum
  source 1..40: mol_type = genomic DNA
cagtacccacgtcagcttaaaggtctgggaaccgtagatg

SEQ ID NO: 40019 - DNA, 50 bp, Blautia obeum
  source 1..50: mol_type = genomic DNA
cgtatccgtatgcctgcacagttagataaccttgcgtacatacggatata

SEQ ID NO: 40020 - DNA, 40 bp, Blautia obeum
  source 1..40: mol_type = genomic DNA
ctggacacacatcagcatggagtcctgggaaccgtggctg

SEQ ID NO: 40021 - protein, 600 aa, Sphingomonas melonis
MFAYVYARWSSQEQTRGSTLARQLATCGDFVESKPGWTLAETITDKGTSAYTGDNIETGNLGKFRDRILNGTIDPTKAVLVCEELDRLSRQPADVMLSWLSPLVRRGLTIVVVNTGQTITREMLDVDMGGLMMILITAFGSHTESRKKAKRVAAAWEAKREAARTGKSVTRTHRHPKWITVKEDGTFTVLPHHRLIVETIFKNRIDGIGKGLTAKTLNALAQNDPAFAPWPVGMTGAAPALWTATYIGRVLRNRAVMGEWQPFTRPRKGAPAPAGEPITNYYPLVIDAATFARANEERIADALKHQGRGNNLSNLLGTRARCGECGGQMAARGSAAYFTNKKGEKRRHYFLYCQNAKSGGSCENQRGWTYDRVEVPILDTILSLAMDETHFDSGTNLAPIEAAIYTHKGTIADVEHKLANLLDLVESGNKGAAARYAQREAELEAARDALMEAENRLAEAKGRVSPTEHLRRVAEVRTLMWSDDQDVKFQARSKVKAALGDVIERITFHPKTGNVSVMLVEFMRMFVINHAGEVIEDMDLTKMGGGPGHGKVTTYENATVAIGEDGNHTLMSGDAVAVANDLNDDQKLAAVAYMRRKASG

SEQ ID NO: 40022 - DNA, 50 bp, Sphingomonas melonis
  source 1..50: mol_type = genomic DNA
ctcttgaaaagggtaattatgcgtgacagaaaggtaactcttttcaagga

SEQ ID NO: 40023 - DNA, 40 bp, Sphingomonas melonis
  source 1..40: mol_type = genomic DNA
ggtgtcgggcccgctgctcgaccgcatcgacctgcatgtc

SEQ ID NO: 40024 - DNA, 50 bp, Sphingomonas melonis
  source 1..50: mol_type = genomic DNA
ctcttgaaaagggtaattatgcgtcccagaaaggtaactcttttcaagga

SEQ ID NO: 40025 - DNA, 40 bp, Sphingomonas melonis
  source 1..40: mol_type = genomic DNA
ggagtagaccccgctcctcccccgcatccaactgaacgtg

SEQ ID NO: 40026 - protein, 516 aa, Roseburia hominis
MSKKVMRKSPEVTEQIRTGAAYIRVSTDDQLEYSPESQLEEIKRYCLQHNILLPSEFIFVEEEGRSGRKSSNRYAFQNMIAMAKTKPKPFDVIVLWKFSRFARNQDESTFYKSMLRKKLGIDVVSVSEPLIDGMYGRLIEMIIEWQDEFYSVNLSGEVRRSMLSRARKGLYNGKMPLGYTKPPNENPVIEEQEAAIVRKIFDMYASGSDINYITRGLNDHGYKTKTGKKFDQEGVIYILENPFYIGKVRYNMRESSATSTLRDPDEWIIADSFHEPIIDMETWNIVQERRERSKKLAGRYEHPVSHAKHWLSGLVKCPVCGKSLSHKEGYPRKSTNGTTYLSGEGFQCLGYMKGLHSGSQFISAKKLTDSVITSLRDVLESTTDVSFELVRTYEPTIELDCQRYQRELASLDRKLERIREAYMNEIDTLEDYKRNKEMIEKRRADLEALLADMTTAASGPENYKEQFLNRVQSVLDIIESDAPNDLKAEALRGIVRKIVFYKDTNTLEFHYYLMVE

SEQ ID NO: 40027 - DNA, 50 bp, Roseburia hominis
  source 1..50: mol_type = genomic DNA
agtagctgtatttccggtcatcccccaccgtgaccggaaatacggctact

SEQ ID NO: 40028 - DNA, 40 bp, Roseburia hominis
  source 1..40: mol_type = genomic DNA
ggtggccccggggttcgcaccaccatgccccgcatccaat

SEQ ID NO: 40029 - DNA, 50 bp, Roseburia hominis
  source 1..50: mol_type = genomic DNA
agtagctgtatttccggtcatcccgaaccgtgaccggaaatacggctact

SEQ ID NO: 40030 - DNA, 40 bp, Roseburia hominis
  source 1..40: mol_type = genomic DNA
gctgacacaggggtccgcagacccaggcccctcattccat

SEQ ID NO: 40031 - protein, 543 aa, Bradyrhizobium diazoefficiens
MIRAAIYARFSSDRQKDRSIDDQIALCRDLCAREGMAVTSTFEDRAISGSAAVNRPGFQALMQAAESRLFDVIVAEDMDRIFRDQADYHNARKGLDFLGITLHTAAGKIGTIDGALRALMSEQFIENLRVHTRRGLEGVLRDGRHAGGRAYGYRAVKSKPGELEIVEEEAEIVRQIFADYVANKTPRQIAHDLNKRGVRPPRGRLWNGSTINGHVARGGGMILNDLYAGRIVWNKVRMVKDPTTGKRLSRPNPKEQYKIVDAPHLRIIDEATFKAAQVIKIERRRDATPASAQKSRAPKRVFSGLIRCGACGGGMASNGADRKGVRLQCSSYKESGSCSNSRRVYLDDLEALAIKGLRQHLAHPAMITEYVDAYNAARKRLKRQASTERARLERRLGEIGREMKRIVDSIVITGMPPEQFVARMQELEAEKAKVVAGLESAEESDNVIALHPKALDRYKRAVKELADELKRGGPTEFATIRELVTAIVVHASPSRPGGAGTKANAEDDRSVRIDIKGRLVALCGNPALFPNMAMSGGMLVAGE

SEQ ID NO: 40032 - DNA, 50 bp, Bradyrhizobium diazoefficiens
  source 1..50: mol_type = genomic DNA
gtcggggggaatgttggtagcgggagagcgctacccacgttccccccgac

SEQ ID NO: 40033 - DNA, 40 bp, Bradyrhizobium diazoefficiens
  source 1..40: mol_type = genomic DNA
ggggaaagatggtagcgggagagggactcgaacccccgac

SEQ ID NO: 40034 - DNA, 50 bp, Bradyrhizobium diazoefficiens
  source 1..50: mol_type = genomic DNA
gtcggggggaatgttggtagcggggcagcgctacccacgttccccccgac

SEQ ID NO: 40035 - DNA, 40 bp, Bradyrhizobium diazoefficiens
  source 1..40: mol_type = genomic DNA
ggggaaacaaggtggctgggcagggacgtgagccgcctat

SEQ ID NO: 40036 - protein, 543 aa, Bradyrhizobium diazoefficiens
MILAAIYARFSSDRQKDRSIDDQIALCRDLCAREGMAVISTFEDRAISGSAAVNRPGFQALMQAAESRLFDVIVAEDMDRIFRDQADYHNARKGLDFLGITLHTAAGKIGTIDGALRALMSEQFIENLRVHTRRGLEGVLRDGRHAGGRAYGYRAVKSKPGELEIVEEEADIVRQIFSDYVANKTPRQIAHDLNTRGVRPPRGRLWNGSTINGHVARGGGMILNDLYAGRIVWNKVRMVKDPTTGKRLSRPNPKEQYKIVEAPHLRIIDDATFKAAQVIKIERRRDATPASAQKSRAPKRVFSGLIRCGACGGGMASNGADRKGVRLQCSSYKESGSCSNSRRVYLDDLEALAIKGLRQHLAHPAMITEYVDAYNAARKRLKKEASTERARLERRLGEIGREMKRIVDSIVITGMPPEQFVARMQELEAEKAKVVAGLESAKESDNVIALHPKALDRYKRAVVELADELKCGTPSEFATIRELVTAIIVHASPSRPGGAGTKANAEDDRSVRIDIKGRLAALCGNPALFPNMAMSGGMLVAGE

SEQ ID NO: 40037 - DNA, 50 bp, Bradyrhizobium diazoefficiens
  source 1..50: mol_type = genomic DNA
gtcggggggaatgttggtagcgggagagggttaccgacgttccccccgac

SEQ ID NO: 40038 - DNA, 40 bp, Bradyrhizobium diazoefficiens; identical to SEQ ID NO: 40033
  source 1..40: mol_type = genomic DNA

SEQ ID NO: 40039 - DNA, 50 bp, Bradyrhizobium diazoefficiens
  source 1..50: mol_type = genomic DNA
gtcggggggaatgttggtagcggggcagggttaccgacgttccccccgac

SEQ ID NO: 40040 - DNA, 40 bp, Bradyrhizobium diazoefficiens; identical to SEQ ID NO: 40035
  source 1..40: mol_type = genomic DNA

SEQ ID NO: 40041 - protein, 513 aa, Bacteroides eggerthii
MSKKKSKEKVVEYSKLEHKVAAVWTRVSTGKQADNNGSLESQKRICDEYAASKGIRIKEYFGDTNESAQTEGKLYRNMIEKVAKDKEINVILVASYDRFSRTGPEGIMTKAYLKAKGIFVVSATQATDPDSAAGTFMENIIFLFNQFENSLRRDKAVIGMTDCLRKGNWFSKPPLGYNKVKVEKDHILTVNETGRILRNAFIWKATEGIGDIEIVQRLKELGLSIDRKHLNKILHNPFYCGYIQHSLLGDEIIKGNQEILIDEATFNKVNGISNTGYEHKKITEPFPLKRHIICSDCGGYLTGYTVKARGKDYYKCNKKGCKSNHSTEKLHQKYINLLNEYNIPDEYIPILTDVLRKVFEEYNQNKGETKKVLLKRKTECENQINAVKVRLGLGEINNEIYTATMGELNSRLAEVKRGLEDAGKNLSNMMKYINQTIEMSCKLGSLWNDSNFVDRQKVQNLVFPSGIYFDKEKDDYRTENENEVFKIFRRFTETYKDEKEKATTDFARLSPSV

SEQ ID NO: 40042 - DNA, 50 bp, Bacteroides eggerthii
  source 1..50: mol_type = genomic DNA
ttttgctcgtttgtcgccttctgtcggctacactatcgaattatcgaaca

SEQ ID NO: 40043 - DNA, 40 bp, Bacteroides eggerthii
  source 1..40: mol_type = genomic DNA
cttgtcgtttttttattgtcggaatgaggcgactcgaacg

SEQ ID NO: 40044 - DNA, 50 bp, Bacteroides eggerthii
  source 1..50: mol_type = genomic DNA
ttttgctcgtttgtcgccttctgtatgctacactatcgaattatcgaaca

SEQ ID NO: 40045 - DNA, 40 bp, Bacteroides eggerthii
  source 1..40: mol_type = genomic DNA
cttgtcctgttttcattttatgattgaggggacaggcagg

SEQ ID NO: 40046 - protein, 513 aa, Bacteroides eggerthii
MSKKKSKEKVVEYSKLEHKVAAVWTRVSTGKQADNNGSLESQKRICDEYAASKGIRIKEYFGDTNESAQTEGKLYRNMIEKVAKDKEINVILVASYDRFSRTGPEGIMTKAYLKAKGIYVVSATQATDPDSAAGTFMENIIFLFNQFENSLRRDKAVIGMTDCLRKGNWYSKPPLGYDKVKIDKDHILTVNETGKILRNAFIWKATEGIKDIEIVHRLKGLGLSIDRKHLNKILHNPFYCGYIQHSLLGDEIIKGNQEILIDEATFNKVNDISNVGYEHKEITEPFPLKRHIICSDCRGYLTGYTVKARGRDYYKCNKKGCKSNHSTEKLHQKYINLLNGYNIPDEFIPILTDVLRKVFEEYNQNKGETKKVLLKRKTECENRIKAVKVRFGLGEINSEIYTATMSELNSRLAEIRRDLEDAGKNLSNMMNYINQTIEISCKLGSLWNDSDFSNRQKIQNLVYPSGIYFDKENDDYRTENENEVFKIFRRFTETYKDEKEKATTDFARLSPSV

SEQ ID NO: 40047 - DNA, 50 bp, Bacteroides eggerthii; identical to SEQ ID NO: 40042
  source 1..50: mol_type = genomic DNA

SEQ ID NO: 40048 - DNA, 40 bp, Bacteroides eggerthii; identical to SEQ ID NO: 40043
  source 1..40: mol_type = genomic DNA

SEQ ID NO: 40049 - DNA, 50 bp, Bacteroides eggerthii; identical to SEQ ID NO: 40044
  source 1..50: mol_type = genomic DNA

SEQ ID NO: 40050 - DNA, 40 bp, Bacteroides eggerthii; identical to SEQ ID NO: 40045
  source 1..40: mol_type = genomic DNA

SEQ ID NO: 40051 - protein, 478 aa, Micrococcus luteus
MVELVSLRKTNEVAAYVRASMDRKGDRWTVDTQLRKIRALAEAKDWNVVEVYEDNAVSATKKRRAGTRWAEMLDDARAGRFSMVVAVDMDRLLRSTKDLNTLIDLGLRVVTVDGEIDLSTADGEFRATMLAALARFEARRKAERQIRSNERRRAEGIPASTWKAFGWTREGELIEEEAAAVRRAFDAFLGEPSLSIRRIREDLNSAGHLTARGSEFSVDAVRYLLANSLYAGFIRHYKTGELYPVQGEAFPPIVGEQTWRAAVAKLEDNVRRSARQGNQPKYLLSTIGLCGKCGATLVSGTNSRKQPTYRCGEQFHLTRQREPVDAMVTEAVLTRLSSVDVHDLVMPQEAAGPDREELLTERNALVERVKELSPLLRDIHQPVLEITAAINDVKARIDEIDAELLDRSVSVAAKLLAEVDEPVGTTERREVVESKWKALDMDRRRMLVDELVTVTIEPIMPGHVKFDPDLVRIEPRRD

SEQ ID NO: 40052 - DNA, 50 bp, Micrococcus luteus
  source 1..50: mol_type = genomic DNA
caacgccacaagcccgacatgcgctagcacatgtcagggttacaacaccc

SEQ ID NO: 40053 - DNA, 40 bp, Micrococcus luteus
  source 1..40: mol_type = genomic DNA
gaagtagagcgggttctcatagcgcaggtcgatcacgccg

SEQ ID NO: 40054 - DNA, 50 bp, Micrococcus luteus
  source 1..50: mol_type = genomic DNA
caacgccacaagcccgacatgcgcgagcacatgtcagggttacaacaccc

SEQ ID NO: 40055 - DNA, 40 bp, Micrococcus luteus
  source 1..40: mol_type = genomic DNA
gaaggagagaggaaactcagagggcaggtcgtccacggca

SEQ ID NO: 40056 - protein, 478 aa, Micrococcus lylae
MVELVALRKTNEVAAYVRASMDRKGDRWTVDTQLRKIRALAEAKDWNVVEVYEDNAVSATKKRRAGTRWAEMLDDARAGRFSMVVAVDMDRLLRSTKDLNTLIDLGLRVVTVDGEIDLSTADGEFRATMLAALARFEARRKSERQIRSNERRRAEGIPASTWKAFGWTREGELIEEEAAAVRRAFDAFLGEPSLSIRRIREDLNSAGHLTARGSEFSVDAVRYLLANSLYAGFIRHYKTGELYPVQGEAFPPIVGEQTWRAAVAKLEDNVRRSARQGNQPKYLLSTIGLCGKCGATLVSGTNSRKQPTYRCGEQFHLTRQREPVDAMVTEAVLTRLSSVDVHDLVMPQEAAGPDREELLTERNALVERVKELSPLLRDIHQPVLEITAAINDVKARIDEIDAELLDRSVSVAAKLLAEVDEPVGTAERREVVESKWKALDMDRRRMLVDELVTVTIEPIMPGHVKFDPDLVRIEPRRD

SEQ ID NO: 40057 - DNA, 50 bp, Micrococcus lylae
  source 1..50: mol_type = genomic DNA
caacgccacaagcccgacatgcgctagcgcatgtcggggttgcaacactc

SEQ ID NO: 40058 - DNA, 40 bp, Micrococcus lylae
  source 1..40: mol_type = genomic DNA
cggcgtgatcgacctgcgctatgagaacccgctctacttc

SEQ ID NO: 40059 - DNA, 50 bp, Micrococcus lylae
  source 1..50: mol_type = genomic DNA
caacgccacaagcccgacatgcgctcgcgcatgtcggggttgcaacactc

SEQ ID NO: 40060 - DNA, 40 bp, Micrococcus lylae
  source 1..40: mol_type = genomic DNA
tgccgtggacgacctgccctctgagtttcctctctccttc

SEQ ID NO: 40061 - protein, 586 aa, Pseudomonas libanensis
MAKIWPYIRFSSEEQKHGDSRRRQRELVESFARRHEIVAEGSVIDDSLDLNDLGVSGYRGKNLLTGRFKAFLDAVEAGIVKPGDYLAVEALNRITRLDPMESLPIILNLIQERGIKIAITSGSQIYKKGDDISSLYIAVGELQRGFKESQEKGVRVKEAWNSKKKRAADLGEIATSRVPLWLAVDTTRLDSGTIKRTIREIEERVAVVREIFRLSDINIGAVATARMLTDRGVPTFTRENARKNSNYGDFWQVTYIRKILANRAVLGHYQPMQWLEVDGKRARVSHGAEIKNYFPQIISSELFDRVQLKKDSRKNEGQGNKGLKFSNLFTKMAFCSECGAVAHHVNKGKDPKKGGRYLVCYRAKYGSCAYKSWRYEKVESMILSYLAEADIKSIMRDDNKVDVLINERYKIESECIAVSEMLENFRNDFKALNGRISNIERELAIENEARLVEFKSKLQSLDAEILDAIEQQKADIKQEVKALQEMESVADENTVFEIRSKINARLKLVVDRIVLNFALQVAEVRFKNGVVRYIHEGGVFGNIMPPPTAEQSLEDLRQIEEWSKLSDDEKRSTWADSAFPIVPLKI

SEQ ID NO: 40062 - DNA, 50 bp, Pseudomonas libanensis
  source 1..50: mol_type = genomic DNA
aggggtccaatgcttcccgaattgaaggatttcagctagcattggaccta

SEQ ID NO: 40063 - DNA, 40 bp, Pseudomonas libanensis
  source 1..40: mol_type = genomic DNA
gcccggggggccactgaacaacaggttatgcgcaccggcc

SEQ ID NO: 40064 - DNA, 50 bp, Pseudomonas libanensis
  source 1..50: mol_type = genomic DNA
aggggtccaatgcttcccgaattgccggatttcagctagcattggaccta

SEQ ID NO: 40065 - DNA, 40 bp, Pseudomonas libanensis; identical to SEQ ID NO: 11605
  source 1..40: mol_type = genomic DNA

SEQ ID NO: 40066 - protein, 537 aa, Hungatella hathewayi
MKQPIYNTALYLRLSRDDELQGESSSITTQRSMLRQYAAENGLNVIAEYADDGWSGTNFDRPDFQRMIEDIEAGKINCVVTKDLSRLGRNYILTGQYTELYFPSRGVRYIAINDGVDSANGESEIAPFKNIINEWVARDTSRKVKSAMKVRFAEGAHYGAYAPLGYRKDPDAKGKLLIDGDTRWIIEKIFDLASHGMGAAKITKTLIEEKVPTSAWLNFQKYGTFAHIFEGQPESKRYLWTIGQVKNLMKDETYIGNSVHNKQSTVSFKSRKKIRKPEEEWYRVEDTHEPLVDKDVFRQVQEQIKGRRRERKDKTTQIFAGLVKCADCGWSLRFGTNNQNKTPYSHFSCSYYGQFGKGYCSAHYIRYDVLYAYVLSRLQYWSQEAEQDEGNLLHRLLKTGDRERAAAKKKAASELKKAEKRQREIDTLFMKMYEDRAAEKITERNFSMLSTKYQNEQAELSEKIQNLQEQLAQSEQQNSDAEKWIALIKQYSNPAELTAPLLNTLIEKIVVHNAVTNADGEREQEVEIFYRFIGKID

SEQ ID NO: 40067 - DNA, 50 bp, Hungatella hathewayi
  source 1..50: mol_type = genomic DNA
caatatctttaactatgggaaaccggagtttcccatagttaaggatatga

SEQ ID NO: 40068 - DNA, 40 bp, Hungatella hathewayi
  source 1..40: mol_type = genomic DNA
cgttagtaaatgggagtcagggctttcctgcccggatatt

SEQ ID NO: 40069 - DNA, 50 bp, Hungatella hathewayi; identical to SEQ ID NO: 40067
  source 1..50: mol_type = genomic DNA

SEQ ID NO: 40070 - DNA, 40 bp, Hungatella hathewayi
  source 1..40: mol_type = genomic DNA
cagtagtaagtgctaggcagggccttcctgacagcatatt

SEQ ID NO: 40071 - protein, 510 aa, Clostridium tyrobutyricum
MLKIAIYSRKSVETDTGESIKNQIAICKQYFQRQNEECKFEIFEDEGFSGGNINRPDFKRMMQLVKIKQFDVVAVYKVDRIARNIVDFVNVFDELDKLNVKLVSVTEGFDPSTPIGKMMMMLLASFAEMERMNIAQRVKDNMRELAKLGRWSGGTAPSGYSVQKVKENGKEVSYLKKEKDADNIKLIFQKYASGYTAFEIHKYFKLKGFTYNPKTIYGILTNPTYLEATEESIKYLENKGYTVYGEPNGCGFLPYNRRPRYKGIKAWKDKSMMVGVSRHEPAVDLNLWIAVQSQLEKKTVAPHPHESKFTFLTGGIMKCRCGAGMGVSPGRIRSDGTRVYYFTCSGKRYRQNGCSNLSLRVDWAESKVKTFLEKMRDKETLTKYYNSNKKKSNVDRDIKSINKKIASNKKAVDSLVDKLILLSNDAAKPLAERIEDITQESNALKEELLKLEREKLFNSNDRLNIDLIHKAIIQFLDTDSLEEKKKFAKDIFDKITWDSASKELLFFLQM

SEQ ID NO: 40072 - DNA, 50 bp, Clostridium tyrobutyricum
  source 1..50: mol_type = genomic DNA
tgatgttaattattctggtcagtacctcctgaccggattaattaatatca

SEQ ID NO: 40073 - DNA, 40 bp, Clostridium tyrobutyricum
  source 1..40: mol_type = genomic DNA
agctacggccattggtggacctcctgaccacccccactcg

SEQ ID NO: 40074 - DNA, 50 bp, Clostridium tyrobutyricum
  source 1..50: mol_type = genomic DNA
tgatgttaattattctggtcagtagttcctgaccggattaattaatatca

SEQ ID NO: 40075 - DNA, 40 bp, Clostridium tyrobutyricum
  source 1..40: mol_type = genomic DNA
acctgttgccatctgtggagttcctgaccacctcccccag

SEQ ID NO: 40076 - protein, 536 aa, Pseudomonas fragi
MPSAISYIRFSSSKQSDGNSHQRQMEAAQRWLVNNPSYTASTMNFEDLGVSGFHGDHIKDGGGWAKLLLAVDAGHIKAGDVVLVEAMDRTGRLPALQMIEIIRPVLQAGIAIITLDDNNRFDEDSLNGPQIFLLVAKIQAAHGYSKILSERTKESYQIRKERARKGEPVKRGVPIWLTSDGKLKEHIAPHIKEVFDLYISGIGKNTIANRLRASGVPEFKTCSGPTVGSWLQNTTTTGHWDDIPNVYPAVVSREVFLQAQNRWKELTTAPPGRTSKNFLVGLVKCGICNGNLIFHNKDGKPNSMRCLTNHRLRANGCSNNKSIPHSILWHIYRITSSQHFRRALERVELTATDKRKLTVKAELEALQVKIDRAVNALINLPDMPELVNSTRELNAQRDNLHNELLILDRTVDESEGHQIHFTSALVEDDLLVSDPIRLNSLLKGVGYTITAYPDGLIIVAGESYPWLYTGVKRKGNHTLGYKVQYLAMEDVISPEINLPSCGKHTEDKSEQLQYVLKRSHKLVSVGRPVDAKQSEE

SEQ ID NO: 40077 - DNA, 50 bp, Pseudomonas fragi
  source 1..50: mol_type = genomic DNA
gcagtgtcataagcaaaatacttgcaccaagatattcatttgttacactc

SEQ ID NO: 40078 - DNA, 40 bp, Pseudomonas fragi
  source 1..40: mol_type = genomic DNA
gcgagtgatcaagggctgggacatcggcctgatgggcatg

SEQ ID NO: 40079 - DNA, 50 bp, Pseudomonas fragi
  source 1..50: mol_type = genomic DNA
gcagtgtcataagcaaaatacttgccccaagatattcatttgttacactc

SEQ ID NO: 40080 - DNA, 40 bp, Pseudomonas fragi
  source 1..40: mol_type = genomic DNA
gccagtggtcaatgccaggccaatgggcttgaggggcatc

SEQ ID NO: 40081 - protein, 511 aa, Pseudomonas fragi
MEAAQRWLINNPSYTASTMNFEDLGVSGFHGDHIKDGGGWAKLLLAVEAGHIKAGDVVLVEAMDRTGRLPALQMIEIIRPVLQAGIAIITLDDNNKFDEDSLNGPQIFLLVAKIQAAHGYSKILSERTKESYQIRKEKARKGEKVRRGVPIWLTTDGELKAHLAPYIKEVFDLYISGVGKNTIANRLRASGVPEFKTCSGPTVGSWLQNTTTIGYWDDIPDVYPAVVSKELFLQAQNRWKEVAKSPPSRTSKNFLVGLVKCGICDGNLIFHNKDGKPHSMRCLTNHRLRSNGCSNNKSIPHSVIWYIYTLTASQNFRRALEKIELTATDKRKLTVTAELEKVQAKIVRAVNALISLPDMPEIVSSLKELNAQRDTLQVELQILDRTVDEPGKSSIHFNESLVEDDLLINDPIRLNSLLKGVDYTITTYTDGLIIVAGESYPWLYTGVKRTGNRTLGYKVQYLAMEDVISPEVSFPSCGTQTENESEQMRYVLRRSHKLISVGMPVDAVYLD

SEQ ID NO: 40082 - DNA, 50 bp, Pseudomonas fragi
  source 1..50: mol_type = genomic DNA
cagtgtcataaacaaaatacttgcgaccaagatattcgtttgttacactc

SEQ ID NO: 40083 - DNA, 40 bp, Pseudomonas fragi; identical to SEQ ID NO: 40078
  source 1..40: mol_type = genomic DNA

SEQ ID NO: 40084 - DNA, 50 bp, Pseudomonas fragi
  source 1..50: mol_type = genomic DNA
cagtgtcataaacaaaatacttgcccccaagatattcgtttgttacactc

SEQ ID NO: 40085 - DNA, 40 bp, Pseudomonas fragi; identical to SEQ ID NO: 40080
  source 1..40: mol_type = genomic DNA

SEQ ID NO: 40086 - protein, 549 aa, Clostridioides difficile; identical to SEQ ID NO: 17081

SEQ ID NO: 40087 - DNA, 50 bp, Clostridioides difficile; identical to SEQ ID NO: 10392
  source 1..50: mol_type = genomic DNA

SEQ ID NO: 40088 - DNA, 40 bp, Clostridioides difficile
  source 1..40: mol_type = genomic DNA
atggttgtagggcatcatggatgtggtatgtgtaatgttg

SEQ ID NO: 40089 - DNA, 50 bp, Clostridioides difficile; identical to SEQ ID NO: 18979
  source 1..50: mol_type = genomic DNA

SEQ ID NO: 40090 - DNA, 40 bp, Clostridioides difficile
  source 1..40: mol_type = genomic DNA
atctgtgtggggtgtgatgtgtgtggtgtgtgtgatgttt

SEQ ID NO: 40091 - protein, 558 aa, Acutalibacter muris
MLQADKITALYCRLSQEDMQAGESESIQNQKLILQRYADEHFFLNTRFFVDDGFSGVSFEREGLQAMLREVEAGNVATVITKDLSRLGRNYLKTGELIEIVFPEYEVRYIAINDGVDTAREDNEFTPLRNWFNEFYARDTSKKIRAVKQAKAQRGERVNGEVPYGYIADPNDRNHLIPDPETAHAVKQIFAMYVRGDRICEIQNWLRDNEILTVGELRYRRTGRTQHPRPQLNAWYNWPEKTLYDILARQEYLGHTITAKTYKVSYKSKKTRKNAEDKRYFFPNTHEPLIDEETFELAQKRITTRHRPTKSDEIDLFSGLLFCGDCGYKMYLQKGAGTPERKHAYTCGNYRNRARNDFLCTTHYIRKSVLKELVLADLQRIMSYVKGHEQEFIQTATECSEQAMKKALGHQRKELDKAEARLGEINLLFRKLYEDNALGRLSNEQFVFLTSGYEDEKRELTKRTAELKKEIDTAAERSADVKRFVALVRRYTEISELTYENVHEFIDRILVYELDKNTNTRKIEIFYSFVGKVDTGDQPTESVSYFRQIGADVKSVVV

SEQ ID NO: 40092 - DNA, 50 bp, Acutalibacter muris
  source 1..50: mol_type = genomic DNA
cggttacgttatctcaccccagcaaaagctgaggttagataacgtaactt

SEQ ID NO: 40093 - DNA, 40 bp, Acutalibacter muris
  source 1..40: mol_type = genomic DNA
gcaaaaaccgggcgcctggaacagacagcccggttttcat

SEQ ID NO: 40094 - DNA, 50 bp, Acutalibacter muris
  source 1..50: mol_type = genomic DNA
cggttacgttatctcaccccagcaagagctgaggttagataacgtaactt

SEQ ID NO: 40095 - DNA, 40 bp, Acutalibacter muris
  source 1..40: mol_type = genomic DNA
gcaaaaacctggcccctgcaggagtcaggcctggtctcac

SEQ ID NO: 40096 - protein, 536 aa, Qipengyuania flava
MKNLGASEPKRAYIYCRVSTDEQAKHLTSIDQQEADARKLCEDRGIEVVGVFTDRGISGSDRNRPEFNRMLMLACSDDHPVDAVVACDMSRIARDMEFSVLVLNQLRRASVEMTLVYQHFENSHAGRLLQLLTSWQDEDAIVKASQNTRRGLRGTAEENFWTGGTVPLGYESRTIEVRGKKEKKRLFESAAEAPTVRLIFDLAERGLDGTPMGGRAIAEYLNSRGYTRRGKPFYNATVAGILSRPHYLGRFVGNKFDFDGNLLPEEEWTWVDCPALIAQEQFDRVAALRAKRAPRVTAPRIVNGPTLLIGIARCGVPGCGCGMTIRTGKAGRYRYYSCHSRVNAGAVSCSCPYVRAEKLDELVMSQLAERIFSDDQLEPLLQQVLDTSDEARERKQSEIEQCETKLAEARRRLFNLHEALEDGTVSKRDRDFANRIKNRRAEIDGLEQTKKTLKQQLDRGPSRITPDAVKRFGQIVRERIISGNGNARQQIARAFIKQVRVGPNIIIEGETEALAHGAAAVARSKGKVPTFDRKWC

SEQ ID NO: 40097 - DNA, 50 bp, Qipengyuania flava
  source 1..50: mol_type = genomic DNA
caaggtgcccacctttgaccggaaatggtgccccgtagatgacaaagatg

SEQ ID NO: 40098 - DNA, 40 bp, Qipengyuania flava
  source 1..40: mol_type = genomic DNA
ctcgccccggggcaagcgaatggtgcggtcgagaagactc

SEQ ID NO: 40099 - DNA, 50 bp, Qipengyuania flava
  source 1..50: mol_type = genomic DNA
caaggtgcccacctttgaccggaaagggtgccccgtagatgacaaagatg

SEQ ID NO: 40100 - DNA, 40 bp, Qipengyuania flava
  source 1..40: mol_type = genomic DNA
ctccccccagggcaggcctagggtgcggtcctgagggcgc

SEQ ID NO: 40101 - protein, 619 aa, Dorea formicigenerans
MAGIRMENKIYEVGMYCRLSKDDGTDNESASIATQKSILTDYVKKQGWHLAKTYVDDGYSGTNFQRPSFQNMIKDIESGLINCVITKDLSRLGRNYLDCGLYLEVFFPEHNVRYIAVNDGVDTLNKSAMDITPFRNILNEMYSADVSVKIKSAYRARFQQGKFMGTTAPYGYVKDPADHNHLLIDDKVAHVVREIFDLALAGNGIAKIRKHINKQHILRPAAYAAEQGATGYERYFEENEENRYIWSENSVRGILRSPIYAGNLAGYKRIAANMKSKKRPSKLPEEWEVIPDTHEGIVTQEEFDTVQQLITSRRLPENKGGFENIFAGVIKCADCGYAMRAMSANRRKRPDIIDCVQYSCNNYGRYGNIMCTAHSIEARDLFNAVLTDINRFADMAVNDEKAVRAIEKRLTETDQSKAKALEKEQRKLNKRLAELDRLFSSLYEDKVMERITERNFEMMSGKYQKEQLEIEARLKEVTETLSDSYEKTQGVRDFLSLIRNYQGIKELDATIINALIDKILVSEREKLTDGMVRQEIKIYYKFIGFVGELHITPTKRWTALKPKNCTVCGVEYVPRSGISKYCPACAKKIQREKSNESKRRSRERNRQACIELSAKNDRL

SEQ ID NO: 40102 - DNA, 50 bp, Dorea formicigenerans; identical to SEQ ID NO: 11112
  source 1..50: mol_type = genomic DNA

SEQ ID NO: 40103 - DNA, 40 bp, Dorea formicigenerans
  source 1..40: mol_type = genomic DNA
ctgtccgtggaagccgtctgatctggaacagcaggaaggg

SEQ ID NO: 40104 - DNA, 50 bp, Dorea formicigenerans; identical to SEQ ID NO: 11112
  source 1..50: mol_type = genomic DNA

SEQ ID NO: 40105 - DNA, 40 bp, Dorea formicigenerans
  source 1..40: mol_type = genomic DNA
ctgtacattgcaggagtaagagctggaatagcaggaaggg

SEQ ID NO: 40106 - protein, 419 aa, Ruminococcus albus
MTLTIFNDWYARDTSKKIRAVFKAKGQSGKPLSLPIYGYKASEENKHKWIINDEPAAVVRKIYKLCISGYGPTQIARKLTEEGIPNPTAYAISQGRNPANKNSRLDRWCTETVIDILEHPEYIGHTVNFRTRRKSYKNKRKIENPKEDWLIFENTHEPIVTQQEFDLVQEMRKNKRRNQKQETVNPFSGICYCADCGKKLYLCRSRSLSEDQEHLKCSTHSADKDSCSAHYIRTVVLKELVLNALNKLLDSVKDNEAEFVQTAMDNSASKHSSDVFKAKKALNQAEKRIAELDRLFARLYEDNISGKISDERFAVLSAGYEDEQKKLKAKASELTAFIETAEQKCADVNSFIKVVQKYEHITELTPEIMHELIEKIIVHAPDKSDGHRTQQIEILFRFDVAVATAIADSKEYGKKKKAA

SEQ ID NO: 40107 - DNA, 50 bp, Ruminococcus albus
  source 1..50: mol_type = genomic DNA
aaactgctttatgtgcgccgcactaaagtgcggcgctgatatagcagtat

SEQ ID NO: 40108 - DNA, 40 bp, Ruminococcus albus
  source 1..40: mol_type = genomic DNA
caatcaaaaaacgcctgcaaacgcagacgttttgatacta

SEQ ID NO: 40109 - DNA, 50 bp, Ruminococcus albus
  source 1..50: mol_type = genomic DNA
aaactgctttatgtgcgccgcactagagtgcggcgctgatatagcagtat

SEQ ID NO: 40110 - DNA, 40 bp, Ruminococcus albus
  source 1..40: mol_type = genomic DNA
cctttgaagaacccctggaagcgtagacgtttttatgcta

SEQ ID NO: 40111 - protein, 487 aa, Bacillus cereus; identical to SEQ ID NO: 39756

SEQ ID NO: 40112 - DNA, 50 bp, Bacillus cereus; identical to SEQ ID NO: 39757
  source 1..50: mol_type = genomic DNA

SEQ ID NO: 40113 - DNA, 40 bp, Bacillus cereus
  source 1..40: mol_type = genomic DNA
cttctctcgaatttcagcatctacgtgtctcatcacgtat

SEQ ID NO: 40114 - DNA, 50 bp, Bacillus cereus
  source 1..50: mol_type = genomic DNA
ttttgtctatataggctgtcggcatatgcggtatgcttatatggacaaaa

SEQ ID NO: 40115 - DNA, 40 bp, Bacillus cereus
  source 1..40: mol_type = genomic DNA
cttcattttaaattgggcatatacgtgtttcatcactttt

SEQ ID NO: 40116 - protein, 616 aa, Burkholderia sp IDO3
MPTAYSYIRFSTPEQKKGDSLRRQKELSERYAHDHGLTLDTSLHLHDLGVSAFDGSNITRGALGGFLAAVDEGRVVPGSYLLVESLDRLSRDRVMEALNLFLSIVNRGITIVTLSDGRVYNAATDNTADLIVSITIMSRAHEESLTKSKRLKAAWTNKRSRLHEKKLTARCPLWMRLSDDRSQFEFVPERVSVVREVISLAKNGMGQTIIAKTLNSRSVPSFSGNPKGWHPSYIQKILTSPALYGEYQPGIFEGGRAIPHGEPVADYYPALISKEEFYSLQAYRSQNAVGGGKARKGETIPNLLSGLLRCGYCGSPMVIAGAAARRIRSADGKEMQRPPKKVLVCDGGRRGLGCYAVQWAHRDFETSFLSFCRGIEFEKVLADVRSGHNESRELTLDEKIRSTQAEILAKDARIKNLMVAIEEGNAPASLVERIRLLEEEVSDLRRTETELATELNLHRAAHQELTSTAKTARSMIDTMKSIASDELFRVRAALAAQFRRTIATVTLYPAGRLFTHEQVERQRASLIDAGLVADQVDRYVAETYPIEPRRQGRGNRGRYASRKDIGRFFAIETVNGGFRVVYPDFDDPATARIVAGLDETPVFAVDPEGQPSLATP

SEQ ID NO: 40117 - DNA, 50 bp, Burkholderia sp IDO3
  source 1..50: mol_type = genomic DNA
ttgtgtgttcttcgccacgttattgcaagatcgtggtgatcaacacacgt

SEQ ID NO: 40118 - DNA, 40 bp, Burkholderia sp IDO3
  source 1..40: mol_type = genomic DNA
gggcacgagccatctggtcgcgatctcgggcctgcatgtc

SEQ ID NO: 40119 - DNA, 50 bp, Burkholderia sp IDO3
  source 1..50: mol_type = genomic DNA
ttgtgtgttcttcgccacgttattgaaagatcgtggtgatcaacacacgt

SEQ ID NO: 40120 - DNA, 40 bp, Burkholderia sp IDO3
  source 1..40: mol_type = genomic DNA
gggcatgtgacttctggtggagctctgggccccgcaggtc

SEQ ID NO: 40121 - protein, 616 aa, Burkholderia sp IDO3
MPTAYSYIRFSTPEQKKGDSLRRQKELSERYAHDHGLTLDTSLHLHDLGVSAFDGSNITRGALGGFLAAVDEGRVVPGSYLLVESLDRLSRDRVMEALNLFLSIVNRGITIVTLSDGRVYNAATDNTADLIVSITIMSRAHEESLTKSKRLKAAWTNKRSRLHEKKLTARCPLWMRLSDDRSQFEFVPERVSVVREVISLAKNGMGQTIIAKTLNSRSVPSFSGNPKGWHPSYIQKILTSPALYGEYQPGIFEGGRAIPHGEPVADYYPALISKEEFYSLQAYRSQNAVGGGKARKGETIPNLLSGLLRCGYCGSPMVIAGAAARRIRSADGKEMQRPPKKVLVCDGGRRGLGCYAVQWAHKDFETSFLSFCRGIEFEKVLADVRSGHNESRELTLDEKIRSTQAEILAKDARIKNLMVAIEEGNAPASLVERIRLLEEEVSDLRRTETELATELNLHRAAHQELTSTAKTARSMIDTMESIASDELFRVRAALAAQFRRTIATVTLYPAGRLFTHEQVERQRASLIDAGLVADQVDRYVAETYPIEPRRQGRGNRGRYASRKDIGRFFAIETVNGGFRVVYPDFDDPATARIVAGLDETPVFAVDPEGQPSLATP

SEQ ID NO: 40122 - DNA, 50 bp, Burkholderia sp IDO3
  source 1..50: mol_type = genomic DNA
gtgtatgttcttcgccacgatattgcaatatcgtggtgatcaacacatgt

SEQ ID NO: 40123 - DNA, 40 bp, Burkholderia sp IDO3; identical to SEQ ID NO: 40118
  source 1..40: mol_type = genomic DNA

SEQ ID NO: 40124 - DNA, 50 bp, Burkholderia sp IDO3
  source 1..50: mol_type = genomic DNA
gtgtatgttcttcgccacgatattgaaatatcgtggtgatcaacacatgt

SEQ ID NO: 40125 - DNA, 40 bp, Burkholderia sp IDO3; identical to SEQ ID NO: 40120
  source 1..40: mol_type = genomic DNA

SEQ ID NO: 40126 - protein, 679 aa, Bacteroides intestinalis
MNNMDKKVLIYCRVSTQQQTTDRQKEELLKFAAENHWNVEEEDIFIDVISGFKKGEFRPEYVKMLERVEYGDIDIILFSEFSRLARNATELLEQIKLFIDKGINLYFDKQKLWVRDSNKDVGSIILLHVLAVMSSYEIELFVERSLSGKITKVQAGHGGGDERAYGYMHNENKQIVINPIESKIVARIFEMYVGGYSSIQISEILNAEKVPAPYVRKLNEYKKNREAKGLEVKEYKFDTDNLKWRISTINRLMHNELYKGNRRITFYKPDPTNPLPLSERQDREIVYEYSEHVESLRIVSDELFQQAQDKLSKAYYNKNNAVRHENLLKHLMVCGECGANFSVGKSNETSKNYISGGRTYKCYGRVNRKDKPRTCTNGAELRQWKLDGLVLQLSIQMFAEINIQQTNILKIENLGKEIEELVQIKSSKNTELVEAENLYKKTLKRLIAIEDDEVAKNLISDAKHKYDETKNVLNKTMDKLSREITTKRITIDNLKRLNANPLLINKMDEIRKNRDLVKTMVDEYIDKITIFRLHELWLLVVVSYKGGEEMWGTIKCARYKKEEMFYDELHCHYGVEFQGWLLNNTEHCFSYDKSTRIITYHGGSKIYVEFKSGEYDYDTFNQMIQATGWMGCFPFYAYEDSGKDLSVPSNEDFGKSLQENRTDWKAHNDKVLERLLSKS

SEQ ID NO: 40127 - DNA, 50 bp, Bacteroides intestinalis
  source 1..50: mol_type = genomic DNA
aaggatgtgttcatttcgactatatgcataggtgcgattgacacatcctg

SEQ ID NO: 40128 - DNA, 40 bp, Bacteroides intestinalis
  source 1..40: mol_type = genomic DNA
aactatatgctcgcaagtatgcataggtgggtattcttgt

SEQ ID NO: 40129 - DNA, 50 bp, Bacteroides intestinalis
  source 1..50: mol_type = genomic DNA
aaggatgtgttcatttcgactatactcataggtgcgattgacacatcctg

SEQ ID NO: 40130 - DNA, 40 bp, Bacteroides intestinalis
  source 1..40: mol_type = genomic DNA
cactaaatactcacatgtcctctgaggcaggtattcttgt

SEQ ID NO: 40131 - protein, 623 aa, Bacteroides dorei; identical to SEQ ID NO: 3741

SEQ ID NO: 40132 - DNA, 50 bp, Bacteroides dorei; identical to SEQ ID NO: 11702
  source 1..50: mol_type = genomic DNA

SEQ ID NO: 40133 - DNA, 40 bp, Bacteroides dorei; identical to SEQ ID NO: 27433
  source 1..40: mol_type = genomic DNA

SEQ ID NO: 40134 - DNA, 50 bp, Bacteroides dorei; identical to SEQ ID NO: 11704
  source 1..50: mol_type = genomic DNA

SEQ ID NO: 40135 - DNA, 40 bp, Bacteroides dorei; identical to SEQ ID NO: 11675
  source 1..40: mol_type = genomic DNA

SEQ ID NO: 40136 - protein, 623 aa, Phocaeicola dorei
MKAAFLIRCSTKNQDLDRQTRDLTRLAKSLGYEYDIENLVFGEKITVKDDVTIKNRESIDKLLRAAKEQKFDVVLVAEVSRMSRDPASGRVYVRQLINMSIPVYFRDIDTWTINPDNGKRVRDAEQVIGAAFDAAWKYLRSLKTQVASGRRNELDNNQISVGQPFFGYTRYGGKDKSKKNCWIVDEVAAEVVVFVFNEYIKDGSTLKSTALATTAKYGELLGKKFSVGSIEHILTYESYHTGIKKISLTDPDTEEIEVFDVKVPILVDTELFEKATAKRKNNRVKSEPYPKQTTYILSKLLKCPYCGYTMTPRTKGNDSKGKTTNERYRIINGRKALSWLCMSGINNATSCSNRISVANEKAEPIIWELVKKELIVFANLNNEERELKVEELTEKISHLASNIDNYNTHKSSLQKQLSKAYTVATMADESVLEMAMTEFNKTARTIRKEMSDCDSAIEQIKGEIENLANLKIFYSQPNLPSDIIEKAETDEAEKRKLVKELINKIVPYKITTFKKRHRDKGLVTLNFGVVLLEVYTVNGIYYVFYNANDRGDIRQAYYISGVFAKFQNSINKFDAYKEGEYFVISNADMVMETKEIDELITVNQMVEIAINNGWVLSYSYKQK

SEQ ID NO: 40137 - DNA, 50 bp, Phocaeicola dorei; identical to SEQ ID NO: 3742
  source 1..50: mol_type = genomic DNA

SEQ ID NO: 40138 - DNA, 40 bp, Phocaeicola dorei; identical to SEQ ID NO: 27433
  source 1..40: mol_type = genomic DNA

SEQ ID NO: 40139 - DNA, 50 bp, Phocaeicola dorei; identical to SEQ ID NO: 11684
  source 1..50: mol_type = genomic DNA

SEQ ID NO: 40140 - DNA, 40 bp, Phocaeicola dorei; identical to SEQ ID NO: 11675
  source 1..40: mol_type = genomic DNA

SEQ ID NO: 40141 - protein, 623 aa, Phocaeicola dorei; identical to SEQ ID NO: 3741

SEQ ID NO: 40142 - DNA, 50 bp, Phocaeicola dorei; identical to SEQ ID NO: 3742
  source 1..50: mol_type = genomic DNA

SEQ ID NO: 40143 - DNA, 40 bp, Phocaeicola dorei; identical to SEQ ID NO: 27433
  source 1..40: mol_type = genomic DNA

SEQ ID NO: 40144 - DNA, 50 bp, Phocaeicola dorei; identical to SEQ ID NO: 11684
  source 1..50: mol_type = genomic DNA

SEQ ID NO: 40145 - DNA, 40 bp, Phocaeicola dorei; identical to SEQ ID NO: 11675
  source 1..40: mol_type = genomic DNA

SEQ ID NO: 40146 - protein, 678 aa, Vibrio splendidus
MSSNLSNTTTPKIYSYTRVSTLEQKKGSGVAMQINDKVLEALALEHQLPLAEETYQDLGKSAFHGQHLKHELGTFLQAIKDGVIAKGSIIVVYSLDRLSRLEIGHAKQTYLDLTNNGVSVYSIVDNHLYRAHNAADDIIATITFERAHNESKNKSSRVIDASKQGLKRWKETGEPQSSLGRSPFWIDQPTNEFNINAAGVKKAIEMKIAGYGDLKIKKYLDNHFEYKPTRRKGKVKQSNTWDYIAISKLWRRRSLTGENSYTIEGVTHVMENYYPALIDDDTFRKLQVKNTKKQGRDTSSGKIPLLKSLARCGTCGGAMVFVDKGESRINYVCNLAMKGEHAREVYNVNMLDLLTLEVCKDAYLSESSKSHNIHAEQQKLKLETELFEQQESRDNLRDYYKATPSKTLLDLIIDSESKIIDLEAKLDAINTNTVELNADELSNLPEVYTESIRTDYLNPTRHEIRNNLRRFISSITLNRSEEPCPDAKTKVANCIDITWHFKNAQKRRLAMLPYQFTKAVEGDKTLYLPYAYMYGSKSNIKVEDGDQFLSNIFNKLHSLDLTRFLYPSRGRYQWSNLNLECGKTYWAPLDRAVFIEQGMEHIAFTERGTPNEAGHAANYLSLMFNYPSSDGGAYDYPDSKFIELACKFGFVEEHDFSLFLQDNQFNQELYSSLDFLMS

SEQ ID NO: 40147 - DNA, 50 bp, Vibrio splendidus
  source 1..50: mol_type = genomic DNA
caaagaattttgttggcgttatagttcgctaataaaaaacagtttccttc

SEQ ID NO: 40148 - DNA, 40 bp, Vibrio splendidus
  source 1..40: mol_type = genomic DNA
tgaagaatatttgctgtggttcgacaaaaaagggttcccc

SEQ ID NO: 40149 - DNA, 50 bp, Vibrio splendidus
  source 1..50: mol_type = genomic DNA
caaagaattttgttggcgttatagcccgctaataaaaaacagtttccttc

SEQ ID NO: 40150 - DNA, 40 bp, Vibrio splendidus
  source 1..40: mol_type = genomic DNA
tttagagtgattactgtggcctcacaaaagaggcttcccc

SEQ ID NO: 40151 - protein, 678 aa, Vibrio splendidus
MSSNLSNTTTPKIYSYTRVSTLEQKKGSGVAMQINDKVLEALALEHQLPLAEETYQDLGKSAFHGQHLKHELGTFLQAIKDGVIAKGSIIVVYSLDRLSRLEIGHAKQTYLDLTNNGVSVYSIVDNHLYRAHNAADDIIATITFERAHNESKNKSSRVIDASKQGLKRWKETGEPQSSLGRSPFWIDQPTNEFNINAAGVKKAIEMKIAGYGDLKIKKYLDNHFEYKPTRRKGKVKQSNTWDYIAISKLWRRRSLTGENSYTIEGVTHVMENYYPALIDDDTFRKLQVKNTKKQGRDTSSGKIPLLKSLARCGTCGGAMVFVDKGESRINYVCNLAMKGEHAREVYNVNMLDLLTLEVCKDAYLSESSKSHNIHAEQQKLKLETELFEQQESRDNLRDYYKATPSKTLLDLIIDSESKIIDLEAKLDAINTNTVELNADELSNLPEVYTESVRTDYLNPTRHEIRNNLRRFISSITLNRSEEPCPDAKTKVANCIDITWHFKNAQKRRLAMLPYQFTKAVEGDKTLYLPYAYMYGSKSNIKVEDGDQFLSNIFNKLHSLDLTRFLYPSRGRYQWSNLNLECGKTYWAPLDRAVFIEQGMEHIAFTERGTPNEAGHAANYLSLMFNYPSSDGGAYDYPDSKFIELACKFGFVEEHDFSLFLQDNQFNQELYSSLDFLMS

SEQ ID NO: 40152 - DNA, 50 bp, Vibrio splendidus; identical to SEQ ID NO: 40147
  source 1..50: mol_type = genomic DNA

SEQ ID NO: 40153 - DNA, 40 bp, Vibrio splendidus; identical to SEQ ID NO: 40148
  source 1..40: mol_type = genomic DNA

SEQ ID NO: 40154 - DNA, 50 bp, Vibrio splendidus; identical to SEQ ID NO: 40149
  source 1..50: mol_type = genomic DNA

SEQ ID NO: 40155 - DNA, 40 bp, Vibrio splendidus; identical to SEQ ID NO: 40150
  source 1..40: mol_type = genomic DNA

SEQ ID NO: 40156 - protein, 506 aa, Escherichia coli
MRSVITYLRYSSAIQGAEGADSTRRQNDLFKQWLKKNSDAQVVASFSDEGLSGYKGKHLTGQFGDMLARIESGEFPEGTILLVESIDRIGRLEHLETEALMNRILGNGIEIHTLQDGLIYTKDALADDLGISIIQRVKAYIAHQESKQKSFRVSQKWEQRAKLALAGEQRLTKMVPGWIDPDTFKLNEHAETVRLIFKLLLDGESLHNIARHLQSNGIKSFSRRKDANGFSVHSVRTILRSETTIGTLPASQRNDRPAIPNYYEAAIDAATFNKAQEVLDKNRKGRTPASDNPLTINIFKGLFRCQCGASVHPTGTKNKYAGVYRCNNHLDGRCDVPPLKRKPFDKWVLENFLGMIDVGNDGESERKIAALQHEVEIVTARIKKATALLLEMDDIDELKIQLKELNQKRTELQTTIDSMRRKASLTDKELPQLKDIDLTTKAGRVECQLILSKHLKGLTLGKDSVTVTLQNDTEITIPTNPLPLNDGSPIFEIADKELLDIDAYQL

SEQ ID NO: 40157 - DNA, 50 bp, Escherichia coli; identical to SEQ ID NO: 36192
  source 1..50: mol_type = genomic DNA

SEQ ID NO: 40158 - DNA, 40 bp, Escherichia coli; identical to SEQ ID NO: 20043
  source 1..40: mol_type = genomic DNA

SEQ ID NO: 40159 - DNA, 50 bp, Escherichia coli
  source 1..50: mol_type = genomic DNA
aaaccgaatagactttattcaaggtgcattgtattgtagctattcggcat

SEQ ID NO: 40160 - DNA, 40 bp, Escherichia coli
  source 1..40: mol_type = genomic DNA
ttgtggatgaaaagcacggtgcattgtagtcataatcact

SEQ ID NO: 40161 - protein, 506 aa, Escherichia coli
MRSVITYLRFSSAIQGAEGADSTRRQNDLFKQWLKKNSDAQIVASFSDEGLSGYKGKHLTGQFGDMLARIESGEFPEGTILLVEAIDRIGRLEHLETEALMNRILGIGIEIHTLQDGLIYTKDALADDLGISIIQRVKAYIAHQESKQKSFRVSQRWGQRAKLALAGKQRLTEMVPGWIDPETFKLNEHAETVRLIFKLLLDGESLHNIARHLQSNGIKSFSRRKDANGFSVHSVRTILRSETTIGTLPASQRNDRPAIPNYYEGVVDIPTFNKAQEILDKNRKGRTPASDNPLTINIFKGLFRCQCGASVHPTGTKNKYAGVYRCNNHLDGRCDVQPLKRKPFDRWMIDNFLGMIDVGNDGESERKIAALQHEVEIVTSRIKKATALLLEMDDITELKTQVKELNQRRTDIQTTIDTLKRKTSLSDKGLPQLKDIDLMTKAGRVECQLILSKHLKGLTLGKGLVTITLQNDTEITIPTNPLPLNDGSPIFEIADKELLDIDAYQL

SEQ ID NO: 40162 - DNA, 50 bp, Escherichia coli; identical to SEQ ID NO: 36192
  source 1..50: mol_type = genomic DNA

SEQ ID NO: 40163 - DNA, 40 bp, Escherichia coli; identical to SEQ ID NO: 20043
  source 1..40: mol_type = genomic DNA

SEQ ID NO: 40164 - DNA, 50 bp, Escherichia coli; identical to SEQ ID NO: 40159
  source 1..50: mol_type = genomic DNA

SEQ ID NO: 40165 - DNA, 40 bp, Escherichia coli; identical to SEQ ID NO: 40160
  source 1..40: mol_type = genomic DNA

SEQ ID NO: 40166 - protein, 506 aa, Escherichia coli; identical to SEQ ID NO: 30746

SEQ ID NO: 40167 - DNA, 50 bp, Escherichia coli
  source 1..50: mol_type = genomic DNA
aaaccgaatagacttcattcaagggtcattgtatcgtagctattcggcat

SEQ ID NO: 40168 - DNA, 40 bp, Escherichia coli; identical to SEQ ID NO: 20043
  source 1..40: mol_type = genomic DNA

SEQ ID NO: 40169 - DNA, 50 bp, Escherichia coli
  source 1..50: mol_type = genomic DNA
aaaccgaatagacttcattcaaggtgcattgtatcgtagctattcggcat

SEQ ID NO: 40170 - DNA, 40 bp, Escherichia coli; identical to SEQ ID NO: 40160
  source 1..40: mol_type = genomic DNA

SEQ ID NO: 40171 - protein, 523 aa, Escherichia coli
MRQVITYLRFSSKPQERGDSIRRQKGLFERWLKDNPDAKVVDEFSDEGASAYHGHHLKGDFGRMLQNIQDGRYLSGQTVLLVESETRLNRQKARNTENLVDLITGKGVDVICLESGKIYTSTNIDDLDTSIQLKIAAHIAHQQSKEKSIKVSAAWEHRAQLALEGKQQLTKNVPGWIDPDTRKLNEHSSTVVTIFDLLLSGESLHNIARYLQANNIKSFSRREKANGFSVHSVRTILRSESTVGTLAASKRNDRPAIPNYYEPAIDVATFNKAQEILSKNRVGRAPASDNPITINLFKGIIRCQCGASVHPTGVKATYQGVYRCNNVPDGRCNVPTIKRKPFDKWMLDNIIGFLERSDGNNTDKRKAEIEYQISLVTSKLKKATTLLLELDDVTELKEQVKELNIQRSNLQSELDELNQRETLSDKPLHHLSEIDLTTKAGRVEAQLILSKFVQSIELQREMIIITLRNGTVIGKSRDLSPVLSRDLMKQVVSSPSPTDIDMFSVITSDEEFRKSGKQVTKRS

SEQ ID NO: 40172 - DNA, 50 bp, Escherichia coli
  source 1..50: mol_type = genomic DNA
aacccgaatagcctatactcaagggtcattgtatttgagctattcggcga

SEQ ID NO: 40173 - DNA, 40 bp, Escherichia coli; identical to SEQ ID NO: 20043
  source 1..40: mol_type = genomic DNA

SEQ ID NO: 40174 - DNA, 50 bp, Escherichia coli
  source 1..50: mol_type = genomic DNA
aacccgaatagcctatactcaaggtgcattgtatttgagctattcggcga

SEQ ID NO: 40175 - DNA, 40 bp, Escherichia coli; identical to SEQ ID NO: 40160
  source 1..40: mol_type = genomic DNA

SEQ ID NO: 40176 - protein, 506 aa, Escherichia coli; identical to SEQ ID NO: 36196

SEQ ID NO: 40177 - DNA, 50 bp, Escherichia coli; identical to SEQ ID NO: 36192
  source 1..50: mol_type = genomic DNA

SEQ ID NO: 40178 - DNA, 40 bp, Escherichia coli; identical to SEQ ID NO: 20043
  source 1..40: mol_type = genomic DNA

SEQ ID NO: 40179 - DNA, 50 bp, Escherichia coli; identical to SEQ ID NO: 40159
  source 1..50: mol_type = genomic DNA

SEQ ID NO: 40180 - DNA, 40 bp, Escherichia coli; identical to SEQ ID NO: 40160
  source 1..40: mol_type = genomic DNA

SEQ ID NO: 40181 - protein, 506 aa, Escherichia coli
MRSVITYLRYSSAIQGAEGADSTRRQNDLFKQWLKKNGDAQIVASFSDEGLSGYKGKHLTGQFGDMLARIEAGEFPEGTILLVESIDRIGRVEHLETEALMNRILGNGIEIHTLQDGLIYTKDALADDLGISIIQRVKAYIAHQESKQKSFRVSQKWGQRAKLALAGEQRLTKMVPGWIDPETFKLNEHAETVRLIFKLLLDGESLHNIARHLQSNGIKSFSRRKDANGFSVHSVRTILRSETTIGTLPASQRNDRPAIPNYYEGVVDIPTFNKAQEILDKNRKGRTPASDNPLTINIFKGLFRCQCGASVHPTGTKNKYAGVYRCNNHLDGRCDVQPLKRKPFDKWVLENFLGMIDVGNDGESERKIAALQHEVEIVTARIKKATALLLEMDDITELKTQVKGLNQKRTEIQTTIDTLKRKTSLSDKGLPQLKDIDLMTKAGRVECQLILSKHLKGLTLGKDSVTVTLQNDTEITIPTNPLPLNDGSPIFEIADKELLDIDAYQL

SEQ ID NO: 40182 - DNA, 50 bp, Escherichia coli; identical to SEQ ID NO: 36192
  source 1..50: mol_type = genomic DNA

SEQ ID NO: 40183 - DNA, 40 bp, Escherichia coli; identical to SEQ ID NO: 20043
  source 1..40: mol_type = genomic DNA

SEQ ID NO: 40184 - DNA, 50 bp, Escherichia coli; identical to SEQ ID NO: 40159
  source 1..50: mol_type = genomic DNA

SEQ ID NO: 40185 - DNA, 40 bp, Escherichia coli; identical to SEQ ID NO: 40160
  source 1..40: mol_type = genomic DNA

SEQ ID NO: 40186 - protein, 506 aa, Escherichia coli
MRTAITYLRYSSAIQGVEGADSTRRQNDLFKQWLKKNSDAQIVASFSDEGLSGYKGKHLTGQFGDMLARIESGEFPEGTILLVESIDRIGRLEHLETEALMNRILGNGIEIHTLQDGLIYTKDALADDLGISIIQRVKAYVAHQESKQKSFRVSQKWEQRAKLALAGEQRLTKMVPGWIDPETFKLNEHAETVRLIFKLLLDGESLHNIARHLQSNGIKSFSRRKDANGFSVHSVRTILRSETTIGTLPASQRNDRPAIPNYYESAIDALTFSKAQEILDKNRKGRTPASDNPLSLNLFKGLFRCQCGASVHPTGTKNKYAGVYRCNNHLDGRCDVQPLKRKSFDRWMIDNLLSMITVGDDGESERKIASLQHEVEVVTARIKKATALLLEMDDITELKAQAKELSRKRTELQTTIDSMRRKASLTDKELPQLRGIDLTTKAGRVECQLILSKHLESLTLGRGQVTVKLSNGTEIIVPTDPLPLTDGAAIFEIAEKNLLNIDTFQL

SEQ ID NO: 40187 - DNA, 50 bp, Escherichia coli
  source 1..50: mol_type = genomic DNA
aaaccgaataggctttattcaagggtcattgtattgtagctattcggcat

SEQ ID NO: 40188 - DNA, 40 bp, Escherichia coli; identical to SEQ ID NO: 20043
  source 1..40: mol_type = genomic DNA

SEQ ID NO: 40189 - DNA, 50 bp, Escherichia coli
  source 1..50: mol_type = genomic DNA
aaaccgaataggctttattcaaggtgcattgtattgtagctattcggcat

SEQ ID NO: 40190 - DNA, 40 bp, Escherichia coli; identical to SEQ ID NO: 40160
  source 1..40: mol_type = genomic DNA

SEQ ID NO: 40191 - protein, 506 aa, Escherichia coli
MRTAITYLRYSSAIQGVEGADSTRRQNDLFKQWLKKNSDAQIVASFSDEGLSGYKGKHLTGQFGDMLARIESGEFPEGTILLVESIDRIGRLEHLETEALMNRILGNGIEIHTLQDGLIYTKDALADDLGISIIQRVKAYIAHQESKQKSFRVSQKWEQRAKLALAGEQRLTKMVPGWIDPETFKLNEHAETVRLIFKLLLDGESLHNIARHLQSNGIKSFSRRKDANGFSVHSVRTILRSETTIGTLPASQRNDRPAIPNYYESAIDALTFSKAQEILDKNRKGRTPASDNPLSLNLFKGLFRCQCGASVHPTGTKNKYAGVYRCNNHLDGRCDVQPLKRKSFDRWMIDNLLSMITVGDDGESERKIASLQHEVEVVTARIKKATALLLEMDDITELKAQAKELSRKRTELQTTIDSMRRKASLTDKELPQLRGIDLTTKAGRVECQLILSKHLESLTLGRGQVTVKLSNGTEIIVPTDPLPLTDGAAIFEIAEKNLLNIDTFQL

SEQ ID NO: 40192 - DNA, 50 bp, Escherichia coli; identical to SEQ ID NO: 36192
  source 1..50: mol_type = genomic DNA

SEQ ID NO: 40193 - DNA, 40 bp, Escherichia coli; identical to SEQ ID NO: 20043
  source 1..40: mol_type = genomic DNA

SEQ ID NO: 40194 - DNA, 50 bp, Escherichia coli; identical to SEQ ID NO: 40159
  source 1..50: mol_type = genomic DNA

SEQ ID NO: 40195 - DNA, 40 bp, Escherichia coli; identical to SEQ ID NO: 40160
  source 1..40: mol_type = genomic DNA

SEQ ID NO: 40196 - protein, 506 aa, Escherichia coli
MRSVITYLRFSSAIQGAEGADSTRRQNDLFKQWLKKNSDAQIVASFSDEGLSGYKGKHLTGQFGDMLARIESGEFPEGTILLVEAIDRIGRLEHLETEALMNRILGNGIEIHTLQDGLIYTKDALADDLGISIIQRVKAYIAHQESKQKSFRVSQRWGQRAKLALAGKQRLTKMVPGWIDPETFKLNEHAETVRLIFKLLLDGESLHNIARHLQSNGIKSFSRRKDANGFSVHSVRTILRSETTIGTLPASQRNDRPAIPNYYEGVVDIPTFNKAQEILDKNRKGRTPASDNPLTINIFKGLFRCQCGASVHPTGTKNKYAGVYRCNNHLDGRCDVQPLKRKPFDRWMIDNFLGMIDVGNDGESERKIAALQHEVEIVTSRIKKATALLLEMDDITELKTQVKELNQRRTDIQTTIDTLKRKTSLSDKGLPQLKDIDLMTKAGRVECQLILSKHLKGLTLGKGLVTITLQNDTEITIPTNPLPLNDGSPIFEIADKELLDIDAYQL

SEQ ID NO: 40197 - DNA, 50 bp, Escherichia coli; identical to SEQ ID NO: 36192
  source 1..50: mol_type = genomic DNA

SEQ ID NO: 40198 - DNA, 40 bp, Escherichia coli; identical to SEQ ID NO: 20043
  source 1..40: mol_type = genomic DNA

SEQ ID NO: 40199 - DNA, 50 bp, Escherichia coli; identical to SEQ ID NO: 40159
  source 1..50: mol_type = genomic DNA

SEQ ID NO: 40200 - DNA, 40 bp, Escherichia coli; identical to SEQ ID NO: 40160
  source 1..40: mol_type = genomic DNA

SEQ ID NO: 40201 - protein, 506 aa, Escherichia coli; identical to SEQ ID NO: 29881

SEQ ID NO: 40202 - DNA, 50 bp, Escherichia coli; identical to SEQ ID NO: 36192
  source 1..50: mol_type = genomic DNA

SEQ ID NO: 40203 - DNA, 40 bp, Escherichia coli; identical to SEQ ID NO: 20043
  source 1..40: mol_type = genomic DNA

SEQ ID NO: 40204 - DNA, 50 bp, Escherichia coli; identical to SEQ ID NO: 40159
  source 1..50: mol_type = genomic DNA

SEQ ID NO: 40205 - DNA, 40 bp, Escherichia coli; identical to SEQ ID NO: 40160
  source 1..40: mol_type = genomic DNA

SEQ ID NO: 40206 - protein, 506 aa, Escherichia coli
MRSVITYLRYSSAIQGAEGADSTRRQNDQFKQWLKKNSDAQVVASFSDEGLSGYKGKHLTGQFGDMLARIESGEFPEGTILLVESIDRIGRLEHLETEALMNRILGNGLEIHTLQDGLIYTKDALADDLGISIIQRVKAYIAHQESKQKSFRVSQKWEQRAKLALAGEQRLTRNVPGWIDPDTFKCNEHAETVRLIFKLLLDGESLHNIARHLQSNDIKSFSRRKDANGFSVHSVRTVLRSESVIGTLPASQRNDRPAIPNYYEAAIDAATFNKAQEILDKNRKGRTPASDNPLTINIFKGLFRCQCGASVHPTGTKNKYAGVYRCNNHLDGRCDVPPLKRKPFDKWMIDNFLGMIDVGNDGEAEGKIASLQHEVEIVTTRIKKATALLLEMDDITELKTQVKELNQKRTELQTTIDSMRRKTSLSDKGLPQLKDIDLMTKEGRVECQLILSKHLKGLTLGKDSVTVTLQNDTEITIPTNPLPLNDGSPIFEIADKELLDIDAYQL

SEQ ID NO: 40207 - DNA, 50 bp, Escherichia coli; identical to SEQ ID NO: 36192
  source 1..50: mol_type = genomic DNA

SEQ ID NO: 40208 - DNA, 40 bp, Escherichia coli; identical to SEQ ID NO: 20043
  source 1..40: mol_type = genomic DNA

SEQ ID NO: 40209 - DNA, 50 bp, Escherichia coli; identical to SEQ ID NO: 40159
  source 1..50: mol_type = genomic DNA

SEQ ID NO: 40210 - DNA, 40 bp, Escherichia coli; identical to SEQ ID NO: 40160
  source 1..40: mol_type = genomic DNA

SEQ ID NO: 40211 - protein, 426 aa, Escherichia coli
MLVESIDRIGRLEHLETEALMNRILGNGLEIHTLQDGLIYTKDALADDLGISIIQRVKAYIAHQESKQKSFRVSQKWEQRAKLALAGEQRLTKMVPGWIDPDTFKLNEHAETVRLIFKLLLSGESLHNIARHLQSNGIKSFSRRKDANGFSVHSVRTILRSETTIGTLPASQRNDRPAIPNYYEAAIDASTFNKAQEILGKNRIGRTPASDNPLTINIFKGLFRCQCGASVHPTGTKNKYQGVYRCNNHLDGRCDVPPLKRKPFDKWMIDNFLGMIDVGNDGEAEGKIASLQHEVEIVTTRIKKATALLLEMDDIDELKIQLKELNQKRTELQTTIDNMRRKASLTDKELPQLKDIDLTTKAGRVECQLILSKHLKGLTLGKDSVTVTLQNDTEITIPTNPLPLNDGSPIFEIADKELLDIDAYQL

SEQ ID NO: 40212 - DNA, 50 bp, Escherichia coli; identical to SEQ ID NO: 36192
  source 1..50: mol_type = genomic DNA

SEQ ID NO: 40213 - DNA, 40 bp, Escherichia coli; identical to SEQ ID NO: 20043
  source 1..40: mol_type = genomic DNA

SEQ ID NO: 40214 - DNA, 50 bp, Escherichia coli; identical to SEQ ID NO: 40159
  source 1..50: mol_type = genomic DNA

SEQ ID NO: 40215 - DNA, 40 bp, Escherichia coli; identical to SEQ ID NO: 40160
  source 1..40: mol_type = genomic DNA

SEQ ID NO: 40216 - protein, 506 aa, Escherichia coli
MRSVITYLRYSSAIQGAEGADSTRRQNDLFKQWLKKNGDAQIVASFSDEGLSGYKGKHLTGQFGDMLARIEAGEFPEGTILLVESIDRIGRLEHLETEALMNRILGNGIEIHTLQDGLIYTKDALADDLGISIIQRVKAYIAHQESKQKSFRVSQKWGQRAKLALAGEQRLTKMVPGWIDPETFKLNEHAETVRLIFKLLLDGESLHNIARHLQSNGIKSFSRRKDANGFSVHSVRTILRSETTIGTLPASQRNDRPAIPNYYEGVVDIPTFNKAQEILDKNRKGRTPASDNPLTINIFKGLFRCQCGASVHPTGTKNKYAGVYRCNNHLDGRCDVQPLKRKPFDKWVLENFLGMIDVGNDGESERKIAALQHEVEIVTARIKKATALLLEMDDITELKTQVKGLNQKRTEIQTTIDTLKRKTSLSDKGLPQLKDIDLMTKAGRVECQLILSKHLKGLTLGKDSVTVTLQNDTEITIPTNPLPLNDGSPIFEIADKELLDIDAYQL

SEQ ID NO: 40217 - DNA, 50 bp, Escherichia coli; identical to SEQ ID NO: 36192
  source 1..50: mol_type = genomic DNA

SEQ ID NO: 40218 - DNA, 40 bp, Escherichia coli; identical to SEQ ID NO: 20043
  source 1..40: mol_type = genomic DNA

SEQ ID NO: 40219 - DNA, 50 bp, Escherichia coli; identical to SEQ ID NO: 40159
  source 1..50: mol_type = genomic DNA

SEQ ID NO: 40220 - DNA, 40 bp, Escherichia coli; identical to SEQ ID NO: 40160
  source 1..40: mol_type = genomic DNA

SEQ ID NO: 40221 - protein, 506 aa, Escherichia coli
MRSVITYLRYSSAIQGAEGADSTRRQNDLFKQWLKKNSDAQVVASFSDEGLSGYKGKHLTGQFGDMLARIESGEFPEGTILLVESIDRIGRLEHLETEALMNRILGNGLEIHTLQDGLIYTKDALADDLGISIIQRVKAYIAHQESKQKSFRVSQKWEQRAKLALAGEQRLTKMVPGWIDPDTFKLNEHAETVRLIFKLLLSGESLHNIARHLQANNISSFSRRKDANGFSVHSVRTILRSETTIGTLPASQRNDRPAIPNYYEPAIDASTFNKAQEILDKNRKGRTPASDNPLTINIFKGLFRCQCGASVHPTGTKNKYAGVYRCNSHLDGLCGVPPLKRKPFDKWMIDNFLGMIDVGNDGEAEKEIASLQHEVETVTARIKKATALLLEMDDIDELKIQLKELNQKRTELQTTIDSMRRKASLTDKELPQLKDIDLTTKAGRVECQLILSKHLESLTLGRGQVTVKLSNGTEIIVPTDPLPLTDGAAIFEIAEKNLLNIDTFQL

SEQ ID NO: 40222 - DNA, 50 bp, Escherichia coli
  source 1..50: mol_type = genomic DNA
aaaccgaatagactttattcaatggtcattgtattgtagctattcggcat

SEQ ID NO: 40223 - DNA, 40 bp, Escherichia coli; identical to SEQ ID NO: 20043
  source 1..40: mol_type = genomic DNA

SEQ ID NO: 40224 - DNA, 50 bp, Escherichia coli
  source 1..50: mol_type = genomic DNA
aaaccgaatagactttattcaatgtgcattgtattgtagctattcggcat

SEQ ID NO: 40225 - DNA, 40 bp, Escherichia coli; identical to SEQ ID NO: 40160
  source 1..40: mol_type = genomic DNA

SEQ ID NO: 40226 - protein, 506 aa, Escherichia coli; identical to SEQ ID NO: 23231

SEQ ID NO: 40227 - DNA, 50 bp, Escherichia coli; identical to SEQ ID NO: 40222
  source 1..50: mol_type = genomic DNA

SEQ ID NO: 40228 - DNA, 40 bp, Escherichia coli; identical to SEQ ID NO: 20043
  source 1..40: mol_type = genomic DNA

SEQ ID NO: 40229 - DNA, 50 bp, Escherichia coli; identical to SEQ ID NO: 40224
  source 1..50: mol_type = genomic DNA

SEQ ID NO: 40230 - DNA, 40 bp, Escherichia coli; identical to SEQ ID NO: 40160
  source 1..40: mol_type = genomic DNA

SEQ ID NO: 40231 - protein, 506 aa, Escherichia coli
MRSVITYLRFSSAIQGAEGADSTRRQNDLFKQWLKKNSDAQIVASFSDEGLSGYKGKHLTGQFGDMLARIESGEFPEGTILLVEAIDRIGRLEHLETEALMNRILGNGIEIHTLQDGLIYTKDALADDLGISIIQRVKAYIAHQESKQKSFRVSQRWGQRAKLALAGKQRLTKMVPGWIDPETFKLNEHAETVRLIFKLLLDGESLHNIARHLQSNGIKSFSRRKDANGFSVHSVRTILRSETTIGTLPASQRNDRPAIPNYYEGVVDIPTFNKAQEILDKNRKGRTPASDNPLTINIFKGLFRCQCGASVHPTGTKNKYAGVYRCNNHLDGRCDVQPLKRKPFDRWMIDNFLGMIDVGNDGESERKIAALQHEVEIVTARIKKATALLLEMDDITELKTQVKELNQRRTDIQTTIDTLKRKTSLSDKGLPQLKDIDLMTKAGRVECQLILSKHLKGLTLGKGSVTITLQNDTEITIPTNPLPLNDGTSIFEIAEKELLEIDAYQL

SEQ ID NO: 40232 - DNA, 50 bp, Escherichia coli; identical to SEQ ID NO: 40222
  source 1..50: mol_type = genomic DNA

SEQ ID NO: 40233 - DNA, 40 bp, Escherichia coli; identical to SEQ ID NO: 20043
  source 1..40: mol_type = genomic DNA

SEQ ID NO: 40234 - DNA, 50 bp, Escherichia coli; identical to SEQ ID NO: 40224
  source 1..50: mol_type = genomic DNA

SEQ ID NO: 40235 - DNA, 40 bp, Escherichia coli; identical to SEQ ID NO: 40160
  source 1..40: mol_type = genomic DNA

SEQ ID NO: 40236 - protein, 506 aa, Escherichia coli; identical to SEQ ID NO: 32376

SEQ ID NO: 40237 - DNA, 50 bp, Escherichia coli; identical to SEQ ID NO: 40222
  source 1..50: mol_type = genomic DNA

SEQ ID NO: 40238 - DNA, 40 bp, Escherichia coli; identical to SEQ ID NO: 20043
  source 1..40: mol_type = genomic DNA

SEQ ID NO: 40239 - DNA, 50 bp, Escherichia coli; identical to SEQ ID NO: 40224
  source 1..50: mol_type = genomic DNA

SEQ ID NO: 40240 - DNA, 40 bp, Escherichia coli; identical to SEQ ID NO: 40160
  source 1..40: mol_type = genomic DNA

SEQ ID NO: 40241 - protein, 506 aa, Escherichia coli
MRSVITYLRYSSAIQGAEGADSTRRQNDLFKQWLKKNGDAQIVASFSDEGLSGYKGKHLTGQFGDMLARIEAGEFPEGTILLVESIDRIGRLEHLETEALMNRILGNGIEIHTLQDGLIYTKDALADDLGISIIQRVKAYIAHQESKQKSFRVSQKWGHRAKLALAGEQRLTKMVPGWIDPETLKLNEHAETVRLIFKLLLDGESLHNIARHLQSNGIRSFSRRKDANGFSVHSVRTILRSETTIGTLPASQRNDRPAIPNYYEAAIDASTFNKAQEILTKNRKGRTPASDNPLSLNLFKGLFKCRCGASVHPTGTKNKYQGVYRCNNHLDGRCDVPPLKRKPFDRWMIDNFLGMIDMGNDGESERKIAALQHEVEIVTSRIKKATALLFEMDDITELKTQVKELNQKRTALQTTIDSMKRKALLTDKKLPQIRDVDLTTKAGRVECQLILSKHLESLTLDEGFVTVKLQNGTKIIIPTDPLPLNDGTSIFEIADKKLLDIDVYRL

SEQ ID NO: 40242 - DNA, 50 bp, Escherichia coli; identical to SEQ ID NO: 40222
  source 1..50: mol_type = genomic DNA

SEQ ID NO: 40243 - DNA, 40 bp, Escherichia coli; identical to SEQ ID NO: 20043
  source 1..40: mol_type = genomic DNA

SEQ ID NO: 40244 - DNA, 50 bp, Escherichia coli; identical to SEQ ID NO: 40224
  source 1..50: mol_type = genomic DNA

SEQ ID NO: 40245 - DNA, 40 bp, Escherichia coli; identical to SEQ ID NO: 40160
  source 1..40: mol_type = genomic DNA

SEQ ID NO: 40246 - protein, 506 aa, Escherichia coli
MRSVITYLRYSSAIQGAEGADSTRRQNDLFKQWLKKNSDAQVVASFSDEGLSGYKGKHLTGQFGDMLARIESGEFPEGTILLVESIDRIGRLEHLETEALMNRILGNGLEIHTLQDGLIYTKDALADDLGISIIQRVKAYIAHQESKQKSFRVSQKWEQRAKLALAGEQRLTKMVPGWIDPDTFKLNEHAETVRLIFKLLLSGESLHNIARHLQANNISSFSRRKDANGFSVHSVRTILRSETTIGTLPASQRNDRPAIPNYYEPAIDASTFNKAQEILDKNRKGRTPASDNPLTINIFKGLFRCQCGASVHPTGTKNKYAGVYRCNSYLDGRCGVPPLKRKPFDKWMIDNFLGMIDVGNDGEAEKEIASLQHEVETVTARIKKATALLLEMDDIDELKIQLKELNQKRTELQTTIDSMRRKASLTDKELPQLKDIDLTTKAGRVECQLILSKHLESLTLGRGQVTVKLSNGTEIIVPTDPLPLTDGAAIFEIAEKNLLNIDTFQL

SEQ ID NO: 40247 - DNA, 50 bp, Escherichia coli; identical to SEQ ID NO: 40222
  source 1..50: mol_type = genomic DNA

SEQ ID NO: 40248 - DNA, 40 bp, Escherichia coli; identical to SEQ ID NO: 20043
  source 1..40: mol_type = genomic DNA

SEQ ID NO: 40249 - DNA, 50 bp, Escherichia coli; identical to SEQ ID NO: 40224
  source 1..50: mol_type = genomic DNA

SEQ ID NO: 40250 - DNA, 40 bp, Escherichia coli; identical to SEQ ID NO: 40160
  source 1..40: mol_type = genomic DNA

SEQ ID NO: 40251 - protein, 506 aa, Escherichia coli
MRSVITYLRYSSAIQGAEGADSTRRQNDLFKQWLKKNSDAQVVASFSDEGLSGYKGKHLTGQFGDMLARIESGEFPEGTILLVESIDRIGRLEHLETEALMNRILGNGLEIHTLQDGLIYTKDALADDLGISIIQRVKAYIAHQESKQKSFRVSQKWEQRAKLALAGEQRLTKMVPGWIDPDTFKLNEHAETVRLIFKLLLSGESLHNIARHLQSNGIKSFSRRKDANGFSVHSVRTILRSETTIGTLPASQRNDRPAIPNYYEAAIDASTFNKAQEILGKNRIGRTPASDNPLTINIFKGLFRCQCGASVHPTGTKNKYQGVYRCNNHLDGRCDVPPLKRKPFDKWMIDNFLGMIDVGNDGEAEGKIASLQHEVEIVTTRIKKATALLLEMDDIDELKIQLKELNQKRTELQTTIDNMRRKASLTDKELPQLKDIDLTTKAGRVECQLILSKHLKGLTLGKDSVTVTLQSDTEITIPTNPLPLNDGSPIFEIADKELLDIDAYQL

SEQ ID NO: 40252 - DNA, 50 bp, Escherichia coli; identical to SEQ ID NO: 36192
  source 1..50: mol_type = genomic DNA

SEQ ID NO: 40253 - DNA, 40 bp, Escherichia coli; identical to SEQ ID NO: 20043
  source 1..40: mol_type = genomic DNA

SEQ ID NO: 40254 - DNA, 50 bp, Escherichia coli; identical to SEQ ID NO: 40159
  source 1..50: mol_type = genomic DNA

SEQ ID NO: 40255 - DNA, 40 bp, Escherichia coli; identical to SEQ ID NO: 40160
  source 1..40: mol_type = genomic DNA

SEQ ID NO: 40256 - protein, 506 aa, Escherichia coli; identical to SEQ ID NO: 23231

SEQ ID NO: 40257 - DNA, 50 bp, Escherichia coli; identical to SEQ ID NO: 36192
  source 1..50: mol_type = genomic DNA

SEQ ID NO: 40258 - DNA, 40 bp, Escherichia coli; identical to SEQ ID NO: 20043
  source 1..40: mol_type = genomic DNA

SEQ ID NO: 40259 - DNA, 50 bp, Escherichia coli; identical to SEQ ID NO: 40159
  source 1..50: mol_type = genomic DNA

SEQ ID NO: 40260 - DNA, 40 bp, Escherichia coli; identical to SEQ ID NO: 40160
  source 1..40: mol_type = genomic DNA

SEQ ID NO: 40261 - protein, 506 aa, Escherichia coli
MRSVITYLRYSSAIQGAEGADSTRRQNDLFKQWLKKNSDAQVVASFSDEGLSGYKGKHLTGQFGDMLARIESGEFPEGTILLVESIDRIGRLEHLETEALMNRILGNGLEIHTLQDGLIYTKDALADDLGISIIQRVKAYIAHQESKQKSFRVSQKWEQRAKLALAGKQRLTKMVPGWIDPDTFKLNEHAETVRLIFKLLLSGESLHNIARHLQANNISSFSRRKDANGFSVHSVRTILRSVTTIGTLPASQRNDRPAIPNYYEAAIDAATFNKAQEILDKNRKGRTPASDNPLTINIFKGLFRCQCGASVHPTGTKNKYAGVYRCNNHLDGRCDVPPLKRKPFDRWMIDNFLGMIDVGNDGESERKIAALQHEVEIVTSRIKKATALLLEMDDITELKTQVKELNQKRTALQTTIDNMRRKTSLTDKELPQLKDIDLTTKAGRVECQLILSKHLKGLTLGKDSVIVTLQNDTEITIPTNPLPLNDGTSIFEIAEKELLEIDAYQL

SEQ ID NO: 40262 - DNA, 50 bp, Escherichia coli; identical to SEQ ID NO: 36192
  source 1..50: mol_type = genomic DNA

SEQ ID NO: 40263 - DNA, 40 bp, Escherichia coli; identical to SEQ ID NO: 20043
  source 1..40: mol_type = genomic DNA

SEQ ID NO: 40264 - DNA, 50 bp, Escherichia coli; identical to SEQ ID NO: 40159
  source 1..50: mol_type = genomic DNA

SEQ ID NO: 40265 - DNA, 40 bp, Escherichia coli; identical to SEQ ID NO: 40160
  source 1..40: mol_type = genomic DNA

SEQ ID NO: 40266 - protein, 506 aa, Escherichia coli
MRSVITYLRYSSAIQGAEGADSTRRQNDLFKQWLKKNSDAQVVASFSDEGLSGYKGKHLTGQFGDMLARIESGEFPEGTILLVESIDRIGRLEHLETEALMNRILGNGLEIHTLQDGLIYTKDALADDLGISIIQRVKAYIAHQESKQKSFRVSQKWEQRAKLALAGEQRLTKMVPGWIDPDTFKLNEHAETVRLIFKLLLSGESLHNIARHLQSNGIKSFSRRKDANGFSVHSVRTILRSETTIGTLPASQRNDRPAIPNYYEAAIDASTFNKAQEILGKNRIGRTPASDNPLTINIFKGLFRCQCGASVHPTGTKNKYQGVYRCNNHLDGRCDVPPLKRKPFDKWMIDNFLGMIDVGNDGEAEGKIASLQHEVEIVTTRIKKATALLLEMDDIDELKIQLKELNQKRTELQTTIDNMRRKASLTDKELPQLKDIDLTTKAGRVECQLILSKHLKGLTLGKDSVTVTLQNDTEITIPTNPLPLNDGTSIFEIAEKELLEIDAYQL

SEQ ID NO: 40267 - DNA, 50 bp, Escherichia coli; identical to SEQ ID NO: 36192
  source 1..50: mol_type = genomic DNA

SEQ ID NO: 40268 - DNA, 40 bp, Escherichia coli; identical to SEQ ID NO: 20043
  source 1..40: mol_type = genomic DNA

SEQ ID NO: 40269 - DNA, 50 bp, Escherichia coli; identical to SEQ ID NO: 40159
  source 1..50: mol_type = genomic DNA

SEQ ID NO: 40270 - DNA, 40 bp, Escherichia coli; identical to SEQ ID NO: 40160
  source 1..40: mol_type = genomic DNA

SEQ ID NO: 40271 - protein, 523 aa, Escherichia coli
MRQVITYLRFSSKPQERGDSIRRQKGLFERWLKDNPDAKVVDEYSDEGASAYHGHHLKGDFGRMLQKIQDGKYLSGQTVLLVESETRLNRQKARNTENLVDLITGKGVDVICLESGKIYTSTNIDDLDTSIQLKIAAHIAHQQSKEKSIKVSAAWEHRAQLALEGKQQLTKNVPGWIDPDTRKLNEHSSTVVTIFDLLLSGESLHNIARYLQANNIKSFSRREKANGFSVHSVRTILRSESTVGTLAASKRNDRPAIPNYYEPAIDVATFNKAQEILSKNRVGRAPASDNPITINLFKGIIRCQCGASVHPTGVKATYQGVYRCNNVPDGRCNVPTIKRKPFDKWMLDNIIGFLERSDGNNTDKRKAEIEYQISLVTSKLKKAATLLLELDDVTELKEQVKELNIQRINMQSELDELNHRETLSDKPLHHLSEIDLTTKAGRVEAQLILSKFVQSIELQREMIIITLRNGAVIGKSRDLSPALSQDLMKQVVSSSSPRDIDMLSVITSDEEFRKSGKPVTKRS

SEQ ID NO: 40272 - DNA, 50 bp, Escherichia coli
  source 1..50: mol_type = genomic DNA
accccgaatagcctacattcaagggtcattgtatttgagctattcggcga

SEQ ID NO: 40273 - DNA, 40 bp, Escherichia coli; identical to SEQ ID NO: 20043
  source 1..40: mol_type = genomic DNA

SEQ ID NO: 40274 - DNA, 50 bp, Escherichia coli
  source 1..50: mol_type = genomic DNA
accccgaatagcctacattcaaggtgcattgtatttgagctattcggcga

SEQ ID NO: 40275 - DNA, 40 bp, Escherichia coli; identical to SEQ ID NO: 40160
  source 1..40: mol_type = genomic DNA

SEQ ID NO: 40276 - protein, 506 aa, Escherichia coli
MRSVITYLRYSSAIQGAEGADSTRRQNDLFKQWLKKNGDAQVVASFSDEGLSGYKGKHLTGQFGDMLARIESGEFPEGTVLLVESIDRIGRLEHLETEALMNRILGNGLEIHTLQDGLIYTKDALADDLGISIIQRVKAYIAHQESKQKSFRVSEKWKQRAKLALAGEQRLTKMVPGWIDPDTLKLNEHAETVRLIFKLLLSGESLHNIARHLQSNGIKSFSRRKDANGFSVHSVRTILRSETTIGTLPASQRNDRPAIPNYYEAAIDAATFNKAQEILDKNRKGRTPASDNPLTINIFKGLFRCQCGASVHPTGTKNKYAGVYRCNNHLDGRCDVPPLKRKPFDRWMIDNFLGMIDVGNDGEAEGKIASLQHEVEIVTARIKKATALLLEMDDITELKTQVKGLNQKRTELQTTIDNMRRKASLTDKELPQLKDIDLTTKAGRVECQLILSKHLKGLTLGKDSVIVTLQNDTEITIPTNPLPLNDGTSIFEIAEKELLEIDAYQL

SEQ ID NO: 40277 - DNA, 50 bp, Escherichia coli; identical to SEQ ID NO: 36192
  source 1..50: mol_type = genomic DNA

SEQ ID NO: 40278 - DNA, 40 bp, Escherichia coli; identical to SEQ ID NO: 20043
  source 1..40: mol_type = genomic DNA

SEQ ID NO: 40279 - DNA, 50 bp, Escherichia coli; identical to SEQ ID NO: 40159
  source 1..50: mol_type = genomic DNA

SEQ ID NO: 40280 - DNA, 40 bp, Escherichia coli; identical to SEQ ID NO: 40160
  source 1..40: mol_type = genomic DNA

SEQ ID NO: 40281 - protein, 506 aa, Escherichia coli
MRSVITYLRYSSAIQGAEGADSTRRQNDLFKQWLKKNSDAQVVASFSDEGLSGYKGKHLTGQFGDMLARIESGEFPEGTILLVESIDRIGRLEHLETEALMNRILGNGLEIHTLQDGLIYTKDALADDLGISIIQRVKAYIAHQESKQKSFRVSQKWGQRAKLALAGEQRLTKMVPGWIDPDTFKLNEHAETVRLIFKLLLSGESLHNIARHLQSNGIKSFSRRKDANGFSVHSVRTILRSETTIGTLPASQRNDRPAIPNYYEAAIDASTFNKAQEILGKNRIGRTPASDNPLTINIFKGLFRCQCGASVHPTGTKNKYQGVYRCNNHLDGRCDVPPLKRKPFDKWMIDNFLGMIDVGNDGEAEGKIASLQHEVEIVTTRIKKATALLLEMDDIDELKIQLKELNQKRTELQTTIDNMRRKASLTDKELPQLKDIDLTTKAGRVECQLILSKHLKGLTLGKDSVTVTLQNDTEITIPTNPLPLNDGSPIFEIADKELLDIDAYQL

SEQ ID NO: 40282 - DNA, 50 bp, Escherichia coli; identical to SEQ ID NO: 36192
  source 1..50: mol_type = genomic DNA

SEQ ID NO: 40283 - DNA, 40 bp, Escherichia coli; identical to SEQ ID NO: 20043
  source 1..40: mol_type = genomic DNA

SEQ ID NO: 40284 - DNA, 50 bp, Escherichia coli; identical to SEQ ID NO: 40159
  source 1..50: mol_type = genomic DNA

SEQ ID NO: 40285 - DNA, 40 bp, Escherichia coli; identical to SEQ ID NO: 40160
  source 1..40: mol_type = genomic DNA

SEQ ID NO: 40286 - protein, 506 aa, Escherichia coli
MRTVITYLRFSSATQGAEGADSTRRQNELFKQWLRKNSDAQVVASFSDEGLSGYKGKHLTGQFGDMLARIEAGEFPAGAILLVESIDRIGRLEHLETEALMNRIIAHGIEIHTLQDGLIYTRDALSDDLGISIIQRVKSYLAHQESKQKSFRVSEKWKQRAKLALAGEQHLTRNVPGWIDPDTFKCNEHAETVRLIFKLLLDGESLHNIARHLQSNDIKSFSRRKDANGFSVHSVRTVLRSESVIGTLPASQRNDRPAIPNYYEAAIDAATFNKAQEILDKNRKGRTPASDNPLTINIFKGLFRCQCGASVHPTGTKNKYQGVYRCNNHLDGRCDVPPLKRKPFDKWMIDNFLGMIDVGNDGEAEGKIASLQHEVEIVTARIKKATALLLEMDDITELKTQVKGLNQKRTEIQTTIDTLKRKTSLTDKELPQLKDIDLTTKAGRVECQLILSKHLKGLTLGKDSVTVTLQNDTEITIPTNPLPLNDGSPIFEIAEKNLLNIDTFQL

SEQ ID NO: 40287 - DNA, 50 bp, Escherichia coli
  source 1..50: mol_type = genomic DNA
taaccgaatagacttcattcaagggtcattgtattgtagctattcggcat

SEQ ID NO: 40288 - DNA, 40 bp, Escherichia coli; identical to SEQ ID NO: 20043
  source 1..40: mol_type = genomic DNA

SEQ ID NO: 40289 - DNA, 50 bp, Escherichia coli
  source 1..50: mol_type = genomic DNA
taaccgaatagacttcattcaaggtgcattgtattgtagctattcggcat

SEQ ID NO: 40290 - DNA, 40 bp, Escherichia coli; identical to SEQ ID NO: 40160
  source 1..40: mol_type = genomic DNA

SEQ ID NO: 40291 - protein, 506 aa, Escherichia coli
MRSVITYLRYSSAIQGAEGADSTRRQNDLFKQWLKKNSDAQVVASFSDEGLSGYKGKHLTGQFGDMLARIESGEFPEGTILIVESIDRIGRLEHLETEALMNRILGNGLEIHTLQDGLIYTKDALADDLGISIIQRVKAYIAHQESKQKSFRVSQKWEQRAKLALAGEQRLTKMVPGWIDPDTFKLNEHAETVRLIFKLLLSGESLHNIARHLQSNGIKSFSRRKDANGFSVHSVRTILRSETTIGTLPASQRNDRTAIPNYYEAAIDAATFNKAQEILGKNRIGRTPASDNPLTINIFKGLFRCQCGASVHPTGTKNKYQGVYRCNNHLDGRCDVPPLKRKPFDKWMIDNFLGMIDVGNDGEAEGKIASLQHEVEIVTTRIKKATALLLEMDDIDELKIQLKELNQRRTELQTTIDNMRRKASLTDKELPQLKDIDLTTKAGRVECQLILSKHLKGLTLGKDSVTVTLQNDTEITIPTNPLPLNDGSPIFEIADKELLDIDAYQL

SEQ ID NO: 40292 - DNA, 50 bp, Escherichia coli; identical to SEQ ID NO: 36192
  source 1..50: mol_type = genomic DNA

SEQ ID NO: 40293 - DNA, 40 bp, Escherichia coli; identical to SEQ ID NO: 20043
  source 1..40: mol_type = genomic DNA

SEQ ID NO: 40294 - DNA, 50 bp, Escherichia coli; identical to SEQ ID NO: 40159
  source 1..50: mol_type = genomic DNA

SEQ ID NO: 40295 - DNA, 40 bp, Escherichia coli; identical to SEQ ID NO: 40160
  source 1..40: mol_type = genomic DNA

SEQ ID NO: 40296 - protein, 506 aa, Escherichia coli
MRSVITYLRYSSAIQGAEGADSTRRQNDLFKQWLKKNSDAQVVASFSDEGLSGYKGKHLTGQFGDMLARIESGEFPEGTILLVESIDRIGRLEHLETEALMNRILGNGLEIHTLQDGLIYTKDALADDLGISIIQRVKAYIAHQESKQKSFRVSQKWGQRAKLALAGKQRLTKMVPGWIDPETFEVNEHAETVRLIFKLLLDGESLHNIARHLQANNISSFSRRKDANGFSVHSVRTILRSVTTIGTLPASQRNDRPAIPNYYEAAIDAATFNKAQEILDKNRKGRTPASDNPLTINIFKGLFRCQCGASVHPTGTKNKYAGVYRCNNHLDGRCDVPPLKRKPFDRWMIDNFLGMIDVGNDGESERKIAALQHEVEIVTSRIKKATALLLEMDDITELKTQVKELNQKRTALQTTIDNMRRKTSLTDKELPQLKDIDLTTKAGRVECQLILSKHLKGLTLGKDSVIVTLQNDTEITIPTNPLPLNDGTSIFEIAEKELLEIDAYQL

SEQ ID NO: 40297 - DNA, 50 bp, Escherichia coli; identical to SEQ ID NO: 36192
  source 1..50: mol_type = genomic DNA

SEQ ID NO: 40298 - DNA, 40 bp, Escherichia coli; identical to SEQ ID NO: 20043
  source 1..40: mol_type = genomic DNA

SEQ ID NO: 40299 - DNA, 50 bp, Escherichia coli; identical to SEQ ID NO: 40159
  source 1..50: mol_type = genomic DNA

SEQ ID NO: 40300 - DNA, 40 bp, Escherichia coli; identical to SEQ ID NO: 40160
  source 1..40: mol_type = genomic DNA

SEQ ID NO: 40301 - protein, 506 aa, Escherichia coli
MRSVITYLRFSSATQGAEGADSTRRQNELFKQWLRKNSDAQVVASFSDEGLSGYKGKHLTGQFGDMLARIEAGEFPAGAILLVESIDRIGRLEHLETEALMNRIIAHGIEIHTLQDGLIYTRDALSDDLGISIIQRVKSYLAHQESKQKSFRVSQKWEQRAKLALAGEQRLTKMVPGWIDPDTFKCNEHAETVRLIFKLLLDGESLHNIARHLQINDIKSFSRRKDANGFSVHSVRTVLRSESVIGTLPASQRNDRPAIPNYYEAAIDAATFNKAQEILDKNRKGRTPASDNPLTINIFKGLFRCQCGASVHPTGTKNKYQGVYRCNNHLDGRCDVPPLKRKPFDRWMIDNFLGMIDVGNDGEAEGKIASLQHEVEIVTTRIKKATALLLEMDDIDELKIQLKELNQKRTELQTTIDNMRRKASLTDKELPQLKDIDLTTKAGRVECQLILSKHLKGLTLGKDSVTVTLQNDTEITIPTNPLPLNDGSPIFEIADKELLEIDAYQL

SEQ ID NO: 40302 - DNA, 50 bp, Escherichia coli; identical to SEQ ID NO: 36192
  source 1..50: mol_type = genomic DNA

SEQ ID NO: 40303 - DNA, 40 bp, Escherichia coli; identical to SEQ ID NO: 20043
  source 1..40: mol_type = genomic DNA

SEQ ID NO: 40304 - DNA, 50 bp, Escherichia coli; identical to SEQ ID NO: 40159
  source 1..50: mol_type = genomic DNA

SEQ ID NO: 40305 - DNA, 40 bp, Escherichia coli; identical to SEQ ID NO: 40160
  source 1..40: mol_type = genomic DNA

SEQ ID NO: 40306 - protein, 506 aa, Escherichia coli
MRSVITYLRYSSAIQGAEGADSTRRQNDLFKQWLKKNSDAQVVASFSDEGLSGYKGKHLTGQFGDMLARIESGEFPEGTILLVESIDRIGRLEHLETEALMNRILGNGLEIHTLQDGLIYTKDALADDLGISIIQRVKAYIAHQESKQKSFRVSQKWKQRAKLALAGEQRLTKMVPGWIDPDTFKCNEHAETVRLIFKLLLDGESLHNIARHLQSNDIKSFSRRKDANGFSVHSVRTVLRSVSAIGTLPASQRNDRPAIPNYYEAAIDAATFNKAQEILDKNRKGRTPASDNPLTINIFKGLFRCQCGASVHPTGTKNKYAGVYRCNNNPDGRCDVPPLKRKPFDKWMIDNFLGMIDVGNDGEAEGKIASLQHEVEIVTTRIKKATALLLEMDDIDELKIQLKELNQKRTELQTTIDNMRRKASLTDKELPQLKDIDLMTKAGRVECQLILSKHLESLTLGRGQVTVKLSNGTEIIVPTDPLPLTDGAAIFEIAEKNLLNIDTFQL

SEQ ID NO: 40307 - DNA, 50 bp, Escherichia coli; identical to SEQ ID NO: 36192
  source 1..50: mol_type = genomic DNA

SEQ ID NO: 40308 - DNA, 40 bp, Escherichia coli; identical to SEQ ID NO: 20043
  source 1..40: mol_type = genomic DNA

SEQ ID NO: 40309 - DNA, 50 bp, Escherichia coli; identical to SEQ ID NO: 40159
  source 1..50: mol_type = genomic DNA

SEQ ID NO: 40310 - DNA, 40 bp, Escherichia coli; identical to SEQ ID NO: 40160
  source 1..40: mol_type = genomic DNA

SEQ ID NO: 40311 - protein, 506 aa, Escherichia coli
MRHVITYLRYSSAIQGAEGADSTRRQNDLFKQWLKKNSDAQVVASFSDEGLSGYKGKHLTGQFGDMLARIESGEFPEGTILLVESIDRIGRLEHLETEALMNRILGNGLEIHTLQDGLIYTKDALADDLGISIIQRVKAYIAHQESKQKSFRVSEKWGQRAKLALAGEQRLTRNVPGWIDPDTFKCNEHAETVRLIFKLLLSGESLHNIARHLQSNGIKSFSRRKDANGFSVHSVRTVLRSESVIGTLPASQRNDRPAIPNYYEAAIDAATFNKAQEILDKNRKGRTPASDNPLTINIFKGLFRCQCGASVHPTGTKNKYAGVYRCNNHLDGRCDVPPLKRKPFDRWMIDNFLGMIDVGNDGESERKIAALQHEVETVTARIKKATALLLEMDDIDELKIQLKELNQKRTELQTTIDSMRRKASLTDKELPQLKDIDLTTKAGRVECQLILSKHLKGLTLGKDSVTVTLQNDTEITIPTNPLPLNDGSPIFEIADKELLDIDAYQL

SEQ ID NO: 40312 - DNA, 50 bp, Escherichia coli; identical to SEQ ID NO: 36192
  source 1..50: mol_type = genomic DNA

SEQ ID NO: 40313 - DNA, 40 bp, Escherichia coli; identical to SEQ ID NO: 20043
  source 1..40: mol_type = genomic DNA

SEQ ID NO: 40314 - DNA, 50 bp, Escherichia coli; identical to SEQ ID NO: 40159
  source 1..50: mol_type = genomic DNA

SEQ ID NO: 40315 - DNA, 40 bp, Escherichia coli; identical to SEQ ID NO: 40160
  source 1..40: mol_type = genomic DNA

SEQ ID NO: 40316 - protein, 506 aa, Escherichia coli
MRTAITYLRYSSAIQGVEGADSTRRQNDLFKQWLKKNSDAQIVASFSDEGLSGYKGKHLTGQFGDMLARIEAGEFPEGTILLVESIDRIGRLEHLETEALMNRILGNGLEIHTLQDGLIYTKDALADDLGISIIQRVKAYIAHQESKQKSFRVSQKWEQRAKLALAGKQRLTKMVPGWIDPETFKLNEHAETVRLIFKLLLDGESLHNIARHLQSNGIKSFSRRKDANGFSVHSVRTILRSETTIGTLPASQRNDRPAIPNYYEAAIDAATFNKAQEILDKNRTGRTPASDNPLTINIFKGLFRCQCGASVHPTGTKNKYAGVYRCNNHLDGRCDVQPLKRKPFDKWVLENFLGMIDVGNDGESERKIAALQHEVEIVTARIKKATALLLEMDDITELKTQVKGLNQKRTEIQTTIDTLKRKTSLSDKGLPQLKDIDLMTKAGRVECQLILSKHLKGLTLGKDSVTVTLQNDTEITIPTNPLPLNDGSPIFEIADKELLDIDAYQL

SEQ ID NO: 40317 - DNA, 50 bp, Escherichia coli; identical to SEQ ID NO: 36192
  source 1..50: mol_type = genomic DNA

SEQ ID NO: 40318 - DNA, 40 bp, Escherichia coli; identical to SEQ ID NO: 20043
  source 1..40: mol_type = genomic DNA

SEQ ID NO: 40319 - DNA, 50 bp, Escherichia coli; identical to SEQ ID NO: 40159
  source 1..50: mol_type = genomic DNA

SEQ ID NO: 40320 - DNA, 40 bp, Escherichia coli; identical to SEQ ID NO: 40160
  source 1..40: mol_type = genomic DNA

SEQ ID NO: 40321 - protein, 506 aa, Escherichia coli
MRSVITYLRYSSAIQGAEGADSTRRQNDLFKQWLKKNSDAQVVASFSDEGLSGYKGKHLTGQFGDMLARIESGEFPEGTILLVESIDRIGRLEHLETEALMNRILGNGLEIHTLQDGLIYTKDALADDLGISIIQRVKAYIAHQESKQKSFRVSQKWEQRAKLALAGEQRLTKMVPGWIDPDTFKLNEHAETVRLIFKLLLSGESLHNIARHLQSNGIKSFSRRKDANGFSVHSVRTILRSETTIGTLPASQRNDRPAIPNYYEAAIDASTFNKAQEILDKNRKGRTPASDNPLTINIFKGLFRCQCGASVHPTGTKNKYAGVYRCNNHLDGRCDVQPLKRKPFDRWMIDNFLGMIDVGNDGEAEGKIASLQHEVEIVTARIKKATALLLEMDDIDELKIQLKELNQKRTELQTMIDNMRRKASLTDKELPQLKDIDLMTKAGRVECQLILSKHLKGLTLGKDSVTVTLQNDTEIIVPTDPLPLNDGTSIFEIAEKELLEIDAYQL

SEQ ID NO: 40322 - DNA, 50 bp, Escherichia coli; identical to SEQ ID NO: 36192
  source 1..50: mol_type = genomic DNA

SEQ ID NO: 40323 - DNA, 40 bp, Escherichia coli; identical to SEQ ID NO: 20043
  source 1..40: mol_type = genomic DNA

SEQ ID NO: 40324 - DNA, 50 bp, Escherichia coli; identical to SEQ ID NO: 40159
  source 1..50: mol_type = genomic DNA

SEQ ID NO: 40325 - DNA, 40 bp, Escherichia coli; identical to SEQ ID NO: 40160
  source 1..40: mol_type = genomic DNA

SEQ ID NO: 40326 - protein, 506 aa, Escherichia coli
MRTAITYLRYSSAIQGAEGADSTRRQNDLFKQWLKKNSDAQVVASFSDEGLSGYKGKHLTGQFGDMLARIESGEFPEGTILLVESIDRIGRLEHLETEALMNRILGNGIEIHTLQDGLIYTKDALADDLGISIIQRVKAYIAHQESKQKSFRVSQKWGQRAKLALAGEQRLTKMVPGWIDPETFKLNEHAETVRLIFKLLLDGESLHNIARHLQSNGIKSFSRRKDANGFSVHSVRTILRSVTTIGTLPASQRNDRPAIPNYYEAAIDAATFNKAQEILDKNRKGRTPASDNPLTINIFKGLFRCQCGASVHPTGTKNKYAGVYRCNNHLDGRCDVPPLKRKPFDRWMIDNFLGMIDVGNDGESERKIAALQHEVEIVTARIKKATALLLEMDDIDELKIQLKELNQKRTELQTTIDSMRRKASLTDKELPQLKDIDLTTKAGRVECQLILSKHLESLTLGRGQVTVKLSNGTEIIVPTDPLPLTDGAAIFEIAEKNLLNIDTFQL

SEQ ID NO: 40327 - DNA, 50 bp, Escherichia coli; identical to SEQ ID NO: 36192
  source 1..50: mol_type = genomic DNA

SEQ ID NO: 40328 - DNA, 40 bp, Escherichia coli; identical to SEQ ID NO: 20043
  source 1..40: mol_type = genomic DNA

SEQ ID NO: 40329 - DNA, 50 bp, Escherichia coli; identical to SEQ ID NO: 40159
  source 1..50: mol_type = genomic DNA

SEQ ID NO: 40330 - DNA, 40 bp, Escherichia coli; identical to SEQ ID NO: 40160
  source 1..40: mol_type = genomic DNA

SEQ ID NO: 40331 - protein, 506 aa, Escherichia coli
MRHVITYLRYSSAIQGAEGADSTRRQNDLFKQWLKKNSDAQVVASFNDEGLSGYKGKHLSGQFGDMLSRIESGEFSKGTILLVEAIDRIGRLEHLETEALMNRIIAHGIEIHTLQDGLIYTRDALSDDLGISIIQRVKSYLAHQESKQKSFRVSQKWKQRAKLALAGEQRLTRNVPGWIDPETFKLNEHAETVRLIFKLLLDGESLHNIARHLQSNGIRSFSRRKDANGFSVHSVRTVLRSESVIGTLPASQRNDRPAIPNYYEAAIDAATFNKAQEILDKNRKGRTPASDNPLTINIFKGLFRCQCGASVHPTGTKNKYQGVYRCNNHLDGRCDVPPLKRKPFDKWMIDNFLGMIDVGNDGEAEGKIAALQHEVEIVTARIKKATALLLEMDDITELKTQVKELNQRRTELQTTIDNMRRKTSLSDKELPQLKDIDLTTKAGRVECQLILSKHLKGLTLGKDSVTVTLQNDTEITIPTNPLPLNDGSPIFEIADKELLDIDAYQL

SEQ ID NO: 40332 - DNA, 50 bp, Escherichia coli; identical to SEQ ID NO: 36192
  source 1..50: mol_type = genomic DNA

SEQ ID NO: 40333 - DNA, 40 bp, Escherichia coli; identical to SEQ ID NO: 20043
  source 1..40: mol_type = genomic DNA

SEQ ID NO: 40334 - DNA, 50 bp, Escherichia coli; identical to SEQ ID NO: 40159
  source 1..50: mol_type = genomic DNA

SEQ ID NO: 40335 - DNA, 40 bp, Escherichia coli; identical to SEQ ID NO: 40160
  source 1..40: mol_type = genomic DNA

SEQ ID NO: 40336 - protein, 506 aa, Escherichia coli; identical to SEQ ID NO: 40321

SEQ ID NO: 40337 - DNA, 50 bp, Escherichia coli; identical to SEQ ID NO: 40222
  source 1..50: mol_type = genomic DNA

SEQ ID NO: 40338 - DNA, 40 bp, Escherichia coli; identical to SEQ ID NO: 20043
  source 1..40: mol_type = genomic DNA

SEQ ID NO: 40339 - DNA, 50 bp, Escherichia coli; identical to SEQ ID NO: 40224
  source 1..50: mol_type = genomic DNA

SEQ ID NO: 40340 - DNA, 40 bp, Escherichia coli; identical to SEQ ID NO: 40160
  source 1..40: mol_type = genomic DNA

SEQ ID NO: 40341 - protein, 506 aa, Escherichia coli
MRTVITYLRFSSAIQGAEGADSTRRQNDLFKQWLKKNSDAQVVASFSDEGLSGYKGKHLTGQFGDMLARIESGEFPEGTILLVEAIDRIGRLEHLETEALMNRIIAHGIEIHTLQDGLIYTRDALSDDLGISIIQRVKSYVAHQESKQKSFRVSQKWKQRAKLALAGEQRLTKMVPGWIDPDTFKCNKHAETVRLIFKLLLDGESLHNIARHLQANNISSFSRRKDANGFSVHSVRTILRSETTIGTLPASQRNDRPAIPNYYEAAIDASTFNKAQEILDKNRKGRTPASDNPLTINIFKGLFRCQCGASVHPTGTKNKYQGVYRCNNHLDGRCDVPPLKRKPFDKWMIDNFLGMIDVGNDGEAEGKIASLQHEVEIVTTRIKKATALLLEMDDITELKAQVKELNQKRTELQTTIDSMRRKTSLSDKGLPQLKDIDLMTKAGRVECQLILSKHLKGLTLGKDSVTVTLQNDTEITIPTNPLPLNDGTSIFEIAEKELLEIDAYQL

SEQ ID NO: 40342 - DNA, 50 bp, Escherichia coli; identical to SEQ ID NO: 40222
  source 1..50: mol_type = genomic DNA

SEQ ID NO: 40343 - DNA, 40 bp, Escherichia coli; identical to SEQ ID NO: 20043
  source 1..40: mol_type = genomic DNA

SEQ ID NO: 40344 - DNA, 50 bp, Escherichia coli; identical to SEQ ID NO: 40224
  source 1..50: mol_type = genomic DNA

SEQ ID NO: 40345 - DNA, 40 bp, Escherichia coli; identical to SEQ ID NO: 40160
  source 1..40: mol_type = genomic DNA

SEQ ID NO: 40346 - protein, 506 aa, Escherichia coli
MRSVITYLRYSSAIQGAEGADSTRRQNDLFKQWLKKNSDAQVVASFSDEGLSGFKGKHLTGQFGDMLARIESGEFPEGTILLVESIDRIGRLEHLETEALMNRILGNGLEIHTLQDGLIYTKDALADDLGISIIQRVKAYIAHQESKQKSFRVSQKWEQRAKLALAGEQRLTKMVPGWIDPDTFKLNEHAETVRLIFKLLLSGESLHNIARHLQANNISSFSRRKDANGFSVHSVRTILRSETTIGTLPASQRNDRPAIPNYYEPAIDASTFNKAQEILDKNRKGRTPASDNPLTINIFKGLFRCQCGASVHPTGTKNKYAGVYRCNSHLDGRCGVPPLKRKPFDKWMIDNFLGMIDVGNDGEAEKEIASLQHEVETVTARIKKATALLLEMDDIDELKIQLKELNQKRTELQTTIDSMRRKASLTDKELPQLKDIDLTTKAGRVECQLILSKHLESLTLGRGQVTVKLSNGTEIIVPTDPLPLTDGAAIFEIAEKNLLNIDTFQL

SEQ ID NO: 40347 - DNA, 50 bp, Escherichia coli; identical to SEQ ID NO: 40222
  source 1..50: mol_type = genomic DNA

SEQ ID NO: 40348 - DNA, 40 bp, Escherichia coli; identical to SEQ ID NO: 20043
  source 1..40: mol_type = genomic DNA

SEQ ID NO: 40349 - DNA, 50 bp, Escherichia coli; identical to SEQ ID NO: 40224
  source 1..50: mol_type = genomic DNA

SEQ ID NO: 40350 - DNA, 40 bp, Escherichia coli; identical to SEQ ID NO: 40160
  source 1..40: mol_type = genomic DNA

SEQ ID NO: 40351 - protein, 506 aa, Escherichia coli
MRSVITYLRYSSAIQGAEGADSTRRQNDLFKQWLKKNSDAQVVASFSDEGLSGYKGKHLTGQFGDMLARIESGEFPEGTILLVESIDRIGRLEHLETEALMNRILGNGLEIHTLQDGLIYTKDALADDLGISIIQRVKAYIAHQESKQKSFRVSQKWEQRAKLALAGEQRLTKMVPGWIDPDTFKLNEHAETVRLIFKLLLSGESLHNIARHLQANNISSFSRRKDANGFSVHSVRTILRSETTIGTLPASQRNDRPAIPNYYEPAIDASTFNKAQEILDKNRKGRTPASDNPLTINIFKGLFRCQCGASVHPTGTKNKYAGVYRCNSHLDGRCGVPPLKRKPFDKWMIDNFLGMIDVGNDGESERKIASLQHEVEIVTARIKKATALLLEMDDIDELKIQLKELNQRRTELQTTIDSMRRKTSLSDKGLPQLKDIDLMTKAGRVECQLILSKHLKGLTLGKDSVTVTLQNDTEITIPTNPLPLNDGSPIFEIADKELLDIDAYQL

SEQ ID NO: 40352 - DNA, 50 bp, Escherichia coli; identical to SEQ ID NO: 40222
  source 1..50: mol_type = genomic DNA

SEQ ID NO: 40353 - DNA, 40 bp, Escherichia coli; identical to SEQ ID NO: 20043
  source 1..40: mol_type = genomic DNA

SEQ ID NO: 40354 - DNA, 50 bp, Escherichia coli; identical to SEQ ID NO: 40224
  source 1..50: mol_type = genomic DNA

SEQ ID NO: 40355 - DNA, 40 bp, Escherichia coli; identical to SEQ ID NO: 40160
  source 1..40: mol_type = genomic DNA

SEQ ID NO: 40356 - protein, 499 aa, Escherichia coli
MRFSSAIQGAEGADSTRRQNDLFKQWLKKNSDAQVVASFSDEGLSGYKGKHLTGQFGDMLARIESGEFPAGTILLVESIDRIGRLEHLETEALMNRILGNGLEIHTLQDGLIYTKDALADDLGISIIQRVKAYIAHQESKQKSFRVSQKWEQRAKLALAGEQRLTKMVPGWIDPDTFKCNEHAETVRLIFKLLLDGESLHNIARHLQANNISSFSRRKDANGFSVHSVRTILRSVTTIGTLPASQRNDRPAIPNYYEAAIDAATFNKAQEILDKNRKGRTPASDNPLTINIFKGLFRCQCGASVHPTGTKNKYAGVYRCNNHLDGRCDVPPLKRKPFDRWMIDNFLGMIDVGNDGESERKIAALQHEVETVTARIKKATALLLEMDDIDELKIQLKELNQKRTELQTTIDSMRRKASLTDKELPQLKDIDLTTKAGRVECQLILSKHLKGLTLGKDSVTVTLQNDTEITIPTNPLPLNDGSPIFEIADKELLDIDAYQL

SEQ ID NO: 40357 - DNA, 50 bp, Escherichia coli; identical to SEQ ID NO: 36192
  source 1..50: mol_type = genomic DNA

SEQ ID NO: 40358 - DNA, 40 bp, Escherichia coli; identical to SEQ ID NO: 20043
  source 1..40: mol_type = genomic DNA

SEQ ID NO: 40359 - DNA, 50 bp, Escherichia coli; identical to SEQ ID NO: 40159
  source 1..50: mol_type = genomic DNA

SEQ ID NO: 40360 - DNA, 40 bp, Escherichia coli; identical to SEQ ID NO: 40160
  source 1..40: mol_type = genomic DNA

SEQ ID NO: 40361 - protein, 506 aa, Escherichia coli
MRSVITYLRFSSAIQGAEGADSTRRQNDLFKQWLKKNSDAQIVASFSDEGLSGYKGKHLTGQFGDMLARIESGEFPEGTILLVEAIDRIGRLEHLETEALMNRILGNGIEIHTLQDGLIYTKDALADDLGISIIQRVKAYIAHQESKQKSFRVSQRWGQRAKLALAGKQRLTKMVPGWIDPETFKLNEHAETVRLIFKLLLDGESLHNIARHLQSNGIKSFSRRKDANGFSVHSVRTILRSETTIGTLPASQRNDRPAIPNYYEGVVDIPTFNKAQEILDKNRKGRTPASDNPLTINIFKGLFRCQCGASVHPTGTKNKYAGVYRCNNHLDGRCDVQPLKRKPFDRWMIDNFLGMIDVGNDGESERKIAALQHEVEIVTSRIKKATALLLEMDDITELKTQVKELNQRRTDIQTTIDTLKRKTSLSDKGLPQLKDIDLMTKADRVECQLILSKHLKGLTLGKGSVTITLQNDTEITIPTNPLPLNDGSPIFEIADKELLDIDAYQL

SEQ ID NO: 40362 - DNA, 50 bp, Escherichia coli; identical to SEQ ID NO: 36192
  source 1..50: mol_type = genomic DNA

SEQ ID NO: 40363 - DNA, 40 bp, Escherichia coli; identical to SEQ ID NO: 20043
  source 1..40: mol_type = genomic DNA

SEQ ID NO: 40364 - DNA, 50 bp, Escherichia coli; identical to SEQ ID NO: 40159
  source 1..50: mol_type = genomic DNA

SEQ ID NO: 40365 - DNA, 40 bp, Escherichia coli; identical to SEQ ID NO: 40160
  source 1..40: mol_type = genomic DNA

SEQ ID NO: 40366 - protein, 506 aa, Escherichia coli
MRTAITYLRFSSAIQGAEGADSTRRQNDLFKQWLKKNSDAQVVASFSDEGVSGYKGKHLTGQFGDMLARIEAGEFPEGTILLVESIDRIGRLEHLETEALMNRILGNGIEIHTLQDGLVYTKDALADDLGISIIQRVKAYIAHQESKQKSFRVSQKWKQRAKLALAGEQRLTRNVPGWIDPDTLKLNEHAETVRLIFKLLLSGESLHNIARHLQSNGIKSFSRRKDANGFSVHSVRTILRSETTIGTLPASQRNDRPAIPNYYEAAIDAATFNKAQEILDKNRKGRTPASDNPLTINIFKGLFRCQCGASVHPTGTKNKYAGVYRCNNHLDGRCDVPPLKRKPFDRWMIDNFLGMIDVGNDGEAEGKIASLQHEVEIVTARIKKATALLLEMDDIDELKIQLKELNQKRTELQTMIDNMRRKASLTDKELPQLKDIDLTTKAGRVECQLILSKHLKGLTLGKDSVTVTLQNDTEIIVPTDPLPLNDGTSIFEIAEKELLEIDAYQL

SEQ ID NO: 40367 - DNA, 50 bp, Escherichia coli; identical to SEQ ID NO: 36192
  source 1..50: mol_type = genomic DNA

SEQ ID NO: 40368 - DNA, 40 bp, Escherichia coli; identical to SEQ ID NO: 20043
  source 1..40: mol_type = genomic DNA

SEQ ID NO: 40369 - DNA, 50 bp, Escherichia coli; identical to SEQ ID NO: 40159
  source 1..50: mol_type = genomic DNA

SEQ ID NO: 40370 - DNA, 40 bp, Escherichia coli; identical to SEQ ID NO: 40160
  source 1..40: mol_type = genomic DNA

SEQ ID NO: 40371 - protein, 506 aa, Escherichia coli
MRSVITYLRYSSAIQGAEGADSTRRQNDLFKQWLKKNSDAQVVASFSDEGLSGYKGKHLTGQFGDMLARIESGEFPEGTILLVESIDRIGRLEHLETEALMNRILGNGLEIHTLQDGLIYTKDALADDLGISIIQRVKAYIAHQESKQKSFRVSQKWEQRAKLALAGEQRLTKMVPGWIDPDTFKLNEHAETVRLIFKLLLSGESLHNIARHLQANNISSFSRRKDANGFSVHSVRTILRSETTIGTLPASQRNDRPAIPNYYEPAIDASTFNKAQEILDKNRKGRTPASDNPLTINIFKGLFRCQCGASVHPTGTKNKYAGVYRCNNHLDGRCDVQPLKRKPFDRWMIDNFLGMIDVGNDGKSKRKIASLQHEVEIVTARIKKATALLLEMDDITELKTQVRELNQKRTELQTTIDTLKRKTSLTDKELTQLKDIDLMTKAGRVECQLILSKHLKGLTLGKDSVTVTLQNDTEITIPTNPLPLNDGSPIFEIADKELLDIDAYQL

SEQ ID NO: 40372 - DNA, 50 bp, Escherichia coli; identical to SEQ ID NO: 36192
  source 1..50: mol_type = genomic DNA

SEQ ID NO: 40373 - DNA, 40 bp, Escherichia coli; identical to SEQ ID NO: 20043
  source 1..40: mol_type = genomic DNA

SEQ ID NO: 40374 - DNA, 50 bp, Escherichia coli; identical to SEQ ID NO: 40159
  source 1..50: mol_type = genomic DNA

SEQ ID NO: 40375 - DNA, 40 bp, Escherichia coli; identical to SEQ ID NO: 40160
  source 1..40: mol_type = genomic DNA

SEQ ID NO: 40376 - protein, 506 aa, Escherichia coli
MRSVITYLRYSSAIQGAEGADSTRRQNDLFKQWLKKNSDAQVVASFSDEGLSGYKGKHLTGQFGDMLARIESGEFSEGTVLLVEAIDRIGRLEHLETEALMNRILGNGIEIHTLQDGLIYTKDALADDLGISIIQRVKSYIAHQESKQKSFRVSQKWGQRAKLALAGEQRLTKMVPGWIDPETFEVNEHAETVRLIFKLLLDGESLHNIARHLQANNISSFSRRKDANGFSVHSVRTILRSETTIGTLPASQRNDRPAIPNYYEAAIDAATFNKAQEILDKNRKGRTPASDNPLTINIFKGLFRCQCGASVHPTGTKNKYQGVYRCNNHLDGRCDVPPLKRKPFDRWMIDNFLGMIDVVSDGETERRIAALQHEVEIVTARIKKATALLLEMDDITELKAQVKELNQKRTELQTTIDTMKRKTSLSDKGLPQLKDIDLMTKAGRVECQLILSKHLKGLTLGKDSVTVTLQNDTEITIPTNPLPLNDGSPIFEIADKELLDVDAYQL

SEQ ID NO: 40377 - DNA, 50 bp, Escherichia coli; identical to SEQ ID NO: 36192
  source 1..50: mol_type = genomic DNA

SEQ ID NO: 40378 - DNA, 40 bp, Escherichia coli; identical to SEQ ID NO: 20043
  source 1..40: mol_type = genomic DNA

SEQ ID NO: 40379 - DNA, 50 bp, Escherichia coli; identical to SEQ ID NO: 40159
  source 1..50: mol_type = genomic DNA

SEQ ID NO: 40380 - DNA, 40 bp, Escherichia coli; identical to SEQ ID NO: 40160
  source 1..40: mol_type = genomic DNA

SEQ ID NO: 40381 - protein, 506 aa, Escherichia coli
MRSVITYLRYSSAIQGAEGADSTRRQNDLFKQWLKKNSDAQVVASFSDEGLSGYKGKHLTGQFGDMLARIESGEFPEGTILLVESIDRIGRLEHLETEALMNRILGNGLEIHTLQDGLIYTKDALADDLGISIIQRVKAYIAHQESKQKSFRVSQKWEQRAKLALAGEQRLTRNVPGWIDPDTFKCNEHAETVRLIFKLLLDGESLHNIARHLQSNDIKSFSRRKDANGFSVHSVRTVLRSESVIGTLPASQRNDRPAIPNYYEAAIDAATFNKAQEILDKNRKGRTPASDNPLTINIFKGLFRCQCGASVHPTGTKNKYAGVYRCNNHLDGRCDVPPLKRKPFDKWMIDNFLGMIDVGNDGEAEGKIASLQHEVEIVTTRIKKATALLLEMDDITELKTQVKELNQKRTELQTTIDSMRRKTSLSDKGLPQLKDIDLMTKEGRVECQLILSKHLKGLTLGKDSVTVTLQNDTEITIPTNPLPLNDGSPIFEIADKELLDIDAYQL

SEQ ID NO: 40382 - DNA, 50 bp, Escherichia coli; identical to SEQ ID NO: 36192
  source 1..50: mol_type = genomic DNA

SEQ ID NO: 40383 - DNA, 40 bp, Escherichia coli; identical to SEQ ID NO: 20043
  source 1..40: mol_type = genomic DNA

SEQ ID NO: 40384 - DNA, 50 bp, Escherichia coli; identical to SEQ ID NO: 40159
  source 1..50: mol_type = genomic DNA

SEQ ID NO: 40385 - DNA, 40 bp, Escherichia coli; identical to SEQ ID NO: 40160
  source 1..40: mol_type = genomic DNA

SEQ ID NO: 40386 - protein, 506 aa, Escherichia coli
MRSVITYLRYSSAIQGAEGADSTRRQNDLFKQWLKKNSDAQVVASFSDEGLSGYKGKHLTGQFGDMLARIESGEFSEGTILLVEAIDRIGRLEHLETEALMNRILGNGIEIHTLQDGLIYTKDALADDLGISIIQRVKSYIAHQESKQKSFRVSQKWGQRAKLALAGEQRLTKMVPGWIDPETFEVNEHAETVRLIFKLLLDGESLHNIARHLQANNISSFSRRKDANGFSVHSVRTILRSETTIGTLPASQRNDRPAIPNYYEAAIDAATFNKAQEILDKNRKGRTPASDNPLTINIFKGLFRCQCGASVHPTGTKNKYQGVYRCNNHLDGRCDVPPLKRKPFDRWMIDNFLGMIDVVSDGETERRIAALQHEVEIVTARIKKATALLLEMDDITELKAQVKELNQKRTELQTTIDTMKRKTSLSDKGLPQLKDIDLMTKAGRVECQLILSKHLKGLTLGKDSVTVTLQNDTEITIPTNPLPLNDGSPIFEIADKELLDVDAYQL

SEQ ID NO: 40387 - DNA, 50 bp, Escherichia coli; identical to SEQ ID NO: 36192
  source 1..50: mol_type = genomic DNA

SEQ ID NO: 40388 - DNA, 40 bp, Escherichia coli; identical to SEQ ID NO: 20043
  source 1..40: mol_type = genomic DNA

SEQ ID NO: 40389 - DNA, 50 bp, Escherichia coli; identical to SEQ ID NO: 40159
  source 1..50: mol_type = genomic DNA

SEQ ID NO: 40390 - DNA, 40 bp, Escherichia coli; identical to SEQ ID NO: 40160
  source 1..40: mol_type = genomic DNA

SEQ ID NO: 40391 - protein, 506 aa, Escherichia coli
MRSVITYLRFSSATQGAEGADSTRRQNDLFKQWLKKNSDAQVVASFSDEGLSGYKGKHLTGQFGDMLARIESGEFPEGTLLLVEAIDRIGRLEHLETEALMNRIIAHGIEIHTLQDGLIYTRDALSDDLGISIIQRVKSYVAHQESKQKSFRVSQKWKQRAKLALAGEQRLTKMVPGWIDPDTFKLNEHAETVRLIFKLLLDGESLHNIARHLQSNDIKSFSRRKDANGFSVHSVRTVLRSVSAIGTLPASQRNDRPAIPNYYEAAIDAATFNKAQEILDKNRKGRTPASDNPLTINIFKGLFRCQCGASVHPTGTKNKYQGVYRCNNHLDGRCDVPPLKRKPFDKWMIDNFLGMIDVGNDGEAEGKIAALQHEVEIVTARIKKATALLLEMDDITELKTQVKGLNQKRTELQTTIDNMRRKASLTDKELPQLKDIDLTTKAGRVECQLILSKHLKGLTLGKDSVIVTLQNDTEITIPTNPLPLNDGTSIFEIAEKNLLNIDTFQL

SEQ ID NO: 40392 - DNA, 50 bp, Escherichia coli
  source 1..50: mol_type = genomic DNA
taaccgaatagagttcattcaagggtcattgtattgtagctattcggcat

SEQ ID NO: 40393 - DNA, 40 bp, Escherichia coli; identical to SEQ ID NO: 20043
  source 1..40: mol_type = genomic DNA

SEQ ID NO: 40394 - DNA, 50 bp, Escherichia coli
  source 1..50: mol_type = genomic DNA
taaccgaatagagttcattcaaggtgcattgtattgtagctattcggcat

SEQ ID NO: 40395 - DNA, 40 bp, Escherichia coli; identical to SEQ ID NO: 40160
  source 1..40: mol_type = genomic DNA

SEQ ID NO: 40396 - protein, 506 aa, Escherichia coli
MRTVITYLRFSSATQGAEGADSTRRQNELFKQWLRKNSDAQVVASFNDEGLSGYKGKHLSGQFGDMLSRIESGEFPEGTILLVEAIDRIGRLEHLETEALMNRIIAHGIEIHTLQDGLIYTRDALSDDLGISIIQRVKSYLAHQESKQKSFRVSEKWKQRAKLALAGKQRLTKMVPGWIDPETFKINEHAETVRLIFKLLLSGESLHNIARHLQSNGIKSFSRRKDANGFSVHSVRTILRSETTIGTLPASQRNDRPAIPNYYEAAIDAATFNKAQEILDKNRTGRTPASDNPLTINIFKGLFRCQCGASVHPTGTKNKYAGVYRCNNNPDGRCDVPPLKRKPFDKWMIDNFLGMIDVGNDGEAEGKIASLQHEVEIVTARIKKATALLLEMDDITELKTQVRELNQKRTDIQTTIDTLKRKTSLSDKGLPQLKDIDLMTKAGRVECQLILSKHLKGLTLGKDSVTVTLQNDTEITIPTNPLPLNDGSPIFEIADKELLDIDAYQL

SEQ ID NO: 40397 - DNA, 50 bp, Escherichia coli; identical to SEQ ID NO: 36192
  source 1..50: mol_type = genomic DNA

SEQ ID NO: 40398 - DNA, 40 bp, Escherichia coli; identical to SEQ ID NO: 20043
  source 1..40: mol_type = genomic DNA

SEQ ID NO: 40399 - DNA, 50 bp, Escherichia coli; identical to SEQ ID NO: 40159
  source 1..50: mol_type = genomic DNA

SEQ ID NO: 40400 - DNA, 40 bp, Escherichia coli; identical to SEQ ID NO: 40160
  source 1..40: mol_type = genomic DNA

SEQ ID NO: 40401 - protein, 506 aa, Escherichia coli
MRSVITYLRFSSAIQGAEGADSTRRQNDLFKQWLKKNSDAQIVASFSDEGLSGYKGKHLTGQFGDMLARIESGEFPEGTILLVEAIDRIGRLEHLETEALMNRILGNGIEIHTLQDGLIYTKDALADDLGISIIQRVKAYIAHQESKQKSFRVSQRWGQRAKLALAGKQRLTKMVPGWIDPETFKLNEHAETVRLIFKLLLDGESLHNIARHLQSNGIKSFSRRKDANGFSVHSVRTILRSETTIGTLPASQRNDRPAIPNYYEGVVDIPTFNKAQEILDKNRKGRTPASDNPLTINIFKGLFRCQCGASVHPTGTKNKYAGVYRCNNHLDGRCDVQPLKRKPFDRWMIDNFLGMIDVGNDGESERKIAALQHEVEIVTSRIKKATALLLEMDDITELKTQVKELNQRRTDIQTTIDTLKRKTSLSDKGLPQLKDIDLMTKAGRVECQLILSKHLKGLTLGKGSVTITLQNDTEITIPINPLPLNDGSPIFEIADKELLDIDAYQL

SEQ ID NO: 40402 - DNA, 50 bp, Escherichia coli; identical to SEQ ID NO: 40222
  source 1..50: mol_type = genomic DNA

SEQ ID NO: 40403 - DNA, 40 bp, Escherichia coli; identical to SEQ ID NO: 20043
  source 1..40: mol_type = genomic DNA

SEQ ID NO: 40404 - DNA, 50 bp, Escherichia coli; identical to SEQ ID NO: 40224
  source 1..50: mol_type = genomic DNA

SEQ ID NO: 40405 - DNA, 40 bp, Escherichia coli; identical to SEQ ID NO: 40160
  source 1..40: mol_type = genomic DNA

SEQ ID NO: 40406 - protein, 506 aa, Escherichia coli
MRSVITYLRYSSAIQGAEGADSTRRQNDLFKQWLKKNSDAQVVASFSDEGLSGYKGKHLTGQFGDMLARIEAGEFPEGTILLVESIDRIGRLEHLETEALMNRILGNGIEIHTLQDGLIYTKDALADDLGISIIQRVKAYIAHQESKQKSFRVSQKWGQRAKLALAGKQRLTKMVPGWIDPETFKLNEHAETVRLIFKLLLDGESLHNIARHLQSNGIRSFSRRKDANGFSVHSVRTILRSETTIGTLPASQRNDRPAIPNYYEAAIDASTFNKAQEILDKNRKGRTPASDNPLTINIFKGLFRCQCGASVHPTGTKNKYAGVYRCNNHLDGRCDVPPLKRKPFDKWVLENFLGMIDVGNDGESERKIAALQHEVEIVTARIKKATALLLEMDDIDELKIQLKELNQKRTELQTTIDNMRRKASLSDKGLPQLKDIDLMTKEGRVECQLILSKHLKGLTLGKDSVTVTLQNDTEITIPTNPLPLNDGSPIFEIADKELLDIDAYRL

SEQ ID NO: 40407 - DNA, 50 bp, Escherichia coli; identical to SEQ ID NO: 36192
  source 1..50: mol_type = genomic DNA

SEQ ID NO: 40408 - DNA, 40 bp, Escherichia coli; identical to SEQ ID NO: 20043
  source 1..40: mol_type = genomic DNA

SEQ ID NO: 40409 - DNA, 50 bp, Escherichia coli; identical to SEQ ID NO: 40159
  source 1..50: mol_type = genomic DNA

SEQ ID NO: 40410 - DNA, 40 bp, Escherichia coli; identical to SEQ ID NO: 40160
  source 1..40: mol_type = genomic DNA

SEQ ID NO: 40411 - protein, 441 aa, Escherichia coli
MLARIESGEFPEGTILLVEAIDRIGRLEHLETEALMNRILGNGIEIHTLQDGLIYTKDALADDLGISIIQRVKAYIAHQESKQKSFRVSQRWGQRAKLALAGKQRLTKMVPGWIDPETFKLNEHAETVRLIFKLLLDGESLHNIARHLQSNGIKSFSRRKDANGFSVHSVRTILRSETTIGTLPASQRNDRPAIPNYYEGVVDIPTFNKAQEILDKNRKGRTPASDNPLTINIFKGLFRCQCGASVHPTGTKNKYAGVYRCNNHLDGRCDVQPLKRKPFDRWMIDNFLGMIDVGNDGESERKIAALQHEVEIVTSRIKKATALLLEMDDITELKTQVKELNQRRTDIQTTIDTLKRKTSLSDKGLPQLKDIDLMTKAGRVECQLILSKHLKGLTLGKGLVTITLQNDTEITIPTNPLPLNDGSPIFEIADKELLDIDAYQL

SEQ ID NO: 40412 - DNA, 50 bp, Escherichia coli; identical to SEQ ID NO: 36192
  source 1..50: mol_type = genomic DNA

SEQ ID NO: 40413 - DNA, 40 bp, Escherichia coli; identical to SEQ ID NO: 20043
  source 1..40: mol_type = genomic DNA

SEQ ID NO: 40414 - DNA, 50 bp, Escherichia coli; identical to SEQ ID NO: 40159
  source 1..50: mol_type = genomic DNA

SEQ ID NO: 40415 - DNA, 40 bp, Escherichia coli; identical to SEQ ID NO: 40160
  source 1..40: mol_type = genomic DNA

SEQ ID NO: 40416 - protein, 506 aa, Escherichia coli
MRSVITYLRYSSAIQGAEGADSTRRQNDLFKQWLKKNSDAQVVASFNDEGLSGYKGKHLTGQFGDMLARIESGEFSEGTILLVEAIDRIGRLEHLETEALMNRILGNGIEIHTLQDGLIYTKDALADDLGISIIQRVKSYIAHQESKQKSFRVSQKWGQRAKLALAGEQRLTKMVPGWIDPETFEVNEHAETVRLIFKLLLDGESLHNIARHLQANNISSFSRRKDANGFSVHSVRTILRSETTIGTLPASQRNDRPAIPNYYEAAIDAATFNKAQEILDKNRKGRTPASDNPLTINIFKGLFRCQCGASVHPTGTKNKYAGVYRCNNHLDGRCDVPPLKRKPFDRWMIDNFLGMIDVGNDGESERKIAALQHEVEIVTSRIKKATALLLEMDDITELKAQVKELNQKRTELQTTINTMKRKTSLSDKGLPQLKDIDLMTKAGRVECQLILSKHLKGLTLGKDSVTVTLQNDTEITIPTNPLPLNDGSPIFEIADKELLDVDAYQL

SEQ ID NO: 40417 - DNA, 50 bp, Escherichia coli; identical to SEQ ID NO: 36192
  source 1..50: mol_type = genomic DNA

SEQ ID NO: 40418 - DNA, 40 bp, Escherichia coli; identical to SEQ ID NO: 20043
  source 1..40: mol_type = genomic DNA

SEQ ID NO: 40419 - DNA, 50 bp, Escherichia coli; identical to SEQ ID NO: 40159
  source 1..50: mol_type = genomic DNA

SEQ ID NO: 40420 - DNA, 40 bp, Escherichia coli; identical to SEQ ID NO: 40160
  source 1..40: mol_type = genomic DNA

SEQ ID NO: 40421 - protein, 506 aa, Escherichia coli
MRSVITYLRYSSAIQGAEGADSTRRQNDLFKQWLKKNSDAQVVASFSDEGLSGYKGKHLTGQFGDMLARIESGEFTAGTILLVESIDRIGRLEHLETEALMNRILGNGIEIHTLQDGLIYTKDALADDLGISIIQRVKAYIAHQESKQKSFRVSQKWEQRAKLALAGEQRLTKMVPGWIDPDTFKLNEHAETVRLIFKLLLDGESLHNIARHLQSNGIKSFSRRKDANGFSVHSVRTILRSETTTGTLPASQRNDRPAIPNYYEAAIDAATFNKAQEILDKNRKGRTPASDNPLTINIFKGLFRCQCGASVHPTGTKNKYAGVYRCNNHLDGRCDVQPLKRKPFDRWMIDNFLGMIDVGNDGESERKIAALQHEVEIVTARIKKATALLLEMDDIDELKIQLKELNQKRTELQTTIDNMRRKASLTDKELPQLKDIDLTTKAGRVECQLILSKHLKGLTLGKDTVTVTLQNDTEITIPTDPLPLNDGTSIFEIAEKNLLNIDTFQL

SEQ ID NO: 40422 - DNA, 50 bp, Escherichia coli; identical to SEQ ID NO: 36192
  source 1..50: mol_type = genomic DNA

SEQ ID NO: 40423 - DNA, 40 bp, Escherichia coli; identical to SEQ ID NO: 20043
  source 1..40: mol_type = genomic DNA

SEQ ID NO: 40424 - DNA, 50 bp, Escherichia coli; identical to SEQ ID NO: 40159
  source 1..50: mol_type = genomic DNA

SEQ ID NO: 40425 - DNA, 40 bp, Escherichia coli; identical to SEQ ID NO: 40160
  source 1..40: mol_type = genomic DNA

SEQ ID NO: 40426 - protein, 506 aa, Escherichia coli
MRSVITYLRYSSAIQGAEGADSTRRQNDLFKQWLKKNSDAQVVASFSDEGLSGYKGKHLTGQFGDMLARIESEEFPEGTILLVESIDRIGRLEHLETEALMNRILGNGIEIHTLQDGLIYTKDALADDLGISIIQRVKAYIAHQESKQKSFRVSQKWGQRAKLALAGEQRLTKMVPGWIDPETFKLNEHAETVRLIFKLLLDGESLHNIARHLQSNGIKSFSRRKDANGFSVHSVRTVLRSESVIGTLPASQRNDRPAIPNYYEAAIDASTFNKAQEILDKNRKGRTPASDNPLTINIFKGLFRCQCGASVHPTGTKNKYAGVYRCNNHLDGRCDVQPLKRKPFDKWVLENFLGMIDVGNDGESERKIAALQHEVEIVTARIKKATALLLEMDDITELKTQVKGLNQKRTEIQTTIDTLKRKTSLSDKGLPQLKDIDLMTKAGRVECQLILSKHLKGLTLGKDSVTVTLQNDTEITIPTNPLPLNDGSPIFEIADKELLDIDAYQL

SEQ ID NO: 40427 - DNA, 50 bp, Escherichia coli; identical to SEQ ID NO: 36192
  source 1..50: mol_type = genomic DNA

SEQ ID NO: 40428 - DNA, 40 bp, Escherichia coli; identical to SEQ ID NO: 20043
  source 1..40: mol_type = genomic DNA

SEQ ID NO: 40429 - DNA, 50 bp, Escherichia coli; identical to SEQ ID NO: 40159
  source 1..50: mol_type = genomic DNA

SEQ ID NO: 40430 - DNA, 40 bp, Escherichia coli; identical to SEQ ID NO: 40160
  source 1..40: mol_type = genomic DNA

SEQ ID NO: 40431 - protein, 506 aa, Escherichia coli
MRSVITYLRYSSAIQGAEGADSTRRQNDLFKQWLKKNSDAQVVASFSDEGLSGYKGKHLTGQFGDMLARIESGEFPEGTILLVESIDRIGRLEHLETEALMNRILGNGLEIHTLQDGLIYTKDALADDLGISIIQRVKAYIAHQESKQKSFRVSQKWEQRAKLALAGEQRLTKMVPGWIDPDTFKLNEHAETVRLIFKLLLSGESLHNIARHLQSNGIKSFSRRKDANGFSVHSVRTILRSETTIGTLPASQRNDRPAIPNYYEAAIDAATFNKAQEILDKNRKGRTPASDNPLTINIFKGLFRCQCGASVHPTGTKNKYQGVYRCNNHLDGRCDVPPLKRKPFDRWMIDNFLGMIDVGNDGEAEGKIASLQHEVEIVTTRIKKATALLLEMDDIDELKIQLKELNQKRTELQTTIDNMRRKASLTDKELPQLKDIDLTTKAGRVKCQLILSKHLKGLTLGKDSVTVTLQNDTEITIPTNPLPLNDGSPIFEIADKELLDIDAYQL

SEQ ID NO: 40432 - DNA, 50 bp, Escherichia coli; identical to SEQ ID NO: 36192
  source 1..50: mol_type = genomic DNA

SEQ ID NO: 40433 - DNA, 40 bp, Escherichia coli; identical to SEQ ID NO: 20043
  source 1..40: mol_type = genomic DNA

SEQ ID NO: 40434 - DNA, 50 bp, Escherichia coli; identical to SEQ ID NO: 40159
  source 1..50: mol_type = genomic DNA

SEQ ID NO: 40435 - DNA, 40 bp, Escherichia coli; identical to SEQ ID NO: 40160
  source 1..40: mol_type = genomic DNA

SEQ ID NO: 40436 - protein, 506 aa, Escherichia coli
MRSVITYLRYSSAIQGAEGADSTRRQNDLFKQWLKKNSDAQVVASFSDEGLSGYKGKHLTGQFGDMLARIESGEFPEGTILLVESIDRIGRLEHLETEALMNRILGNGLEIHTLQDGLIYTKDALADDLGISIIQRVKAYIAHQESKQKSFRVSQKWEQRAKLALAGEQRLTKMVPGWIDPDTFKLNEHAETVRLIFKLLLSGESLHNIARHLQSNGIKSFSRRKDANGFSVHSVRTILRSETTIGTLPASQRNDRPAIPNYYEAAIDASTFNKAQEILGKNRIGRTPASDNPLTINIFKGLFRCQCGASVHPTGTKNKYQGVYRCNNHLDGRCDVPPLKRKPFDKWMIDNFLGMIDVGNDGEAEGKIASLQHEVEIVTTRIKKATALLLEMDDIDELKIQLKELNQKRTELQTTIDNMRRKASLTDKELPQLKDIDLTTKAGRVECQLILSKHLKGLTLGKDSVIVTLQNDTEITIPTNPLPLNDGSPIFEIADKELLDIDAYQL

SEQ ID NO: 40437 - DNA, 50 bp, Escherichia coli; identical to SEQ ID NO: 36192
  source 1..50: mol_type = genomic DNA

SEQ ID NO: 40438 - DNA, 40 bp, Escherichia coli; identical to SEQ ID NO: 20043
  source 1..40: mol_type = genomic DNA

SEQ ID NO: 40439 - DNA, 50 bp, Escherichia coli; identical to SEQ ID NO: 40159
  source 1..50: mol_type = genomic DNA

SEQ ID NO: 40440 - DNA, 40 bp, Escherichia coli; identical to SEQ ID NO: 40160
  source 1..40: mol_type = genomic DNA

SEQ ID NO: 40441 - protein, 506 aa, Escherichia coli
MRSVITYLRFSSAIQGAECADSTRRQNDLFKQWLKKNSDAQIVASFSDEGLSGYKGKHLTGQFGDMLARIESGEFPEGTILLVEAIDRIGRLEHLETEALMNRILGNGIEIHTLQDGLIYTKDALADDLGISIIQRVKAYIAHQESKQKSFRVSQRWGQRAKLALAGKQRLTKMVPGWIDPETFKLNEHAETVRLIFKLLLDGESLHNIARHLQSNGIKSFSRRKDANGFSVHSVRTILRSETTIGTLPASQRNDRPAIPNYYEGVVDIPTFNKAQEILDKNRKGRTPASDNPLTINIFKGLFRCQCGASVHPTGTKNKYAGVYRCNNHLDGRCDVQPLKRKPFDRWMIDNFLGMIDVGNDGESERKIAALQHEVEIVTSRIKKATALLLEMDDITELKTQVKELNQRRTDIQTTIDTLKRKTSLSDKGLPQLKDIDLMTKAGRVECQLILSKHLKGLTLGKGLVTITLQNDTEITIPTNPLPLNDGSPIFEIADKELLDIDAYQL

SEQ ID NO: 40442 - DNA, 50 bp, Escherichia coli; identical to SEQ ID NO: 36192
  source 1..50: mol_type = genomic DNA

SEQ ID NO: 40443 - DNA, 40 bp, Escherichia coli; identical to SEQ ID NO: 20043
  source 1..40: mol_type = genomic DNA

SEQ ID NO: 40444 - DNA, 50 bp, Escherichia coli; identical to SEQ ID NO: 40159
  source 1..50: mol_type = genomic DNA

SEQ ID NO: 40445 - DNA, 40 bp, Escherichia coli; identical to SEQ ID NO: 40160
  source 1..40: mol_type = genomic DNA

SEQ ID NO: 40446 - protein, 506 aa, Escherichia coli
MRSVITYLRYSSAIQGAEGADSTRRQNDLFKQWLKKSSDAQVVASFSDEGLSGYKGKHLTGQFGDMLARIEAGEFPEGTILLVESIDRIGRLEHLETEALMNRILGNGIEIHTLQDGLIYTKDALADDLGISIIQRVKAYIAHQESKQKSFRVSQKWGQRAKLALAGKQRLTKMVPGWIDPETFKLNEHAETVRLIFKLLLDGESLHNIARHLQSNGIRSFSRRKDANGFSVHSVRTILRSETTIGTLPASQRNDRPAIPNYYEAAIDASTFNKAQEILDKNRKGRTPASDNPLTINIFKGLFRCQCGASVHPTGTKNKYAGVYRCNNHLDGRCDVQPLKRKPFDKWVLENFLGMIDVGNDGESERKIAALQHEVEIVTARIKKATALLLEMDDIDELKIQLKELNQKRTELQTTIDSMRRKTSLSDKGLPQLKDIDLMTKAGRVECQLILSKHLESLTLGRGQVTVKLSNGTEIIVPTDPLPLTDGAAIFEIAEKNLLNIDTFQL

SEQ ID NO: 40447 - DNA, 50 bp, Escherichia coli; identical to SEQ ID NO: 36192
  source 1..50: mol_type = genomic DNA

SEQ ID NO: 40448 - DNA, 40 bp, Escherichia coli; identical to SEQ ID NO: 20043
  source 1..40: mol_type = genomic DNA

SEQ ID NO: 40449 - DNA, 50 bp, Escherichia coli; identical to SEQ ID NO: 40159
  source 1..50: mol_type = genomic DNA

SEQ ID NO: 40450 - DNA, 40 bp, Escherichia coli; identical to SEQ ID NO: 40160
  source 1..40: mol_type = genomic DNA

SEQ ID NO: 40451 - protein, 506 aa, Escherichia coli
MRSVITYLRFSSATQGAEGADSTRRQNDLFKQWLKKNSDAQVVASFSDEGLSGYKGKHLTGQFGDMLARIESGEFPEGTLLLVEAIDRIGRLEHLETEALMNRIIAHGIEIHTLQDGLIYTRDALSDDLGISIIQRVKSYIAHQESKQKSFRVSQKWEQRAKLALAGEQRLTKMVPGWIDPDTFKLNEHAETVRLIFKLLLDGESLHNIARHLQSNDIKSFSRRKDANGFSVHSVRTVLRSVSAIGTLPASQRNDRPAIPNYYEAAIDAATFNKAQEILDKNRKGRTPASDNPLTINIFKGLFRCQCGASVHPTGTKNKYQGVYRCNNHLDGRCDVPPLKRKPFDKWMIDNFLGMIDVGNDGEAEGKIAALQHEVEIVTARIKKATALLLEMDDITELKTQVKGLNQKRTELQTTIDNMRRKASLTDKELPQLKDIDLTTKAGRVECQLILSKHLKGLTLGKDSVIVTLQNDTEITIPTNPLPLNDGTSIFEIAEKNLLNIDTFQL

SEQ ID NO: 40452 - DNA, 50 bp, Escherichia coli; identical to SEQ ID NO: 40287
  source 1..50: mol_type = genomic DNA

SEQ ID NO: 40453 - DNA, 40 bp, Escherichia coli; identical to SEQ ID NO: 20043
  source 1..40: mol_type = genomic DNA

SEQ ID NO: 40454 - DNA, 50 bp, Escherichia coli; identical to SEQ ID NO: 40289
  source 1..50: mol_type = genomic DNA

SEQ ID NO: 40455 - DNA, 40 bp, Escherichia coli; identical to SEQ ID NO: 40160
  source 1..40: mol_type = genomic DNA

SEQ ID NO: 40456 - protein, 499 aa, Escherichia coli
MRFSSATQGAEGADSTRRQNELFKQWLRKNSDAQVVASFSDEGLSGYKGKHLTGQFGDMLARIEAGEFPAGAILLVESIDRIGRLEHLETEALMNRIIAHGIEIHTLQDGLIYTRDALSDDLGISIIQRVKSYLAHQESKQKSFRVSEKWKQRAKLALAGEQHLTRNVPGWIDPDTFKCNEHAETVRLIFKLLLDGESLHNIARHLQSNDIKSFSRRKDANGFSVHSVRTVLRSESVIGTLPASQRNDRPAIPNYYEAAIDAATFNKAQEILDKNRKGRTPASDNPLTINIFKGLFRCQCGASVHPTGTKNKYAGVYRCNNHLDGRCDVPPLKRKPFDRWMIDNFLGMIDVGNDGESERKIAALQHEVEIVTARIKKATALLLEMDDITELKAQVKGLNQKRTEIQTTIDTLKRKTSLTDKELPQLKDIDLTTKAGRVECQLILSKHLKGLTLGKDSVTVTLQNDTEITIPTNPLPLNDGSPIFEIADKELLDIDAYQL

SEQ ID NO: 40457 - DNA, 50 bp, Escherichia coli; identical to SEQ ID NO: 36192
  source 1..50: mol_type = genomic DNA

SEQ ID NO: 40458 - DNA, 40 bp, Escherichia coli; identical to SEQ ID NO: 20043
  source 1..40: mol_type = genomic DNA

SEQ ID NO: 40459 - DNA, 50 bp, Escherichia coli; identical to SEQ ID NO: 40159
  source 1..50: mol_type = genomic DNA

SEQ ID NO: 40460 - DNA, 40 bp, Escherichia coli; identical to SEQ ID NO: 40160
  source 1..40: mol_type = genomic DNA

SEQ ID NO: 40461 - protein, 506 aa, Escherichia coli
MRSVITYLRFSSATQGAEGADSTRRQNDLFKQWLKKNSDAQVVASFNDEGLSGYKGKHLSGQFGDMLSRIESGEFSEGTILLVEAIDRIGRLEHLETEALMNRIIAHGIEIHTLQDGLIYTRDALSDDLGISIIQRVKSYIAHQESKQKSFRVSQKWKQRAKLALAGEQRLTKMVPGWIDPDTFKLNEHAETVRLIFKLLLDGESLHNIARHLQSNDIKSFSRRKDANGFSVHSVRTVLRSVSAIGTLPASQRNDRPAIPNYYEAAIDASTFNKAQEILDKNRKGRTPASDNPLTINIFKGLFRCQCGASVHPTGTKNKYAGVYRCNNNPDGRCDVPPLKRKPFDKWMIDNFLGMIDVGNDGEAEGKIASLQHEVEIVTARIKKATALLLEMDDIDELKIQIKELNQKRTELQTMIDNMRRKASLTDKELPQLKDIDLMTKAGRVECQLILSKHLKGLTLGKDSVTVTLQNDTEIIVPTDPLPLNDGTSIFEIAEKELLEIDAYQL

SEQ ID NO: 40462 - DNA, 50 bp, Escherichia coli; identical to SEQ ID NO: 40287
  source 1..50: mol_type = genomic DNA

SEQ ID NO: 40463 - DNA, 40 bp, Escherichia coli; identical to SEQ ID NO: 20043
  source 1..40: mol_type = genomic DNA

SEQ ID NO: 40464 - DNA, 50 bp, Escherichia coli; identical to SEQ ID NO: 40289
  source 1..50: mol_type = genomic DNA

SEQ ID NO: 40465 - DNA, 40 bp, Escherichia coli; identical to SEQ ID NO: 40160
  source 1..40: mol_type = genomic DNA

SEQ ID NO: 40466 - protein, 506 aa, Escherichia coli
MRSVITYLRYSSAIQGAEGADSTRRQNDLFKQWLKKNSDAQVVASFSDEGLSGYKGKHLTGQFGDMLARIESGEFPEGTILLVESIDRIGRLEHLETEALMNRILGNGLEIHTLQDGLIYTKDALADDLGISIIQRVKAYIAHQESKQKSFRVSQKWEQRAKLALAGEQRLTKMVPGWIDPDTFKLNEHAETVRLIFKLLLSGESLHNIARHLQSNGIKSFSRRKDANGFSVHSVRTILRSETTIGTLPASQRNDRPAIPNYYEAAIDASTFNKAQEILGKNRIGRTPASDNPLTINIFKGLFRCQCGASVHPTGTKNKYQGVYRCNNHLDGRCDVPPLKRKPFDKWMIDNFLGMIDVGKDGEAEGKIASLQHEVEIVTTRIKKATALLLEMDDIDELKIQLKELNQKRTELQTTIDNMRRKASLTDKELPQLKDIDLTTKAGRVECQLILSKHLKGLTLGKDSVTVTLQNDTEITIPTNPLPLNDGSPIFEIADKELLDIDAYQL

SEQ ID NO: 40467 - DNA, 50 bp, Escherichia coli; identical to SEQ ID NO: 36192
  source 1..50: mol_type = genomic DNA

SEQ ID NO: 40468 - DNA, 40 bp, Escherichia coli; identical to SEQ ID NO: 20043
  source 1..40: mol_type = genomic DNA

SEQ ID NO: 40469 - DNA, 50 bp, Escherichia coli; identical to SEQ ID NO: 40159
  source 1..50: mol_type = genomic DNA

SEQ ID NO: 40470 - DNA, 40 bp, Escherichia coli; identical to SEQ ID NO: 40160
  source 1..40: mol_type = genomic DNA

SEQ ID NO: 40471 - protein, 506 aa, Escherichia coli
MRSVITYLRFSSATQGAEGADSTRRQNDLFKQWLKKNSDAQVVASFSDEGLSGYKGKHLTGQFGDMLARIESGEFPEGTLLLVEAIDRIGRLEHLETEALMNRIIAHGIEIHTLQDGLIYTRDALSDDLGISIIQRVKSYIAHQESKQKSFRVSQKWEQRAKLALAGEQRLTKMVPGWIDPDTFKLNEHAETVRLIFKLLLDGESLHNIARHLQSNDIKSFSRRKDANGFSVHSVRTVLRSVSAIGTLPASQRNDRPAIPNYYEAAIDAATFNKAQEILDKNRKGRTPASDNPLTINIFKGLFRCQCGASVHPTGTKRTYQGVYRCNNHLDGRCDVPPLKRKPFDKWMIDNFLGMIDVGNDGEAEGKIAALQHEVEIVTARIKKATALLLEMDDITELKTQVKGLNQKRTELQTTIDNMRRKASLTDKELPQLKDIDLTTKAGRVECQLILSKHLKGLTLGKDSVIVTLQNDTEITIPTNPLPLNDGSPIFEIADKELLDIDAYQL

SEQ ID NO: 40472 - DNA, 50 bp, Escherichia coli; identical to SEQ ID NO: 40287
  source 1..50: mol_type = genomic DNA

SEQ ID NO: 40473 - DNA, 40 bp, Escherichia coli; identical to SEQ ID NO: 20043
  source 1..40: mol_type = genomic DNA

SEQ ID NO: 40474 - DNA, 50 bp, Escherichia coli; identical to SEQ ID NO: 40289
  source 1..50: mol_type = genomic DNA

SEQ ID NO: 40475 - DNA, 40 bp, Escherichia coli; identical to SEQ ID NO: 40160
  source 1..40: mol_type = genomic DNA

SEQ ID NO: 40476 - protein, 506 aa, Escherichia coli
MRSVITYLRYSSAIQGAEGADSTRRQNDLFKQWLKKNSDAQVVASFSDEGLSGYKGKHLTGQFGDMLARIESGEFPEGTILLVESIDRIGRLEHLETEALMNRILGNGLEIHTLQDGLIYTKDALADDLGISIIQRVKAYIAHQESKQKSFRVSQKWEQRAKLALAGEQRLTKMVPGWIDPDTFKLNEHAETVRLIFKLLLSGESLHNIARHLQSNGIKSFSRRKDANGFSVHSVRTILRSETTIGTLPASQRNDRPAIPNYYEAAIDASTFNKAQEILGKNRIGRTPASDNPLTINIFKGLFRCQCGASVHPTGTKNKYQGVYRCNNHLDGRCDVPPLKRKPFDKWMIDNFLGMIDVGNDGEAEGKIASLQHEVEIVTTRIKKATALLLEMDDIDELKIQLKELNQKRTELQTTIDNMRRKASLTDKELPQLKDIDLTTKAGRVECQLILSKHLKGLTLGKDSVIVTLQNDTEITIPTNPLPLNDGTSIFEIAEKELLEIDAYQL

SEQ ID NO: 40477 - DNA, 50 bp, Escherichia coli; identical to SEQ ID NO: 36192
  source 1..50: mol_type = genomic DNA

SEQ ID NO: 40478 - DNA, 40 bp, Escherichia coli; identical to SEQ ID NO: 20043
  source 1..40: mol_type = genomic DNA

SEQ ID NO: 40479 - DNA, 50 bp, Escherichia coli; identical to SEQ ID NO: 40159
  source 1..50: mol_type = genomic DNA

SEQ ID NO: 40480 - DNA, 40 bp, Escherichia coli; identical to SEQ ID NO: 40160
  source 1..40: mol_type = genomic DNA

SEQ ID NO: 40481 - protein, 506 aa, Escherichia coli
MRSVITYLRYSSAIQGAEGADSTRRQNDLFKQWLKKNSDAQVVASFSDEGLSGYKGKHLTGQFGDMLARIESGEFPEGTILLVESIDRIGRLEHLETEALMNRILGNGLEIHTLQDGLIYTKDALADDLGISIIQRVKAYIAHQESKQKSFRVSQKWEQRAKLALAGEQRLTKMVPGWIDPETFKCNEHAETVRLIFKLLLDGESLHNIARHLQANNISSFSRRKDANGFSVHSVRTILRSETTRGTLPASQRNDRPAIPNYYEAAIDAATFNKAQEILDKNRKGRTPASDNPLTINIFKGLFRCQCGASVHPTGTKNKYQGVYRCNNHLDGRCDVPPLKRKPFDKWMLENFLGMIDVGNDGEAEGKIASLQHEVEIVTTRIKKATALLLEMDDIDELKIQLKELNQKRTELQTTIDNMRRKASLTDKELPQLKDIDLTTKAGRVECQLILSKHLKGLTLGKDSVTVTLQNDTEITIPTNPLPLNDGTSIFEIAEKNLLNIDTFQL

SEQ ID NO: 40482 - DNA, 50 bp, Escherichia coli; identical to SEQ ID NO: 36192
  source 1..50: mol_type = genomic DNA

SEQ ID NO: 40483 - DNA, 40 bp, Escherichia coli; identical to SEQ ID NO: 20043
  source 1..40: mol_type = genomic DNA

SEQ ID NO: 40484 - DNA, 50 bp, Escherichia coli; identical to SEQ ID NO: 40159
  source 1..50: mol_type = genomic DNA

SEQ ID NO: 40485 - DNA, 40 bp, Escherichia coli; identical to SEQ ID NO: 40160
  source 1..40: mol_type = genomic DNA

SEQ ID NO: 40486 - protein, 506 aa, Escherichia coli
MRSVITYLRFSSAIQGAEGADSTRRQNDLFKQWLKKNSDAQIVASFSDEGLSGYKGKHLTGQFGDMLARIESGEFPEGTILLVEAIDRIGRLEHLETEALMNRILGNGIEIHTLQDGLIYTKDALADDLGISIIQRVKAYIAHQESKQKSFRVSQRWGQRAKLALAGKQRLTKMVPGWIDPETFKLNEHAETVRLIFKLLLDGESLHNIARHLQRNGIKSFSRRKDANGFSVHSVRTILRSETTIGTLPASQRNDRPAIPNYYEGVVDIPTFNKAQEILDKNRKGRTPASDNPLTINIFKGLFRCQCGASVHPTGTKNKYAGVYRCNNHLDGRCDVQPLKRKPFDRWMIDNFLGMIDVGNDGESERKIAALQHEVEIVTSRIKKATALLLEMDDITELKTQVKELNQRRTDIQTTIDTLKRKTSLSDKGLPQLKDIDLMTKAGRVECQLILSKHLKGLTLGKGLVTITLQNDTEITIPTNPLPLNDGSPIFEIADKELLDIDAYQL

SEQ ID NO: 40487 - DNA, 50 bp, Escherichia coli; identical to SEQ ID NO: 36192
  source 1..50: mol_type = genomic DNA

SEQ ID NO: 40488 - DNA, 40 bp, Escherichia coli; identical to SEQ ID NO: 20043
  source 1..40: mol_type = genomic DNA

SEQ ID NO: 40489 - DNA, 50 bp, Escherichia coli; identical to SEQ ID NO: 40159
  source 1..50: mol_type = genomic DNA

SEQ ID NO: 40490 - DNA, 40 bp, Escherichia coli; identical to SEQ ID NO: 40160
  source 1..40: mol_type = genomic DNA

SEQ ID NO: 40491 - protein, 506 aa, Escherichia coli; identical to SEQ ID NO: 31536

SEQ ID NO: 40492 - DNA, 50 bp, Escherichia coli; identical to SEQ ID NO: 36192
  source 1..50: mol_type = genomic DNA

SEQ ID NO: 40493 - DNA, 40 bp, Escherichia coli; identical to SEQ ID NO: 20043
  source 1..40: mol_type = genomic DNA

SEQ ID NO: 40494 - DNA, 50 bp, Escherichia coli; identical to SEQ ID NO: 40159
  source 1..50: mol_type = genomic DNA

SEQ ID NO: 40495 - DNA, 40 bp, Escherichia coli; identical to SEQ ID NO: 40160
  source 1..40: mol_type = genomic DNA

SEQ ID NO: 40496 - protein, 506 aa, Escherichia coli
MRHAITYLRYSSAIQGVEGADSTRRQNDLFKQWLKKNSDAQVVASFSDEGLSGYKGKHLTGQFGDMLARIESGEFPEGTILLVESIDRIGRLEHLETEALMNRILGNGLEIHTLQDGLIYTKDALADDLGISIIQRVKAYIAHQESKQKSFRVSQKWKQRAKLALAGEQRLTKMVPGWIDPDTFKLNEHAETVRLIFKLLLDGESLHNIARHLQANNISSFSRRKDANGFSVHSVRTILRSETTIGTLPASQRNDRPAIPNYYEAAIDAATFNKAQEILDKNRKGRTPASDNPLTINIFKGLFRCQCGASVHPTGTKNKYAGVYRCNNNPDGRCDVPPLKRKPFDKWMIDNFLGMIDVGNDGEAEGKIASLQHEVEIVTTRIKKATALLLEMDDIDELKIQLKELNQKRTELQTTIDTLKRKTSLSDKGLPQLKDIDLMTKAGRVECQLILSKHLKGLTLGKDSVTVTLQNDTEITIPTNPLPLNDGLPIFEIADKELLDIDAYRL

SEQ ID NO: 40497 - DNA, 50 bp, Escherichia coli
  source 1..50: mol_type = genomic DNA
agaccgaatagacttcattcaagggtcattgtattgtagctattcggcat

SEQ ID NO: 40498 - DNA, 40 bp, Escherichia coli; identical to SEQ ID NO: 20043
  source 1..40: mol_type = genomic DNA

SEQ ID NO: 40499 - DNA, 50 bp, Escherichia coli
  source 1..50: mol_type = genomic DNA
agaccgaatagacttcattcaaggtgcattgtattgtagctattcggcat

SEQ ID NO: 40500 - DNA, 40 bp, Escherichia coli; identical to SEQ ID NO: 40160
  source 1..40: mol_type = genomic DNA

SEQ ID NO: 40501 - protein, 506 aa, Escherichia coli
MRTVITYLRFSSAIQGAEGADSTRRQNDLFKQWLKKNSDAQVVASFSDEGLSGYKGKHLTGQFGDMLARIESGEFPEGTILLVEAIDRIGRLEHLETEALMNRIIAHGIEIHTLQDGLIYTRDALSDDLGISIIQRVKSYVAHQESKQKSFRVSQKWKQRAKLALAGEQRLTKMVPGWIDPDTFKCNEHAETVRLIFKLLLDGESLHNIARHLQANNISSFSRRKDANGFSVHSVRTILRSETTIGTLPASQRNDRPAIPNYYEAAIDAATFNKAQEILDKNRKGRTPASDNPLTINIFKGLFRCQCGASVHPTGTKNKYAGVYRCNNNPDGRCDVPPLKRKPFDKWMIDNFLGMIDVGNDGEAEGKIASLQHEVEIVTTRIKKATALLLEMDDIDELKIQLKELNQKRTELQTTIDNMRRKASLTDKELPQLKDIDLMTKAGRVECQLILSKHLKGLTLGKDSVTVTLQNDTEITIPTNPLPLNDGSPIFEIADKELLDIDAYQL

SEQ ID NO: 40502 - DNA, 50 bp, Escherichia coli; identical to SEQ ID NO: 36192
  source 1..50: mol_type = genomic DNA

SEQ ID NO: 40503 - DNA, 40 bp, Escherichia coli; identical to SEQ ID NO: 20043
  source 1..40: mol_type = genomic DNA

SEQ ID NO: 40504 - DNA, 50 bp, Escherichia coli; identical to SEQ ID NO: 40159
  source 1..50: mol_type = genomic DNA

SEQ ID NO: 40505 - DNA, 40 bp, Escherichia coli; identical to SEQ ID NO: 40160
  source 1..40: mol_type = genomic DNA

SEQ ID NO: 40506 - protein, 506 aa, Escherichia coli
MRTAITYLRFSSAIQGAEGADSTRRQNDLFKQWLKKNSDAQVVASFSDEGLSGYKGKHLTGQFGDMLARIESGEFSKGTILLVESIDRIGRLEHLETEALMNRILGNGIEIHTLQDGLVYTKDALADDLGISIIQRVKAYIAHQESKQKSFRVSQKWKQRAKLALAGEQRLTRNVPGWIDPDTLKLNEHAETVRLIFKLLLSGESLHNIARHLQSNGIKSFSRRKDANGFSVHSVRTILRSETTIGTLPASQRNDRPAIPNYYEAAIDAATFNKAQEILDKNRKGRTPASDNPLTINIFKGLFRCQCGASVHPTGTKNKYAGVYRCNNHLDGRCDVPPLKRKPFDRWMIDNFLGMIDVGNDGEAEGKIASLQHEVEIVTARIKKATALLLEMDDIDELKIQLKELNQKRTELQTTIDNMRRKTSLTDKELPQLKDIDLTTKAGRVECQLILSKHLKGLTLGKDSVTVTLQNDTEIIVPTDPLPLNDGTSIFEIAEKELLEIDAYQL

SEQ ID NO: 40507 - DNA, 50 bp, Escherichia coli; identical to SEQ ID NO: 36192
  source 1..50: mol_type = genomic DNA

SEQ ID NO: 40508 - DNA, 40 bp, Escherichia coli; identical to SEQ ID NO: 20043
  source 1..40: mol_type = genomic DNA

SEQ ID NO: 40509 - DNA, 50 bp, Escherichia coli; identical to SEQ ID NO: 40159
  source 1..50: mol_type = genomic DNA

SEQ ID NO: 40510 - DNA, 40 bp, Escherichia coli; identical to SEQ ID NO: 40160
  source 1..40: mol_type = genomic DNA

SEQ ID NO: 40511 - protein, 506 aa, Escherichia coli
MRSVITYLRFSSAIQGAEGADSTRRQNDLFKQWLKKNSDAQIVASFSDEGLSGYKGKHLTGQFGDMLARIESGEFPEGTILLVEAIDRIGRLEHLETEALMNRILGNGIEIHTLQDGLIYTKDALADDLGISIIQRVKAYIAHQESKQKSFRVSQRWGQRAKLALAGKQRLTKMVPGWIAPETFKLNEHAETVRLIFKLLLDGESLHNIARHLQSNGIKSFSRRKDANGFSVHSVRTILRSETTIGTLPASQRNDRPAIPNYYEGVVDIPTFNKAQEILDKNRKGRTPASDNPLTINIFKGLFRCQCGASVHPTGTKNKYAGVYRCNNHLDGRCDVQPLKRKPFDRWMIDNFLGMIDVGNDGESERKIAALQHEVEIVTSRIKKATALLLEMDDITELKTQVKELNQRRTDIQTTIDTLKRKTSLSDKGLPQLKDIDLMTKAGRVECQLILSKHLKGLTLGKGLVTITLQNDTEITIPTNPLPLNDGSPIFEIADKELLDIDAYQL

SEQ ID NO: 40512 - DNA, 50 bp, Escherichia coli; identical to SEQ ID NO: 36192
  source 1..50: mol_type = genomic DNA

SEQ ID NO: 40513 - DNA, 40 bp, Escherichia coli; identical to SEQ ID NO: 20043
  source 1..40: mol_type = genomic DNA

SEQ ID NO: 40514 - DNA, 50 bp, Escherichia coli; identical to SEQ ID NO: 40159
  source 1..50: mol_type = genomic DNA

SEQ ID NO: 40515 - DNA, 40 bp, Escherichia coli; identical to SEQ ID NO: 40160
  source 1..40: mol_type = genomic DNA

SEQ ID NO: 40516 - protein, 506 aa, Escherichia coli
MRSVITYLRYSSAIQGAEGADSTRRQNDLFKQWLKKNSDAQVVASFSDEGLSGYKGKHLTGQFGDMLARIESGEFSEGTVLLVEAIDRIGRLEHLETEALMNRIIAHGIEIHTLQDGLIYTRDALSDDLGISIIQRVKSYVAHQESKQKSFRVSQKWKQRAKLALAGEQRLTRNVPGWIDPDTFKCNEHAETVRLIFKLLLDGESLHNIARHLQSNDIKSFSRRKDANGFSVHSVRTVLRSESVIGTLPASQRNDRPAIPNYYEAAIDAATFNKAQEILDKNRKGRTPASDNPLTINIFKGLFRCQCGASVHPTGTKNKYAGVYRCNNHLDGRCDVPPLKRKPFDRWMIDNFLGMIDVGNDGESERKIAALQHEVEIVTARIKKATALLLEMDDITELKAQVKGLNQKRTEIQTTIDTLKRKTSLTDKELPQLKDIDLTTKAGRVECQLILSKHLKGLTLGKDSVTVTLQNDTEITIPTNPLPLNDGSPIFEIADKELLDIDAYQL

SEQ ID NO: 40517 - DNA, 50 bp, Escherichia coli; identical to SEQ ID NO: 36192
  source 1..50: mol_type = genomic DNA

SEQ ID NO: 40518 - DNA, 40 bp, Escherichia coli; identical to SEQ ID NO: 20043
  source 1..40: mol_type = genomic DNA

SEQ ID NO: 40519 - DNA, 50 bp, Escherichia coli; identical to SEQ ID NO: 40159
  source 1..50: mol_type = genomic DNA

SEQ ID NO: 40520 - DNA, 40 bp, Escherichia coli; identical to SEQ ID NO: 40160
  source 1..40: mol_type = genomic DNA

SEQ ID NO: 40521 - protein, 506 aa, Escherichia coli
MRSVITYLRYSSAIQGAEGADSTRRQNDLFKQWLKKNSDAQVVASFSDEGLSGYKGKHLTGQFGDMLARIESGEFPEGTILLVESIDRIGRLEHLETEALMNRILGNGLEIHTLQDGLIYTKDALADDLGISIIQRVKAYIAHQESKQKSFRVSQKWEQRAKLALAGEQRLTKMVPGWIDPDTFKLNEHAETVRLIFKLLLSGESLHNIARHLQSNGIKSFSRRKDANGFSVHSVRTILRSETTIGTLPASQRNDRPAIPNYYEAAIDAATFNKAQEILDKNRKGRTPASDNPLTINIFKGLFRCRCGASVHPTGTKNKYAGVYRCNNHLDGRCDVQPLKRKPFDRWMIDNFLGMIDVVSDGETERRLAELQHEVEIVTARIKKATALLLEMDDIDELKIQLKELNQKRTELQTTIDNMRRKASLTDKELPQLKDIDLTTKAGRVECQLILSKHLKGLTLGKDSVIVTLQNDTEITIPTNPLPLNDGTSIFEIADKELLDIDAFRL

SEQ ID NO: 40522 - DNA, 50 bp, Escherichia coli; identical to SEQ ID NO: 36192
  source 1..50: mol_type = genomic DNA

SEQ ID NO: 40523 - DNA, 40 bp, Escherichia coli; identical to SEQ ID NO: 20043
  source 1..40: mol_type = genomic DNA

SEQ ID NO: 40524 - DNA, 50 bp, Escherichia coli; identical to SEQ ID NO: 40159
  source 1..50: mol_type = genomic DNA

SEQ ID NO: 40525 - DNA, 40 bp, Escherichia coli; identical to SEQ ID NO: 40160
  source 1..40: mol_type = genomic DNA

SEQ ID NO: 40526 - protein, 506 aa, Escherichia coli; identical to SEQ ID NO: 40366

SEQ ID NO: 40527 - DNA, 50 bp, Escherichia coli
  source 1..50: mol_type = genomic DNA
ttttaacataatgactcttcaagggtcattgtattgtagctattcggcat

SEQ ID NO: 40528 - DNA, 40 bp, Escherichia coli; identical to SEQ ID NO: 20043
  source 1..40: mol_type = genomic DNA

SEQ ID NO: 40529 - DNA, 50 bp, Escherichia coli
  source 1..50: mol_type = genomic DNA
ttttaacataatgactcttcaaggtgcattgtattgtagctattcggcat

SEQ ID NO: 40530 - DNA, 40 bp, Escherichia coli; identical to SEQ ID NO: 40160
  source 1..40: mol_type = genomic DNA

SEQ ID NO: 40531 - protein, 506 aa, Escherichia coli
MRSVITYLRYSSAIQGAEGADSTRRQNDLFKQWLKKNSDAQVVASFSDEGLSGYKGKHLTGQFGDMLARIESGEFPEGTILLVESIDRIGRLEHLETEALMNRILGNGLEIHTLQDGLIYTKDALADDLGISIIQRVKAYIAHQESKQKSFRVSQKWEQRAKLALAGEQRLTKMVPGWIDPDTFKLNEHAETVRLIFKLLLSGESLHNIARHLQANNISSFSRRKDANGFSVHSVRTILRSETTIGTLPASQRNDRPAIPNYYEAAIDAATFNKAQEILDKNRKGRTPASDNPLTINIFKGLFRCQCGASVHPTGTKNKYAGVYRCNNNPDGRCDVPPLKRKPFDKWMIDNFLGMIDVGNDGEAEGKIAALQHEVEIVTARIKKATALLLEMDDITELKTQVKGLNQKRTELQTTIDNMRRKASLTDKELPQLKDIDLTTKAGRVECQLILSKHLKGLTLGKDSVTVTLQNDTEIIVPTDPLPLNDGTSIFEIAEKELLEIDAYQL

SEQ ID NO: 40532 - DNA, 50 bp, Escherichia coli; identical to SEQ ID NO: 36192
  source 1..50: mol_type = genomic DNA

SEQ ID NO: 40533 - DNA, 40 bp, Escherichia coli; identical to SEQ ID NO: 20043
  source 1..40: mol_type = genomic DNA

SEQ ID NO: 40534 - DNA, 50 bp, Escherichia coli; identical to SEQ ID NO: 40159
  source 1..50: mol_type = genomic DNA

SEQ ID NO: 40535 - DNA, 40 bp, Escherichia coli; identical to SEQ ID NO: 40160
  source 1..40: mol_type = genomic DNA

SEQ ID NO: 40536 - protein, 506 aa, Escherichia coli
MRSVITYLRFSSAIQGAEGADSTRRQNDLFKQWLKKNSDAQIVASFSDEGLSGYKGKHLTGQFGDMLARIESGEFPEGTILLVEAIDRIGRLEHLETEALMNRILGNGIEIHTLQDGLIYTKDALADDLGISIIQRVKAYIAHQESKQKSFRVSQRWGQRAKLALAGKQRLTKMVPGWIDPATFKLNEHAETVRLIFKLLLDGESLHNIARHLQSNGIKSFSRRKDANGFSVHSVRTILRSETTIGTLPASQRNDRPAIPNYYEGVVDIPTFNKAQEILDKNRKGRTPASDNPLTINIFKGLFRCQCGASVHPTGTKNKYAGVYRCNNHLDGRCDVQPLKRKPFDRWMIDNFLGMIDVGNDGESERKIAALQHEVEIVTSRIKKATALLLEMDDITELKTQVKELNQRRTDIQTTIDTLKRKTSLSDKGLPQLKDIDLMTKAGRVECQLILSKHLKGLTLGKGSVTITLQNDTEITIPTNPLPLNDGSPIFEIADKELLDIDAYQL

SEQ ID NO: 40537 - DNA, 50 bp, Escherichia coli; identical to SEQ ID NO: 36192
  source 1..50: mol_type = genomic DNA

SEQ ID NO: 40538 - DNA, 40 bp, Escherichia coli; identical to SEQ ID NO: 20043
  source 1..40: mol_type = genomic DNA

SEQ ID NO: 40539 - DNA, 50 bp, Escherichia coli; identical to SEQ ID NO: 40159
  source 1..50: mol_type = genomic DNA

SEQ ID NO: 40540 - DNA, 40 bp, Escherichia coli; identical to SEQ ID NO: 40160
  source 1..40: mol_type = genomic DNA

SEQ ID NO: 40541 - protein, 506 aa, Escherichia coli
MRSVITYLRFSSATQGAEGADSTRRQNDLFKQWLKKNSDAQVVASFSDEGLSGYKGKHLTGQFGDMLARIESGEFPEGTLLLVEAIDRIGRLEHLETEALMNRIIAHGIEIHTLQDGLIYTRDALSDDLGISIIQRVKSYIAHQESKQKSFRVSQKWEQRAKLALAGEQRLTKMVPGWIDPDTFKLNEHAETVRLIFKLLLDGESLHNIARHLQSNDIKSFSRRKDANGFSVHSVRTVLRSVSAIGTLPASQRNDRPAIPNYYEAAIDAATFNKAQEILDKNRKGRTPASDNPLTINIFKGLFRCQCGASVHPTGTKRTYQGVYRCNNHLDGRCDVPPLKRKPFDKWMIDNFLGMIDVGNDGEAEGKIAALQHEVEIVTARIKKATALLLEMDDITELKTQVKGLNQKRTELQTTIDNMRRKASLTDKELPQLKDIDLTTKAGRVECQLILSKHLKGLTLGKDSVTVTLQNDTEITIPTNPLPLNDGSPIFEIADKELLDIDAYQL

SEQ ID NO: 40542 - DNA, 50 bp, Escherichia coli; identical to SEQ ID NO: 40287
  source 1..50: mol_type = genomic DNA

SEQ ID NO: 40543 - DNA, 40 bp, Escherichia coli; identical to SEQ ID NO: 20043
  source 1..40: mol_type = genomic DNA

SEQ ID NO: 40544 - DNA, 50 bp, Escherichia coli; identical to SEQ ID NO: 40289
  source 1..50: mol_type = genomic DNA

SEQ ID NO: 40545 - DNA, 40 bp, Escherichia coli; identical to SEQ ID NO: 40160
  source 1..40: mol_type = genomic DNA

SEQ ID NO: 40546 - protein, 506 aa, Escherichia coli
MRSVITYLRFSSAIQGAEGADSTRRQNDLFKQWLKKNSDAQIVASFSDEGLSGYKGKHLTGQFGDMLARIESGEFPEGTILLVEAIDRIGRLEHLETEALMNRILGNGIEIHTLQDGLIYTKDALADDLGISIIQRVKAYIAHQESKQKSFRVSQRWGQRAKLALAGKQRLTKMVPGWIDPETFKLNEHAETVRLIFKLLLDGESLHNIARHLQSNGIKSFSRRKDANGFSVHSVRTILRSETTIGTLPASQRNDRPAIPNYYEGVVDIPTFNKAQEILDKNRKGRTPASDNPLTINIFKGLFRCQCGASVHPTGTKNKYAGVYRCNNHLDGRCDVQPLKRKPFDRWMIDNFLGMIDVGNDGESERKIAALQHEVEIVTSRIKKATALLLEMDDITELKTQVKELNQRRTDIQTTIDTLKRKTSLSDKGLPQLKDIDLMTKAGRVECQLILSKHLKGLTLGKGLVTITLQNNTEITIPTNPLPLNDGSPIFEIADKELLDIDAYQL

SEQ ID NO: 40547 - DNA, 50 bp, Escherichia coli; identical to SEQ ID NO: 36192
  source 1..50: mol_type = genomic DNA

SEQ ID NO: 40548 - DNA, 40 bp, Escherichia coli; identical to SEQ ID NO: 20043
  source 1..40: mol_type = genomic DNA

SEQ ID NO: 40549 - DNA, 50 bp, Escherichia coli; identical to SEQ ID NO: 40159
  source 1..50: mol_type = genomic DNA

SEQ ID NO: 40550 - DNA, 40 bp, Escherichia coli; identical to SEQ ID NO: 40160
  source 1..40: mol_type = genomic DNA

SEQ ID NO: 40551 - protein, 506 aa, Escherichia coli
MRSVITYLRYSSAIQGAEGADSTRRQNDLFKQWLKKNSDAQVVASFSDEGLSGYKGKHLTGQFGDMLARIESGEFPEGTILLVESIDRIGRLEHLETEALMNRILGNGLEIHTLQDGLIYTKDALADDLGISIIQRVKAYIAHQESKQKSFRVSQKWEQRAKLALAGEQRLTKMVPGWIDPDTFKLNEHAETVRLIFKLLLSGESLHNIARHLQSNGIKSFSRRKDANGFSVHSVRTILRSETTIGTLPASQRNDRPAIPNYYEAAIDASTFNKAQEILGKNRIGRTPASDNSLTINIFKGLFRCQCGASVHPTGTKNKYQGVYRCNNHLDGRCDVPPLKRKPFDKWMIDNFLGMIDVGNDGEAEGKIASLQHEVEIVTTRIKKATALLLEMDDIDELKIQLKELNQKRTELQTTIDNMRRKASLTDKELPQLKDIDLTTKAGRVECQLILSKHLKGLTLGKDSVTVTLQNDTEITIPTNPLPLNDGSPIFEIADKELLDIDAYQL

SEQ ID NO: 40552 - DNA, 50 bp, Escherichia coli; identical to SEQ ID NO: 36192
  source 1..50: mol_type = genomic DNA

SEQ ID NO: 40553 - DNA, 40 bp, Escherichia coli; identical to SEQ ID NO: 20043
  source 1..40: mol_type = genomic DNA

SEQ ID NO: 40554 - DNA, 50 bp, Escherichia coli; identical to SEQ ID NO: 40159
  source 1..50: mol_type = genomic DNA

SEQ ID NO: 40555 - DNA, 40 bp, Escherichia coli; identical to SEQ ID NO: 40160
  source 1..40: mol_type = genomic DNA

SEQ ID NO: 40556 - protein, 506 aa, Escherichia coli; identical to SEQ ID NO: 30291

SEQ ID NO: 40557 - DNA, 50 bp, Escherichia coli
  source 1..50: mol_type = genomic DNA
aaaccgaatagacttcattcaagggtcattgtattgtagctatacggcat

SEQ ID NO: 40558 - DNA, 40 bp, Escherichia coli; identical to SEQ ID NO: 20043
  source 1..40: mol_type = genomic DNA

SEQ ID NO: 40559 - DNA, 50 bp, Escherichia coli
  source 1..50: mol_type = genomic DNA
aaaccgaatagacttcattcaaggtgcattgtattgtagctatacggcat

SEQ ID NO: 40560 - DNA, 40 bp, Escherichia coli; identical to SEQ ID NO: 40160
  source 1..40: mol_type = genomic DNA

SEQ ID NO: 40561 - protein, 506 aa, Escherichia coli
MRSVITYLRYSSAVQGAEGADSTRRQNDLFKQWLKKNSDAQVVASFSDEGLSGYKGKHLTGQFGDMLARIESGEFPEGTILLVESIDRIGRLEHLETEALMNRILGNGLEIHTLQDGLIYTKDALADDLGISIIQRVKAYIAHQESKQKSFRVSQKWEQRAKLALAGEQRLTKMVPGWIDPDTFKLNEHAETVRLIFKLLLSGESLHNIARHLQSNGIKSFSRRKDANGFSVHSVRTILRSETTIGTLPASQRNDRPAIPNYYEAAIDASTFNKAQEILGKNRIGRTPASDNPLTINIFKGLFRCQCGASVHPTGTKNKYQGVYRCNNHLDGRCDVPPLKRKPFDKWMIGNFLGMIDVGNDGEAEGKIASLQHEVEIVTTRIKKATALLLEMDDIDELKIQLKELNQKRTELQTTIDNMRRKASLTDKELPQLKDIDLTTKAGRVECQLILSKHLKGLTLGKDSVTVTLQNDTEITIPTNPLPLNDGSPIFEIADKELLDIDAYQL

SEQ ID NO: 40562 - DNA, 50 bp, Escherichia coli; identical to SEQ ID NO: 36192
  source 1..50: mol_type = genomic DNA

SEQ ID NO: 40563 - DNA, 40 bp, Escherichia coli; identical to SEQ ID NO: 20043
  source 1..40: mol_type = genomic DNA

SEQ ID NO: 40564 - DNA, 50 bp, Escherichia coli; identical to SEQ ID NO: 40159
  source 1..50: mol_type = genomic DNA

SEQ ID NO: 40565 - DNA, 40 bp, Escherichia coli; identical to SEQ ID NO: 40160
  source 1..40: mol_type = genomic DNA

SEQ ID NO: 40566 - protein, 506 aa, Escherichia coli
MRSVITYLRFSSATQGAEGADSTRRQNELFKQWLRKNSDAQVVASFSDEGLSGYKGKHLTGQFGDMLARIEAGEFPAGAILLVESIDRIGRLEHLETEALMNRIIAHGIEIHTLQDGLIYTRDALSDDLGISIIQRVKSYLAHQESKQKSFRVSEKWKQRAKLALAGEQHLTRNVPGWIDPDTFKCNEHAETVRLIFKLLLDGESLHNIARHLQSNDIKSFSRRKDANGFSVHSVRTVLRSESVIGTLPASQRNDRPAIPNYYEAAIDAATFNKAQEILDKNRKGRTPASDNPLTINIFKGLFRCQCGASVHPTGTKNKYAGVYRCNNHLDGRCDVPPLKRKPFDKWMIDNFLGMIDVGNDGEAEGKIAALQHEVEIVTARIKKATALLLEMDDIDELKIQLKELNQKRTELQTTIDNMRRKASLTDKELPQLKDIDLTTKAGRVECQLILSKHLKGLTLGKDTVTVTLQNDTEITIPTNPLPLNDGTSIFEIAEKNLLNIDTFQL

SEQ ID NO: 40567 - DNA, 50 bp, Escherichia coli
  source 1..50: mol_type = genomic DNA
aaaccgaatagacttcactcaagggtcattgtattgtagctattcggcat

SEQ ID NO: 40568 - DNA, 40 bp, Escherichia coli; identical to SEQ ID NO: 20043
  source 1..40: mol_type = genomic DNA

SEQ ID NO: 40569 - DNA, 50 bp, Escherichia coli
  source 1..50: mol_type = genomic DNA
aaaccgaatagacttcactcaaggtgcattgtattgtagctattcggcat

SEQ ID NO: 40570 - DNA, 40 bp, Escherichia coli; identical to SEQ ID NO: 40160
  source 1..40: mol_type = genomic DNA

SEQ ID NO: 40571 - protein, 506 aa, Escherichia coli
MRTAITYLRFSSAIQGAEGADSTRRQNDLFKQWLKKNGDAQVVASFSDEGLSGYKGKHLTGQFGDMLARIEAGEFPEGTILLVESIDRIGRLEHLETEALMNRILGNGIEIHTLQDGLIYTKDALADDLGISIIQRVKAYIAHQESKQKSFRVSQKWGQRAKLALAGKQRLTKMVPGWIDPETFKLNEHAETVRLIFKLLLDGESLHNIARHLQSNGIKSFSRRKDANGFSVHSVRTILRSETTIGTLPASQRNDRPAIPNYYEGVVDAATFNKAQEILDKNRKGRTPASDNPLTINIFKGLFRCQCGASVHPTGTKNKYAGVYRCNNHLDGRCDVQPLKRKPFDRWIIDNFLGMIDVGNDGESERKVAALQHEVEIVTSRIKKATALLLEMDDIDELKIQLKELNQRRTELQTTIDSMRRKTSLSDKGLPQLKDIDLMTKAGRVECQLILSKHLKGLTLGKDSVTVTLQNDTEITIPTNPLPLNDGSPIFEIADKELLDVDTYRL

SEQ ID NO: 40572 - DNA, 50 bp, Escherichia coli; identical to SEQ ID NO: 36192
  source 1..50: mol_type = genomic DNA

SEQ ID NO: 40573 - DNA, 40 bp, Escherichia coli; identical to SEQ ID NO: 20043
  source 1..40: mol_type = genomic DNA

SEQ ID NO: 40574 - DNA, 50 bp, Escherichia coli; identical to SEQ ID NO: 40159
  source 1..50: mol_type = genomic DNA

SEQ ID NO: 40575 - DNA, 40 bp, Escherichia coli; identical to SEQ ID NO: 40160
  source 1..40: mol_type = genomic DNA

SEQ ID NO: 40576 - protein, 506 aa, Escherichia coli
MRNVITYLRYSSAIQGVEGADSTRRQNDLFEQWLKKNSDAQVVASFSDEGLSGYKGKHLSGQFGDMLSRIESGEFPEGTILLVESIDRIGRLEHLETEALMNRILGNGLEIHTLQDGLIYTKDALADDLGISIIQRVKAYIAHQESKQKSFRVSQKWSQRAKLALAGEQRLTKMVPGWIDPDTFKLNEHAETVRLIFKLLLSGESLHHIARHLQANNISSFSRRKDANGFSVHSVRTILRSETTIGTLPASQRNDRPAIPNYYEPAVDAATFNKAQEILDKNRKGRTPASDNPLTINIFKGLFRCQCGASVHPTGTKNKYAGVYRCNNHLDGRCGVPPLKRKPFDKWMLDNFLGMIDVGNDGESERKIAALQHEVEIVTARIKKATALLLEMDDITELKTQVRELNQKRTDIQTTIDTLKRKTSLSDKGLPQLKDIDLMTKAGRVECQLILSKHLQGLTLGKDSVTVTLQNDTEIIVPTDPLPLNDGSPIFEIAEKDLLEVDGFQL

SEQ ID NO: 40577 - DNA, 50 bp, Escherichia coli; identical to SEQ ID NO: 40287
  source 1..50: mol_type = genomic DNA

SEQ ID NO: 40578 - DNA, 40 bp, Escherichia coli; identical to SEQ ID NO: 20043
  source 1..40: mol_type = genomic DNA

SEQ ID NO: 40579 - DNA, 50 bp, Escherichia coli; identical to SEQ ID NO: 40289
  source 1..50: mol_type = genomic DNA

SEQ ID NO: 40580 - DNA, 40 bp, Escherichia coli; identical to SEQ ID NO: 40160
  source 1..40: mol_type = genomic DNA

SEQ ID NO: 40581 - protein, 506 aa, Escherichia coli
MRSVITYLRYSSAIQGAEGADSTRRQNDLFKQWLKKNSDAQVVASFSDEGLSGYKGKHLTGQFGDMLARIESGEFPEGTILLVESIDRIGRLEHLETEALMNRILGNGLEIHTLQDGLIYTKDALADDLGISIIQRVKAYIAHQESKQKSFRVSQKWEQRAKLALAGEQRLTKMVPGWIDPDTFKCNEHAETVRLIFKLLLDGESLHNIARHLQANNISSFSRRKDANGFSVHSVRTILRSETTRGTLPASQRNDRPAIPNYYEAAIDAATFNKAQEILDKNRKGRTPASDNPLTINIFKGLFRCQCGASVHPTGTKNKYAGVYRCNNHLDGRCDVPPLKRKPFDRWMIDNFLGMIDVGNDGEAEKEIASLQHEVEIVTTRIKKATALLLEMDDIDELKIQLKELNQKRTELQTTIDNMRRKASLTDKELPQLKDIDLMTKAGRVECQLILSKHLKGLTLGKDSVTVTLQNDTEITIPTDPLPLNDGTSIFEIAEKNLLNIDTFQL

SEQ ID NO: 40582 - DNA, 50 bp, Escherichia coli; identical to SEQ ID NO: 36192
  source 1..50: mol_type = genomic DNA

SEQ ID NO: 40583 - DNA, 40 bp, Escherichia coli; identical to SEQ ID NO: 20043
  source 1..40: mol_type = genomic DNA

SEQ ID NO: 40584 - DNA, 50 bp, Escherichia coli; identical to SEQ ID NO: 40159
  source 1..50: mol_type = genomic DNA

SEQ ID NO: 40585 - DNA, 40 bp, Escherichia coli; identical to SEQ ID NO: 40160
  source 1..40: mol_type = genomic DNA

SEQ ID NO: 40586 - protein, 506 aa, Escherichia coli
MRHVITYLRYSSAIQGAEGADSTRRQNDLFKQWLKKNSDAQVVASFNDEGLSGYKGKHLSGQFGDMLSRIESGEFSEGTILLVEAIDRIGRLEHLETEALMNRILGNGIEIHTLQDGLIYTKDALADDLGISIIQRVKAYIAHQESKQKSFRVSQKWGQRAKLALAGKQRLTKMVPGWIDPETFEVNEHAETVRLIFKLLLDGESLHNIARHLQANNISSFSRRKDANGFSVHSVRTILRSETTIGTLPASQRNDRPAIPNYYEAAIDAATFNKAQEILDKNRKGRTPASDNPLTINIFKGLFRCQCGASVHPTGTKNKYQGVYRCNNHLDGRCDVPPLKRKPFDKWMIDNFLGMIDVGNDGEAEGKIASLQHEVEIVTTRIKKATALLLEMDDIDELKIQIKELNQRRTELQTTIDNMRRKASLTDKELPQLKDIDLMTKAGRVECQLILSKHLKGLTLGKDSVIVTLQNDTEITIPTNPLPLNDGSPIFEIADKELLDIDAYQL

SEQ ID NO: 40587 - DNA, 50 bp, Escherichia coli; identical to SEQ ID NO: 36192
  source 1..50: mol_type = genomic DNA

SEQ ID NO: 40588 - DNA, 40 bp, Escherichia coli; identical to SEQ ID NO: 20043
  source 1..40: mol_type = genomic DNA

SEQ ID NO: 40589 - DNA, 50 bp, Escherichia coli; identical to SEQ ID NO: 40159
  source 1..50: mol_type = genomic DNA

SEQ ID NO: 40590 - DNA, 40 bp, Escherichia coli; identical to SEQ ID NO: 40160
  source 1..40: mol_type = genomic DNA

SEQ ID NO: 40591 - protein, 506 aa, Escherichia coli
MRSVITYLRFSSATQGAEGADSTRRQNDLFKQWLKKNSDAQVVASFSDEGLSGYKGKHLTGQFGDMLARIESGEFPEGTLLLVEAIDRIGRLEHLETEALMNRIIAHGIEIHTLQDGLIYTRDALSDDLGISIIQRVKSYIAHQESKQKSFRVSQKWEQRAKLALAGEQRLTKMVPGWIDPDTFKLNEHAETVRLIFKLLLDGESLHNIARHLQSNDIKSFSRRKDANGFSVHSVRTVLRSVSAIGTLPASQRNDRPAIPNYYEAAIDAATFNKAQEILDKKRKGRTPASDNPLTINIFKGLFRCQCGASVHPTGTKRTYQGVYRCNNHLDGRCDVPPLKRKPFDKWMIDNFLGMIDVGNDGEAEGKIAALQHEVEIVTARIKKATALLLEMDDITELKTQVKGLNQKRTELQTTIDNMRRKASLTDKELPQLKDIDLTTKAGRVECQLILSKHLKGLTLGKDSVTVTLQNDTEITIPTNPLPLNDGSPIFEIADKELLDIDAYQL

SEQ ID NO: 40592 - DNA, 50 bp, Escherichia coli; identical to SEQ ID NO: 40287
  source 1..50: mol_type = genomic DNA

SEQ ID NO: 40593 - DNA, 40 bp, Escherichia coli; identical to SEQ ID NO: 20043
  source 1..40: mol_type = genomic DNA

SEQ ID NO: 40594 - DNA, 50 bp, Escherichia coli; identical to SEQ ID NO: 40289
  source 1..50: mol_type = genomic DNA

SEQ ID NO: 40595 - DNA, 40 bp, Escherichia coli; identical to SEQ ID NO: 40160
  source 1..40: mol_type = genomic DNA

SEQ ID NO: 40596 - protein, 506 aa, Escherichia coli
MRHVITYLRYSSAIQGAEGADSTRRQNDLFKQWLKKNSDAQVVASFNDEGLSGYKGKHLSGQFGDMLSRIESGEFPEGTILLVEAIDRIGRLEHLETEALMNRIIAHGIEIHTLQDGLIYTRDALSDDLGISIIQRVKSYIAHQESKQKSFRVSQKWEQRAKLALAGEQRLTKMVPGWIDPGTFKVNEHAETVRLIFKLLLDGESLHNIARHLQANNISSFSRRKDANGFSVHSVRTILRSETTIGTLPASQRNDRPAIPNYYEAAIDASTFNKAQEILDKNRKGRTPASDNPLTINIFKGLFRCQCGASVHPTGTKNKYQGVYRCNSHLDGRCDVQPLKRKPFDRWMIDNFLGMIDVGNDGESERKIAALQHEVEIVTARIKKATALLLEMDDIDELKIQLKELNQKRTELQTTIDNMRRKASLTDKELPQLKDINLTTKAGRVECQLILSKHLKGLTLGKDTVTVTLQNDTEITIPTDPLPLNDGTSIFEIAEKNLLNIDTFQL

SEQ ID NO: 40597 - DNA, 50 bp, Escherichia coli; identical to SEQ ID NO: 40222
  source 1..50: mol_type = genomic DNA

SEQ ID NO: 40598 - DNA, 40 bp, Escherichia coli; identical to SEQ ID NO: 20043
  source 1..40: mol_type = genomic DNA

SEQ ID NO: 40599 - DNA, 50 bp, Escherichia coli; identical to SEQ ID NO: 40224
  source 1..50: mol_type = genomic DNA

SEQ ID NO: 40600 - DNA, 40 bp, Escherichia coli; identical to SEQ ID NO: 40160
  source 1..40: mol_type = genomic DNA

SEQ ID NO: 40601 - protein, 506 aa, Escherichia coli
MRSVITYLRYSSAIQGAEGADSTRRQNDLFKQWLKKNGDAQIVASFSDEGLSGYKGKHLTGQFGDMLARIEAGEFPEGTILLVESIDRIGRLEHLETEALMNRILGNGIEIHTLQDGLIYTKDALADDLGISIIQRVKAYIAHQESKQKSFRVSQKWGQRAKLALAGEQRLTKMVPGWIDPETLKLNEHAETVRLIFKLLLDGESLHNIARHLQSNGIKSFSRRKDANGFSVHSVRTILRSETTIGTLPASQRNDRPAIPNYYEGVVDIPTFNKAQEILDKNRKGRTPASDNPLTINIFKGLFRCQCGASVHPTGTKNKYAGVYRCNNHLDGRCDVQPLKRKPFDKWVLENFLGMIDVGNDGESERKIAALQHEVEIVTARIKKATALLLEMDDITELKTQVKGLNQKRTEIQTTIDTLKRKTSLSDKGLPQLKDIDLMTKAGRVECQLILSKHLKGLTLGKDSVTVTLQNDTEITIPTNPLPLNDGSPIFEIADKELLDIDAYQL

SEQ ID NO: 40602 - DNA, 50 bp, Escherichia coli; identical to SEQ ID NO: 36192
  source 1..50: mol_type = genomic DNA

SEQ ID NO: 40603 - DNA, 40 bp, Escherichia coli; identical to SEQ ID NO: 20043
  source 1..40: mol_type = genomic DNA

SEQ ID NO: 40604 - DNA, 50 bp, Escherichia coli; identical to SEQ ID NO: 40159
  source 1..50: mol_type = genomic DNA

SEQ ID NO: 40605 - DNA, 40 bp, Escherichia coli; identical to SEQ ID NO: 40160
  source 1..40: mol_type = genomic DNA

SEQ ID NO: 40606 - protein, 506 aa, Escherichia coli
MRTVITYLRFSSATQGAEGADSTRRQNELFKQWLRKNSDAQVVASFNDEGLSGYKGKHLSGQFGDMLSRIESGEFPEGTILLVEAIDRIGRLEHLETEALMNRIIAHGIEIHTLQDGLIYTRDALSDDLGISIIQRVKSYLAHQESKQKSFRVSQKWEQRAKLALAGEQRLTKMVPGWIDPETFKLNEHAETVRLIFKLLLDGESLHNIARHLQANNISSFSRRKDANGFSVHSVRTILRSETTIGTLPASQRNDRPAIPNYYEAAIDAATFNKAQEILDKNRKGRTPASDNPLTINIFKGLFRCQCGASVHPTGTKNKYAGVYRCNNHLDGRCDVPPLKRKPFDKWMIDNFLGMIDVGNDGEAEGKIASLQHEVEIVTARIKKATALLLEMDDIDELKIQIKELNQRRTELQTTIDNMRRKASLTDKELPQLKDIDLTTKAGRVECQLILSKHLKGLTLGKDTVTVTLQNDTEITIPTDPLPLNDGTSIFEIAEKNLLNIDAYQL

SEQ ID NO: 40607 - DNA, 50 bp, Escherichia coli
  source 1..50: mol_type = genomic DNA
aaaccgaatagacttcattcaagggtcattgcattgtagctattcggcat

SEQ ID NO: 40608 - DNA, 40 bp, Escherichia coli; identical to SEQ ID NO: 20043
  source 1..40: mol_type = genomic DNA

SEQ ID NO: 40609 - DNA, 50 bp, Escherichia coli
  source 1..50: mol_type = genomic DNA
aaaccgaatagacttcattcaaggtgcattgcattgtagctattcggcat

SEQ ID NO: 40610 - DNA, 40 bp, Escherichia coli; identical to SEQ ID NO: 40160
  source 1..40: mol_type = genomic DNA

SEQ ID NO: 40611 - protein, 506 aa, Escherichia coli
MRTAITYLRYSSAIQGVEGADSTRRQNDLFKQWLKKNSDAQIVASFSDEGLSGYKGKHLTGQFGDMLARIEAGEFPEGTILLVESIDRIGRLEHLETEALMNRILGNGLEIHTLQDGLIYTKDALADDLGISIIQRVKAYIAHQESKQKSFRVSQKWEQRAKLALAGKQRLTKMIPGWIDPETFKLNEHAETVRLIFKLLLDGESLHNIARHLQSNGIKSFSRRKDANGFSVHSVRTILRSETTIGTLPASQRNDRPAIPNYYEAAIDAATFNKAQEILDKNRTGRTPASDNPLTINIFKGLFRCQCGASVHPTGTKNKYAGVYRCNNHLDGRCDVQPLKRKPFDKWVLENFLGMIDVGNDGESERKIAALQHEVEIVTARIKKATALLLEMDDITELKTQVKGLNQKRTEIQTTIDTLKRKTSLSDKGLPQLKDIDLMTKAGRVECQLILSKHLKGLTLGKDSVTVTLQNDTEITIPTNPLPLNDGSPIFEIADKELLDIDAYQL

SEQ ID NO: 40612 - DNA, 50 bp, Escherichia coli; identical to SEQ ID NO: 36192
  source 1..50: mol_type = genomic DNA

SEQ ID NO: 40613 - DNA, 40 bp, Escherichia coli; identical to SEQ ID NO: 20043
  source 1..40: mol_type = genomic DNA

SEQ ID NO: 40614 - DNA, 50 bp, Escherichia coli; identical to SEQ ID NO: 40159
  source 1..50: mol_type = genomic DNA

SEQ ID NO: 40615 - DNA, 40 bp, Escherichia coli; identical to SEQ ID NO: 40160
  source 1..40: mol_type = genomic DNA

SEQ ID NO: 40616 - protein, 506 aa, Escherichia coli
MRSVITYLRYSSAIQGAEGADSTRRQNDLFKQWLKKNSDAQVVASFSDEGLSGYKGKHLTGQFGDMLARIESGEFPEGTILLVESIDRIGRLEHLETEALMNRILGNGLEIHTLQDGLIYTKDALADDLGISIIQRVKAYIAHQESKQKSFRVSQKWEQRAKLALAGEQRLTKMVPGWIDPDTFKLNEHAETVRLIFKLLLSGESLHNIARHLQSNGIKSFSRRKDANGFSVHSVRTILRSETTIGTLPASQRNDRPAIPNYYEAAIDASTFNKAQEILGKNRIGRTPASDNPLTINIFKGLFRCQCGASVHPTGTKNKYQGVYRCNNHLDGRCDVPPLKRKPFDKWMIDNFLGMIDVGNDGEAEGKIASLQHEVEIVTTRIKKATALLLEMDDITELKTQVKGLNQKRTELQTTIDNMRRKASLTDKELPQLKDIDLTTKAGRVECQLILSKHLKGLTLGKDSVTVTLQNDTEIIVPTDPLPLNDGSPIFEIADKELLDIDAYQL

SEQ ID NO: 40617 - DNA, 50 bp, Escherichia coli; identical to SEQ ID NO: 36192
  source 1..50: mol_type = genomic DNA

SEQ ID NO: 40618 - DNA, 40 bp, Escherichia coli; identical to SEQ ID NO: 20043
  source 1..40: mol_type = genomic DNA

SEQ ID NO: 40619 - DNA, 50 bp, Escherichia coli; identical to SEQ ID NO: 40159
  source 1..50: mol_type = genomic DNA

SEQ ID NO: 40620 - DNA, 40 bp, Escherichia coli; identical to SEQ ID NO: 40160
  source 1..40: mol_type = genomic DNA

SEQ ID NO: 40621 - protein, 506 aa, Escherichia coli
MRSVITYLRFSSATQGAEGADSTRRQNELFKQWLRKNSDAQVVASFNDEGLSGYKGKHLSGQFGDMLSRIESGEFPEGTILLVEAIDRIGRLEHLETEALMNRIIAHGIEIHTLQDGLIYTRDALSDDLGISIIQRVKSYLAHQESKQKSFRVSEKWKQRAKLALAGKQRLTKMVPGWIDHDTFKINEHAETVRLIFKLLLDGESLHNIARHLQSNGIKSFSRRKDANGFSVHSVRTVLRSESVIGTLPASQRNDRPAIPNYYEAAIDAATFNKAQEILDKNRKGRTPASDNPLTINIFKGLFRCQCGASVHPTGTKNKYAGVYRCNNHLDGRCDVPPLKRKPFDRWMIDNFLGMIDVGNDGESERKIAALQHEVEIVTARIKKATALLLEMDDIDELKIQLKELNQKRTELQTTIDNMRRKASLTDKELPQLKDIDLTTKAGRVECQLILSKHLKGLTLGKDSVTVTLQNDTEITIPTNPLPLNDGSPIFEIADKELLDIDAYQL

SEQ ID NO: 40622 - DNA, 50 bp, Escherichia coli; identical to SEQ ID NO: 40222
  source 1..50: mol_type = genomic DNA

SEQ ID NO: 40623 - DNA, 40 bp, Escherichia coli; identical to SEQ ID NO: 20043
  source 1..40: mol_type = genomic DNA

SEQ ID NO: 40624 - DNA, 50 bp, Escherichia coli; identical to SEQ ID NO: 40224
  source 1..50: mol_type = genomic DNA

SEQ ID NO: 40625 - DNA, 40 bp, Escherichia coli; identical to SEQ ID NO: 40160
  source 1..40: mol_type = genomic DNA

SEQ ID NO: 40626 - protein, 506 aa, Escherichia coli
MRTAITYLRFSSAIQGAEGADSTRRQNDLFKQWLKKNSDAQVVASFSDEGVSGYKGKHLTGQFGDMLARIEAGEFPEGTILLVESIDRIGRLEHLETEALMNRILGNGIEIHTLQDGLVYTKDALADDLGISIIQRVKAYIAHQESKQKSFRVSQKWKQRAKLALAGEQRLTRNVPGWIDPDTLKLNEHAETVRLIFKLLLSGESLHNIARHLQSNGIKSFSRRKDANGFSVHSVRTILRSETTIGTLPASQRNDRPAIPNYYEAAIDAATFNKAQEILDKNRKGRTPASDNPLTINIFKGLFRCQCGASVHPTGTKNKYAGVYRCNNHLDGRCDVPPLKRKPFDRWMIDNFLGMIDVGNDGEAEGKIASLQHEVEIVTTRIKKATALLLEMDDIDELKIQLKELNQKRTELQTTIDNMRRKASLTDKELPQLKDIDLTTKAGRVECQLILSKHLKGLTLGKDSVTVTLQNDTEIIVPTDPLPLNDGTSIFEIAEKELLEIDAYQL

SEQ ID NO: 40627 - DNA, 50 bp, Escherichia coli; identical to SEQ ID NO: 40222
  source 1..50: mol_type = genomic DNA

SEQ ID NO: 40628 - DNA, 40 bp, Escherichia coli; identical to SEQ ID NO: 20043
  source 1..40: mol_type = genomic DNA

SEQ ID NO: 40629 - DNA, 50 bp, Escherichia coli; identical to SEQ ID NO: 40224
  source 1..50: mol_type = genomic DNA

SEQ ID NO: 40630 - DNA, 40 bp, Escherichia coli; identical to SEQ ID NO: 40160
  source 1..40: mol_type = genomic DNA

SEQ ID NO: 40631 - protein, 506 aa, Escherichia coli
MRSVITYLRYSSAIQGAEGADSTRRQNDLFKQWLKKNSDAQVVASFSDEGLSGYKGKHLTGQFGDMLARIESGEFPEGTILLVESIDRIGRLEHLETEALMNRILGNGLEIHTLQDGLIYTKDALADDLGISIIQRVKAYIAHQESKQKSFRVSQKWEQRAKLALAGEQRLTKMVPGWIDPDTFKLNEHAETVRLIFKLLLSGESLHNIARHLQANNISSFSRRKDANGFSIHSVRTILRSETTIGTLPASQRNDRPAIPNYYEPAIDASTFNKAQEILDKNRKGRTPASDNPLTINIFKGLFRCQCGASVHPTGTKNKYAGVYRCNSHLDGRCGVPPLKRKPFDKWMIDNFLGMIDVGNDGEAEKEIASLQHEVETVTARIKKATALLLEMDDIDELKIQLKELNQKRTELQTTIDSMRRKASLTDKELPQLKDIDLTTKAGRVECQLILSKHLESLTLGRGQVTVKLSNGTEIIVPTDPLPLTDGAAIFEIAEKNLLNIDTFQL

SEQ ID NO: 40632 - DNA, 50 bp, Escherichia coli; identical to SEQ ID NO: 40222
  source 1..50: mol_type = genomic DNA

SEQ ID NO: 40633 - DNA, 40 bp, Escherichia coli; identical to SEQ ID NO: 20043
  source 1..40: mol_type = genomic DNA

SEQ ID NO: 40634 - DNA, 50 bp, Escherichia coli; identical to SEQ ID NO: 40224
  source 1..50: mol_type = genomic DNA

SEQ ID NO: 40635 - DNA, 40 bp, Escherichia coli; identical to SEQ ID NO: 40160
  source 1..40: mol_type = genomic DNA

SEQ ID NO: 40636 - protein, 506 aa, Escherichia coli
MRSVITYLRYSSAIQGAEGADSTRRQNDLFKQWLKKNSDAQVVASFSDEGLSGYKGKHLTGQFGDMLARIESGEFPEGTILLVESIDRIGRLEHLETEALMNRILGNGIEIHTLQDGLIYTKDALADDLGISIIQRVKAYIAHQESKQKSFRVSQKWEQRAKLALAGEQRLTKMVPGWIDPDTFKLNEHAETVRLIFKLLLSGESLHNIARHLQANNISSFSRRKDANGFSVHSVRTILRSETTIGTLPASQRNDRPAIPNYYEPAIDASTFNKAQEILDKNRKGRTPASDNPLTINIFKGLFRCQCGASVHPTGTKNKYAGVYRCNNHLDGRCDVQPLKRKPFDRWMIDNFLGMIDVGNDGKSKRKIASLQHEVEIVTARIKKATALLLEMDDITELKTQVRELNQKRTELQTTIDTLKRKTSLTDKELTQLKDIDLMTKAGRVECQLILSKHLKGLTLGKDSVTVTLQNDTEITIPTNPLPLNDGSPIFEIADKELLDIDAYQL

SEQ ID NO: 40637 - DNA, 50 bp, Escherichia coli; identical to SEQ ID NO: 36192
  source 1..50: mol_type = genomic DNA

SEQ ID NO: 40638 - DNA, 40 bp, Escherichia coli; identical to SEQ ID NO: 20043
  source 1..40: mol_type = genomic DNA

SEQ ID NO: 40639 - DNA, 50 bp, Escherichia coli; identical to SEQ ID NO: 40159
  source 1..50: mol_type = genomic DNA

SEQ ID NO: 40640 - DNA, 40 bp, Escherichia coli; identical to SEQ ID NO: 40160
  source 1..40: mol_type = genomic DNA

SEQ ID NO: 40641 - protein, 499 aa, Escherichia coli
MRFSSATQGAEGADSTRRQNELFKQWLRKNSDAQVVASFNDEGLSGYKGKHLSGQFGDMLSRIESGEFSEGTILLVEAIDRIGRLEHLETEALMNRIIAHGIEIHTLQDGLIYTRDALSDDLGISIIQRVKSYIAHQESKQKSFRVSQKWGQRAKLALAGKQRLTKMVPGWIDPETFEVNEHAETVRLIFKLLLDGESLHNIARHLQANNISSFSRRKDANGFSVHSVRTILRSETTIGTLPASQRNDRPAIPNYYEAAIDAATFNKAQEILDKNRKGRTPASDNPLTINIFKGLFRCQCGASVHPTGTKNKYQGVYRCNNHLDGRCDVPPLKRKPFDRWMIDNFLGMIDVGNDGESERKIAALQHEVEIVTARIKKATALLLEMDDIDELKIQLKELNQKRTELQTTIDNMRRKASLTDKELPQLKDIDLTTKAGRVECQLILSKHLKGLTLGKDSVTVTLQNDTEITIPTNPLPLNDGSPIFEIAEKELLEIDAYQL

SEQ ID NO: 40642 - DNA, 50 bp, Escherichia coli; identical to SEQ ID NO: 36192
  source 1..50: mol_type = genomic DNA

SEQ ID NO: 40643 - DNA, 40 bp, Escherichia coli; identical to SEQ ID NO: 20043
  source 1..40: mol_type = genomic DNA

SEQ ID NO: 40644 - DNA, 50 bp, Escherichia coli; identical to SEQ ID NO: 40159
  source 1..50: mol_type = genomic DNA

SEQ ID NO: 40645 - DNA, 40 bp, Escherichia coli; identical to SEQ ID NO: 40160
  source 1..40: mol_type = genomic DNA

SEQ ID NO: 40646 - protein, 506 aa, Escherichia coli; identical to SEQ ID NO: 30091

SEQ ID NO: 40647 - DNA, 50 bp, Escherichia coli; identical to SEQ ID NO: 40607
  source 1..50: mol_type = genomic DNA

SEQ ID NO: 40648 - DNA, 40 bp, Escherichia coli; identical to SEQ ID NO: 20043
  source 1..40: mol_type = genomic DNA

SEQ ID NO: 40649 - DNA, 50 bp, Escherichia coli; identical to SEQ ID NO: 40609
  source 1..50: mol_type = genomic DNA

SEQ ID NO: 40650 - DNA, 40 bp, Escherichia coli; identical to SEQ ID NO: 40160
  source 1..40: mol_type = genomic DNA

SEQ ID NO: 40651 - protein, 506 aa, Escherichia coli; identical to SEQ ID NO: 30106

SEQ ID NO: 40652 - DNA, 50 bp, Escherichia coli; identical to SEQ ID NO: 36192
  source 1..50: mol_type = genomic DNA

SEQ ID NO: 40653 - DNA, 40 bp, Escherichia coli; identical to SEQ ID NO: 20043
  source 1..40: mol_type = genomic DNA

SEQ ID NO: 40654 - DNA, 50 bp, Escherichia coli; identical to SEQ ID NO: 40159
  source 1..50: mol_type = genomic DNA

SEQ ID NO: 40655 - DNA, 40 bp, Escherichia coli; identical to SEQ ID NO: 40160
  source 1..40: mol_type = genomic DNA

SEQ ID NO: 40656 - protein, 506 aa, Escherichia coli
MRTAITYLRYSSAIQGVEGADSTRRKNDLFKQWLKKNSDAQIVASFSDEGLSGYKGKHLTGQFGDMLARIEAGEFPEGTILLVESIDRIGRLEHLETEALMNRILGNGLEIHTLQDGLIYTKDALADDLGISIIQRVKAYIAHQESKQKSFRVSQKWEQRAKLALAGKQRLTKMVPGWIDPETFKLNEHAETVRLIFKLLLDGESLHNIARHLQSNGIKSFSRRKDANGFSVHSVRTILRSETTIGTLPASQRNDRPAIPNYYEAAIDAATFNKAQEILDKNRTGRTPASDNPLTINIFKGLFRCQCGASVHPTGTKNKYAGVYRCNNHLDGRCDVQPLKRKPFDKWVLENFLGMIDVGNDGESERKIAALQHEVEIVTARIKKATALLLEMDDITELKTQVKGLNQKRTEIQTTIDTLKRKTSLSDKGLPQLKDIDLMTKAGRVECQLILSKHLKGLTLGKDSVTVTLQNDTEITIPTNPLPLNDGSPIFEIADKELLDIDAYQL

SEQ ID NO: 40657 - DNA, 50 bp, Escherichia coli; identical to SEQ ID NO: 36192
  source 1..50: mol_type = genomic DNA

SEQ ID NO: 40658 - DNA, 40 bp, Escherichia coli; identical to SEQ ID NO: 20043
  source 1..40: mol_type = genomic DNA

SEQ ID NO: 40659 - DNA, 50 bp, Escherichia coli; identical to SEQ ID NO: 40159
  source 1..50: mol_type = genomic DNA

SEQ ID NO: 40660 - DNA, 40 bp, Escherichia coli; identical to SEQ ID NO: 40160
  source 1..40: mol_type = genomic DNA

SEQ ID NO: 40661 - protein, 506 aa, Escherichia coli
MRSVITYLRYSSAIQGAEGADSTRRQNDLFKQWLKKNSDAQVVASFSDEGLSGYKGKHLTGQFGDMLARIESGEFSEGTILLVEAIDRIGRLEHLETEALMNRILGNGIEIHTLQDGLIYTKDALADDLGISIIQRVKSYIAHQESKQKSFRVSQKWGQRAKLALAGEQRLTKMVPGWIDPETFEVNEHAETVRLIFKLLLDGESLHNIARHLQANNISSFSRRKDANGFSVHSVRTILRSETTIGTLPASQRNDRPAIPNYYEAAIDAATFNKAQEILDKNRKGRTPASDNPLTINIFKGLFRCQCGASVHPTGTKNKYQGVYRCNNHLDGRCDVPPLKRKPFDRWMIDNFLGMIDVGNDGESERKIAALQHEVEIVTARIKKATALLLEMDDITELKTQVKGLNQKRTELQTTIDNMRRKASLTDKELPQLKDIDLTTKAGRVECQLILSKHLKGLTLGKDSVTVTLQNDTEITIPTNPLPLNDGSPIFEIADKELLDIDAYQL

SEQ ID NO: 40662 - DNA, 50 bp, Escherichia coli; identical to SEQ ID NO: 36192
  source 1..50: mol_type = genomic DNA

SEQ ID NO: 40663 - DNA, 40 bp, Escherichia coli; identical to SEQ ID NO: 20043
  source 1..40: mol_type = genomic DNA

SEQ ID NO: 40664 - DNA, 50 bp, Escherichia coli; identical to SEQ ID NO: 40159
  source 1..50: mol_type = genomic DNA

SEQ ID NO: 40665 - DNA, 40 bp, Escherichia coli; identical to SEQ ID NO: 40160
  source 1..40: mol_type = genomic DNA

SEQ ID NO: 40666 - protein, 506 aa, Escherichia coli
MRSVITYLRYSSAIQGAEGADSTRRQNDLFKQWLKKNSDAQVVASFSDEGLSGYKGKHLTGQFGDMLARIESGEFPEGTILLVESIDRIGRLEHLETEALMNRILGNGLEIHTLQDGLIYTKDALADDLGISIIQRVKAYIAHQESKQKSFRVSQKWEQRAKLALAGEQRLTKMVPGWIDPDTFKLNEHAETVRLIFKLLLSGESLHNIARHLQSNGIKSFSRRKDANGFSVHSVRTILRSETTTGTLPASQRNDRPAIPNYYEAAIDASTFNKAQEILGKNRIGRTPASDNPLTINIFKGLFRCQCGASVHPTGTKNKYQGVYRCNNHLDGRCDVPPLKRKPFDKWMIDNFLGMIDVGNDGEAEGKIASLQHEVEIVTTRIKKATALLLEMDDIDELKIQLKELNQKRTELQTTIDNMRRKASLTDKELPQLKDIDLTTKAGRVECQLILSKHLKGLTLGKDSVTVTLQNDTEITIPTNPLPLNDGSPIFEIADKELLDIDAYQL

SEQ ID NO: 40667 - DNA, 50 bp, Escherichia coli; identical to SEQ ID NO: 36192
  source 1..50: mol_type = genomic DNA

SEQ ID NO: 40668 - DNA, 40 bp, Escherichia coli; identical to SEQ ID NO: 20043
  source 1..40: mol_type = genomic DNA

SEQ ID NO: 40669 - DNA, 50 bp, Escherichia coli; identical to SEQ ID NO: 40159
  source 1..50: mol_type = genomic DNA

SEQ ID NO: 40670 - DNA, 40 bp, Escherichia coli; identical to SEQ ID NO: 40160
  source 1..40: mol_type = genomic DNA

SEQ ID NO: 40671 - protein, 506 aa, Escherichia coli
MRSVITYLRYSSAIQGAEGADSTRRQNDLFKQWLKKNSDAQVVASFSDEGLSGYKGKHLTGQFGDMLARIESGEFSEGTILLVEAIDRIGRLEHLETEALMNRIIAHGIEIHTLQDGLIYTRDALSDDLGISIIQRVKSYVAHQESKQKSFRVSQKWKQRAKLALAGEQRLTKMVPGWIDPDTFKCNEHAETVRLIFKLLLDGESLHNIARHLQANNISSFSRRKDANGFSVHSVRTVLRSESVIGTLPASQRNDRPAIPNYYEAAIDAATFNKAQEILDKNRKGRTPASDNPLTINIFKGLFRCQCGASVHPTGTKNKYAGVYRCNNHLDGRCDVPPLKRKPFDRWMIDNFLGMIDVGNDGESERKIAALQHEVEIVTARIKKATALLLEMDDITELKAQVKELNQKRTELQTTINTMKRKTSLSDKGLPQLKDIDLMTKAGRVECQLILSKHLKGLTLGKDSVTVTLQNDTEITIPTNPLPLNDGSPIFEIADKELLDIDAYQL

SEQ ID NO: 40672 - DNA, 50 bp, Escherichia coli; identical to SEQ ID NO: 36192
  source 1..50: mol_type = genomic DNA

SEQ ID NO: 40673 - DNA, 40 bp, Escherichia coli; identical to SEQ ID NO: 20043
  source 1..40: mol_type = genomic DNA

SEQ ID NO: 40674 - DNA, 50 bp, Escherichia coli; identical to SEQ ID NO: 40159
  source 1..50: mol_type = genomic DNA

SEQ ID NO: 40675 - DNA, 40 bp, Escherichia coli; identical to SEQ ID NO: 40160
  source 1..40: mol_type = genomic DNA

SEQ ID NO: 40676 - protein, 506 aa, Escherichia coli
MRSVITYLRFSSATQGAEGADSTRRQNDLFKQWLRKNSDAQVVASFNDEGLSGYKGKHLSGQFGDMLSRIESGEFSEGTILLVEAIDRIGRLEHLETEALMNRIIAHGIEIHTLQDGLIYTRDALSDDLGISIIQRVKSYIAHQESKQKSFRVSQKWEQRAKLALAGEQRLTKMVPGWIDPDTFKLNEHAETVRLIFKLLLDGESLHNIARHLQSNDIKSFSRRKDANGFSVHSVRTVLRSVSAIGTLPASQRNDRPAIPNYYEAAIDAATFNKAQEILDKNRKGRTPASDNPLTINIFKGLFRCQCGASVHPTGTKNKYAGVYRCNNNPDGRCDVPPLKRKPFDKWMIDNFLGMIDVGNDGEAEGKIASLQHEVEIVTTRIKKATALLLEMDDITELKTQVKELNQKRTELQTMIDNMRRKASLTDKELPQLKDIDLMTKAGRVECQLILSKHLKGLTLGKDSVTVTLQNDTEITIPTNPLPLNDGSPIFEIADKELLDIDAYQL

SEQ ID NO: 40677 - DNA, 50 bp, Escherichia coli; identical to SEQ ID NO: 40287
  source 1..50: mol_type = genomic DNA

SEQ ID NO: 40678 - DNA, 40 bp, Escherichia coli; identical to SEQ ID NO: 20043
  source 1..40: mol_type = genomic DNA

SEQ ID NO: 40679 - DNA, 50 bp, Escherichia coli; identical to SEQ ID NO: 40289
  source 1..50: mol_type = genomic DNA

SEQ ID NO: 40680 - DNA, 40 bp, Escherichia coli; identical to SEQ ID NO: 40160
  source 1..40: mol_type = genomic DNA

SEQ ID NO: 40681 - protein, 506 aa, Escherichia coli
MRSVITYLRYSSAIQGAEGADSTRRQNDLFKQWLKKNSDAQVVASFSDEGLSGYKGKHLTGQFGDMLARIESGEFPEGTILLVESIDRIGRLEHLETEALMNRILGNGLEIHTLQDGLIYTKDALADDLGISIIQRVKAYIAHQESKQKSFRVSQKWEQRAKLALAGEQRLTKMVPGWIDPDTFKCNEHAETVRLIFKLLLSGESLHNIARHLQANNISSFSRRKDANGFSVHSVRTILRSVTTIGTLPASQRNDRPAIPNYYEAAIDAATFNKAQEILDKNRKGRTPASDNPLTINIFKGLFRCQCGASVHPTGTKNKYAGVYRCNNHLDGRCDVPPLKRKPFDRWMIDNFLGMIDVGNDGESERKIAALQHEVEIVTSRIKKATALLLEMDDITELKTQVKELNQKRTALQTTIDNMRRKTSLTDKELPQLKDIDLTTKAGRVECQLILSKHLKGLTLGKDSVIVTLQNDTEITIPTNPLPLNDGTSIFEIAEKELLEIDAYQL

SEQ ID NO: 40682 - DNA, 50 bp, Escherichia coli; identical to SEQ ID NO: 36192
  source 1..50: mol_type = genomic DNA

SEQ ID NO: 40683 - DNA, 40 bp, Escherichia coli; identical to SEQ ID NO: 20043
  source 1..40: mol_type = genomic DNA

SEQ ID NO: 40684 - DNA, 50 bp, Escherichia coli; identical to SEQ ID NO: 40159
  source 1..50: mol_type = genomic DNA

SEQ ID NO: 40685 - DNA, 40 bp, Escherichia coli; identical to SEQ ID NO: 40160
  source 1..40: mol_type = genomic DNA

SEQ ID NO: 40686 - protein, 506 aa, Escherichia coli; identical to SEQ ID NO: 40261

SEQ ID NO: 40687 - DNA, 50 bp, Escherichia coli
  source 1..50: mol_type = genomic DNA
aaaccgaatagattttattcaagggtcattgtattgtagctattcggcat

SEQ ID NO: 40688 - DNA, 40 bp, Escherichia coli; identical to SEQ ID NO: 20043
  source 1..40: mol_type = genomic DNA

SEQ ID NO: 40689 - DNA, 50 bp, Escherichia coli
  source 1..50: mol_type = genomic DNA
aaaccgaatagattttattcaaggtgcattgtattgtagctattcggcat

SEQ ID NO: 40690 - DNA, 40 bp, Escherichia coli; identical to SEQ ID NO: 40160
  source 1..40: mol_type = genomic DNA

SEQ ID NO: 40691 - protein, 506 aa, Escherichia coli
MRTAITYLRYSSAIQGVEGADSTRRQNDLIKQWLKKNSDAQIVASFSDEGLSGYKGKHLTGQFGDMLARIEAGEFPEGTILLVESIDRIGRLEHLETEALMNRILGNGLEIHTLQDGLIYTKDALADDLGISIIQRVKAYIAHQESKQKSFRVSQKWEQRAKLALAGKQRLTKMVPGWIDPETFKLNEHAETVRLIFKLLLDGESLHNIARHLQSNGIKSFSRRKDANGFSVHSVRTILRSETTIGTLPASQRNDRPAIPNYYEAAIDAATFNKAQEILDKNRTGRTPASDNPLTINIFKGLFRCQCGASVHPTGTKNKYAGVYRCNNHLDGRCDVQPLKRKPFDKWVLENFLGMIDVGNDGESERKIAALQHEVEIVTARIKKATALLLEMDDITELKTQVKGLNQKRTEIQTTIDTLKRKTSLSDKGLPQLKDIDLMTKAGRVECQLILSKHLKGLTLGKDSVTVTLQNDTEITIPTNPLPLNDGSPIFEIADKELLDIDAYQL

SEQ ID NO: 40692 - DNA, 50 bp, Escherichia coli; identical to SEQ ID NO: 36192
  source 1..50: mol_type = genomic DNA

SEQ ID NO: 40693 - DNA, 40 bp, Escherichia coli; identical to SEQ ID NO: 20043
  source 1..40: mol_type = genomic DNA

SEQ ID NO: 40694 - DNA, 50 bp, Escherichia coli; identical to SEQ ID NO: 40159
  source 1..50: mol_type = genomic DNA

SEQ ID NO: 40695 - DNA, 40 bp, Escherichia coli; identical to SEQ ID NO: 40160
  source 1..40: mol_type = genomic DNA

SEQ ID NO: 40696 - protein, 506 aa, Escherichia coli
MRSVITYLRFSSATQGAEGADSTRRQNDLFKQWLKKNSDAQVVASFSDEGLSGYKGKHLTGQFGDMLARIESGEFPEGTLLLVEAIDRIGRLEHLETEALMNRIIAHGIEIHTLQDGLIYTRDALSDDLGISIIQRVKSYVAHQKSKQKSFRVSQKWKQRAKLALAGEQRLTKMVPGWIDPDTFKLNEHAETVRLIFKLLLDGESLHNIARHLQSNDIKSFSRRKDANGFSVHSVRTVLRSVSAIGTLPASQRNDRPAIPNYYEAAIDAATFNKAQEILDKNRKGRTPASDNPLTINIFKGLFRCQCGASVHPTGTKNKYQGVYRCNNHLDGRCDVPPLKRKPFDKWMIDNFLGMIDVGNDGEAEGKIAALQHEVEIVTARIKKATALLLEMDDITELKTQVKGLNQKRTELQTTIDNMRRKASLTDKELPQLKDIDLTTKAGRVECQLILSKHLKGLTLGKDSVIVTLQNDTEITIPTNPLPLNDGTSIFEIAEKNLLNIDTFQL

SEQ ID NO: 40697 - DNA, 50 bp, Escherichia coli; identical to SEQ ID NO: 40287
  source 1..50: mol_type = genomic DNA

SEQ ID NO: 40698 - DNA, 40 bp, Escherichia coli; identical to SEQ ID NO: 20043
  source 1..40: mol_type = genomic DNA

SEQ ID NO: 40699 - DNA, 50 bp, Escherichia coli; identical to SEQ ID NO: 40289
  source 1..50: mol_type = genomic DNA

SEQ ID NO: 40700 - DNA, 40 bp, Escherichia coli; identical to SEQ ID NO: 40160
  source 1..40: mol_type = genomic DNA

SEQ ID NO: 40701 - protein, 506 aa, Escherichia coli
MRTAITYLRFSSAIQGAEGADSTRRQNDLFKQWLKKNSDAQVVASFSDEGVSGYKGKHLTGQFGDMLARIEAGEFPEGTILLVESIDRIGRLEHLETEALMNRILGNGIEIHTLQDGLVYTKDALADDLGISIIQRVKAYIAHQESKQKSFRVSQKWKQRAKLALAGEQRLTRNVPGWIDPDTLKLNEHAETVRLIFKLLLSGESLHNIARHLQSNGIKSFSRRKDANGFSVHSVRTILRSETTIGTLPASQRNDRPAIPNYYEAAIDAATFNKAQEILDKNRKGRTPASDNPLTINIFKGLFRCQCGASVHPTGTKNKYAGVYRCNNHLDGRCDVPPLKRKPFDRWMIDNFLGMIDVGNDGEAEGKIASLQHEVEIVTARIKKATALLLEMDDIDELKIQIKELNQRRTELQTTIDNMRRKASLTDKELPQLKDIDLTTKAGRVECQLILSKHLKGLTLGKDSVIVTLQNDTEITIPTNPLPLNDGTSIFEIAEKELLEIDAYQL

SEQ ID NO: 40702 - DNA, 50 bp, Escherichia coli; identical to SEQ ID NO: 40222
  source 1..50: mol_type = genomic DNA

SEQ ID NO: 40703 - DNA, 40 bp, Escherichia coli; identical to SEQ ID NO: 20043
  source 1..40: mol_type = genomic DNA

SEQ ID NO: 40704 - DNA, 50 bp, Escherichia coli; identical to SEQ ID NO: 40224
  source 1..50: mol_type = genomic DNA

SEQ ID NO: 40705 - DNA, 40 bp, Escherichia coli; identical to SEQ ID NO: 40160
  source 1..40: mol_type = genomic DNA

SEQ ID NO: 40706 - protein, 409 aa, Escherichia coli
MRHAITYLRFSSAIQGAEGADSTRRQNDLFKQWLKKNSDAQVVASFSDEGLSGYKGKHLTGQFGDMLARIESGEFPEGTILLVESIDRIGRLEHLETEALMNRILSNGLEIHTLQDGLIYTKDALADDLGISIIQRVKAYIAHQESKQKSFRISQKWEQRAKLALAGKQRLTKMVPGWIDPETFKLNEHAETVRLIFKLLLDGESLHNIARHLQANNISSFSRRKDANGFSVHSVRTILRSETAIGTLPASQRNDRPAIPNYYEAAIDASTFNKAQEILGKNRIGRTPASDNPLTINIFKGLFRCQCGASVHPTGTKNKYQGVYRCNNHLDGRCDVPPLKRKPFDRWMIDNFLGMIDVVSDGETERRIAALQHEVETVTARIKKATALLLEMDDITELKAQVKPLFMSQ

SEQ ID NO: 40707 - DNA, 50 bp, Escherichia coli; identical to SEQ ID NO: 36192
  source 1..50: mol_type = genomic DNA

SEQ ID NO: 40708 - DNA, 40 bp, Escherichia coli; identical to SEQ ID NO: 20043
  source 1..40: mol_type = genomic DNA

SEQ ID NO: 40709 - DNA, 50 bp, Escherichia coli; identical to SEQ ID NO: 40159
  source 1..50: mol_type = genomic DNA

SEQ ID NO: 40710 - DNA, 40 bp, Escherichia coli; identical to SEQ ID NO: 40160
  source 1..40: mol_type = genomic DNA

SEQ ID NO: 40711 - protein, 506 aa, Escherichia coli
MRHVITYLRYSSAIQGAEGADSTRRQNDLFKQWLKKNSDAQVVASFSDEGLSGYKGKHLTGQFGDMLARIESGEFPEGTLLLVEAIDRIGRLEHLETESLMNRIIAHGIEIHTLQDGLIYTRDALSDDLGISIIQRVKSYIAHQESKQKSFRVSQKWEQRAKLALAGEQRLTKMVPGWIDPDTFKLNEHAETVRLIFKLLLDGESLHNIARHLQSNDIKSFSRRKDANGFSVHSVRTVLRSVSAIGTLPASQRNDRPAIPNYYEAAIDAATFNKAQEILDKNRKGRTPASDNPLTINIFKGLFRCQCGASVHPTGTKNKYQGVYRCNNHLDGRCDVPPLKRKPFDKWMIDNFLGMIDVGNDGEAEGKIAALQHEVEIVTARIKKATALLLEMDDIDELKIQLKELNQKRTELQTTIDNMRRKASLTDKELPQLKDIDLTTKAGRVECQLILSKHLKGLTLGKDSVTVTLQNDTEITIPTNPLPLNDGSPIFEIADKELLDIDAYQL

SEQ ID NO: 40712 - DNA, 50 bp, Escherichia coli; identical to SEQ ID NO: 40287
  source 1..50: mol_type = genomic DNA

SEQ ID NO: 40713 - DNA, 40 bp, Escherichia coli; identical to SEQ ID NO: 20043
  source 1..40: mol_type = genomic DNA

SEQ ID NO: 40714 - DNA, 50 bp, Escherichia coli; identical to SEQ ID NO: 40289
  source 1..50: mol_type = genomic DNA

SEQ ID NO: 40715 - DNA, 40 bp, Escherichia coli; identical to SEQ ID NO: 40160
  source 1..40: mol_type = genomic DNA

SEQ ID NO: 40716 - protein, 506 aa, Escherichia coli
MRSVITYLRFSSATQGAEGADSTRRQNDLFKQWLKKNSDAQVVASFSDEGLSGYKGKHLTGQFGDMLARIEAGEFPAGTLLLVEAIDRIGRLEHLETEALMNRIIAHGIEIHTLQDGLIYTRDALSDDLGISIIQRVKSYIAHQESKQKSFRVSQKWEQRAKLALAGEQRLTKMVPGWIDPDTFKCNEHAETVRLIFKLLLDGESLHNIARHLQANNISSFSRRKDANGFSVHSVRTILRSETTRGTLPASQRNDRPAIPNYYEAAIDAATFNKAQEILDKNRKGRTPASDNPLTINIFKGLFRCQCGASVHPTGTKNKYAGVYRCNHLLDGRCDVPPLKRKPFDRWMIDNFLGMIDVGNDGEAEGKIAALQHEVEIVTARIKKATALLLEMDDITELKTQVKGLNQKRTELQTTIDNMRRKASLTDKELPQLKDIDLTTKAGRVECQLILSKHLKGLTLGKDSVIVTLQNDTEITIPTNPLPLNDGSPIFEIADKELLDIDAYQL

SEQ ID NO: 40717 - DNA, 50 bp, Escherichia coli; identical to SEQ ID NO: 40287
  source 1..50: mol_type = genomic DNA

SEQ ID NO: 40718 - DNA, 40 bp, Escherichia coli; identical to SEQ ID NO: 20043
  source 1..40: mol_type = genomic DNA

SEQ ID NO: 40719 - DNA, 50 bp, Escherichia coli; identical to SEQ ID NO: 40289
  source 1..50: mol_type = genomic DNA

SEQ ID NO: 40720 - DNA, 40 bp, Escherichia coli; identical to SEQ ID NO: 40160
  source 1..40: mol_type = genomic DNA

SEQ ID NO: 40721 - protein, 506 aa, Escherichia coli
MRSVITYLRFSSAIQGAEGADSTRRQNDLFKQWLKKNSDAQVVASFSDEGLSGYKGKHLTGQFGDMLARIEAGEFPASTILLVESIDRIGRLEHLETEALMNRILGNGIEIHTLQDGLIYTKDALADDLGISIIQRVKAYIAHQESKQKSFRVSQKWEQRAKLALAGEQRLTKMVPGWIDPDTFKCNEHAETVRLIFKLLLDGESLHNIARHLQANNISSFSRRKDANGFSVHSVRTILRSETTIGTLPASQRNDRPAIPNYYESAIDAATFNKAQEILGKNRIGRTPASDNPLTINIFKGLFRCQCGASVHPTGTKNKYQGVYRCNNHLDGRCDVPPLKRKPFDKWMIDNFLGMIDVGNDGEAEGKIASLQHEVEIVTTRIKKATALLLEMDDIDELKIQLKELNQKRTELQTTIDNMRRKASLTDKELPQLKDIDLTTKAGRVECQLILSKHLKGLTLGKDSVTVTLQNDTEITIPTNPLPLNDGTSIFEIADKELLEIDAYQL

SEQ ID NO: 40722 - DNA, 50 bp, Escherichia coli; identical to SEQ ID NO: 36192
  source 1..50: mol_type = genomic DNA

SEQ ID NO: 40723 - DNA, 40 bp, Escherichia coli; identical to SEQ ID NO: 20043
  source 1..40: mol_type = genomic DNA

SEQ ID NO: 40724 - DNA, 50 bp, Escherichia coli; identical to SEQ ID NO: 40159
  source 1..50: mol_type = genomic DNA

SEQ ID NO: 40725 - DNA, 40 bp, Escherichia coli; identical to SEQ ID NO: 40160
  source 1..40: mol_type = genomic DNA

SEQ ID NO: 40726 - protein, 506 aa, Escherichia coli; identical to SEQ ID NO: 32376

SEQ ID NO: 40727 - DNA, 50 bp, Escherichia coli
  source 1..50: mol_type = genomic DNA
aaaccgaatagactttattcaaggatcattgtattgtagctattcggcat

SEQ ID NO: 40728 - DNA, 40 bp, Escherichia coli; identical to SEQ ID NO: 20043
  source 1..40: mol_type = genomic DNA

SEQ ID NO: 40729 - DNA, 50 bp, Escherichia coli; identical to SEQ ID NO: 40159
  source 1..50: mol_type = genomic DNA

SEQ ID NO: 40730 - DNA, 40 bp, Escherichia coli; identical to SEQ ID NO: 40160
  source 1..40: mol_type = genomic DNA

SEQ ID NO: 40731 - protein, 443 aa, Escherichia coli
MRSVITYLRYSSSQQGTGDADSSRRQNELFQHWLKRNGDAHIVASFEDEARSAFKGKHLTKEFGAMMARIEANEFPEGTILLCEAIDRIGRLEHLKTESLMNRILEHGIEIHTLADNIIYTKEILSADLGVSLIQRVKSYLAHQESKQKSFRVSKKWEQRAKLALSGEQQLTRMVPGWIDPDTRKLNEHAQTVKTIFSLLLAGESLHNIARYLQANKIKSFSRRKDANGFSVHSVRTILTSESTVGTLAASKHNDRPAIPDYYEAAVNVATFNQAQEILSKNRKGRPPASDNPITINLFKGLMRCKCGASVHPTGVKNTYQGVYRCNNAVDGRCEVPTMKRKSFDRWMIENIVGLLERSGDKRYADGIGKGWKLESIKPSQFSLTFYWRTTELTDKQIKANIEKLVTCDWQRKLTPLQEAVAYAQANLDAFKEELRELTAAIA

SEQ ID NO: 40732 - DNA, 50 bp, Escherichia coli
  source 1..50: mol_type = genomic DNA
ataccgaataggctgcatacgatagtcattgtattggagctattcggcat

SEQ ID NO: 40733 - DNA, 40 bp, Escherichia coli; identical to SEQ ID NO: 20043
  source 1..40: mol_type = genomic DNA

SEQ ID NO: 40734 - DNA, 50 bp, Escherichia coli
  source 1..50: mol_type = genomic DNA
ataccgaataggctgcatacgatatgcattgtattggagctattcggcat

SEQ ID NO: 40735 - DNA, 40 bp, Escherichia coli; identical to SEQ ID NO: 40160
  source 1..40: mol_type = genomic DNA

SEQ ID NO: 40736 - protein, 506 aa, Escherichia coli; identical to SEQ ID NO: 23231

SEQ ID NO: 40737 - DNA, 50 bp, Escherichia coli
  source 1..50: mol_type = genomic DNA
aaaccgaatagcctttattcaatggtcattgtattgtagctattcggcat

SEQ ID NO: 40738 - DNA, 40 bp, Escherichia coli; identical to SEQ ID NO: 20043
  source 1..40: mol_type = genomic DNA

SEQ ID NO: 40739 - DNA, 50 bp, Escherichia coli
  source 1..50: mol_type = genomic DNA
aaaccgaatagcctttattcaatgtgcattgtattgtagctattcggcat

SEQ ID NO: 40740 - DNA, 40 bp, Escherichia coli; identical to SEQ ID NO: 40160
  source 1..40: mol_type = genomic DNA

SEQ ID NO: 40741 - protein, 456 aa, Escherichia coli
MSGYKGKHLTGQFGDMLARIESGEFPEGTILLVEAIDRIGRLEHLETEALMNRILGNGIEIHTLQDGLIYTKDALADDLGISIIQRVKAYIAHQESKQKSFRVSQRWGQRAKLALAGKQRLTKMVPGWIDPETFKLNEHAETVRLIFKLLLDGESLHNIARHLQSNGIKSFSRRKDANGFSVHSVRTILRSETTIGTLPASQRNDRPAIPNYYEGVVDIPTFNKAQEILDKNRKGRTPASDNPLTINIFKGLFRCQCGASVHPTGTKNKYAGVYRCNNHLDGRCDVQPLKRKPFDRWMIDNFLGMIDVGNDGESERKIAALQHEVEIVTSRIKKATALLLEMDDITELKTQVKELNQRRTDIQTTIDTLKRKTSLSDKGLPQLKDIDLMTKAGRVECQLILSKHLKGLTLGKGSVTITLQNDTEITIPTNPLPLNDGSPIFEIADKELLDIDAYQL

SEQ ID NO: 40742 - DNA, 50 bp, Escherichia coli; identical to SEQ ID NO: 40222
  source 1..50: mol_type = genomic DNA

SEQ ID NO: 40743 - DNA, 40 bp, Escherichia coli; identical to SEQ ID NO: 20043
  source 1..40: mol_type = genomic DNA

SEQ ID NO: 40744 - DNA, 50 bp, Escherichia coli; identical to SEQ ID NO: 40224
  source 1..50: mol_type = genomic DNA

SEQ ID NO: 40745 - DNA, 40 bp, Escherichia coli; identical to SEQ ID NO: 40160
  source 1..40: mol_type = genomic DNA

SEQ ID NO: 40746 - protein, 506 aa, Escherichia coli
MRSVITYLRFSSAIQGAEGADSTRRQNDLFKQWLKKNSDAQIVASFSDEGLSGYKGKHLTGQFGDMLARIESGEFPEGTILLVEAIDRIGRLEHLETEALMNRILGNGIEIHTLQDGLIYTKDALADDLGISIIQRVKSYVAHQESKQKSFRVSQKWKQRAKLALAGEQRLTRNVPGWIDPDTFKCNEHAETVRLIFKLLLSGESLHNIARHLQANNISSFSRRKDANGFSVHSVRTVLRSESVIGTLPASQRNDRPAIPNYYEAAIDAATFNKAQEILDKNRKGRTPASDNPLTINIFKGLFRCQCGASVHPTGTKNKYAGVYRCNNNPDGRCDVPPLKRKPFDKWMLENFLGMIDVGNDGEAEGKIASLQHEVEIVTTRIKKATALLLEMDDITELKAQVKELNQKRTELQTTIDSMRRKTSLTDKELPQLKDIDLTTKAGRVECQLILSKHLKGLTLGKDSVIVTLQNDTEITIPTNPLPLNDGTSIFEIAEKELLEIDAYQL

SEQ ID NO: 40747 - DNA, 50 bp, Escherichia coli; identical to SEQ ID NO: 36192
  source 1..50: mol_type = genomic DNA

SEQ ID NO: 40748 - DNA, 40 bp, Escherichia coli; identical to SEQ ID NO: 20043
  source 1..40: mol_type = genomic DNA

SEQ ID NO: 40749 - DNA, 50 bp, Escherichia coli; identical to SEQ ID NO: 40159
  source 1..50: mol_type = genomic DNA

SEQ ID NO: 40750 - DNA, 40 bp, Escherichia coli; identical to SEQ ID NO: 40160
  source 1..40: mol_type = genomic DNA

SEQ ID NO: 40751 - protein, 506 aa, Escherichia coli
MRSVITYLRFSSATQGAEGADSTRRQNDLFKQWLKKNSDAQVVASFSDEGLSGYKGKHLTGQFGDMLARIESGEFPEGTLLLVEAIDRIGRLEHLETEALMNRIIAHGIEIHTLQDGLIYTRDALSDDLGISIIQRVKSYVAHQESKQKSFRVSQKWKQRAKLALAGEQRLTKMVPGWIDPDTFKLNEHAETVRLIFKLLLDGESLHNIARHLQSNDIKSFSRRKDANGFSVHSVRTVLRSVSAIGTLPASQRNDRPAIPNYYEAAIDAATFNKAQEILDKNRKGRTPASDNPLTINIFKGLFRCQCGASVHPTGTKNKYQGVYRCNNHLDGRCDVPPLKRKPFDKWMIDNFLGMIDVGNDGESERKIAALQHEVEIVTARIKKATALLLEMDDITELKTQVKGLNQKRTELQTTIDNMRRKASLTDKELPQLKDIDLTTKAGRVECQLILSKHLKGLTLGKDSVIVTLQNDTEITIPTDPLPLNDGTSIFEIAEKNLLNIDTFQL

SEQ ID NO: 40752 - DNA, 50 bp, Escherichia coli; identical to SEQ ID NO: 40287
  source 1..50: mol_type = genomic DNA

SEQ ID NO: 40753 - DNA, 40 bp, Escherichia coli; identical to SEQ ID NO: 20043
  source 1..40: mol_type = genomic DNA

SEQ ID NO: 40754 - DNA, 50 bp, Escherichia coli; identical to SEQ ID NO: 40289
  source 1..50: mol_type = genomic DNA

SEQ ID NO: 40755 - DNA, 40 bp, Escherichia coli; identical to SEQ ID NO: 40160
  source 1..40: mol_type = genomic DNA

SEQ ID NO: 40756 - protein, 506 aa, Escherichia coli
MRSVITYLRYSSAIQGAEGADSTRRQNDLFKQWLKKNSDAQVVASFSDEGLSGYKGKHLTGQFGDMLARIESGEFPEGTILLVESIDRIGRLEHLETEALMNRILGNGLEIHTLQDGLIYTKDALADDLGISIIQRVKAYIAHQESKQKSFRVSQKWGQRAKLALAGKQRLTKMVPGWIDPETFEVNEHAETVRLIFKLLLDGESLHNIARHLQANNISSFSRRKDANGFSVHSVRTILRSVTTIGTLPASQRNDRPAIPNYYEAAIDAATFNKAQEILDKNRKGRTPASDNPLTINIFKGLFRCQCGASVHPTGTKNKYAGVYRCNNHLDGRCDVPPLKRKPFDRWMIDNFLGMIDVGNDGESERKIAALQHEVEIVTSRIKKATALLLEMDDITELKTQVKELNQKRTALQTTIDNMRRKTSLTDKELPQLKDIDLTTKAGRVECQLILSKHLKGLTLGKDSVIVTLQNDTEITIPTNPLPLNDGTLIFEIAEKELLEIDAYQL

SEQ ID NO: 40757 - DNA, 50 bp, Escherichia coli; identical to SEQ ID NO: 36192
  source 1..50: mol_type = genomic DNA

SEQ ID NO: 40758 - DNA, 40 bp, Escherichia coli; identical to SEQ ID NO: 20043
  source 1..40: mol_type = genomic DNA

SEQ ID NO: 40759 - DNA, 50 bp, Escherichia coli; identical to SEQ ID NO: 40159
  source 1..50: mol_type = genomic DNA

SEQ ID NO: 40760 - DNA, 40 bp, Escherichia coli; identical to SEQ ID NO: 40160
  source 1..40: mol_type = genomic DNA

SEQ ID NO: 40761 - protein, 506 aa, Escherichia coli
MRSVITYLRFSSAIQGAEGADSTRRQNDLFKQWLKKNSDAQIVASFSDEGLSGYKGKHLTGQFGDMLARIESGEFPEGTILLVEAIDRIGRLEHLETEALMNRILGNGIEIHTLQDGLIYTKDALADDLGISIIQRVKAYIAHQESKQKSFRVSQRWGQRAKLALAGKQRLTKMVPGWIDPETFKLNEHAETVRLIFKLLLDGESLHNIARHLQSNGIKSFSRRKDANGFSVHSVRTILRSETTIGTLPASQRNDRPAIPNYYEGVVDIPTFNKAQEILDKNRKGRTPASDNPLTINIFKGLFRCQCGASVHPTGTKNKYAGVYRCNNHLDSRCDVQPLKRKPFDRWMIDNFLGMIDVGNDGESERKIAALQHEVEIVTSRIKKATALLLEMDDITELKTQVKELNQRRTDIQTTIDTLKRKTSLSDKGLPQLKDIDLMTKAGRVECQLILSKHLKGLTLGKGSVTITLQNDTEITIPTNPLPLNDGSPIFEIADKELLDIDAYQL

SEQ ID NO: 40762 - DNA, 50 bp, Escherichia coli; identical to SEQ ID NO: 36192
  source 1..50: mol_type = genomic DNA

SEQ ID NO: 40763 - DNA, 40 bp, Escherichia coli; identical to SEQ ID NO: 20043
  source 1..40: mol_type = genomic DNA

SEQ ID NO: 40764 - DNA, 50 bp, Escherichia coli; identical to SEQ ID NO: 40159
  source 1..50: mol_type = genomic DNA

SEQ ID NO: 40765 - DNA, 40 bp, Escherichia coli; identical to SEQ ID NO: 40160
  source 1..40: mol_type = genomic DNA

SEQ ID NO: 40766 - protein, 506 aa, Escherichia coli
MRSVITYLRYSSAIQGAEGADSTRRQNDLFKQWLKKNSDAQVVASFSDEGLSGYKGKHLTGQFGDMLARIESGEFPEGTILLVESIDRIGRLEHLETEALMNRILGNGLEIHTLQDGLIYTKDALADDLGISIIQRVKAYIAHQESKQKSFRVSQKWEQRAKLALAGEQRLTKMVPGWIDPDTFKLNEHAETVRLIFKLLLSGESLHNIARHLQSNGIKSFSRRKDANGFSVHSVRTILRSETTIGTLPASQRNDRPAIPNYYEAAIDASTFNKAQEILGKNRIGRTPASDNPLTINIFKGLFRCQCGASVHPTGTKNKYQGVYRCNNHLDGRCDVPPLKRKPFDKWMIDNFLGMIDVGNDGEAEGKIASLQHEVEIVTTRIKKATALLLEMDDIDELKIQLKELNQKRTELQTTIDNMRRKASLTDKELPQLKDIDLTTKAGRVECQLILSKHLKGLTLGKDSVTVTLQNDTEIIVPTDPLPLNDGTSIFEIAEKELLEIDAYQL

SEQ ID NO: 40767 - DNA, 50 bp, Escherichia coli; identical to SEQ ID NO: 36192
  source 1..50: mol_type = genomic DNA

SEQ ID NO: 40768 - DNA, 40 bp, Escherichia coli; identical to SEQ ID NO: 20043
  source 1..40: mol_type = genomic DNA

SEQ ID NO: 40769 - DNA, 50 bp, Escherichia coli; identical to SEQ ID NO: 40159
  source 1..50: mol_type = genomic DNA

SEQ ID NO: 40770 - DNA, 40 bp, Escherichia coli; identical to SEQ ID NO: 40160
  source 1..40: mol_type = genomic DNA

SEQ ID NO: 40771 - protein, 506 aa, Escherichia coli
MRSVITYLRYSSAIQGAEGADSTRRQNDLFKQWLKKNSDAQVVASFSDEGLSGYKGKHLTGQFGDMLARIESGEFPEGTILLVESIDRIGRLEHLETEALMNRILGNGLEIHTLQDGLIYTKDALADDLGISIIQRVKAYIAHQESKQKSFRVSQKWEQRAKLALAGEQRLTKMVPGWIDPDTFKLNEHAETVRLIFKLLLSGESLHNIARHLQSNGIKSFSRRKDANGFSVHSVRTILRSETTIGTLPASQRNDRPAIPNYYEAAIDAATFNKAQEVLDKNRKGRTPASDNPLTINIFKGLFRCQCGASVHPTGTKNKYAGVYRCNNHLDGRCDVPPLKRKPFDKWVLENFLGMIDVGNDGESERKIAALQHEVEIVTARIKKATALLLEMDDIDELKIQLKELNQKRTELQTTIDSMRRKASLTDKELPQLKDIDLTTKAGRVECQLILSKHLKGLTLGKDSVTVTLQNDTEITIPTNPLPLNDGSPIFEIADKELLDIDAYQL

SEQ ID NO: 40772 - DNA, 50 bp, Escherichia coli; identical to SEQ ID NO: 36192
  source 1..50: mol_type = genomic DNA

SEQ ID NO: 40773 - DNA, 40 bp, Escherichia coli; identical to SEQ ID NO: 20043
  source 1..40: mol_type = genomic DNA

SEQ ID NO: 40774 - DNA, 50 bp, Escherichia coli; identical to SEQ ID NO: 40159
  source 1..50: mol_type = genomic DNA

SEQ ID NO: 40775 - DNA, 40 bp, Escherichia coli; identical to SEQ ID NO: 40160
  source 1..40: mol_type = genomic DNA

SEQ ID NO: 40776 - protein, 506 aa, Escherichia coli
MRSVITYLRFSSATQGAEGADSTRRQNDLFKQWLKKNSDAQVVASFSDEGLSGYKGKHLTGQFGDMLARIESGEFPEGTLLLVEAIDRIGRLEHLETEALMNRIIAHGIEIHTLQDGLIYTRDALSDDLGISIIQRVKSYIAHQESKQKSFRVSQKWEQRAKLALAGEQRLTKMVPGWIDPDTFKLNEHAETVRLIFKLLLDGESLHNIARHLQSNDIKSFSRRKDANGFSVHSVRTVLRSVSAIGTLPASQRNDRPAIPNYYEAAIDAATFNKAQEILDKNRKGRTPASDNPLTINIFKGLFRCQCGASVHPTGTKNKYQGVYRCNNHLDGRCDVPPLKRKPFDKWMIDNFLGMIDVGNDGEAEGKIAALQHEVEIVTARIKKATALLLEMDDIDELKIQIKELNQRRTELQTTIDSMRRKASLTDKELPQLKDIDLTTKAGRVECQLILSKHLKGLTLGKGSVTITLQNDTEITIPTNPLPLNDGSPIFEIADKELLDIDAYQL

SEQ ID NO: 40777 - DNA, 50 bp, Escherichia coli; identical to SEQ ID NO: 40287
  source 1..50: mol_type = genomic DNA

SEQ ID NO: 40778 - DNA, 40 bp, Escherichia coli; identical to SEQ ID NO: 20043
  source 1..40: mol_type = genomic DNA

SEQ ID NO: 40779 - DNA, 50 bp, Escherichia coli; identical to SEQ ID NO: 40289
  source 1..50: mol_type = genomic DNA

SEQ ID NO: 40780 - DNA, 40 bp, Escherichia coli; identical to SEQ ID NO: 40160
  source 1..40: mol_type = genomic DNA

SEQ ID NO: 40781 - protein, 506 aa, Escherichia coli; identical to SEQ ID NO: 23231

SEQ ID NO: 40782 - DNA, 50 bp, Escherichia coli; identical to SEQ ID NO: 40187
  source 1..50: mol_type = genomic DNA

SEQ ID NO: 40783 - DNA, 40 bp, Escherichia coli; identical to SEQ ID NO: 20043
  source 1..40: mol_type = genomic DNA

SEQ ID NO: 40784 - DNA, 50 bp, Escherichia coli; identical to SEQ ID NO: 40189
  source 1..50: mol_type = genomic DNA

SEQ ID NO: 40785 - DNA, 40 bp, Escherichia coli; identical to SEQ ID NO: 40160
  source 1..40: mol_type = genomic DNA

SEQ ID NO: 40786 - protein, 506 aa, Escherichia coli
MRHVITYLRYSSAIQGAEGADSTRRQNDLFKQWLKKNSDAQVVASFNDEGLSGYKGKHLSGQFGDMLSRIESGEFSEGTILLVEAIDRIGRLEHLETEALMNRILGNGIEIHTLQDGLIYTKDALADDLGISIIQRVKAYIAHQESKQKSFRVSQKWEQRAKLALAGEQRLTKMVPGWIDPDTFKLNEHAETVRLIFKLLLSGESLHNIARHLQSNGIKSFSRRKDANGFSVHSVRTVLRSESVIGTLPASQRNDRPAIPNYYEAAIDAATFNKAQEILDKNRKGRTPASDNPLTINIFKGLFRCQCGASVHPTGTKNKYAGVYRCNNHLDGRCDVPPLKRKPFDRWMIDNFLGMIDVGNDGESERKIAALQHEVEIVTARIKKATALLLEMDDIDELKIQLKELNQKRTELQTTIDNMRRKASLTDKELPQLKDIDLTTKAGRVECQLILSKHLKGLTLGKDSVTVTLQNDTEITIPTNPLPLNDGSPIFEIADKELLDIDAYQL

SEQ ID NO: 40787 - DNA, 50 bp, Escherichia coli; identical to SEQ ID NO: 36192
  source 1..50: mol_type = genomic DNA

SEQ ID NO: 40788 - DNA, 40 bp, Escherichia coli; identical to SEQ ID NO: 20043
  source 1..40: mol_type = genomic DNA

SEQ ID NO: 40789 - DNA, 50 bp, Escherichia coli; identical to SEQ ID NO: 40159
  source 1..50: mol_type = genomic DNA

SEQ ID NO: 40790 - DNA, 40 bp, Escherichia coli; identical to SEQ ID NO: 40160
  source 1..40: mol_type = genomic DNA

SEQ ID NO: 40791 - protein, 443 aa, Escherichia coli
MRSVITYLRYSSSQQGTGDADSSRRQNELFQHWLKRNGDAHIVASFEDEARSAFKGKHLTKEFGAMMARIEANEFPEGTILLCEAIDRIGRLEHLKTESLMNRILEHGIEIHTLADNIIYTKEILSADLGVSLIQRVKSYLAHQESKQKSFRVSKKWEQRAKLALSGEQQLTRMVPGWIDPDTRKLNEHAQTVKTIFSLLLAGESLHNIARYLQANKIKSFSRRKDANGFSVHSVRTILTSESTVGTLAASKHNDRPAIPDYYEAAVNVATFNQAQEILSKNRKGRPPASDNPITINLFKGLMRCKCGASVHPTGVKNTYQGVYRCNNAVDGRCEVPTMKRKSFDRWMIENIVGLLERSGDKRYADGIGKGWKLESIKPSQFSLTFYWRTTELTDKQIKANIEKLVTCDWQRKLTPLQEAVAYAPANLDAFKEELRELTAAIA

SEQ ID NO: 40792 - DNA, 50 bp, Escherichia coli; identical to SEQ ID NO: 40732
  source 1..50: mol_type = genomic DNA

SEQ ID NO: 40793 - DNA, 40 bp, Escherichia coli; identical to SEQ ID NO: 20043
  source 1..40: mol_type = genomic DNA

SEQ ID NO: 40794 - DNA, 50 bp, Escherichia coli; identical to SEQ ID NO: 40734
  source 1..50: mol_type = genomic DNA

SEQ ID NO: 40795 - DNA, 40 bp, Escherichia coli; identical to SEQ ID NO: 40160
  source 1..40: mol_type = genomic DNA

SEQ ID NO: 40796 - protein, 506 aa, Escherichia coli
MRSVITYLRYSSAIQGAEGADSTRRQNDLFKQWLKKNGDAQIVASFSDEGLSGYKGKHLTGQFGDMLARIEAGEFPEGTILLVESIDRIGRLEHLETEALMNRILGNGIEIHTLQDGLIYTKDALADDLGISIIQRVKAYIAHQESKQKSFRVSQKWGHRAKLALAGEQRLTKMVPGWIDPETFKLNEHAETVRLIFKLLLDGESLHNIARHLQSNGIRSFSRRKDANRFSVHSVRTILRSETTIGTLPASQRNDRPAIPNYYEAAIDASTFNKAQEILTKNRKGRTPASDNPLSLNLFKGLFKCRCGASVHPTGTKNKYQGVYRCNNHLDGRCDVPPLKRKPFDRWMIDNFLGMIDMGNDGESERKIAALQHEVEIVTSRIKKATALLFEMDDITELKTQVKELNQKRTALQTTIDSMKRKALLTDKKLPQIRDVDLTTKAGRVECQLILSKHLESLTLDEGFVTVKLQNGTKIIIPTDPLPLNDGTSIFEIADKKLLDIDVYRL

SEQ ID NO: 40797 - DNA, 50 bp, Escherichia coli; identical to SEQ ID NO: 40222
  source 1..50: mol_type = genomic DNA

SEQ ID NO: 40798 - DNA, 40 bp, Escherichia coli; identical to SEQ ID NO: 20043
  source 1..40: mol_type = genomic DNA

SEQ ID NO: 40799 - DNA, 50 bp, Escherichia coli; identical to SEQ ID NO: 40224
  source 1..50: mol_type = genomic DNA

SEQ ID NO: 40800 - DNA, 40 bp, Escherichia coli; identical to SEQ ID NO: 40160
  source 1..40: mol_type = genomic DNA

SEQ ID NO: 40801 - protein, 506 aa, Escherichia coli
MRSVITYLRFSSAIQGAEGADSTRRQNDLFKQWLKKNSDAQIVASFSDEGLSGYKGKHLTGQFGDMLARIESGEFPEGTILLVEAIDRIGRLEHLETEALMNRILGNGIEIHTLQDGLIYTKDALADDLGISIIQRVKAYIAHQESKQKSFRVSQRWGQRAKLALAGKQRLTKMVPGWIDPETFKLNEHAETVRLIFKLLLDGESLHNIARHLQSNGIKSFSRRKDANGFSVHSVRTILRSETTIGTLPASQRNDRPAIPNYYEGVVDIPTFNKAQEILDKNRKGRTPASDNPLTINIFKGLFRCQCGASVHPTGTKNKYAGVYRCNNHLDGRCDVQSLKRKPFDRWMIDNFLGMIDVGNDGESERKIAALQHEVEIVTSRIKKATALLLEMDDITELKTQVKELNQRRTDIQTTIDTLKRKTSLSDKGLPQLKDIDLMTKAGRVECQLILSKHLKGLTLGKGSVTITLQNDTEITIPTNPLPLNDGSPIFEIADKELLDIDAYQL

SEQ ID NO: 40802 - DNA, 50 bp, Escherichia coli; identical to SEQ ID NO: 40222
  source 1..50: mol_type = genomic DNA

SEQ ID NO: 40803 - DNA, 40 bp, Escherichia coli; identical to SEQ ID NO: 20043
  source 1..40: mol_type = genomic DNA

SEQ ID NO: 40804 - DNA, 50 bp, Escherichia coli; identical to SEQ ID NO: 40224
  source 1..50: mol_type = genomic DNA

SEQ ID NO: 40805 - DNA, 40 bp, Escherichia coli; identical to SEQ ID NO: 40160
  source 1..40: mol_type = genomic DNA

SEQ ID NO: 40806 - protein, 506 aa, Escherichia coli
MRTAITYLRFSSAIQGAEGADSTRRQNDLFKQWLKKNSDAQVVASFSDEGVSGYKGKHLTGQFGDMLARIEAGEFPEGTILLVESIDRIGRLEHLETEALMNRILGNGLEIHTLQDGLIYTKDALADDLGISIIQRVKAYIAHQESKQKSFRVSQKWEQRAKLALAGEQRLTKMVPGWIDPDTFKLNEHAETVRLIFKLLLSGESLHNIARHLQSNGIKSFSRRKDANGFSVHSVRTILRSETTIGTLPASQRNDRPAIPNYYEAAIDASTFNKAQEILGKNRIGRTPASDNPLTINIFKGLFRCQCGASVHPTGTKNKYQGVYRCNNHLDGRCDVPPLKRKPFDKWMIDNFLGMIDVGNDGEAEGKIASLQHEVEIVTTRIKKATALLLEMDDIDELKIQLKELNQKRTELQTTIDNMRRKASLTDKELPQLKDIDLTTKAGRVECQLILSKHLKGLTLGKDSVTVTLQNDTEITIPTNPLPLNDGSPIFEIADKELLDIDAYQL

SEQ ID NO: 40807 - DNA, 50 bp, Escherichia coli; identical to SEQ ID NO: 36192
  source 1..50: mol_type = genomic DNA

SEQ ID NO: 40808 - DNA, 40 bp, Escherichia coli; identical to SEQ ID NO: 20043
  source 1..40: mol_type = genomic DNA

SEQ ID NO: 40809 - DNA, 50 bp, Escherichia coli; identical to SEQ ID NO: 40159
  source 1..50: mol_type = genomic DNA

SEQ ID NO: 40810 - DNA, 40 bp, Escherichia coli; identical to SEQ ID NO: 40160
  source 1..40: mol_type = genomic DNA

SEQ ID NO: 40811 - protein, 506 aa, Escherichia coli
MRSVITYLRYSSAIQGAEGADSTRRQNDLFKQWLKKNSDAQVVASFSDEGLSGYKGKHLTGQFGDMLARIESGEFPECTILLVESIDRIGRLEHLETEALMNRILGNGLEIHTLQDGLIYTKDALADDLGISIIQRVKAYIAHQESKQKSFRVSQKWEQRAKLALAGKQRLTKMVPGWIDPDTFKLNEHAETVRLIFKLLLSGESLHNIARHLQANNISSFSRRKDANGFSVHSVRTILRSVTTIGTLPASQRNDRPAIPNYYEAAIDAATFNKAQEILDKNRKGRTPASDNPLTINIFKGLFRCQCGASVHPTGTKNKYAGVYRCNNHLDGRCDVPPLKRKPFDRWMIDNFLGMIDVGNDGESERKIAALQHEVEIVTSRIKKATALLLEMDDITELKTQVKELNQKRTALQTTIDNMRRKTSLTDKELPQLKDIDLTTKAGRVECQLILSKHLKGLTLGKDSVIVTLQNDTEITIPTNPLPLNDGTSIFEIAEKELLEIDAYQL

SEQ ID NO: 40812 - DNA, 50 bp, Escherichia coli; identical to SEQ ID NO: 36192
  source 1..50: mol_type = genomic DNA

SEQ ID NO: 40813 - DNA, 40 bp, Escherichia coli; identical to SEQ ID NO: 20043
  source 1..40: mol_type = genomic DNA

SEQ ID NO: 40814 - DNA, 50 bp, Escherichia coli; identical to SEQ ID NO: 40159
  source 1..50: mol_type = genomic DNA

SEQ ID NO: 40815 - DNA, 40 bp, Escherichia coli; identical to SEQ ID NO: 40160
  source 1..40: mol_type = genomic DNA

SEQ ID NO: 40816 - protein, 506 aa, Escherichia coli
MRTAITYLRYSSAIQGVEGADSTRRQNDLFKQWLKKNSDAQIVASFSDEGLSGYKGKHLTGQFGDMLARIESGEFPEGTILLVESIDRIGRLEHLETEALMNRILGNGIEIHTLQDGLIYTKDALADDLGISIIQRVKAYIAHQESKQKSFRVSQKWEQRAKLALAGEQRLTKMVPGWIDPETFKLNEHAETVRLIFKLLLDGESLHNIARHLQSNGIKSFSRRKDANGFSVHSVRTILRSETTIGTLPASQRNDRPAIPNYYEGVVDVSTFNKAQEILDKNRKGRTPASDNPLTINIFKGLFRCQCGASVHPTGTKNKYAGVYRCNNHLDGRCDVPQLKRKPFDRWMIDNFLGMIDVVSDGESERKIAALHYEVETVTARIKKATTLLLEMDDITELKAQVKELNQKRTELQTTIDTMKRKTSLTDKGLPQLKDIDLMTKAGRVECQLILSKHLKGLTLGKDSVTVTLQNDTEIIVPTDPLPLNDGTSIFEIAEKNLLEVDGFQL

SEQ ID NO: 40817 - DNA, 50 bp, Escherichia coli
  source 1..50: mol_type = genomic DNA
aagccgaatagacttaaatcaagggtcattgtattgtagctattcggcat

SEQ ID NO: 40818 - DNA, 40 bp, Escherichia coli; identical to SEQ ID NO: 20043
  source 1..40: mol_type = genomic DNA

SEQ ID NO: 40819 - DNA, 50 bp, Escherichia coli
  source 1..50: mol_type = genomic DNA
aagccgaatagacttaaatcaaggtgcattgtattgtagctattcggcat

SEQ ID NO: 40820 - DNA, 40 bp, Escherichia coli; identical to SEQ ID NO: 40160
  source 1..40: mol_type = genomic DNA

SEQ ID NO: 40821 - protein, 506 aa, Escherichia coli
MRSVITYLRYSSAIQGAEGADSTRRQNDLFKQWLKKNSDAQVVASFSDEGLSGYKGKHLTGQFGDMLARIESGEFPEGTILLVESIDRIGRLEHLETEALMNRILGNGLEIHTLQDGLIYTKDALADDLGISIIQRVKAYIAHQESKQKSFRVSQKWEQRAKLALAGEQRLTKMVPGWIDPDTFKLNEHAETVRLIFKLLLSGESLHNIARHLQSNGIKSFSRRKDANGFSVHSVRTILRSETTIGTLPASQRNDRPAIPNYYEAAIDASTFNKAQEILGKNRIGRTPASDNPLTINIFKGLFRCQCGASVHPTGTKNKYQGVYRCNNHLDGRCDVPPLKRKPFDKWMIDNFLGMIDVGNDGEAEGKIASLQHEVEIVTTRIKKATALLLEMDDIDELKIQLKELNQKRTELQTTIDNMRRKASLTDKELPQLKDIDLTTKAGRIECQLILSKHLKGLTLGKDSVTVTLQNDTEITIPTNPLPLNDGSPIFEIADKELLDIDAYQL

SEQ ID NO: 40822 - DNA, 50 bp, Escherichia coli; identical to SEQ ID NO: 36192
  source 1..50: mol_type = genomic DNA

SEQ ID NO: 40823 - DNA, 40 bp, Escherichia coli; identical to SEQ ID NO: 20043
  source 1..40: mol_type = genomic DNA

SEQ ID NO: 40824 - DNA, 50 bp, Escherichia coli; identical to SEQ ID NO: 40159
  source 1..50: mol_type = genomic DNA

SEQ ID NO: 40825 - DNA, 40 bp, Escherichia coli; identical to SEQ ID NO: 40160
  source 1..40: mol_type = genomic DNA

SEQ ID NO: 40826 - protein, 506 aa, Escherichia coli
MRSVITYLRYSSAIQGAEGADSTRRQNDLFKQWLKKNSDAQVVASFSDEGLSGYKGKHLTGQFGDMLARIESGEFPEGTILLVESIDRIGRLEHLETEALMNRILGNGLEIHTLQDGLIYTKDALADDLGISIIQRVKAYIAHQESKQKSFRVSQKWEQRAKLALAGEQRLTKMVPGWIDPDTFKLNEHAETVRLIFKLLLSGESLHNIARHLQSNGIKSFSRRKDANGFSVHSVRTILRSETTIGTLPASQRNDRPAIPNYYEAAIDASTFNKAQEILGKNRIGRTPASDNPLTINIFKGLFRCQCGASVHPTGTKNKYQGVYRCNNHLDGRCDVPPLKRKPFDKWMIDNFLGMIDVGNDGEAEGKIASLQHEVEIVTTRIKKATALLLEMDDIDELKIQLKELNQKRTELQTTIDNMRRKTSLTDKELPQLKDIDLTTKAGRVECQLILSKHLKGLTLGKDSVTVTLQNDTEITIPTNPLPLNDGTSIFEIADKELLDIDAYQL

SEQ ID NO: 40827 - DNA, 50 bp, Escherichia coli; identical to SEQ ID NO: 36192
  source 1..50: mol_type = genomic DNA

SEQ ID NO: 40828 - DNA, 40 bp, Escherichia coli; identical to SEQ ID NO: 20043
  source 1..40: mol_type = genomic DNA

SEQ ID NO: 40829 - DNA, 50 bp, Escherichia coli; identical to SEQ ID NO: 40159
  source 1..50: mol_type = genomic DNA

SEQ ID NO: 40830 - DNA, 40 bp, Escherichia coli; identical to SEQ ID NO: 40160
  source 1..40: mol_type = genomic DNA

SEQ ID NO: 40831 - protein, 506 aa, Escherichia coli; identical to SEQ ID NO: 30541

SEQ ID NO: 40832 - DNA, 50 bp, Escherichia coli; identical to SEQ ID NO: 36192
  source 1..50: mol_type = genomic DNA

SEQ ID NO: 40833 - DNA, 40 bp, Escherichia coli; identical to SEQ ID NO: 20043
  source 1..40: mol_type = genomic DNA

SEQ ID NO: 40834 - DNA, 50 bp, Escherichia coli; identical to SEQ ID NO: 40159
  source 1..50: mol_type = genomic DNA

SEQ ID NO: 40835 - DNA, 40 bp, Escherichia coli; identical to SEQ ID NO: 40160
  source 1..40: mol_type = genomic DNA

SEQ ID NO: 40836 - protein, 506 aa, Escherichia coli
MRTVITYLRFSSATQGAEGADSTRRQNDLFKQWLKKNSDAQVVASFSDEGLSGYKGKHLTGQFGDMLARIESGEFPGGTILLVESIDRIGRLEHLETEALMNRILGNGIEIHTLQDGLVYTKDALADDLGISIIQRVKSYIAHQESKQKSFRVSEKWKQRAKLALAGEQRLTRNVPGWIDPDTFTLNEHAETVRLIFKLLLSGESLHNIARHLQANNISSFSRRKDANGFSVHSVRTVLRSESVIGTLPASQRNDRPAIPNYYEAAIDAATFNKAQEILDKNRKGRTPASDNPLTINIFKGLFRCQCGASVHPTGTKRTYQGVYRCNNHLDGRCHVPPLKRKPFDKWMLENFLGMIDVGNDGESERKIAALQHEVEIVTARIKKATALLLEMDDITELKAQVKGLNQKRTEIQTTIDTLKRKTSLTDKELPQLKDIDLMTKAGRVECQLILSKHLKGLTLGKDSVIVTLQNDTEITIPTNPLPLNDGTSIFEIAEKELLEIDAYQL

SEQ ID NO: 40837 - DNA, 50 bp, Escherichia coli
  source 1..50: mol_type = genomic DNA
aaaccgaatagacttcattcaagcgtcattgtattgtagctattcggcat

SEQ ID NO: 40838 - DNA, 40 bp, Escherichia coli; identical to SEQ ID NO: 20043
  source 1..40: mol_type = genomic DNA

SEQ ID NO: 40839 - DNA, 50 bp, Escherichia coli
  source 1..50: mol_type = genomic DNA
aaaccgaatagacttcattcaagctgcattgtattgtagctattcggcat

SEQ ID NO: 40840 - DNA, 40 bp, Escherichia coli; identical to SEQ ID NO: 40160
  source 1..40: mol_type = genomic DNA

SEQ ID NO: 40841 - protein, 506 aa, Escherichia coli
MRSVITYLRYSSAIQGAEGADSTRRQNDLFKQWLKKNGDAQIVASFSDEGLSGYKGKHLTGQFGDMLARIEAGEFPEGTILLVESIDRIGRLEHLETEALMNRILGNGIEIHTLQDGLIYTKDALADDLGISIIQRVKAYIAHQESKQKSFRVSQKWGQRAKLALAGEQRLTKMVPGWIDPETFKLNEHAETVRLIFKLLLDGESLHNIARHLQSNGIKSFSRRKDANGFSVHSVRTILRSETTIGTLPASQRNDRPAIPNYYEGVVDIPTFNKAQEILDKNRKGRTPASDNPLTINIFKGLFRCQCGASVHPTGTKNKYAGVYRCNNHLDGRCDVPPLKRKPFDRWMIDNFLGMIDVGNDGESERKIAALQHEVEIVTARIKKATALLLEMDDITELKAQVKGLNQKRTEIQTTIDTLKRKTSLTDKELPQLKDIDLTTKAGRVECQLILSKHLKGLTLGKDSVTVTLQNDTEITIPTNPLPLNDGSPIFEIADKELLDIDAYQL

SEQ ID NO: 40842 - DNA, 50 bp, Escherichia coli; identical to SEQ ID NO: 36192
  source 1..50: mol_type = genomic DNA

SEQ ID NO: 40843 - DNA, 40 bp, Escherichia coli; identical to SEQ ID NO: 20043
  source 1..40: mol_type = genomic DNA

SEQ ID NO: 40844 - DNA, 50 bp, Escherichia coli; identical to SEQ ID NO: 40159
  source 1..50: mol_type = genomic DNA

SEQ ID NO: 40845 - DNA, 40 bp, Escherichia coli; identical to SEQ ID NO: 40160
  source 1..40: mol_type = genomic DNA

SEQ ID NO: 40846 - protein, 506 aa, Escherichia coli
MRTVITYLRFSSAIQGAEGADSTRRQNDLFKQWLKKNSDAQVVASFSDEGLSGYKGKHLTGQFGDMLARIESGEFPEGTILLVEAIDRIGRLEHLETEALMNRIIAHGIEIHTLQDGLIYTRDALSDDLGISIIQRVKSYVAHQESKQKSFRVSQKWKQRAKLALAGEQRLTKMVPGWIDPDTFKLNEHAETVRLIFKLLLSGESLHNIARHLQSNGIKSFSRRKDANGFSVHSVRTILRSETTIGTLPASQRNDRPAIPNYYEAAIDVSTFNKAQEILDKNRKGRTPASDNPLTINIFKGLFRCQCGASVHPTGTKNKYQGVYRCNNHLDGRCDVPPLKRKPFDKWMLENFLGMIDVGNDGEAEGKIASLQHEVEIVTTRIKKATALLLEMDDITELKAQVKELNQKRTELQTTIDSMRRKTSLTDKELPQLKDIDLTTKAGRVECQLILSKHLKGLTLGKDSVIVTLQNDTEITIPTNPLPLNDGTSIFEIAEKELLEIDAYQL

SEQ ID NO: 40847 - DNA, 50 bp, Escherichia coli; identical to SEQ ID NO: 36192
  source 1..50: mol_type = genomic DNA

SEQ ID NO: 40848 - DNA, 40 bp, Escherichia coli; identical to SEQ ID NO: 20043
  source 1..40: mol_type = genomic DNA

SEQ ID NO: 40849 - DNA, 50 bp, Escherichia coli; identical to SEQ ID NO: 40159
  source 1..50: mol_type = genomic DNA

SEQ ID NO: 40850 - DNA, 40 bp, Escherichia coli; identical to SEQ ID NO: 40160
  source 1..40: mol_type = genomic DNA

SEQ ID NO: 40851 - protein, 506 aa, Escherichia coli
MRSVITYLRYSSAIQGAEGADSTRRQNDLFKQWLKKNSDAQVVASFSDEGLSGYKGKHLTGQFGDMLARIESGEFSEGTVLLVEAIDRIGRLEHLETEALMNRIIAHGIEIHTLQDGLIYTRDALSDDLGISIIQRVKSYVAHQESKQKSFRVSQKWEQRAKLALAGEQRLTKMVPGWIDPDTFKLNEHAETVRLIFKLLLSGESLHNIARHLQSNGIKSFSRRKDANGFSVHSVRTILRSETTIGTLPASQRNDRPAIPNYYEPAIDASTFNKAQEILDKNRKGRTPASDNPLTINIFKGLFRCQCGASVHPTGTKNKYAGVYRCNSHLDGRCGVPPLKRKPFDKWMIDNFLGMIDVGNDGEAEKEIASLQHEVETVTARIKKATALLLEMDDIDELKIQLKELNQKRTELQTTIDSMRRKASLTDKELPQLKDIDLTTKAGRVECQLILSKHLESLTLGRGQVTVKLSNGTEIIVPTDPLPLTDGAAIFEIAEKNLLNIDTFQL

SEQ ID NO: 40852 - DNA, 50 bp, Escherichia coli; identical to SEQ ID NO: 36192
  source 1..50: mol_type = genomic DNA

SEQ ID NO: 40853 - DNA, 40 bp, Escherichia coli; identical to SEQ ID NO: 20043
  source 1..40: mol_type = genomic DNA

SEQ ID NO: 40854 - DNA, 50 bp, Escherichia coli; identical to SEQ ID NO: 40159
  source 1..50: mol_type = genomic DNA

SEQ ID NO: 40855 - DNA, 40 bp, Escherichia coli; identical to SEQ ID NO: 40160
  source 1..40: mol_type = genomic DNA

SEQ ID NO: 40856 - protein, 506 aa, Escherichia coli
MRSVITYLRYSSAIQGAEGADSTRRQNDLFKQWLKKNSDAQVVASFSDEGLSGYKGKHLTGQFGDMLARIESGEFPEGTILLVESIDRIGRLEHLETEALMNRILGNGIEIHTLQDGLIYTKDALADDLGISIIQRVKAYIAHQESKQKSFRVSQKWKQRAKLALAGEQRLTKMVPGWIDPETFKLNEHAETVRLIFKLLLDGESLHNIARHLQSNGIRSFSRRKDANGFSVHSVRTILRSETAIGTLPASQRNDRPAIPNYYEAAIDASTFNKAQEILGKNRIGRTPASDNPLTINIFKGLFRCQCGASVHPTGTKNKYQGVYRCNNHLDGRCDVPPLKRKPFDRWMIDNFLGMIDVVSDGETERRIAALQHEVETVTARIKKATALLLEMDDITELKAQVKELNQKRTELQTTIDTLKRKTSLTDKELPQLKDIDLMTKAGRVECQLILSKHLKGLTLGKDSVTVTLQNDTEITIPTNPLPLNDGSPIFEIADKELLDIDAYQL

SEQ ID NO: 40857 - DNA, 50 bp, Escherichia coli; identical to SEQ ID NO: 36192
  source 1..50: mol_type = genomic DNA

SEQ ID NO: 40858 - DNA, 40 bp, Escherichia coli; identical to SEQ ID NO: 20043
  source 1..40: mol_type = genomic DNA

SEQ ID NO: 40859 - DNA, 50 bp, Escherichia coli; identical to SEQ ID NO: 40159
  source 1..50: mol_type = genomic DNA

SEQ ID NO: 40860 - DNA, 40 bp, Escherichia coli; identical to SEQ ID NO: 40160
  source 1..40: mol_type = genomic DNA

SEQ ID NO: 40861 - protein, 506 aa, Escherichia coli
MRTAITYLRYSSAIQGAEGADSTRRQNDLFKQWLKKNGDAQIVASFSDEGLSGYKGKHLTGQFGDMLARIESGEFPEGTILLVEAIDRIGRLEHLETEALMNRILGNGIEIHTLQDGLIYTKDALADDLGISIIQRVKSYIAHQESKQKSFRVSQKWEQRAKLALAGEQRLTKMVPGWIDPETFKLNEHAETVRLIFKLLLDGESLHNIARHLQSNGIKSFSRRKDANGFSVHSVRTILRSETTTGTLPASQRNDRPAIPNYYEAAIDASTFNKAQEILGKNRTGRTPASDNPLTINIFKGLFRCQCGASVHPTGTKNKYQGVYRCNNHLDGRCDVPPLKRKPFDKWMIDNFLGMIDVVSDGESERKIAALQHEVETVTARIKKATALLLEMDDITELKAQVKELNQKRTELQTTINTMKRKTSLSDKGLPQIKGLDLMTKAGRVECQLILSKHLKGLTLGKDSVTVTLQNDTEIIVPTDPLPLNDGTSIFEIAEKELLEIDAYQL

SEQ ID NO: 40862 - DNA, 50 bp, Escherichia coli; identical to SEQ ID NO: 36192
  source 1..50: mol_type = genomic DNA

SEQ ID NO: 40863 - DNA, 40 bp, Escherichia coli; identical to SEQ ID NO: 20043
  source 1..40: mol_type = genomic DNA

SEQ ID NO: 40864 - DNA, 50 bp, Escherichia coli; identical to SEQ ID NO: 40159
  source 1..50: mol_type = genomic DNA

SEQ ID NO: 40865 - DNA, 40 bp, Escherichia coli; identical to SEQ ID NO: 40160
  source 1..40: mol_type = genomic DNA

SEQ ID NO: 40866 - protein, 574 aa, Oscillibacter sp
MVAISQSVWRFMKEVNMLQPNQKITALYCRLSRDDNLEGDSNSIQNQKLILQKYADENGFQNTRFYVDDGYSGANFNRPAFEQMMDDMSNGDIAVIITKDLSRLGRNQLHTGLYIEEIFPSNDVRYIAVNDNVDTKYENSNELMPFKNLFNEWHVRDCSRKVRNVVNAKAQRGIRVGTRAPYGYRKGATKDSPLLVDEEAAAVVKRIFAMCAGGMGPAQIAKQLKKECIYSPSMYAYTKFGTSHSGLNAERPYNWTGDMVADMLQNMVYLGHTVNLRYSTKSYKDKKRCERPKSEWLIFENTHEELVDQETWDIVQEVRSHKRRRTNMDEQNMFSGLVYCADCGKPMVLHRAHTMKPEQNHFTCRTYKKDGAEVCSAHYIREVALKETVLETIRRATEFARSDPERFAAYIQQKQSTEVAKEIRGLERELSTMRKRDGELDVVFKRMYEDSALGRVSNEQFRLLSEAYSKEKAQLAEAIPATEERLEKLRSSMANAKNFIAKARKFTDMTELTPELLRTFVAKIIVYEKEVKYSKHAPQKIHICFRDFNLNETDDMLLCGETTEKADSTIALPA

SEQ ID NO: 40867 - DNA, 50 bp, Oscillibacter sp; identical to SEQ ID NO: 10817
  source 1..50: mol_type = genomic DNA

SEQ ID NO: 40868 - DNA, 40 bp, Oscillibacter sp
  source 1..40: mol_type = genomic DNA
tacataaaaaagaagggcgaaagcccttctttttttgcac

SEQ ID NO: 40869 - DNA, 50 bp, Oscillibacter sp; identical to SEQ ID NO: 10817
  source 1..50: mol_type = genomic DNA

SEQ ID NO: 40870 - DNA, 40 bp, Oscillibacter sp
  source 1..40: mol_type = genomic DNA
gtcctaaacaagagaggtgaaagcccttctttactttcac

SEQ ID NO: 40871 - protein, 548 aa, Mycolicibacterium fortuitum; identical to SEQ ID NO: 38736

SEQ ID NO: 40872 - DNA, 50 bp, Mycolicibacterium fortuitum; identical to SEQ ID NO: 38737
  source 1..50: mol_type = genomic DNA

SEQ ID NO: 40873 - DNA, 40 bp, Mycolicibacterium fortuitum
  source 1..40: mol_type = genomic DNA
cgcctcagtcgggtgtccgaggggggacttgaacccccac

SEQ ID NO: 40874 - DNA, 50 bp, Mycolicibacterium fortuitum
  source 1..50: mol_type = genomic DNA
gagtcgtgtcgccaaatgtgtccgtggggggacttgtccgtctacgacac

SEQ ID NO: 40875 - DNA, 40 bp, Mycolicibacterium fortuitum
  source 1..40: mol_type = genomic DNA
tgcctcagtggggactctgtgtgggggcttgtacccacat

SEQ ID NO: 40876 - protein, 536 aa, Mycolicibacterium conceptionense
MSLRFAFYGRVSTEDAQDPEASRSWQKRRAIDLISPHGGVLAADYFDIGQSRSLPWKRRPEASRLLADVTSRDRGFDAVVIGEPARAFYGPQFALTFPVLTHYGVGLWVPEVGGAVDPGSEAHDLVMTLFGGMSKGERARIQMRVRTAMSALAQDTTRYLGGRPPYGYQLVDAGPHPNPAKASLGQRLHRLEPDPETAPTVERIYRMYADGAGLRFIAQQLTDDGVPSPSQYDPARNRHRDPRGWSHSAIRAILDNPAYRGIRVWGKQEKYEVLLNPDDVAAGYETRMRWRDRADWIAPDRRTHEELIPDELAQAVRLRMQARRGPGRVCSRESTVPYALRGLLFCAACGRRMQGAARPGKQTTRILYRCEFGKSRSVPVDLSDHPRTVYLREDAVTARLDEWIATLADPEDLARGQDVDPAAGPGYAALQRQLSEANAKVAALITAVESGVAVEDLTAALRQRTAERDELRARVERVERPRAMCAAEISELVKELGGLSVILGAATGAERAEVYASLGLRLDYDPHLRRVTATAT

SEQ ID NO: 40877 - DNA, 50 bp, Mycolicibacterium conceptionense; identical to SEQ ID NO: 38737
  source 1..50: mol_type = genomic DNA

SEQ ID NO: 40878 - DNA, 40 bp, Mycolicibacterium conceptionense; identical to SEQ ID NO: 40873
  source 1..40: mol_type = genomic DNA

SEQ ID NO: 40879 - DNA, 50 bp, Mycolicibacterium conceptionense; identical to SEQ ID NO: 40874
  source 1..50: mol_type = genomic DNA

SEQ ID NO: 40880 - DNA, 40 bp, Mycolicibacterium conceptionense; identical to SEQ ID NO: 40875
  source 1..40: mol_type = genomic DNA

SEQ ID NO: 40881 - protein, 548 aa, Mycolicibacterium fortuitum; identical to SEQ ID NO: 13166

SEQ ID NO: 40882 - DNA, 50 bp, Mycolicibacterium fortuitum; identical to SEQ ID NO: 442
  source 1..50: mol_type = genomic DNA

SEQ ID NO: 40883 - DNA, 40 bp, Mycolicibacterium fortuitum
  source 1..40: mol_type = genomic DNA
gcctcagtcgggtgtccgaggggggacttgaacccccacg

SEQ ID NO: 40884 - DNA, 50 bp, Mycolicibacterium fortuitum
  source 1..50: mol_type = genomic DNA
agtcgtgtcgccggatgtgtccgagtggggacttgtccgtctacgacacg

SEQ ID NO: 40885 - DNA, 40 bp, Mycolicibacterium fortuitum
  source 1..40: mol_type = genomic DNA
gcctcagtggggactctgtgtgggggcttgtacccacatt

SEQ ID NO: 40886 - protein, 534 aa, Thioclava electrotropha
MTKRVAIYARYSSGLQKQTSIDDQVAMAERFAAERGWVVTHRFTDYEKSGRNTRREGLQALCAAVNARQVDAIVIEAVDRLTRKIADALNHYELFQFQQAELYSVAEGQQDFFKVLINALGAQLYAQMIGEHTRRGMVQGLTRKRLHTSAYGYRKCEGDEGLNREIDPEEAEVVRRIFREFADGHSTQAIVKRLNGDGIPAPRGGTWDISTIRGNPARFEGILRNRLYIGIASVAKTSRRYHPETGSKEVYETPGAAAEIEIPALRIIDQDLWKRVETQLATQAVKAKSKGNPVGARRSKHLLSGLLVCGCCGATYVKVGRTHFGCREARKGACNNKKTIHRDRIEARVFSKLRGTFLTSELAASFDAALKAEYKALASAQGANAVTRLERRLKKACTSRQRIFEAIEQGAPYSAYKVRAEELEREIANLEAELSQHQETRSVLPQLPTDSAALFARAVQELETLLADPELVHQANEHLRELIRRVELRPDPYAPDALAAEITTDLGALLSAGGVTPSIVDIFSAMRQLSVRQG

SEQ ID NO: 40887 - DNA, 50 bp, Thioclava electrotropha
  source 1..50: mol_type = genomic DNA
gcggcaactatcggtcaggcagggggcctaacccgaccgatagttgtcag

SEQ ID NO: 40888 - DNA, 40 bp, Thioclava electrotropha
  source 1..40: mol_type = genomic DNA
caagacttaaggaagagggggctctgcccccatctcctcc

SEQ ID NO: 40889 - DNA, 50 bp, Thioclava electrotropha
  source 1..50: mol_type = genomic DNA
gcggcaactatcggtcaggcagggcccctaacccgaccgatagttgtcag

SEQ ID NO: 40890 - DNA, 40 bp, Thioclava electrotropha
  source 1..40: mol_type = genomic DNA
caagccataagggatctggccccctgacccaatcacctcc

SEQ ID NO: 40891 - protein, 619 aa, Streptococcus anginosus; identical to SEQ ID NO: 40101

SEQ ID NO: 40892 - DNA, 50 bp, Streptococcus anginosus; identical to SEQ ID NO: 11112
  source 1..50: mol_type = genomic DNA

SEQ ID NO: 40893 - DNA, 40 bp, Streptococcus anginosus
  source 1..40: mol_type = genomic DNA
tgttccttggcgtccctcggacatccagcaacgcaatgga

SEQ ID NO: 40894 - DNA, 50 bp, Streptococcus anginosus; identical to SEQ ID NO: 11112
  source 1..50: mol_type = genomic DNA

SEQ ID NO: 40895 - DNA, 40 bp, Streptococcus anginosus
  source 1..40: mol_type = genomic DNA
ttttccttagtgttcctttgacatccagcagattaatgga

SEQ ID NO: 40896 - protein, 619 aa, Streptococcus anginosus; identical to SEQ ID NO: 19271

SEQ ID NO: 40897 - DNA, 50 bp, Streptococcus anginosus; identical to SEQ ID NO: 11112
  source 1..50: mol_type = genomic DNA

SEQ ID NO: 40898 - DNA, 40 bp, Streptococcus anginosus; identical to SEQ ID NO: 40893
  source 1..40: mol_type = genomic DNA

SEQ ID NO: 40899 - DNA, 50 bp, Streptococcus anginosus; identical to SEQ ID NO: 11112
  source 1..50: mol_type = genomic DNA

SEQ ID NO: 40900 - DNA, 40 bp, Streptococcus anginosus; identical to SEQ ID NO: 40895
  source 1..40: mol_type = genomic DNA

SEQ ID NO: 40901 - protein, 600 aa, Pantoea agglomerans
MARKLYSYQRWSSAVQADGTTKARQTRSAEEYAQKNGLEIEEIVDAGVSGFKSANTDENGALGQFLRAVDEGLIAHNSVLFVEALDRITRDEIDTALELFLGILRRGITVVTGMDNKVYTREAIKGNPVDLLTSILMFSRAHEESKTKQNRTNGNALALIDRFIKQGLPVNIKSIGSHPWWIDDSGSMYEAVKTHPVLWACAQFAIENFMEGESVFKVTQMLNEKFPHYYKGKAWAMANIRKLRINKGVYGLREVTVGGKTYVLPNYYPALITEGQFLRLQQIRTTTKYIGKVGDGRVVTNADGSTKIIAEKNNINLLAGMKLFRCGHCGGTMMAMRHRNTIRYLCEKGRGNNHDCKTWSMPGMLVEHTLMLVTTIAYMDLQKKGQGDKADYTQQITAMESTISGYSVQINKATKLAIALDDVDVDELADTIRELKRKRDNAIIELEVLQRKQLLANDSTFESIMMDFFTYVQYGVLQDPLHEYRSKLRDVVYSAIGDVRAWKHDRRLFISFQIKGNEGYYNFSAGNTPYDWGCYVGALPFSQHELEVANEEVPEHALDRVRERYAELHAVNMMMLRHAKELLSHVGYPELDSKMFWPRK

SEQ ID NO: 40902 - DNA, 50 bp, Pantoea agglomerans
  source 1..50: mol_type = genomic DNA
tcctgtgtagaaaattattttggcaacccgaaaggtggttctacacatta

SEQ ID NO: 40903 - DNA, 40 bp, Pantoea agglomerans
  source 1..40: mol_type = genomic DNA
tatcatcagtcatccaggcaacccgaaattcccggtcgat

SEQ ID NO: 40904 - DNA, 50 bp, Pantoea agglomerans
  source 1..50: mol_type = genomic DNA
tcctgtgtagaaaattattttggcttcccgaaaggtggttctacacatta

SEQ ID NO: 40905 - DNA, 40 bp, Pantoea agglomerans
  source 1..40: mol_type = genomic DNA
tatcatcagtcatacagggttccccagctgcccagtctca

SEQ ID NO: 40906 - protein, 595 aa, Saccharomonospora cyanea
MRDEVRVAVLGRTSTEDQQDPRQSILRQVGNCKTAIPESWVIVAYFYDVESGRMELDQRGRGENYERFDIPIARDGGIADLLAEATHPNRRFDVVIAESISRVARRAYEGLSVERELERADVPLFASNEPITLSGSRAQRVLQRRINQSIAEYEVLNTLEQSWGGLCTHVREGYNLGKPPYGYKAKVIPHPNPAKADKGHTKTLLIADSVRAETVTQIAHWRYYEGLGYDTIADRLNADLVRYPLPEPPGGKRARKAWGKTSVYEILRNPKYTGYQVFNRRASRSRKGKVNDPIKWVWSLKPTHEPLIPKWMYDELNARRQARKGSRADNDLNQHPQTRRTYVLRGMVFCGCGRRMYGNHRHNRAYYMCWPKNNNRGRPDTYAGHAKAIYLREEALLDAVAVFLAERVFGPERRGILAADLDGLDHHAARQRQAERERLQRILTDLARRQATILQQAQDGDLDDPFTQGLRSSYNDLETQKKTALAAIAELDADDEADLGAPHADDIALLDALPYLALNLADAPEEHLRRLFELLDLTVQLIDNTDHIILGITLPADDLPQITRQASAVGTPKLATHKTPGQAAGAIRADAVRAP

SEQ ID NO: 40907 - DNA, 50 bp, Saccharomonospora cyanea
  source 1..50: mol_type = genomic DNA
cgtgcggatgctgtacgtgcccccggtgcggttcgtacagcatccgcacg

SEQ ID NO: 40908 - DNA, 40 bp, Saccharomonospora cyanea
  source 1..40: mol_type = genomic DNA
cgtgcaggtttgtgcccccggcaggactcgaacctgcgac

SEQ ID NO: 40909 - DNA, 50 bp, Saccharomonospora cyanea
  source 1..50: mol_type = genomic DNA
cgtgcggatgctgtacgtgcccccactgcggttcgtacagcatccgcacg

SEQ ID NO: 40910 - DNA, 40 bp, Saccharomonospora cyanea
  source 1..40: mol_type = genomic DNA
ggtgcaggttggagcccccacccagacccgcaccagctgc

SEQ ID NO: 40911 - protein, 569 aa, Anaerotruncus colihominis
MRQSNYKKSRDTTAFLYERLSRDDNLEGESYSIGNQKKLLTKVAKEKGYTNLVHFLDDGISGVTMDRPGFVEMIRQLEQGRAAAVFVKDLSRLGRNYIEVGRLTEEFFPEHDIRLVAVSDNIDTAEGENELAPIRNLFNEWYARDISKKRRISNKIKGNAGEPMGQPPYGYIKDPGNPKRWIVDNEAAQVVRRIYSMTLEGYGTEQIATQLERDEILTPRAYWLKKGIKRPGKGKQNPATKWNSSTVTKILSLQEYCGDILNFKTYSKSYKNKKRLENDRENWVIFKDVHEPIIERSVFEQVQQKRGKIRKRRTNEGEHNMFSGLLVCADCGCNLHFHFNQGNPEIKYFNCSNYKGNRGSCASTHYVRVDFLEQVVLGEIRRLTKFASLYEDEFLKAVIGHSQQAAETDRKLKEKELKALLARDEELDGLFERIYEDNVSGKLSDDRFAKMSRRYEDEQKKLAEKIKKLRSKIEKQSSQAMTTDMFISLVRKYTRARKLTPRMLNELVEKIEVYHAEKIDEVWEQRLRIHYNCVGEITIPKMLPLPIPDVTVNTRKGVFVNYAPAEIAG

SEQ ID NO: 40912 - DNA, 50 bp, Anaerotruncus colihominis
  source 1..50: mol_type = genomic DNA
caaaagctataagaacactcgccatggtatgagtggtgatacagaacttt

SEQ ID NO: 40913 - DNA, 40 bp, Anaerotruncus colihominis
  source 1..40: mol_type = genomic DNA
ccaaagtgggcattctttttggtccgaatagcgggacttg

SEQ ID NO: 40914 - DNA, 50 bp, Anaerotruncus colihominis
  source 1..50: mol_type = genomic DNA
caaaagctataagaacactcgccacagtatgagtggtgatacagaacttt

SEQ ID NO: 40915 - DNA, 40 bp, Anaerotruncus colihominis
  source 1..40: mol_type = genomic DNA
caaaaataggcattcttttcagtatgaaatcctgcacttg

SEQ ID NO: 40916 - protein, 439 aa, Corynebacterium sanguinis
MHGIMSSIAEFYSKNLANEVTKGMSQKVRSGGTTGKAPLGYLNTRIYETGVETRTVEVDPERSPLVQWAFERYAEGNISVADLTDELAARGLTTVPTRLYPSKAVSKRYIHAVLSNKYYLGILTYCGVEYPGNHEPLISQGLFDRVQQTLNSRRQGERRRKHDHFLKSTAWCGDRGSRMILQKPTNHQGLQYEYFVCNGRLSKRTNCQMSAVPVEWLKGQMEELYRRIQVPPEILDLMRPRLKEQLQLHNASRDEEREQLKTQAQAIRRKQEKLLEAFYDQALPMELMAREQKQLEQSLAQVERRLKSFEGDDVEQDALLDTALRLASNCYSAYTKASPAQKCLLNQVFFEKVLVCSLEDKDHHVHAHLTPWTLVFRTTNIAENQAIGLEHQLEPVPELEPDENLVQGVDLTQETEKARSEDLAFSNKFRTRMCKHTMV

SEQ ID NO: 40917 - DNA, 50 bp, Corynebacterium sanguinis
  source 1..50: mol_type = genomic DNA
tactcgtatgtgtaagcacacgatggtacgccaagcatcacgcaacatat

SEQ ID NO: 40918 - DNA, 40 bp, Corynebacterium sanguinis
  source 1..40: mol_type = genomic DNA
taccgactgcctttttctgtgtaccccgtacgggatttga

SEQ ID NO: 40919 - DNA, 50 bp, Corynebacterium sanguinis
  source 1..50: mol_type = genomic DNA
tactcgtatgtgtaagcacacgattttacgccaagcatcacgcaacatat

SEQ ID NO: 40920 - DNA, 40 bp, Corynebacterium sanguinis
  source 1..40: mol_type = genomic DNA
atcccactgcctttttctttttactccctaagggatggaa

SEQ ID NO: 40921 - protein, 485 aa, Priestia megaterium
MINNVAIYLRLSRDEENKGIEAILSNHRKTLVNLCKQNKWKFDTYEEIASSYDMLREQLNIMLDKVKNNEYDAVVVMDVDRLSRNEFEAPIIHKVLLDSDTNIVTPSKTYDLHKDEDTLLLGVQSLVAAQEYKQIRKRMQRGKTFAMEKGYWVHGTPPLGYDKDSETRKLIPNDEAKHVQFIFNSIVDGKTVSDVYHDLNAMGVKTKNNSKFAFNSIMRIVTNEAYKGTIVSNRYIAKDKQKPKSEWIYTHNAHEPIVTKETWDKANKIVNTYSFSAPRSKNKIYPTSKLIVCGNCGKFQGAQLAHTSKLYLKICSNCKNRSFLYEPILKQIKEEIQNYVSTVVNEIKHVEQSNNISEVQYKKQQIEERIQKAQKALDKLLPLYEEDIIDLKQFKDRKALREQEIKDLRQELQQVIQEDPKDKIADLKEMKARIEYLLNNWQCLDGEGLTDEEINRSLHFIIDRIEWTYPKGKDAQPDLKIIYKL

SEQ ID NO: 40922 - DNA, 50 bp, Priestia megaterium
  source 1..50: mol_type = genomic DNA
aaataatcccgaaatttcgagcaaacgtgttgcgaactttgggataacac

SEQ ID NO: 40923 - DNA, 40 bp, Priestia megaterium
  source 1..40: mol_type = genomic DNA
aattatttttaccggtcctacaggatcaggtaaaaccact

SEQ ID NO: 40924 - DNA, 50 bp, Priestia megaterium
  source 1..50: mol_type = genomic DNA
aaataatcccgaaatttcgagcaaccgtgttgcgaactttgggataacac

SEQ ID NO: 40925 - DNA, 40 bp, Priestia megaterium
  source 1..40: mol_type = genomic DNA
atgtattttaaccagccctccagggttacttaaaactact

SEQ ID NO: 40926 - protein, 535 aa, Hungateiclostridium thermocellum
MNAVIYARYSSDNQREESIDAQVRAIKDFAAREGINIIRIYADEAKSATTDQRPQFLDMMKDAETGMFQAVIVHKLDRFSRDRFDSAYYKRHLKKCGVRLISVLENLDDSPESIILESVLEGMAEYYSKNLSREVMKGMKETAYQCKHTGGIPPLGFDVGPDKSYVINEWEAEAVRMIFEMFADGKGYSAIIDALNAKGYKTKAGKPFGKNSIHDLLLNEKYIGVFVFNKVYNKINGKRNGHKMKPDDEIIRIPGGCPAIVSQDLWERVKKRLEANKRASGAYSAKAVYILSGRIFCGKCGAAMTGKRARMGRNKTVYSYYECSARKSKRTCDMKPINKDFVEQKVIDALYDNLFCDEVIEAATDMIYNHAASRNTEIPEMIKKYEKQLQTVEFEISNIVNAIAKGMFHESMKAKMDELEASKAQLMIRIEEAKLQQQSHSLTREQIYAFLARYRNIKEMTPEQQKTAIQVFVERVTVYEDKIDMDILTIPGKGPGPDKNKKATSGNTDSSIDSKTPENGHSGLSGDSCTLMVEA

SEQ ID NO: 40927 - DNA, 50 bp, Hungateiclostridium thermocellum
  source 1..50: mol_type = genomic DNA
ggtgacagttgcaccttgatggtggaggcgagccagattaaactcaggat

SEQ ID NO: 40928 - DNA, 40 bp, Hungateiclostridium thermocellum
  source 1..40: mol_type = genomic DNA
cttgctcatttgaatggtggaggcgaggggagtcgaaccc

SEQ ID NO: 40929 - DNA, 50 bp, Hungateiclostridium thermocellum
  source 1..50: mol_type = genomic DNA
ggtgacagttgcaccttgatggtgggggcgagccagattaaactcaggat

SEQ ID NO: 40930 - DNA, 40 bp, Hungateiclostridium thermocellum
  source 1..40: mol_type = genomic DNA
gttgctcatctgaaaggtgggggtgggggtggtagcagcc

SEQ ID NO: 40931 - protein, 519 aa, Vibrio parahaemolyticus
MIAYPYKRFSFNQQEKGDSIRRQSKLIDSYCLEHSLTLSDKTFEDLGVSAFRSSNSKEDAGLGQFLQALQEGKLETPCYLLVESLDRLSRDNIDSALTQFMNIIQADVTIVTLFDNKTYKKGMDVVDYLTALISMQRANEESRIKSQRISASWKNRQSGIPAKKSKGCPFWLSVSDCKTFYEVNHRVDVVHKIFALANDGLGSRLIAKALNAEEVPSPKGKNWSDATVNGLLNSRAVIGEYQPKQRYNSEGVRVDMAVGSPIKDYYPAIMTEDEFLITQDGIKSRQKTSKRGASKTFLNVVKGVATCGCCGSPMRLRKQLEYYYLECNKRSVGICSDSNRINLRFIIDWLREVWLTPEYAPIIASDAPESKELRVLESDLDKLNNTLKKLLGLLDDDADDVIFDRIKAKKAEKKALLQKIDECKESLAPFNVTKKALWKRFTLVKIAFMDENTEETIKARCQLAQLINQLKGFKVTMSEDKIATLEVTDSKGNVALYKSRQNPYYVHCKESGSIWKKEP

SEQ ID NO: 40932 - DNA, 50 bp, Vibrio parahaemolyticus
  source 1..50: mol_type = genomic DNA
gcttatacatagaaaaacgcttgcttccaagttcttgcttatgtattatc

SEQ ID NO: 40933 - DNA, 40 bp, Vibrio parahaemolyticus
  source 1..40: mol_type = genomic DNA
gctgataccagctgcatgcttaaatgctccatcacaaagg

SEQ ID NO: 40934 - DNA, 50 bp, Vibrio parahaemolyticus
  source 1..50: mol_type = genomic DNA
gcttatacatagaaaaacgcttgctaccaagttcttgcttatgtattatc

SEQ ID NO: 40935 - DNA, 40 bp, Vibrio parahaemolyticus
  source 1..40: mol_type = genomic DNA
gcctagtcaagctgactgctaaaatgagccatcacaaggg

SEQ ID NO: 40936 - protein, 547 aa, Enterocloster bolteae
MKKRTKCYIYTRVSTSMQVDGYSLDAQRDKLRKYAEYEDMTIVGEYSDEGFSGKNIQGRLEFQRMLNDIQEGKDDVSFVLVFKLSRFGRNAADVLNSLQLMQDFGVNLICVEDGIDSSKDSGKLMISVLSAVAEIERENIRTQTMAGREQKAREGKWNGGFAPYGYRLENGNLMIAEDEAEVIRIIYDRYIHTNEGLSAVANYLNNHGYTKKLRQNGTIPGFSSNFVKDVLDNPVYMGKIAYGRRRTEKKLGTRNEFHVVEQDEFPVYEGQHEAIVSEEDWNLAQEKRKINAFKREKVHDPEHAHILSGILKCPCCGKSLYGNIAKAHSKDKKTRYYYYCKNTVGATGHKCTFRVNIEQTEMNRMVAAIISAMVNDPQFSKAIKEKIGTSVDTEDLEKQLAALQAQLRQTLGIKTRLERQMDTLDIDDPHFDRKILDLQRRYDEQYGRIEEIERQINDMKGQILNIRQEKISGDNIYQLLLAFDEVYGAATEFEQKEFMRAFIERIDLYPEKQKDGNWIRNMVFNFPVPVNGQEVKELPLESRTTLE

SEQ ID NO: 40937 - DNA, 50 bp, Enterocloster bolteae
  source 1..50: mol_type = genomic DNA
cccttggaatccagaacaacgctcgagacggttgtcttgctttccaaggg

SEQ ID NO: 40938 - DNA, 40 bp, Enterocloster bolteae
  source 1..40: mol_type = genomic DNA
tccggggacggggaatgtcgaggtggtaataatgatgcgg

SEQ ID NO: 40939 - DNA, 50 bp, Enterocloster bolteae
  source 1..50: mol_type = genomic DNA
cccttggaatccagaacaacgctcctgacggttgtcttgctttccaaggg

SEQ ID NO: 40940 - DNA, 40 bp, Enterocloster bolteae
  source 1..40: mol_type = genomic DNA
tccggggtccgggaaagccctggtgggaactgtgatgttg

SEQ ID NO: 40941 - protein, 676 aa, Bacteroides fragilis
MDKKILIYCRVSTQQQTTDRQKEELLKFAEDNHWNVAEEDIFIDVISGFKKGEFRPEYAKMLERVEYGDIDIILFSEFSRLARNATELLEQIKLFIDKGINLYFDKQKLWVKDTNKDVGSLILLHVLAVMSSYEIELFVERSLSGKITKVQAGHGGGDERAYGYMHNENKQIVINPIESKIVARIFEMYVGGYSSIQISEILNAEKVPAPYVRKLNEYKKNREAKGLEVKEYKFDTDNLKWRISTINRLMHNELYKGNRRITFYKPDPTNPLPLSERQDREIVYEYSEHVESLRIVSDELFQQAQDKLSKAHYNKNNAVRHENLLKHLMVCGECGANFSVGKSNETSKNYISGGRTYKCYGRVNRKDKPRTCTNGAELRQWKLDGLVLQLSIQMFAEINIQQTNILKIENLGKEIEELVQIKSSKNTELVEAENLYKKTLKRLIAIEDDEVAKNLISDAKHKYDETKNMLNKTIDKLSREITTKRITIDNLKRLNANPLLINKMDEIRKDRNLVKTMVDEYIDKITIFRLHELWLLVVVSYKGGEEMWGTIKCARYKKEEMFYDELHCHYGVEFQGWLLNNTERCFSYDKNTHIITYNGESKIYVEFKSGEYNYDTFNQMIQETGWMGCFPFYAYEDSGKDLSVPSNEDFGKSLQENRIDWKAHNEKVLERLLSKS

SEQ ID NO: 40942 - DNA, 50 bp, Bacteroides fragilis
  source 1..50: mol_type = genomic DNA
aagggtgtgtttatctctgccgtgtgcataggtgcaattgacacatcctg

SEQ ID NO: 40943 - DNA, 40 bp, Bacteroides fragilis
  source 1..40: mol_type = genomic DNA
gagcaaatgctctgctgtatgcatcgggggatattcttgt

SEQ ID NO: 40944 - DNA, 50 bp, Bacteroides fragilis
  source 1..50: mol_type = genomic DNA
aagggtgtgtttatctctgccgtgttcataggtgcaattgacacatcctg

SEQ ID NO: 40945 - DNA, 40 bp, Bacteroides fragilis
  source 1..40: mol_type = genomic DNA
gagcaaaagcgaggctttattcatggaggtatactgttgt

SEQ ID NO: 40946 - protein, 501 aa, Bacillus glycinifermentans
MDLKERIKRVAIYLRKSRNNEGEESEETLAKHRKRLLDIAKKNNWAYEIFQEVGSSMDNNRDEYQRMIHKLNDGIFDAVLSVNLARVTRDDSETPKFMSLLRQEDILFVTDSERIYDLEIQEDWQALKFTGFVNNWEYENIKAQLRKGKKDSARMGRWANGTPNYGYIYNRLEKKLEIDEEKAEAVKLAFQMCINGIGVDNIAIALNQLGYRTNKGNLFWGNSVKRMIRSPIYKGWIVSNRIKGRNKYQGKLRPKEQWIISKKAAPIIIDKETWEKANNALDKRKALSPRSRAQKHGLSTLIRCGICGRVHAISRRSDRGGARVFQSCSKVNLLGEKCYNSGIMYDVMMELIIDNIKEKREQIAMEITTLPNDKQTIDLKQIKIKRIKEQIKKIEKALHMLQLQLEEDLIDLNYFKERKSKRTIELDNLKTELKNLMDTTQEDEVKSKESFLNKMDSFLSNWKQLDESELNKELMSFIDKVTWYSPRGSKEPPQLKIYWSE

SEQ ID NO: 40947 - DNA, 50 bp, Bacillus glycinifermentans
  source 1..50: mol_type = genomic DNA
tgggtagttaagcgaacatgtcattgatggcacgttcgcttaactacaca

SEQ ID NO: 40948 - DNA, 40 bp, Bacillus glycinifermentans
  source 1..40: mol_type = genomic DNA
agctacacgcacatgtcattggtgccacgtcatggcccac

SEQ ID NO: 40949 - DNA, 50 bp, Bacillus glycinifermentans
  source 1..50: mol_type = genomic DNA
tgggtagttaagcgaacatgtcatgtatggcacgttcgcttaactacaca

SEQ ID NO: 40950 - DNA, 40 bp, Bacillus glycinifermentans
  source 1..40: mol_type = genomic DNA
ggctacactgacagcttatgtgtgccaagtcctggccaag

SEQ ID NO: 40951 - protein, 575 aa, Lactonifactor longoviformis
MANQEKYTILYGRLSQEDEREGESNSIQNQRMMLEKYAEDNGFTNTKFLYDDGYSGTNFNRPAWKEVMELVESDQVSTLIVKDMSRLGRDYLLVGQYTEMIFPSYGVRFIAVNNNVDSLYGDNDFTPFVNLFNDFYAKDTSRKIRAVKKAQAERGERIGTRPPYGYSKSENNPKQIVPDEQTADVVRHIFRLCAEGRGPSQIAKQLKAEQVLTPTNYYYRQTGVALVNLDTERPYNWSDTTIASILGDISYLGHTVNMRYTTVSYKNKKQIERPESEWLKFENTHEPLISQELWDIVQDIRKHKKRPPKQMDMPNLFSGMVFCADCGGTLVLHRAHTMKETQNNFMCSTYKKRGKEECSAHYIRETQLKTIVLDDLKRVTHYARQKEKLFVEHITRKNTAETRQEITRIQREIDAAKRRDGELTALFKRLYEDNVLGRIPNEHFRLLSSEYTTEQAELRNRLPKLEQRLEHLRNSLTNVAQFIDKAKRYSDITELTPEILRLFIEKIVVGEKSQKYSRTAEQDIWIYYRDIGLMDTPVEPEEAQEDGLDEGEAILTDDTPAATSDAPAASTGPAA

SEQ ID NO: 40952 - DNA, 50 bp, Lactonifactor longoviformis
  source 1..50: mol_type = genomic DNA
ttttgtccctatgataccccgcctaatggcgggaagccacaaggataaat

SEQ ID NO: 40953 - DNA, 40 bp, Lactonifactor longoviformis
  source 1..40: mol_type = genomic DNA
aaaaaaatagccccgcagcaaaactgctgcggggttacta

SEQ ID NO: 40954 - DNA, 50 bp, Lactonifactor longoviformis
  source 1..50: mol_type = genomic DNA
ttttgtccctatgataccccgcctactggcgggaagccacaaggataaat

SEQ ID NO: 40955 - DNA, 40 bp, Lactonifactor longoviformis
  source 1..40: mol_type = genomic DNA
aaaaacacagccccgcaacacaacagtggtgtggtaactc

SEQ ID NO: 40956 - protein, 501 aa, Paenibacillus odorifer
MIAVYARVSTEEQAKHGFSLNDQIRQCRQKAGTNKVKEYVDDGVSGEFLDRPALTKLRDDIREGIINKIICLDPDRLSRKLMNQLIITDEFDRRGIELVFVNGEYAKTPEGNLFYSMRGAIAEFEKSKITERMSRGRKEKARQGRVLRDFQVYGYSYDKESEQFLVDEDEAAIVRLIFDLFTQPNTIVQGLNGIALYLTSKGVPTKRGASMWHRQVVRQIIMNRAYIGEFYQNRWNTEGMLGNKHRNDEEKIPMKERPKDEWILLPCPPLIDEAQFEHAQILLSESRRRWAQKSKHPYLLSGLLRCGDCGNTMTGRLSNNWGKKVPEYTDIKNTAGAKSKGCGRRIKAHLIEEQVWDQVTTWLNNPDEIAAALQEEKTKEPFETAEIMRIEKEIGKTKNARKKLIKLFAVSEDGIAEEDIRQELKELTQKEEGLNAQLIELSHMLNSAQNTEYNIHVLMEAVQHYLSKGQAELTFEEKRDLIRQVVREIRVYEDSVEIFTF

SEQ ID NO: 40957 - DNA, 50 bp, Paenibacillus odorifer
  source 1..50: mol_type = genomic DNA
atgcgcactaatgacatttagatggagatcctaatgtcattagtgttaca

SEQ ID NO: 40958 - DNA, 40 bp, Paenibacillus odorifer
  source 1..40: mol_type = genomic DNA
agcacgttgtattgaaaacgaaattctgatgcacctgcgt

SEQ ID NO: 40959 - DNA, 50 bp, Paenibacillus odorifer
  source 1..50: mol_type = genomic DNA
atgcgcactaatgacatttagatgacgatcctaatgtcattagtgttaca

SEQ ID NO: 40960 - DNA, 40 bp, Paenibacillus odorifer
  source 1..40: mol_type = genomic DNA
agcacatgctattgaaaaaacagtgctgatggacttgctc

SEQ ID NO: 40961 - protein, 515 aa, Bacillus cereus
MNKKIKAGIYIRVSTEEQKQGHSLEAQESMLKEFADRKGYEIYDVYNDGGYSGKNFNRPEIQRLLRDLKDDKIDVILVWKVDRLSRNNTDVMSLIDTELTPRKKNLIITSIDMDSSSPTGHMFISLLSTFARYERATIIDRVKAGMQKRAEKGYWNGGSILGYDSVDKKLIINENESEIVREIFQLRAEGKGYKFIVNILNEKGIKTKTGKNFSIPAIKVIVNNHIYNGKMVWKKHQDWNTRRRTGKSEPIIVEGIHDAIIDEGLWTRVQKVNELQKNSFSSNRNFNGNFLLTGILKCPKCGAGTVMSKTKKRNSDDYHLYYMCQAYHNKGSSVCSANLIRKDQVEQQVLNIISLLVNENDIINALIDELNSDNNKTNESHIAHIKMLKKQLGKAYDKRKKLDNDYFEGNIEGSTYNRLMNELQLDINKLKRNVRESESEIIKNDSTINKEEVIYALENFNKLFKIVNDEEKKLLIRSLIREVQMEANRKDVKEITFWFLPSSVLPSNKVRRTVS

SEQ ID NO: 40962 - DNA, 50 bp, Bacillus cereus
  source 1..50: mol_type = genomic DNA
ttttaccatctaataaagtgcgcagaaccgtatcacaaatgatggtaaac

SEQ ID NO: 40963 - DNA, 40 bp, Bacillus cereus
  source 1..40: mol_type = genomic DNA
atttcgaattaatcgtggggaaccgtatcataagtaatgt

SEQ ID NO: 40964 - DNA, 50 bp, Bacillus cereus
  source 1..50: mol_type = genomic DNA
ttttaccatctaataaagtgcgcataaccgtatcacaaatgatggtaaac

SEQ ID NO: 40965 - DNA, 40 bp, Bacillus cereus
  source 1..40: mol_type = genomic DNA
atttggttttattgggatgtaaccgtatcataagtaaaga

SEQ ID NO: 40966 - protein, 557 aa, Alkalihalobacillus halodurans
MKEVLRVAIYVRVSTEEQATEGYSITAQLRTLRQYASLYEYEIVNEYVDEGLSGKNIQGRPALQRLIADAEKELFDIVLVWKISRLSRNMLDTLVLLDKFENHNIKFVSYSENFDTSTPIGRLVVQLMASIAEMERNTLSENVKLGMKQRALEGSWNGGIVYGYDSNDKELIVNEDEANVVQLIFKLYAEGKGLKAVTNYLNKAGYRTKRGKHFSINGIATILDNPLYRGKIRWLQVENWDKKRRKGKNPNYILTDGNHEAIISEELWNIVQNRRKSRSFKQRQSHEPFLLSSILRCPSCGQGMVPSITTSTRKNGTKVKHRYYVCSNFHNKGSSACKANSIKAFDAEDTVIKRIEGFINNHDGFIQAIQKINSYSIESLNNLRTELDKVEYELNETNKLQEKYLEAFEQNLFPATILQERLQKVANDKAKLEQKKNELSTKLNSSDSKVIQPELVRILLEQFLDCYKSSTREKKKQLLQLLLAEIQIKQRTDSRSRTIDTIKIEFDFSVYNQTKTFTLIHMLNYKTNNDYSQTLPASDNKVPPYLQLFLPLFVVRF

SEQ ID NO: 40967 - DNA, 50 bp, Alkalihalobacillus halodurans
  source 1..50: mol_type = genomic DNA
ttttgcctctatttgtggtacggttcagcgtgtttgtttaagaggcaaaa

SEQ ID NO: 40968 - DNA, 40 bp, Alkalihalobacillus halodurans
  source 1..40: mol_type = genomic DNA
cctttatttatgatacggttcccccctattaatccgaaac

SEQ ID NO: 40969 - DNA, 50 bp, Alkalihalobacillus halodurans
  source 1..50: mol_type = genomic DNA
ttttgcctctatttgtggtacggttaagcgtgtttgtttaagaggcaaaa

SEQ ID NO: 40970 - DNA, 40 bp, Alkalihalobacillus halodurans
  source 1..40: mol_type = genomic DNA
tctttacttatgatacggttacatcccaataaaaccaaat

SEQ ID NO: 40971 - protein, 515 aa, Bacillus cereus; identical to SEQ ID NO: 26551

SEQ ID NO: 40972 - DNA, 50 bp, Bacillus cereus
  source 1..50: mol_type = genomic DNA
tgtcgtcaccttgttggtgtaattaggttgacgccaacatggtagcaaca

SEQ ID NO: 40973 - DNA, 40 bp, Bacillus cereus
  source 1..40: mol_type = genomic DNA
tgttgccattaggcgcatgagatttaccccattaagccct

SEQ ID NO: 40974 - DNA, 50 bp, Bacillus cereus
  source 1..50: mol_type = genomic DNA
tgtcgtcaccttgttggtgtaattatgttgacgccaacatggtagcaaca

SEQ ID NO: 40975 - DNA, 40 bp, Bacillus cereus; identical to SEQ ID NO: 11750
  source 1..40: mol_type = genomic DNA

SEQ ID NO: 40976 - protein, 515 aa, Bacillus thuringiensis
MKTAIYLRKSRADLEAEARGEGETLAKHRSTLLKIAKEMNLNVLAVREEIVSGESLVKRPEMLALLEEIEDNKYDVVLCMDMDRLGRGGMKEQGIILETFKRSNTKIMTPRKTYDLNDEWDEEYSEFEAFMARKELKIITRRMQRGRVASVEVGNYLGTHAPFGYDIHRLNKRERTLTINSEEASVVRMIFDWYANEDMGANAIRSKLNDLGYKSKLGNEWNPYSILDILKNNVYIGKVTWQKRKEVKRPDAVKRSCARQDKSDWIIADGKHEPIIPESLFEQVQEKLNSRYHVPYNTNGIKNPLAGIIKCSKCGYSMVQRYPKNRKETMDCKHRGCENKSSYTELIEKRLLEALKEWYINYKADFEKHKQDDKLKETQVIQMNEAALRKLEKELVDVQKQKNNLHDLLERGVYTVDMFLERSNVVSDRITEITSMMENLKKEIKIEIKKEKVKKDTIPQVEHVLDLYFKTDDPKKKNSLLKSVLEKAVYKKEKWQRLDDFELVLYPKLPQDGDI

SEQ ID NO: 40977 - DNA, 50 bp, Bacillus thuringiensis; identical to SEQ ID NO: 17337
  source 1..50: mol_type = genomic DNA

SEQ ID NO: 40978 - DNA, 40 bp, Bacillus thuringiensis
  source 1..40: mol_type = genomic DNA
tgtggccattaggcgcatgagatttactccattaagccct

SEQ ID NO: 40979 - DNA, 50 bp, Bacillus thuringiensis
  source 1..50: mol_type = genomic DNA
tgtcgtcaccttgttggtgtaattatgttgttaccaacagggtgataaca

SEQ ID NO: 40980 - DNA, 40 bp, Bacillus thuringiensis; identical to SEQ ID NO: 11750
  source 1..40: mol_type = genomic DNA

SEQ ID NO: 40981 - protein, 515 aa, Bacillus cereus
MKTAIYLRKSRADLEAEARGEGETLAKHRTTLLKIAKEMNLNVLSVREEIVSGESLVKRPEMLALLEEIEDNKYDAVLCMDMDRLGRGGMKEQGIILETFKRSNTKIMTPRKTYDLNDEWDEEYSEFEAFMARKELKIITRRMQRGRVASVEAGNYLGTHAPFGYDIHRLNKRERTLTINSEEASVVRMIFDWYANEDMGANAIRSKLNDLGYKSKLGNEWNPYSILDILKNNVYIGKVTWQKRKEVKRPDAVKRSCARQDKSDWIIADGKHEPIIPESLFEQVQDKLNSRYHVPYNTNGIKNPLAGIIKCSKCGYSMVQRYPKNRKETMDCKHRGCENKSSYTELIEKRLLEALKEWYINYKADFEKHKQDDKLKETQVIQMNVAALRKLDKELVDVQKQKNNLHDLLERGVYTVDMFLERSNVISDRITEITSTVENLKKEIKTEIKKEKVKKDTIPQVEHVLDLYFKTDDPKKKNSLLKSVLEKAVYKKEKWQRLDDFELVLYPKLPQDGDI

SEQ ID NO: 40982 - DNA, 50 bp, Bacillus cereus; identical to SEQ ID NO: 40972
  source 1..50: mol_type = genomic DNA

SEQ ID NO: 40983 - DNA, 40 bp, Bacillus cereus; identical to SEQ ID NO: 40973
  source 1..40: mol_type = genomic DNA

SEQ ID NO: 40984 - DNA, 50 bp, Bacillus cereus; identical to SEQ ID NO: 40974
  source 1..50: mol_type = genomic DNA

SEQ ID NO: 40985 - DNA, 40 bp, Bacillus cereus; identical to SEQ ID NO: 11750
  source 1..40: mol_type = genomic DNA

SEQ ID NO: 40986 - protein, 515 aa, Bacillus cereus
MKTAIYLRKSRADLEAEARGEGETLAKHRTTLLKIAKEMNLNVLSVREEIVSGESLVKRPEMLALLEEIEDNKYDAVLCMDMDRLGRGGMKEQGIILETFKRSNTKIMTPRKTYDLNDEWDEEYSEFEAFMARKELKIITRRMQRGRVASVEAGNYLGTHAPFGYDIHRLNKRERTLTINSEEASVVRMIFDWYANEDMGANAIRSKLNDLGYKSKLGNEWNPYSILDILKNNVYIGKVTWQKRKEVKRPDAVKRSCARQDKSDWIIADGKHEPIIPESLFEQVQDKLNSRYHVPYNTNGIKNPLAGIIKCGKCGYSMVQRYPKNRKEAMDCKHRGCENKSSYTELIEKRLLEALKEWYIDYKADFEKHKQDDKLKETQVIQMNEVALRKLEKELVDVQKQKNNLHDLLERGVYTIDMFLERSNVISDRINEITSTMENLKKEIKTEIKKEKVKKDTIPQVEHVLDLYFKTDDPKKKNSLLKSVLEKAVYKKEKWQRLDDFELVLYPKLPQDGDI

SEQ ID NO: 40987 - DNA, 50 bp, Bacillus cereus
  source 1..50: mol_type = genomic DNA
tgttgtcaccttgttggtgtaattaggttgacgccaacatggtagcaaca

SEQ ID NO: 40988 - DNA, 40 bp, Bacillus cereus; identical to SEQ ID NO: 40973
  source 1..40: mol_type = genomic DNA

SEQ ID NO: 40989 - DNA, 50 bp, Bacillus cereus
  source 1..50: mol_type = genomic DNA
tgttgtcaccttgttggtgtaattatgttgacgccaacatggtagcaaca

SEQ ID NO: 40990 - DNA, 40 bp, Bacillus cereus; identical to SEQ ID NO: 11750
  source 1..40: mol_type = genomic DNA

SEQ ID NO: 40991 - protein, 515 aa, Bacillus cereus
MKTAIYLRKSRADLEAEARGEGETLAKHRTTLLKIAKEMNLNVLSVREEIVSGESLVKRPEMLALLEEIEDNKYDVVLCMDMDRLGRGGMKEQGIILETFKRSNTKIMTPRKTYDLNDEWDEEYSEFEAFMARKELKIITRRMQRGRIASVEAGNYLGTHAPFGYDIHRLNKRERTLTINSEEASVVRMIFDWYANEDMGASAIRSKLNDLGYKSKLGNEWNPYSILDILKNNVYIGKVTWQKRKEVKQPDAVKRSCARQDKSDWIIADGKHEPIIPESLFEQVQEKLNSRYHVPYNTNGIKNPLAGIIKCSKCGYSMVQRYPKNRKETMDCKHRGCENKSSYTELIEKRLLEALKEWYINYKADFEKHKQDDKLKETQVIQMNEAALRKLEKELVDVQKQKSNLHDLLERGVYTVDMFLERSNVVSDRITEITSTMENLKKEIKTEIKKEKVKKDTIPQVEHVLDLYFKTDDPKKKNSLLKSVLEKAVYKKEKWQRLDDFELVLYPKLPQDGDI

SEQ ID NO: 40992 - DNA, 50 bp, Bacillus cereus
  source 1..50: mol_type = genomic DNA
tgtcgtcaccttgttggtgtaattaggttgactccaacatggtgacaaca

SEQ ID NO: 40993 - DNA, 40 bp, Bacillus cereus; identical to SEQ ID NO: 40973
  source 1..40: mol_type = genomic DNA

SEQ ID NO: 40994 - DNA, 50 bp, Bacillus cereus
  source 1..50: mol_type = genomic DNA
tgtcgtcaccttgttggtgtaattatgttgactccaacatggtgacaaca

SEQ ID NO: 40995 - DNA, 40 bp, Bacillus cereus; identical to SEQ ID NO: 11750
  source 1..40: mol_type = genomic DNA

SEQ ID NO: 40996 - protein, 515 aa, Bacillus cereus
MKTAIYLRKSRADLEAEARGEGETLAKHRSTLLKIAKEMNLNVLAVREEIVSGESLVKRPEMLALLEEIEDNKYDVVLCMDMDRLGRGGMKEQGIILETFKRSNTKIMTPRKTYDLNDEWDEEYSEFEAFMARKELKIITRRMQRGRIASVEAGNYLGTHAPYGYDIHRLNKRERTLTINSEEASVVRMIFDWYANEDMGANAIRSKLNDLGYKSKLGNEWNPYSILDILKNNVYIGKVTWQKRKEVKRPDAVKRSCARQDKSDWIIADGKHEPIIPESLFEQVQEKLNSRYHIPYNTNGIKNPLAGIIKCSKCGYSMVQRYPKNRKETMDCKHRGCENKSSYTELIEKRLLEALKEWYINYKADFEKHKQDDKLKETQVIQMNEAALRKLEKELVDVQKQKNNLHDLLERGVYTVDMFLERSNVVSDRITEITSTMENLKKEIKTEIKKEKVKKDTIPQVEHVLDLYFKTDDPKKKNSLLKSVLEKAVYKKEKWQRLDDFELVLYPKLPQDGDI

SEQ ID NO: 40997 - DNA, 50 bp, Bacillus cereus; identical to SEQ ID NO: 40972
  source 1..50: mol_type = genomic DNA

SEQ ID NO: 40998 - DNA, 40 bp, Bacillus cereus; identical to SEQ ID NO: 40973
  source 1..40: mol_type = genomic DNA

SEQ ID NO: 40999 - DNA, 50 bp, Bacillus cereus; identical to SEQ ID NO: 40974
  source 1..50: mol_type = genomic DNA

SEQ ID NO: 41000 - DNA, 40 bp, Bacillus cereus; identical to SEQ ID NO: 11750
  source 1..40: mol_type = genomic DNA

SEQ ID NO: 41001 - protein, 515 aa, Bacillus mycoides
MKTAIYLRKSRADLEAEARGEGETLAKHRSTLLKIAKEMNLNVLSVREEIVSGESLVKRPEMLALLEEIEDNKYDVVLCMDMDRLGRGGMKEQGIILETFKRSNTKIMTPRKTYDLNDEWDEEYSEFEAFMARKELKIITRRMQRGRVASVEAGNYLGTHAPYGYDIHRLNKRERTLTINSEEASVIRMIFDWYANEDMGASAIRNKLNELGYKSKLGNEWNPYSILDILKNNVYIGKVTWQKRKEVKRPDAVKRSCARQDKSDWIIADGKHEPIIPENLFEQVQEKLNSRYHVPYNTNGIKNPLAGIIKCSKCGYSMVQRYPKNRKETMDCKHRGCENKSSYTELIEKRLLEALKEWYINYKADFEKHKQDDKLKETQVIQMNEAALRKLEKELMDVQKQKNNLHDLLERGVYTVDMFLERSNVVSDRITEITSTMENLKKEIKTEIKKEKVKKDTIPQVEHVLDLYFKTDDPKKKNSLLKSVLEKAVYKKEKWQRLDDFELVLYPKLPQDGDI

SEQ ID NO: 41002 - DNA, 50 bp, Bacillus mycoides
  source 1..50: mol_type = genomic DNA
tgtcgtcaccttgttggtgtaattaggttgaccccaacagggtgatgaca

SEQ ID NO: 41003 - DNA, 40 bp, Bacillus mycoides
  source 1..40: mol_type = genomic DNA
tgtagccattaggcgcatgagatttactccattaagccct

SEQ ID NO: 41004 - DNA, 50 bp, Bacillus mycoides
  source 1..50: mol_type = genomic DNA
tgtcgtcaccttgttggtgtaattatgttgaccccaacagggtgatgaca

SEQ ID NO: 41005 - DNA, 40 bp, Bacillus mycoides; identical to SEQ ID NO: 11750
  source 1..40: mol_type = genomic DNA

SEQ ID NO: 41006 - protein, 515 aa, Bacillus mycoides
MKTAIYLRKSRADLEAEARGEGETLAKHRSTLLKIAKEMNLNVLSVREEIVSGESLVKRPEMLALLEEIEDNKYDVVLCMDMDRLGRGGMKEQGIILETFKRSNTKIMTPRKTYDLNDEWDEEYSEFEAFMARKELKIITRRMQRGRIASVEAGNYLGTHAPYGYDIHRLNKRERTLTINSEEASVVRMIFDWYANDDMGASAIRNKLNELGYKSKLSNEWNPYSILDILKNNVYIGKVTWQKRKEVKRPDAVKRSCARQDKSDWIIADGKHEPIIPESLFEQVQEKLNSRYHIPYNTNGIKNPLAGIIKCAKCGYSMVQRYPKNRKETMDCKHRGCENKSSYTELIEKRLLEALKEWYINYKADFEKHKQDDKLKETQVIQMNEAALRKLEKELVDVQKQKNNLHDLLERGVYTVDMFLERSNVVSDRITEITSTMENLKKEIKTEIKKEKVKKDTIPQVEHVLDLYFKTNDPKKKNSLLKSVLEKAVYKKEKWQRLDDFELVLYPKLPQDGDI

SEQ ID NO: 41007 - DNA, 50 bp, Bacillus mycoides; identical to SEQ ID NO: 41002
  source 1..50: mol_type = genomic DNA

SEQ ID NO: 41008 - DNA, 40 bp, Bacillus mycoides; identical to SEQ ID NO: 41003
  source 1..40: mol_type = genomic DNA

SEQ ID NO: 41009 - DNA, 50 bp, Bacillus mycoides; identical to SEQ ID NO: 41004
  source 1..50: mol_type = genomic DNA

SEQ ID NO: 41010 - DNA, 40 bp, Bacillus mycoides; identical to SEQ ID NO: 11750
  source 1..40: mol_type = genomic DNA

SEQ ID NO: 41011 - protein, 515 aa, Bacillus mycoides
MKTAIYLRKSRADLEAEARGEGETLAKHRSTLLKIAKEMNLNVLSVREEIVSGESLVKRPEMLALLEEIEDNKYDVVLCMDMDRLGRGGMKEQGIILETFKRSNTKIMTPRKTYDLNDEWDEEYSEFEAFMARKELKIITRRMQRGRVASIEAGNYLGTHAPFGYDIHRLNKRERTLTINSEEASVIRMIFDWYANEDMGASTIRNKLNDLGYKSKLGNEWNPYSILDILKNNVYIGKVTWQKRKEVKRPDAVKRSCARQDKSDWIIADGKHEPIIPESLFEQVQEKLNSRYHLPYNTNGIKNPLAGIIKCSKCGYSMVQRYPKNRKETMDCKHRGCENKSSYTELIEKRLLEALKEWYINYKADFEAHKQGDKLKETQVIQMNEAALRKLEKELVDVQKQKNNLHDLLERGVYTVDMFLERSQVISDRINEITSTMENLKKEIKTEIKKEKVKKDTIPQVEHVLDLYFKTDDPKKKNSLLKSVLEKAVYKKEKWQRLDDFELVLYPKLPQDGDI

SEQ ID NO: 41012 - DNA, 50 bp, Bacillus mycoides; identical to SEQ ID NO: 36457
  source 1..50: mol_type = genomic DNA

SEQ ID NO: 41013 - DNA, 40 bp, Bacillus mycoides; identical to SEQ ID NO: 41003
  source 1..40: mol_type = genomic DNA

SEQ ID NO: 41014 - DNA, 50 bp, Bacillus mycoides; identical to SEQ ID NO: 36459
  source 1..50: mol_type = genomic DNA

SEQ ID NO: 41015 - DNA, 40 bp, Bacillus mycoides; identical to SEQ ID NO: 11750
  source 1..40: mol_type = genomic DNA

SEQ ID NO: 41016 - protein, 515 aa, Bacillus mycoides
MRTAIYLRKSRADLEAEARGEGETLAKHRSTLLKIAKEMNLNVLAVREEIVSGESLVKRPEMLALLEEIEDNKYDVVLCMDMDRLGRGGMKEQGIILETFKSSNTKIMTPRKTYDLNDEWDEEYSEFEAFMARKELKIITRRMQRGRIASVEAGNYLGTHAPFGYDIHRLNKRERTLTINSEEASVIRMIFDWYANEDMGASAIRNKLNDLGYKSKLGNEWNPYSILDILKNNVYIGKVTWQKRKEVKRPDAVKRSCARQDKSDWIIADGKHEPIIPESLFEQVQEKLNSRYHVPYNTNGIKNPLAGIIKCSKCGYSMVQRYPKNRKETMDCKHRGCENKSSYTELIEKRLLEALKEWYINYKADFEAHKQGDKLKETQVIQMNEAALRKLEKELVDVQKQKNNLHDLLERGVYTVDMFLERSQVISDRINEITSTMENLKKEIKTEIKKEKVKKDTIPQVEHVLDLYFKTDDPKKKNSLLKSVLEKAVYKKEKWQRLDDFELVLYPKLPQDGDI

SEQ ID NO: 41017 - DNA, 50 bp, Bacillus mycoides
  source 1..50: mol_type = genomic DNA
tgtcgtcaccttgttggtttaattaggttgactccaacagggtgatgaca

SEQ ID NO: 41018 - DNA, 40 bp, Bacillus mycoides; identical to SEQ ID NO: 41003
  source 1..40: mol_type = genomic DNA

SEQ ID NO: 41019 - DNA, 50 bp, Bacillus mycoides
  source 1..50: mol_type = genomic DNA
tgtcgtcaccttgttggtttaattatgttgactccaacagggtgatgaca

SEQ ID NO: 41020 - DNA, 40 bp, Bacillus mycoides; identical to SEQ ID NO: 11750
  source 1..40: mol_type = genomic DNA

SEQ ID NO: 41021 - protein, 515 aa, Bacillus mycoides
MKTAIYLRKSRADLEAEARGEGETLAKHRSTLLKIAKEMNLNILSVREEIVSGESLVKRPEMLALLEEIEDNKYDVVLCMDMDRLGRGGMKEQGIILETFKRSNTKIMTPRKTYDLNDEWDEEYSEFEAFMARKELKIITRRMQRGRIASVEAGNYLGTHAPFGYDIHRLNKRERTLTINSEEASVVRMIFDWYAHEDMGASAIRNKLNDLGYKSKLGNEWNPYSILDILKNNVYIGKVTWQKRKEVKRPDAVKRSCARQDKSDWIIADGKHDSIIPESLFEQVQEKLNSRYHVPYNTNGIKNPLAGIIKCAKCSYSMVQRYPKNRKETMDCKHRGCENKSSYTELIEKRLLEALKEWYINYKADFEKHKQDDKLKETQVIQMNEAALRKLEKELVDVQKQKNNLHDLLERGVYTVDMFLERSKVISNRINEITSTMGNLQKEIKTEIKKEKVKKDTIPQVEHVLDLYFKTDDPKKKNSLLKSVLEKAVYKKEKWQRLDDFELVLYPKLPQDGDI

SEQ ID NO: 41022 - DNA, 50 bp, Bacillus mycoides; identical to SEQ ID NO: 1612
  source 1..50: mol_type = genomic DNA

SEQ ID NO: 41023 - DNA, 40 bp, Bacillus mycoides; identical to SEQ ID NO: 41003
  source 1..40: mol_type = genomic DNA

SEQ ID NO: 41024 - DNA, 50 bp, Bacillus mycoides; identical to SEQ ID NO: 1614
  source 1..50: mol_type = genomic DNA

SEQ ID NO: 41025 - DNA, 40 bp, Bacillus mycoides; identical to SEQ ID NO: 11750
  source 1..40: mol_type = genomic DNA

SEQ ID NO: 41026 - protein, 515 aa, Bacillus wiedmannii
MKTAIYLRKSRADLEAEARGEGETLAKHRSTLLKIAKEMNLNVLAVREEIVSGESLVKRPEMLALLEEIEDNKYDVVLCMDMDRLGRGGMKEQGIILETFKRSNTKIMTPRKTYDLNDEWDEEYSEFEAFMARKELKIITRRMQRGRVASVEAGNYLGTHAPFGYDIHRLNKRERTLTINPEEASVVRMIFDWYANEDMGANAIRSKLNDLGYKSKLGNEWNPYSILDILKNNVYIGKVTWQKRKEVKQPDAIKRSCARQDKSDWIIADGKHEPIIPESLFEQVQEKLNSRYHVPYNTNGIKNPLAGIIKCSKCGYSMVQRYPKNRKETMDCKHRGCENKSSYTELIEKRLLEALKEWYINYKADFEKHKKDDKLKETQVIQMNEAALRKLEKELVDVQKQKNNLHDLLERGVYTVDMFLERSNVVSDRITEITSTMENLKKEIKTEIKKKKVKKDTIPQVEHVLDLYFKTDDPKKKNSLLKSVLEKAVYKKEKWQRLDDFELVLYPKLPQDGDI

SEQ ID NO: 41027 - DNA, 50 bp, Bacillus wiedmannii; identical to SEQ ID NO: 9727
  source 1..50: mol_type = genomic DNA

SEQ ID NO: 41028 - DNA, 40 bp, Bacillus wiedmannii; identical to SEQ ID NO: 40973
  source 1..40: mol_type = genomic DNA

SEQ ID NO: 41029 - DNA, 50 bp, Bacillus wiedmannii; identical to SEQ ID NO: 9729
  source 1..50: mol_type = genomic DNA

SEQ ID NO: 41030 - DNA, 40 bp, Bacillus wiedmannii; identical to SEQ ID NO: 11750
  source 1..40: mol_type = genomic DNA

SEQ ID NO: 41031 - protein, 515 aa, Bacillus wiedmannii
MKTAIYLRKSRADLEAEARGEGETLAKHRTTLLKIAKEMNLNVLAVREEIVSGESLVKRPEMLALLEDIEDNKYDVVLCMDMDRLGRGGMKEQGIILETFKRSNTKIMTPRKTYDLNDEWDEEYSEFEAFMARKELKIITRRMQRGRVASVEAGNYLGTHAPFGYDIHRLNKRERTLTINPEEASVVRMIFDWYANEDMGANAIRSKLNDLGYKSKLGNEWNPYSILDILKNNVYIGKVTWQKRKEVKRPDAVKRSCARQEKSDWIIADGKHEPIIPESLFEQVQEKLNSRYHVPYNTNGIKNPLAGIIKCSKCGYSMVQRYPKNRKETMDCKHRGCENKSSYTELIEKRLLEALKEWYINYKADFEKHKQDDKLKETQVIQMNEAALGKLEKELVDVQKQKNNLHDLLERGVYTVDMFLERSNVVSDRITEITSTMENLKKEIKIEIKKEKVKKDTIPQVEHVLDLYFKTDDPKKKNSLLKSVLEKAVYKKEKWQRLDDFELVLYPKLPQDGDI

SEQ ID NO: 41032 - DNA, 50 bp, Bacillus wiedmannii
  source 1..50: mol_type = genomic DNA
tgtcgtcaccttgttggtgtaattaggttgacgccaacagggtgatgacg

SEQ ID NO: 41033 - DNA, 40 bp, Bacillus wiedmannii; identical to SEQ ID NO: 40973
  source 1..40: mol_type = genomic DNA

SEQ ID NO: 41034 - DNA, 50 bp, Bacillus wiedmannii
  source 1..50: mol_type = genomic DNA
tgtcgtcaccttgttggtgtaattatgttgacgccaacagggtgatgacg

SEQ ID NO: 41035 - DNA, 40 bp, Bacillus wiedmannii; identical to SEQ ID NO: 11750
  source 1..40: mol_type = genomic DNA

SEQ ID NO: 41036 - protein, 515 aa, Bacillus paranthracis
MKTAIYLRKSRADLEAEARGEGETLAKHRTTLLKIAKEMNLNVLAVREEIVSGESLVKRPEMLALLEEIEDNKYDVVLCMDMDRLGRGGMKEQGIILETFKRSNTKIMTPRKTYDLNDEWDEEYSEFEAFMARKELKIITRRMQRGRVASVEAGNYLGTHAPFGYDIHRLNKRERTLTINSEEASIVRMIFDWYANEDMGANAIRSKLNDLGYKSKLGNDWNPYSILDILKNNVYIGKVTWQKRKEVKRPDAVKRSCARQDKSDWIIADGKHEPIISESLFEQVQEKLNSRYHVPYNTNGIKNPLAGIIKCSKCGYSMVQRYPKNRKETMDCKHRGCENKSSYTELIEKRLLEALKEWYINYKADFEKHKQDDKLKETQVIQMNEAALRKLEKELVDVQKQKNNLHDLLERGVYTVDMFLERSNVVSDRITEITSTMENLKKEIKTEIKKEKVKKDTIPQVEHVLDLYFKTDDPKKKNSLLKSVLEKAVYKKEKWQRLDDFELVLYPKLPQDGDI

SEQ ID NO: 41037 - DNA, 50 bp, Bacillus paranthracis; identical to SEQ ID NO: 36472
  source 1..50: mol_type = genomic DNA

SEQ ID NO: 41038 - DNA, 40 bp, Bacillus paranthracis; identical to SEQ ID NO: 40978
  source 1..40: mol_type = genomic DNA

SEQ ID NO: 41039 - DNA, 50 bp, Bacillus paranthracis; identical to SEQ ID NO: 36474
  source 1..50: mol_type = genomic DNA

SEQ ID NO: 41040 - DNA, 40 bp, Bacillus paranthracis; identical to SEQ ID NO: 11750
  source 1..40: mol_type = genomic DNA

SEQ ID NO: 41041 - protein, 513 aa, Chryseobacterium bernardetii
MIADLYIRVSTDEQADKGYSQRDQEERLRLHCDRLAITIDRVIFEDHSAKSFDRPEWKNYLQSFKRSRGYREERLILFTKWDRFSRNTSEAYQMIGHLKKNNILPQAIEQPLDLSIPENKVLLAIYLSTPEVENDRRALNVTNGMRRAIKEGRLMGIAPYGYVNKCTEDGRKYVAVKQPEASNIIWAFEQVAKGHLPTAKVRVEMNKREGKNISSNAFMVALRNVTYCGKIYVRAYKNEEEDIVPGKHEALISEELFLKVQHVLKKKGTKDLRLPGGRIINEERYPLRGLLLCPNCGKNLTASSSKGHTKHYYYYHCTTACGFRHHSDKVNKLFKEELSKYDFPTGILEILKKIIVKNTKSTSENFDGERSTLKSRISELNDRISKARDMYLSDKIDEEDFRDIKNRYKGELDDLEYKLSLLVKSEQKEGVEDKISKALKIVGNISERYINASPIDKRAIVSLIYPEKIIFDGSDFQTSKINSFVDSIFLIRKELSKQKKGDLNSKNLNPRLV

SEQ ID NO: 41042 - DNA, 50 bp, Chryseobacterium bernardetii
  source 1..50: mol_type = genomic DNA
ttcgaaaaatttaaacccccgtcttgtgaactcgctggtaggctatccaa

SEQ ID NO: 41043 - DNA, 40 bp, Chryseobacterium bernardetii
  source 1..40: mol_type = genomic DNA
ttggcgccatttagctgtttgtgagctcgacaggattcaa

SEQ ID NO: 41044 - DNA, 50 bp, Chryseobacterium bernardetii
  source 1..50: mol_type = genomic DNA
ttcgaaaaatttaaacccccgtctcctgaactcgctggtaggctatccaa

SEQ ID NO: 41045 - DNA, 40 bp, Chryseobacterium bernardetii
  source 1..40: mol_type = genomic DNA
atgactccatgaagcttttcctgacctctacagacttcaa

SEQ ID NO: 41046 - protein, 550 aa, Flavobacterium salilacus
MIGIYCRISRIKDGNDLSIEDQKQKGVAKAKALGLSYQLYIDEGLSGASEKIEDRPEFQRFIADVSIGKLTHVYAYDQSRFERNPQIRFVILDLFKKHNIKYFTHLDGQVDLHDPQQEFFGDLLSVINKYHVTTTKIKVKSALTMRAKEGKGKGTLPFGYKMDNKGYIIINEEEAHHVKKAYQLSNDGMGCNGISHYFNENNIPTVYSRKAKEKGLNNKYRWSPSSIRNLIVNTFYKGERIYNGEKLVVPAIIDPIVWQQVNDHLPLNANSDGKKISHRFLLSNVLYCNRCAVQRNKVSRMYGRRNEKKSENSYLCSSKRYKGEGCDNKGINISKLDAFIWEHLFLNDGLKQNIEQHFAFEDKQKEVEKYECKVDTLQDELATLQKERSRAISLVIKGTLTEDDIAVQLASIDRKIKKYKKSLDESEKMLSFITSNTDLVKQYTSLFEKFSEETSFEEKRSIITKMIKKIMVEYDSHWQEYYIEIHYTIDIPSNIYAQHHSSEGAVYYRLNEDENSDFSLEHKMKKDNINTINNKIKGEPTPPDLERHTG

SEQ ID NO: 41047 - DNA, 50 bp, Flavobacterium salilacus
  source 1..50: mol_type = genomic DNA
caccccctgatttagaaagacacactggtaacttttacaattcgggggta

SEQ ID NO: 41048 - DNA, 40 bp, Flavobacterium salilacus
  source 1..40: mol_type = genomic DNA
tccttttgatgaagacacactggtatttaaagtcggcgga

SEQ ID NO: 41049 - DNA, 50 bp, Flavobacterium salilacus; identical to SEQ ID NO: 41047
  source 1..50: mol_type = genomic DNA

SEQ ID NO: 41050 - DNA, 40 bp, Flavobacterium salilacus
  source 1..40: mol_type = genomic DNA
tctttgtgatgaaaacacacttttatttattttcagctga

SEQ ID NO: 41051 - protein, 540 aa, Faecalibacterium prausnitzii; identical to SEQ ID NO: 12131

SEQ ID NO: 41052 - DNA, 50 bp, Faecalibacterium prausnitzii; identical to SEQ ID NO: 2472
  source 1..50: mol_type = genomic DNA

SEQ ID NO: 41053 - DNA, 40 bp, Faecalibacterium prausnitzii
  source 1..40: mol_type = genomic DNA
tttttcaagatgcggtagcgggtgtgcccatccagaatgt

SEQ ID NO: 41054 - DNA, 50 bp, Faecalibacterium prausnitzii; identical to SEQ ID NO: 13264
  source 1..50: mol_type = genomic DNA

SEQ ID NO: 41055 - DNA, 40 bp, Faecalibacterium prausnitzii
  source 1..40: mol_type = genomic DNA
ttgttcaagatgtgctaggtgctgtgttcacccagaataa

SEQ ID NO: 41056 - protein, 500 aa, Bacillus sp WP8
MIAIYVRVSTEEQAIKGSSIDSQIEACIKKVGTKDVLKYADEGFSGELLERPALNRLREDASKGLISQVICYDPDRLSRKLMNQLIIDDELRKRNIPLIFVNGEYANSPEGQLFFAMRGAISEFEKAKIKERTSSGRLQKMKKGMIIKDSKLYGYKFVKEKRTLEIFEEEAKIIRMIFNYFTDHKSPFFGRINGIALHLTQMGVKTKKGARVWHRQVVRQILMNSSYKGEHKQYKYDTEGSYVSKQAGNKSIIKIRPEEEQISVAIPAIVPAEQWKYAQELLGQSKRKHLSTSPHNYLLSGLVGCGKCGNTMTGKKRKSHGKDYYVYTCRKNYSGAKDRGCGKEMSENKLNRHVWGEIFKFITNPQKYASFKEIEQSNHLSDELELIQKEIEKTKKGRKRLLTLISLCDDDDLDIDEIKTKIIELQKKQNQLTEKCNEIQSKMKLLDDTSSSENALKRTIDYFQVIGADNLTLEDKKTIVNFIVKEVTVVDSDTIYIETY

SEQ ID NO: 41057 - DNA, 50 bp, Bacillus sp WP8
  source 1..50: mol_type = genomic DNA
caccccccttttgtaattacaatttcgttattaaagtcaaaagggggatg

SEQ ID NO: 41058 - DNA, 40 bp, Bacillus sp WP8
  source 1..40: mol_type = genomic DNA
gcgtaagtgcatgagaatttcattttcaatacaccgcgct

SEQ ID NO: 41059 - DNA, 50 bp, Bacillus sp WP8
  source 1..50: mol_type = genomic DNA
caccccccttttgtaattacaattatgttattaaagtcaaaagggggatg

SEQ ID NO: 41060 - DNA, 40 bp, Bacillus sp WP8
  source 1..40: mol_type = genomic DNA
ggggaagtggaaaagaatcatcttttcaataaacggtgct

SEQ ID NO: 41061 - protein, 558 aa, Ruminiclostridium cellobioparum
MMANQEKYTILYGRLSQEDDLKGDSNSIQNQRLLLEKYAKENGFANVKFLYDDGYSGTNFNRPSWNELLGLIEQDQVETLIVKDLSRLGREYLQVGYYTEIFFPQKGIRFIAVNDGVDSLYESSNDFTPMRNWFNELHAKDSSKKVRAVKRMQAERGEILGGRPPYGYRRDESVRKGIVPDEETAPIVQRIFSLCVGGKGPNQIARILTQEQVLNPTNYYYRMTGKEHKSLDTSSPYRWTSSSVTGILDNRTYLGHMPGLRTTTLSYKNKKAVYHDESEQILVKDTHEALITQEQWDMVQELRQRKKRVPKQMEEPNLFSGLVFCTDCGKPLVLHRAHTMDAVKNNFMCYTYKKRGKEVCSSHYIRECDLVQIILDDLRRVTHFARQKEALFAEYINRKNSVELRKEMNSLQRELDAAKRRDSELTSLFKRLYEDNVLGRVTNEQFRMLSADYNDEQKVLRDAIPAKETRLQKLMDSASNVDAFIEKAKRYTEIRELTPEILRLFIARIEVGEKSTRYSRTAEQAIRIVYRDVGIMDSVEQVAEEKAEDTQTQQENIA

SEQ ID NO: 41062 - DNA, 50 bp, Ruminiclostridium cellobioparum
  source 1..50: mol_type = genomic DNA
atctgtccctttgaacgagaacagaagggttaaccttcatagggatatga

SEQ ID NO: 41063 - DNA, 40 bp, Ruminiclostridium cellobioparum
  source 1..40: mol_type = genomic DNA
ccaaaaacccgctgaatcaaaatgatccggcgggttttct

SEQ ID NO: 41064 - DNA, 50 bp, Ruminiclostridium cellobioparum
  source 1..50: mol_type = genomic DNA
atctgtccctttgaacgagaacagttgggttaaccttcatagggatatga

SEQ ID NO: 41065 - DNA, 40 bp, Ruminiclostridium cellobioparum
  source 1..40: mol_type = genomic DNA
acattaacacgatgattcattatgatcaagtgggttttat

SEQ ID NO: 41066 - protein, 557 aa, Eubacterium siraeum; identical to SEQ ID NO: 36631

SEQ ID NO: 41067 - DNA, 50 bp, Eubacterium siraeum; identical to SEQ ID NO: 11442
  source 1..50: mol_type = genomic DNA

SEQ ID NO: 41068 - DNA, 40 bp, Eubacterium siraeum
  source 1..40: mol_type = genomic DNA
cgcaaagacgggagttataaatatgatgttcagacagaca

SEQ ID NO: 41069 - DNA, 50 bp, Eubacterium siraeum; identical to SEQ ID NO: 36634
  source 1..50: mol_type = genomic DNA

SEQ ID NO: 41070 - DNA, 40 bp, Eubacterium siraeum
  source 1..40: mol_type = genomic DNA
ctataaaatgggagttatagttatgatgatcataataaca

SEQ ID NO: 41071 - protein, 471 aa, Streptococcus agalactiae; identical to SEQ ID NO: 26506

SEQ ID NO: 41072 - DNA, 50 bp, Streptococcus agalactiae
  source 1..50: mol_type = genomic DNA
atacattattgacaaacgacaaccaatattgttgtacatgaaaaacgctg

SEQ ID NO: 41073 - DNA, 40 bp, Streptococcus agalactiae; identical to SEQ ID NO: 28228
  source 1..40: mol_type = genomic DNA

SEQ ID NO: 41074 - DNA, 50 bp, Streptococcus agalactiae
  source 1..50: mol_type = genomic DNA
atacattattgacaaacgacaacctgtattgttgtacatgaaaaacgctg

SEQ ID NO: 41075 - DNA, 40 bp, Streptococcus agalactiae
  source 1..40: mol_type = genomic DNA
acacacatctttaccaagttgtttggttgtacaagccttg

SEQ ID NO: 41076 - protein, 623 aa, Bacteroides intestinalis; identical to SEQ ID NO: 3741

SEQ ID NO: 41077 - DNA, 50 bp, Bacteroides intestinalis; identical to SEQ ID NO: 11702
  source 1..50: mol_type = genomic DNA

SEQ ID NO: 41078 - DNA, 40 bp, Bacteroides intestinalis
  source 1..40: mol_type = genomic DNA
gcgattgaattccggaagttcatccagaaacaaaatgcca

SEQ ID NO: 41079 - DNA, 50 bp, Bacteroides intestinalis
  source 1..50: mol_type = genomic DNA
tagtgaaagtatttttggaattgctagctatttgaaaaatacttgtatag

SEQ ID NO: 41080 - DNA, 40 bp, Bacteroides intestinalis
  source 1..40: mol_type = genomic DNA
gccattgtcttaagcaagttaatgcagaaacagaaaacca

SEQ ID NO: 41081 - protein, 595 aa, Microbacterium testaceum
MTINSSTHPAAVESMGDGQAVIDVEQFAHSPQVLRGRQATDPAHDGNPDDKGTRAVIYLRVSSKKQVDTDYDPEGISLPAQRLACEKKAEQMGLQIVDEYVDAGFSGTDVAGRPQFQDMLERIRAKRNVDYVIVYKLSRLHRNRYDEAFTMMQLQQRGVTLVSATESIDGSPVGQLMQGILSAFNQYRSAEDGADIAYKLGEKAKKGGTVFMAPLGYINTGERIQDREVRVVKPDPDRAHLVRLAFELYATGTYSIPALSDELYLRGLKTRASARWPSKQLSDNQLLRILQDPYYLGFTRFKGNIYPGRHDPLVDGDLFGRVQEVISVRATGERQRIHHHYLKSTLYCGNCHSTDDAHGRIIVAHVNGRGGTYDYFFCRRSQDKLCDAPYMQMARVEDAVERYWDQLRVSPGFTAAARVGLRKTVEKGQAAARSLHTQLTENLRKLDQQEENLLDLAADGTLPRETIQKRMNAILRNRAAMSARLEKTEQKLAVVVDYLDAALSLLERPGELYANATDEQRRMLNQAVFSRIYVYADEITDVEFNEPFDMLMAAGELYENPTKTAPENKGGDVSAEAASLVNIALGDFSSNADVV

SEQ ID NO: 41082 - DNA, 50 bp, Microbacterium testaceum
  source 1..50: mol_type = genomic DNA
ggcgatttttcgagtaacgctgacgtggtggggcttgttgtgaggtactc

SEQ ID NO: 41083 - DNA, 40 bp, Microbacterium testaceum
  source 1..40: mol_type = genomic DNA
ctccgttcagttcggaatcatggtgggcccggaggggctc

SEQ ID NO: 41084 - DNA, 50 bp, Microbacterium testaceum
  source 1..50: mol_type = genomic DNA
ggcgatttttcgagtaacgctgacggggtggggcttgttgtgaggtactc

SEQ ID NO: 41085 - DNA, 40 bp, Microbacterium testaceum
  source 1..40: mol_type = genomic DNA
ctctttccagttctgaataggggtgggttggatggggctc

SEQ ID NO: 41086 - protein, 599 aa, Eubacterium rectale; identical to SEQ ID NO: 38771

SEQ ID NO: 41087 - DNA, 50 bp, Eubacterium rectale; identical to SEQ ID NO: 38587
  source 1..50: mol_type = genomic DNA

SEQ ID NO: 41088 - DNA, 40 bp, Eubacterium rectale
  source 1..40: mol_type = genomic DNA
gctcgtcttgctgcagcacaggctgctatcgcagagcagg

SEQ ID NO: 41089 - DNA, 50 bp, Eubacterium rectale; identical to SEQ ID NO: 38589
  source 1..50: mol_type = genomic DNA

SEQ ID NO: 41090 - DNA, 40 bp, Eubacterium rectale
  source 1..40: mol_type = genomic DNA
gcttggcctgctttagtatttactgctatcacagggcagg

SEQ ID NO: 41091 - protein, 545 aa, Vibrio parahaemolyticus
MKKYHLYQRVSKQIQAEEGLGIQRQEQVCEHWISEYNKRLLDDGKSAYSKGLVYEDHGKSAYTTANFKRGELGTLMKDIESGKIAKGDLIVIELIDRFSRANVDFVRKKFQSILDAGVKVAITKWNLVFEENMEGISSVSARLLLEIGMHLAYQESSQKSTRIKASRKLLERSGKKSIAKPPFWLVRNLDLRSYTIIEENAEIVRKIFDLKLKFNYGPQKIIKSLGELEIYRYKFDDNGNLVKTTKNSPLSESSINAYIRNPNVIGKLDGKDYYPRIIDDKTYYAVQKRTRENTGGASDIFRNVFVGVGKCGCLIRNEDENGYVKFTKCGYIMAYSSRKVKNPAKGQYLKCNKKRKNTKCKSENINYYLAQNKVYSVLKSLKFDFSQSVDISHLEEKINILNKEMSKIRTFMAKYTDDDEWENHYNVKRMEREKIENEIKNSKSLITGKISSLDLDFSAEKDRVLFNQFLKDNRVIVYFTKENMEIIIGSLNNFSIKCGYDDSSRDIDHIIESYSKNGLVGIEEKVGKSEGKGLLRFNLPTVSGS

SEQ ID NO: 41092 - DNA, 50 bp, Vibrio parahaemolyticus
  source 1..50: mol_type = genomic DNA
atgtcgtcaatcatacagttgactaatgacaattgtatgataagctacat

SEQ ID NO: 41093 - DNA, 40 bp, Vibrio parahaemolyticus; identical to SEQ ID NO: 5003
  source 1..40: mol_type = genomic DNA

SEQ ID NO: 41094 - DNA, 50 bp, Vibrio parahaemolyticus
  source 1..50: mol_type = genomic DNA
atgtcgtcaatcatacagttgacttgtgacaattgtatgataagctacat

SEQ ID NO: 41095 - DNA, 40 bp, Vibrio parahaemolyticus
  source 1..40: mol_type = genomic DNA
accctagccacggtagaaatgtgaaacaatcaggccactt

SEQ ID NO: 41096 - protein, 545 aa, Vibrio parahaemolyticus
MNKYHLYQRVSKQIQAEEGQGIQRQEQACEHWISDYNKRLLSEGKSAYSKGLIYEDRGKSAYTAANFKRGELGALINDIENGKIEKGDLIVIELIDRFSRANVDFVRSQFQRVLDAGVKIAITKWNLVFEENMESVSSVTGRILLEIGMYLAYQESSQKSSRIKASRKLLEDSGRKSIAKPPFWLARNLDLKSYTIIEENAEIIRKIFDLKLNFNYGPQKIIKSLGDLDIYRYSFDENGNLIKTTKNSPLSESSINAYIRNTNVIGKLDGKDYYPRIIDDRTFYAVQKRTRENTGGVGEIFRNVFVGVGKCGCLIRKENENGCGSLAKCGYIMAFSSRKVKNPTKGMYLKCNRKRKSTKCDSENINYYLAQNKIYNVLKSLKFDIDQSVDISHLEEKINAIDKSMSKIREYMTQYSDDEEWENQYNIKRMEREKIENEIKASKSRITGKLSNLDIDFSKEKDRVLFNQFLKDNRITVYFTKERMEIIIGSLNNFSIKCGYDDSNRDIDHIIESYSKNGLVGIEEKAGKSEGKGLLRFNLPTVPGS

SEQ ID NO: 41097 - DNA, 50 bp, Vibrio parahaemolyticus
  source 1..50: mol_type = genomic DNA
atgtcgtctatcatacggttgactaaagacaactacatgttatactgcat

SEQ ID NO: 41098 - DNA, 40 bp, Vibrio parahaemolyticus; identical to SEQ ID NO: 5003
  source 1..40: mol_type = genomic DNA

SEQ ID NO: 41099 - DNA, 50 bp, Vibrio parahaemolyticus
  source 1..50: mol_type = genomic DNA
atgtcgtctatcatacggttgacttgagacaactacatgttatactgcat

SEQ ID NO: 41100 - DNA, 40 bp, Vibrio parahaemolyticus; identical to SEQ ID NO: 41095
  source 1..40: mol_type = genomic DNA

SEQ ID NO: 41101 - protein, 545 aa, Vibrio parahaemolyticus
MNKYHLYQRVSKQIQAEEGQGIQRQEQACEHWISDYNKRLLSEGKSAYSKGLIYEDRGKSAYTAANFKRGELGALINDIENGKIEKGDLIVIELIDRFSRANVDFVRSQFQRIIDAGVKIAITKWNLVFEENMESVSSVTGRILLEIGMYLAYQESSQKSSRIKASRKLLEDSGRKSIAKPPFWLARNSDLKSYTIIEENAEIIRKIFDLKLNFNYGPQKIIKSLGDLDIYRYSFDENGNLIKTTKNSPLSESSINAYIRNTNVIGKLDGKDYYPRIIDDRTFYAVQKRTRENTGGVGEIFRNVFVGVGKCGCLIRKENENGCGSLAKCGYIMAFSSRKVKNPTKGMYLKCNRKRKSTKCESENINYYLAQNKIYNVLKSLKFDIDQSVDISHLEEKINTIDKSMSKIRDYMTQYSDDEEWENQYKIKRMEREKIENEIKASKSRITGKLSNLDIDFSKEKDRVLFNQFLKDNRITVYFTKERMEIIIGSLNNFSIKCGYDDSNRDIDHIIESYSKNGLVGIEEKSGKSEGKGLLRFNLPTVPGS

SEQ ID NO: 41102 - DNA, 50 bp, Vibrio parahaemolyticus
  source 1..50: mol_type = genomic DNA
atgtcgtcaatcatacagttgactaatgacaactaaatgttatactacat

SEQ ID NO: 41103 - DNA, 40 bp, Vibrio parahaemolyticus; identical to SEQ ID NO: 5003
  source 1..40: mol_type = genomic DNA

SEQ ID NO: 41104 - DNA, 50 bp, Vibrio parahaemolyticus
  source 1..50: mol_type = genomic DNA
atgtcgtcaatcatacagttgacttgtgacaactaaatgttatactacat

SEQ ID NO: 41105 - DNA, 40 bp, Vibrio parahaemolyticus; identical to SEQ ID NO: 41095
  source 1..40: mol_type = genomic DNA

SEQ ID NO: 41106 - protein, 554 aa, Vibrio cholerae
MTEEKQRFAVTYQRFSSVRQVGNSSLDRQTDTQKAWLRQNPNVTVIDNFVDKAMSGWSGKHLKEGSLGQLMKAIEDGIIQPGTLILVEHFSRLTRQNIDNAEELVKRIWKAGITLVTVRDNTEYPPEAVNNMSLRIRLIVEMEQAFKESEWRSAKVKASYIRREKLAKEEGKAPRIRKPFWLNPDGTLNHLHQAVKDMFNWYLEGLGQQRIVVRLREKYTDTAIQKINPSTVMRWIQSEIVRGYWRGNRVYEPAVDDQLFFDVQAIHKSRLYKNVKPDRQWPLSGLMQCGVCGRGMSIQKSGKSNPVVRCSSKQRDHSCDRKTTFPYFIVHMYMMTHVLQHAIRLHSDKSSNKGLQIELGKVERKLATTRKKLNDEKEFYNKASNEGQNTTMILQLMNETYQKVEELEEQEKSLKASLKQSNRAVSAESRDLLFTPETFNLEMHKLGFKIVVGEEELSTIGFDKPVSKMVYLGYCRKERAYKYADGSSDFVKVWPSSLVTDELLNMQMLKNYINSSSGLKYIWDHIYDDDLEEKLKKRSNEKKEKEKKLKEKGE

SEQ ID NO: 41107 - DNA, 50 bp, Vibrio cholerae
  source 1..50: mol_type = genomic DNA
aatttgcacacgtaatctttaagtgagctataggcgtaggtgtgcagttt

SEQ ID NO: 41108 - DNA, 40 bp, Vibrio cholerae
  source 1..40: mol_type = genomic DNA
gttagaccatttactatgtgagctgaaagctggtcaatcc

SEQ ID NO: 41109 - DNA, 50 bp, Vibrio cholerae
  source 1..50: mol_type = genomic DNA
aatttgcacacgtaatctttaagtctgctataggcgtaggtgtgcagttt

SEQ ID NO: 41110 - DNA, 40 bp, Vibrio cholerae
  source 1..40: mol_type = genomic DNA
gtaacacacattactttgtctcttaaaagcaggtcaatcc

SEQ ID NO: 41111 - protein, 458 aa, Staphylococcus aureus; identical to SEQ ID NO: 13066

SEQ ID NO: 41112 - DNA, 50 bp, Staphylococcus aureus; identical to SEQ ID NO: 11827
  source 1..50: mol_type = genomic DNA

SEQ ID NO: 41113 - DNA, 40 bp, Staphylococcus aureus
  source 1..40: mol_type = genomic DNA
gtatggaggcacttgtataaacataggatgtataccttcg

SEQ ID NO: 41114 - DNA, 50 bp, Staphylococcus aureus; identical to SEQ ID NO: 11829
  source 1..50: mol_type = genomic DNA

SEQ ID NO: 41115 - DNA, 40 bp, Staphylococcus aureus; identical to SEQ ID NO: 11830
  source 1..40: mol_type = genomic DNA

SEQ ID NO: 41116 - protein, 458 aa, Staphylococcus aureus; identical to SEQ ID NO: 11826

SEQ ID NO: 41117 - DNA, 50 bp, Staphylococcus aureus; identical to SEQ ID NO: 11827
  source 1..50: mol_type = genomic DNA

SEQ ID NO: 41118 - DNA, 40 bp, Staphylococcus aureus; identical to SEQ ID NO: 41113
  source 1..40: mol_type = genomic DNA

SEQ ID NO: 41119 - DNA, 50 bp, Staphylococcus aureus; identical to SEQ ID NO: 11829
  source 1..50: mol_type = genomic DNA

SEQ ID NO: 41120 - DNA, 40 bp, Staphylococcus aureus; identical to SEQ ID NO: 11830
  source 1..40: mol_type = genomic DNA

SEQ ID NO: 41121 - protein, 458 aa, Staphylococcus aureus
MKVAIYTRVSTLEQKEKGHSIEEQERKLRAYSDINDWTIQGVYVDAGYSGAKTDRPELNRLKENLSKIDLVLVYKLDRLTRNVKDLLDLLEIFERENVSFRSATEVYDTSTAMGRLFVTLVGAMAEWERETIRERAMMGKQAAIRKGMILTPPPFYYDRVDNKYIPNKYKDVVVWAYEEVKKGNSAKGIARKLNASDIPPPNGIQWEDRTITRALRSPLSKGHYFWGDIFIENSHEPIITDEMYNEIKERLNERVNAKTITHTSVFRGKLICPNCNGRLCLNTSYRKLKRGDVIHKNYYCNNCKVNKNGAFSFTEKEALKVFYDYLSKLDLSKYKTKEKEDKKIVTIDINKVMEQRKRYHKLYANGMMQEEELFELIKETDEKISEYEKQKERVPKKRLDVSKIKKFKNILLDSWNAFTLEDKADFIKMAIKSIEIEYIHVKRGKTKHSIKIKNIDFY

SEQ ID NO: 41122 - DNA, 50 bp, Staphylococcus aureus
  source 1..50: mol_type = genomic DNA
gtgcggaactacgaacagtttatcaacacgaagtgtataaactcccatac

SEQ ID NO: 41123 - DNA, 40 bp, Staphylococcus aureus; identical to SEQ ID NO: 41113
  source 1..40: mol_type = genomic DNA

SEQ ID NO: 41124 - DNA, 50 bp, Staphylococcus aureus
  source 1..50: mol_type = genomic DNA
gtgcggaactacgaacagtttatcttcacgaagtgtataaactcccatac

SEQ ID NO: 41125 - DNA, 40 bp, Staphylococcus aureus; identical to SEQ ID NO: 11830
  source 1..40: mol_type = genomic DNA

SEQ ID NO: 41126 - protein, 458 aa, Staphylococcus aureus
MKVAIYTRVSTLEQKEKGHSIEEQERKLRAYSDINDWTIQGVYVDAGYSGAKTDRPELNRLKENLSKIDLVLVYKLDRLTRNVKDLLDLLEMFERENVSFRSATEVYDTSTAMGRLFVTLVGAMAEWERETIRERAMMGKQAAIRKGMILTPPPFYYDRVDNKYIPNKYKDVVVWAYEEVKKGNSAKGIARKLNASDIPPPNGIQWEDRTITRALRSPLSKGHYFWGDIFIENSHEPIITDEMYNEIKERLNERVNAKTITHTSVFRGKLICPNCNGRLCLNTSYRKLKRGDVIHKNYYCNNCKVNKNGAFSFTEKEALKVFYDYLSKLDLSKYKTKEKEDKKIVTIDINKVMEQRKRYHKLYANGMMQEEELFELIKETDEKISEYEKQKERVPKKRLDVSKIKNFKNILLDSWNAFTLEDKADFIKMAIKSIEIEYIHVKRGKTKHSIKIKNIDFY

SEQ ID NO: 41127 - DNA, 50 bp, Staphylococcus aureus; identical to SEQ ID NO: 11827
  source 1..50: mol_type = genomic DNA

SEQ ID NO: 41128 - DNA, 40 bp, Staphylococcus aureus; identical to SEQ ID NO: 41113
  source 1..40: mol_type = genomic DNA

SEQ ID NO: 41129 - DNA, 50 bp, Staphylococcus aureus; identical to SEQ ID NO: 11829
  source 1..50: mol_type = genomic DNA

SEQ ID NO: 41130 - DNA, 40 bp, Staphylococcus aureus; identical to SEQ ID NO: 11830
  source 1..40: mol_type = genomic DNA

SEQ ID NO: 41131 - protein, 517 aa, Clostridium novyi
MNRIAIYSRKSKETDTGESIKNQIDMCKAYFNRGNVECTFEIFQDEGFSGGNINRPSFQRMIELAKHKQFDIVAVYKVDRIARNIVDFVNIYDELERHDVKLVSITEGFDPSTPIGKMMMMMLASFAEMERMNIAQRVKDNMNALAKMGRWSGGTPPTGYKSKTININGKKEVYLELVEEKKLMINTIFKKASDGYTTYQISELLSMPPKTVANIISNPTYVCSDEMSANYLKSIGYNVFGELNGNGYLVYNRRPKKKGKKLFNAKGMFVAVSKHKPIVDSKTWIIANKNLKERATENKPRISNQSFLAHLVKCSCGSGMYITPGNAKKDDTRNFYFVCSKKKSSRGEECNSKWLRVDFVEKSILNILEKIHLNPKSLENYLKQKNSSVDYTESIKEVKQKLSKNTDKINNLTEKLILLDGAAIEIISKKINEIANENNKLNETLLDLERKKIFLSIDGENSKMLINTIGEFLNRFDKIDITEKQNFVQSILESVTWNSDILNAKGKQGKISIKFLG

SEQ ID NO: 41132 - DNA, 50 bp, Clostridium novyi
  source 1..50: mol_type = genomic DNA
agattactttttagatgtactgcacatggggtacatctgaaattccttct

SEQ ID NO: 41133 - DNA, 40 bp, Clostridium novyi; identical to SEQ ID NO: 29138
  source 1..40: mol_type = genomic DNA

SEQ ID NO: 41134 - DNA, 50 bp, Clostridium novyi
  source 1..50: mol_type = genomic DNA
agattactttttagatgtactgcacctggggtacatctgaaattccttct

SEQ ID NO: 41135 - DNA, 40 bp, Clostridium novyi
  source 1..40: mol_type = genomic DNA
tgctgctgctgctgctgcacctacaatcctgccaccccca

SEQ ID NO: 41136 - protein, 547 aa, Clostridium phoceensis
MKEPKVAIYIRLSLADEDTRRSKEESDSVQHQRLLIHEFLNRHPELKDAPRTEFVDDGFTGTNTNRPAFQNMMKKLRSGELNVLVTKDFSRAMRDYTEMGNYLECVFPFLGVRYISINDGYDSNDYKGVTSGMDVVIRNIVYASYSKDLSVKTTTAKLQMMKQGKYVGSIAPYGYQFHPTIRNKLAIDPESASVVRRIFDLALAGKKTRQIAEILNIDGILTPGSYFRLKHPDQNRFQKRKESNGWNYHTVLGILHQYEYTGATVGHKRSKAAVNVKKALPNKKEDWIVVENMHEAIVTHEEFQKVQEILKLGRKRGSHGIQEYPLKGVVRCAECHRIMTRRTGRKGAVYYLCDKSASDPGASCPREKHFMETDIEQVVLHAIQQMLTLYRQKENQKTALQFTRTGRINACMAELTRLQQLQERYRQEKLTLYESYIAGDCSKERYLKKKAEIDKTVQELDEDVKKQESALAALEEEAHTSENPLRELSRQYRNTPSLTKEMVRGFIQDIYIYPDSQIEIVWKFRDCFADLTDNQTKETEDNYGVDV

SEQ ID NO: 41137 - DNA, 50 bp, Clostridium phoceensis
  source 1..50: mol_type = genomic DNA
tttggttctttgttgacacaaggagatgactgtgtaataatagaaccaac

SEQ ID NO: 41138 - DNA, 40 bp, Clostridium phoceensis
  source 1..40: mol_type = genomic DNA
cgcggccattcttgtcaaagatctctcccgttttggccgg

SEQ ID NO: 41139 - DNA, 50 bp, Clostridium phoceensis
  source 1..50: mol_type = genomic DNA
tttggttctttgttgacacaaggatctgactgtgtaataatagaaccaac

SEQ ID NO: 41140 - DNA, 40 bp, Clostridium phoceensis
  source 1..40: mol_type = genomic DNA
cccggccattcctgtcatatcttcctcacgtttttccccc

SEQ ID NO: 41141 - protein, 478 aa, Enemella evansiae
MVELVSLRKTNEVAAYVRASMDRKGDRWTVETQLRKIRALAEAKDWEVVEVYDDNAVSATKKRRAGTRWAEMLDDARAGRFSMVVAVDMDRLLRSTKDLNTLIDLGLRVVTVDGEIDLSTADGEFRATMLAALARFEARRKAERQIRSNERRRAEGIPASSWKAFGWTREGELIEAEADAVRRAFDAFLGEPSLSIRRIREDLNSAGHLTARGSAFSVDAVRYLLANPLYAGYIKHYASGELYPVQGDAFPPIVGEQTWRAAVAKLEDNVRRSARQGNQPKYLLSTIGLCGKCGATLVSGTNSRKQPTYRCGEQFHLTRQREPVDAMVTEAVLTRLSSVDVHDLVMPQEDDGPDREALLTERNALVERVKELSPLLLDVRQPVLEITEAIRGGKARIDQIDEEILDRSVSVAAKLLGDVDESLGTMERREVVESKWKALDMDRRRMLVDELVTVTIEPIAPGHVKFDPDLIRIEPRRD

SEQ ID NO: 41142 - DNA, 50 bp, Enemella evansiae
  source 1..50: mol_type = genomic DNA
gagtgttgcaaccgcgacatgcgctagcgcatgtcgcggttgcaacactc

SEQ ID NO: 41143 - DNA, 40 bp, Enemella evansiae
  source 1..40: mol_type = genomic DNA
cggggtgatcgacatgcgctatgagaacccgatgtacatg

SEQ ID NO: 41144 - DNA, 50 bp, Enemella evansiae
  source 1..50: mol_type = genomic DNA
gagtgttgcaaccgcgacatgcgcgtgcgcatgtcgcggttgcaacactc

SEQ ID NO: 41145 - DNA, 40 bp, Enemella evansiae
  source 1..40: mol_type = genomic DNA
agtggtgatctacataagggttgagaaactgttgtacctg

SEQ ID NO: 41146 - protein, 510 aa, Myroides odoratimimus
MKIADLYIRVSTDEQADKGYSLRDQEERLRRFCQSNDIQVGKVILEDHSAKSFNRPSWITLMKNLRKRTNQTNLLLFTKWDRFSRNAGDAYQMLSELTKLGVELQAIEQPLDLSIPENKIMLAIYLAAPEVENDRRALNVYHGMRRAKREGRLMGKAPFGYINRSKEDGTKYIAIKELEAKALVWAFEEIAKGLLAANQIRLEMNKFSPRSLSKSAFHVAIRNPLYCGKIFIPKHKDEEAHFVDGLHEALITTELFDKVQEVLDGKVRKELPNTKVLSDANLPLRGFLVCPKCSRNLTGSLSKGRNNSYYYYHCIGSCGFRHSASKANLLFEEGLNQLQLNEAFLTRLKKHLLDTYNKMLKNPIDKKKTLLNEIERLNAQLSTARTKLLSGTLDDDDYLEIKKLNKAELELLETQLMKENSKVKIDINKILNKAIEVVANIGTLYTQADISMKRRIIGSIFPEKVVFDGEVYRTDRINVLIRSILLINNEIAENKNGRNEQKIQFSRLVL

SEQ ID NO: 41147 - DNA, 50 bp, Myroides odoratimimus
  source 1..50: mol_type = genomic DNA
aaaaattcaattctcccgtttagtactcccgaagggacaaatatcgaaca

SEQ ID NO: 41148 - DNA, 40 bp, Myroides odoratimimus
  source 1..40: mol_type = genomic DNA
ttagcttgggattctctgtactcgaggcgggacttgaacc

SEQ ID NO: 41149 - DNA, 50 bp, Myroides odoratimimus
  source 1..50: mol_type = genomic DNA
aaaaattcaattctcccgtttagttgtcccgaagggacaaatatcgaaca

SEQ ID NO: 41150 - DNA, 40 bp, Myroides odoratimimus
  source 1..40: mol_type = genomic DNA
ttagagatggggtctatgttgctgaggctggacttgaacc

SEQ ID NO: 41151 - protein, 513 aa, Streptomyces caniscabiei
MPIAPEYLHLVHQGPFPALLYGRASRDPRKKGRSVGDQLDTGRDLCDAHGWPIVEEFKDIDRSASRHARRARDDFEALIAAIEAKKGRILVAFEASRYYRDIEAYIRLRNACMANDVLLCYDGRVFDLSKREDRKATAQDALQAEDEAEGIRDRVLRSTRAQAKKGLPHGRLLYGYARRYDPDTGDLIEQYPHPEHAPTVLEIFERVAAGETEYSILQDLKKRGERTPGIPWDYYHLPSMLRNIGYKGRRVFQGEDFGEATWPALVPEELFDQVQEIVGDGSRNTVRDYAVKHLLSGIARCGECEDHPHLRVGKSRGYLVYGCSARFDSQMRKDKLDAYVEEGVLAWLASTAAVAAFQSDEQEKRADRARVRMTALQRQLDEAREMAATFKEDGVTPRLSLAALAMQEERLVPQIDAARVEAQAMDAPPLVRRLVGNPAAREIWDEELRIEQRRTVLRAVVNIRLNRARSRGVRTIEPGRVTLTYYGSPEFRAQPRYARGTGPAPVLPGQGTE

SEQ ID NO: 41152 - DNA, 50 bp, Streptomyces caniscabiei
  source 1..50: mol_type = genomic DNA
ccacccctccggtagacattcgcacctgagaaactcgatcagacaggtgt

SEQ ID NO: 41153 - DNA, 40 bp, Streptomyces caniscabiei
  source 1..40: mol_type = genomic DNA
caggatcgtgaagttcgcaccgctgacagcgaggagatgc

SEQ ID NO: 41154 - DNA, 50 bp, Streptomyces caniscabiei; identical to SEQ ID NO: 41152
  source 1..50: mol_type = genomic DNA

SEQ ID NO: 41155 - DNA, 40 bp, Streptomyces caniscabiei
  source 1..40: mol_type = genomic DNA
caggatcatgaatcttccaccactgaaagggaggagatag

SEQ ID NO: 41156 - protein, 483 aa, Rhodococcus opacus
MQSDSRTSQGVRAAIYVRISEDPRGLGQGITRQVEDCEGLAAARGWDVVARYSDNDISALKGKLRPDYDAMMAAAGRGEFDQVVAYGLSRLWRSRQERAAAIDALSDARISVALVRGSDLDLTSAAGRMYAGVLGEFDTAESEIKAERVARAAKQRAERGQANGGCAYGWTRVYERDEQGRVLGWKDVVDEPAAVVVRSIVRDLLAGVTLRAVTARLNEMGSTAPRGGKWVTSSVRKLAIRDLNIGLRRHGKDTYEGAWEPIVDLASHAKVQGLLADPKRRTQKAAARSHLLTFGVGRCGPCGGVLAVSRKGPPDKKTSLYVCRDLGCVGRREDWVDELVVSTVCNRLSKPDARAIFDTTDAALDAARDKVAELRARLDGAADAYAAGQIDTGQLSRISAQIRPALDVAERLVQPPVNVPTAVLDLADAEHTRATWDGLSVSQQRAVLEALRVEVVIEKARGGPGFKPESVSVEWADNPGALL

SEQ ID NO: 41157 - DNA, 50 bp, Rhodococcus opacus
  source 1..50: mol_type = genomic DNA
ttgtccgcccaagtcccccagggaatagcaagtgctcttaaggggtaata

SEQ ID NO: 41158 - DNA, 40 bp, Rhodococcus opacus
  source 1..40: mol_type = genomic DNA
ttgcccacgccgccggggaagagggagtcaccggtgaaga

SEQ ID NO: 41159 - DNA, 50 bp, Rhodococcus opacus
  source 1..50: mol_type = genomic DNA
ttgtccgcccaagtcccccagggacaagcaagtgctcttaaggggtaata

SEQ ID NO: 41160 - DNA, 40 bp, Rhodococcus opacus
  source 1..40: mol_type = genomic DNA
ttacccacgccgtggggcacagagaagtatccggtaaaga

SEQ ID NO: 41161 - protein, 478 aa, Corynebacterium variabile
MVELVSLRKTNEVAAYVRASMDRKGDRWTVETQLRKIRALAEAKDWKVVEVYDDNAVSATKKRRAGTRWAEMLEDARAGKFSMVVAVDMDRLLRSTKDLNTLIDLGLRVVTVDGEIDLSTADGEFRATMLAALARFEARRKAERQIRSNERRRAEGIPTSAWKAFGWTRDGELIEEEAAAVRRAFDAFLGEPSLSIRRIREDLNSAGHFTARGSEFSVDAVRYLLANPLYCGYIKHYASGELYPVQGEAFPPIVGEQTWRAAVAKLEDNVRRSARQGNQPKYLLSTIGLCGKCGATLVSGTNSRKQPTYRCGEQFHLTRQREPVDAMVTEAVLTRLSSVDVHDLVMPQEDDGPDREELLTERNALVDRVKELSPLLRDIHQPVLEITAAINDVKARIDEIDAELLDRSVSAAAKLLADVEEPVGTAERREVVEAKWKVLDVDRRRMLVDELVTVTIEPITPGHVKFDPDLIRIEPRRD

SEQ ID NO: 41162 - DNA, 50 bp, Corynebacterium variabile
  source 1..50: mol_type = genomic DNA
caacgccataactcagacatgcgctagcgcatgtagcggttgcaacaccc

SEQ ID NO: 41163 - DNA, 40 bp, Corynebacterium variabile
  source 1..40: mol_type = genomic DNA
cggcgtcatcgacatccgctacgagaacccgctgcagctc

SEQ ID NO: 41164 - DNA, 50 bp, Corynebacterium variabile
  source 1..50: mol_type = genomic DNA
caacgccataactcagacatgcgcccgcgcatgtagcggttgcaacaccc

SEQ ID NO: 41165 - DNA, 40 bp, Corynebacterium variabile
  source 1..40: mol_type = genomic DNA
ctccgccaaccacagcagccccgagaatccactgaagctc

SEQ ID NO: 41166 - protein, 518 aa, Coprococcus comes
MKKCIGIYLRLSLEDVDKRTNKAKDESNSIAAQRQLIQRHIEQNPYLCNLPQMEFCDDGFSGTNFERPDFQRMIDLIRAGEIHIVIVKDLSRFGRDYLEVGDYLEHIFPFLGVRMISINDHYDSEKYQGNTAGMDIAFRNLIYDYYSKDLSKKVKSAMRTKQRNGGYITCCTYGYKVSPKNKHQMVIDPETAPIVRRIFTDVIAGKSTSQVARELNAEGIPTPQQYKGVARRKDSPSKALWTHNRILDMLKNIKYTGCMVNHTRESMVIRAKSQRRVPKEEWIYHENAHEAIVTMEEFEAAQAALRKVRPHTKKNKENSFPFYCAHCGRKLQRTFGTDVHFYCVTPYWDTDEELCKSVRWDRTDIEEVVLEALKAQIAVMTVEAVSKTQNTISEGTLLRQRLKVLTAELESGDSQKVQSYLDYREGSITKEEFIKLRSEREKRMEELKEQIAETEAEYEDFLKKESQAKQEQAIVEHTSSMNDEALKELMYDAVERINVTDNQSIEIIWKFNDLFATA

SEQ ID NO: 41167 - DNA, 50 bp, Coprococcus comes
  source 1..50: mol_type = genomic DNA
ttttgcacctgattgacacaatcagatgattgagttataataggacaaaa

SEQ ID NO: 41168 - DNA, 40 bp, Coprococcus comes
  source 1..40: mol_type = genomic DNA
aggaattgtccgccggatcgatgatcttggcagaattgtc

SEQ ID NO: 41169 - DNA, 50 bp, Coprococcus comes
  source 1..50: mol_type = genomic DNA
ttttgcacctgattgacacaatcatatgattgagttataataggacaaaa

SEQ ID NO: 41170 - DNA, 40 bp, Coprococcus comes
  source 1..40: mol_type = genomic DNA
atgaatttttcacagaatctagtgttttggcagaattgtc

SEQ ID NO: 41171 - protein, 486 aa, Prochlorothrix hollandica
MKIAYARVSSREQSENSHALEQQIARLESSQVDRVIQDVESGSKNSKSPGFRELMDLVKEGKVAEIVVTRLDRLTRSLSSLQKTMEILKAHGVALVSLDDSIDTSTAAGVFHLNMLGALAEMEVGRLSERVRHGWSHLRDRRVAMNPPFGYRKENDQHVLDTTPFLCLISDRSEWSRAKISRYYIDTFLQERSIRLTLRVVYPHFGIQVYRSRRRGPHATRLIRFSPSAFNEWLTNPVLQGHLSYRRNASGNRKREDPKTWQIIPNTHEPLITAEEAAMIKQILSRNRQAKGFGSPKRRHSVSGLVFCGECRSACYHQSGCQNYARSKRLGIPQIIRRYYQCKNWRSRACPQKAMVSLDIIEEAVIAALISRAEDLAKMADTPAPTPEPLALRELRSQLADLNRMAYNPAIENAKAQIKNQIAGMELDLTHTTQESSRLGQLISALADPDFWKEGLEPNEKSQLFQDLVSQVIIKDGAVLEVKLKV

SEQ ID NO: 41172 - DNA, 50 bp, Prochlorothrix hollandica
  source 1..50: mol_type = genomic DNA
ccattcgtgattgtatggttattgttgaataagttaacaatcgcgaattt

SEQ ID NO: 41173 - DNA, 40 bp, Prochlorothrix hollandica
  source 1..40: mol_type = genomic DNA
tcattgaggggttctatttttgaacgagttaactgagttt

SEQ ID NO: 41174 - DNA, 50 bp, Prochlorothrix hollandica
  source 1..50: mol_type = genomic DNA
ccattcgtgattgtatggttattggtgaataagttaacaatcgcgaattt

SEQ ID NO: 41175 - DNA, 40 bp, Prochlorothrix hollandica
  source 1..40: mol_type = genomic DNA
ttggtgaggggtcctgttagtgagggacttaactgagatt

SEQ ID NO: 41176 - protein, 529 aa, Microbacterium oxydans
MTLTMPMTETGTAPLLTAVTYQRVSTKEQASKGGRDEGFSIPAQRQANARKAEDLGARIVAEFVDAGESARSADRPDLQRMLEYIATHQVTYCIVHKVDRLARNRLDDVEIHRRLVEAGVTLVSATENIDETPSGMLLHGIMSSIAEFYSKNLATEVTKGLTQKFETGGTPMRAPIGYLNVRKRDEQGREYRTVEIDAERAPLVRWVFEQYAAGERTVVDLLADVTARGLTSVPTPKRPSGPVGRSTFFDLLRNPYYIGIVRYKGAEQTGTHEPLVDVETWQQVQRLLDSRKKASERRRTHDHYLKGSLFCGSCGSRMQLDFPANRQGVRYAYYVCSGRASKRKSCTRRAVPVGIAEQLVADCYREIAITEEDYAALAAQVEAAFDERLASRSDELAELTANRQRLQNESDKLLAAHFADAIDLETLKRHQDRIRTGLADIDRRLATEHDQHEGSRKQLSTALSLLVDCATLYARTDDQGKRLANQALTNGIEISEDERATIRLAEPFAALVPEPTSTEVSGSSTSDWV

SEQ ID NO: 41177 - DNA, 50 bp, Microbacterium oxydans
  source 1..50: mol_type = genomic DNA
agcggttctagtacgtccgattgggtggacgcgggtggacttaaaccgaa

SEQ ID NO: 41178 - DNA, 40 bp, Microbacterium oxydans
  source 1..40: mol_type = genomic DNA
ccaggggcttcttcatcctgtggagcctaggagattcgaa

SEQ ID NO: 41179 - DNA, 50 bp, Microbacterium oxydans
  source 1..50: mol_type = genomic DNA
agcggttctagtacgtccgattggggggacgcgggtggacttaaaccgaa

SEQ ID NO: 41180 - DNA, 40 bp, Microbacterium oxydans
  source 1..40: mol_type = genomic DNA
ccaggggcttgtgcaaactgggaagccaagcagttttgag

SEQ ID NO: 41181 - protein, 529 aa, Microbacterium oxydans
MTLTMPIHDTDTSPLLTAVTYQRVSTKEQATKGGRDEGFSIPAQRQANARKAEDLGARIVAEFVDAGESARSADRPDLQRMLEYIATHQVTYCIVHKVDRLARNRLDDVEIHRRLVEAGVTLVSATENIDETPSGMLLHGIMSSIAEFYSKNLASEVSKGLNQKFETGGTPMRAPVGYLNVRKRDEQGREYRTVEIDAERAPLVRWVFEQYATGEHTVVSLLAEATARGLTTVPTPKRPSGPVGRSTFFSMLRNPYYIGIVRYKGAEQSGTHEPLVDVETWQQVQRLLDSRKIAAERRRTHDHYLKGSLFCGQCGSRMQLDYPANKQGVRYAYYVCSGRASKRKNCTRRAVPVGIAEQLVADCYRDISITEEQYAALAAQVETAFDERLASRSQELADLTENRKRLQNESDKLLAAHFADAIDLDTLKRHQDRIRAGLADIDRRLASEHDQHEGSRKHLSTALSLLVDCATLYARADDQGKRLANQALTNGIEISEDERATIKLAEPFAALAPTPASTDVRCSSTSEIV

SEQ ID NO: 41182 - DNA, 50 bp, Microbacterium oxydans
  source 1..50: mol_type = genomic DNA
aggtgttctagtacgtctgaaattgtggacgcgggtggactcaaaccgaa

SEQ ID NO: 41183 - DNA, 40 bp, Microbacterium oxydans; identical to SEQ ID NO: 41178
  source 1..40: mol_type = genomic DNA

SEQ ID NO: 41184 - DNA, 50 bp, Microbacterium oxydans
  source 1..50: mol_type = genomic DNA
aggtgttctagtacgtctgaaattggggacgcgggtggactcaaaccgaa

SEQ ID NO: 41185 - DNA, 40 bp, Microbacterium oxydans; identical to SEQ ID NO: 41180
  source 1..40: mol_type = genomic DNA

SEQ ID NO: 41186 - protein, 507 aa, Bacillus atrophaeus
MFFQENETQEIISYEEYPYAVYARVSSEKDEQVTSIANQIDICHHWIEKNNYEWKDEAIQLDDGISGTVLLDRKAMQLILDKAQKRKLKMVVFKSISRLARDLKDALEIREVLLAHGVRVVTLEEGYDSLYEGKNSMKFEMFSMFAAQYPQTISVAASGALAAKARRGEHSGRVPFGFKKEGKFLAINEEEAKVVRFIFDLHNNHGYGHKRIVLKLNEELALGNIVKPKKTEFWQLSTVQTILKNPIYCGVFIANRHTQVKIGGRKKFIRNPKEKWTVYKDWCPKIISEEEYEKANNKEHKMRKKRFNPRNELRGMMKCGVCGCNMVVLPSYKYNQKREKKEFNYLKCSAYRRGGTALCVNHAPMQYKDLRAFVIKTLKQKGKKLKLDVKSDFEEQKKNRIKRTKIEIENAENKKKRLIELYLEDQLITKAEFQVKRKELEEQIEKLNDKLFMLEREEEETIDISNIKNAFAQLERTDQDLFGAFSALIDKLVVYEDGTVDFHYKFK

SEQ ID NO: 41187 - DNA, 50 bp, Bacillus atrophaeus
  source 1..50: mol_type = genomic DNA
agtttgcgatagatatgcatatcaaatggtatgcatatcggtcgcaaact

SEQ ID NO: 41188 - DNA, 40 bp, Bacillus atrophaeus
  source 1..40: mol_type = genomic DNA
cgttcgtaaccatatttcaaatgccatgcagaaattgggt

SEQ ID NO: 41189 - DNA, 50 bp, Bacillus atrophaeus
  source 1..50: mol_type = genomic DNA
agtttgcgatagatatgcatatcacctggtatgcatatcggtcgcaaact

SEQ ID NO: 41190 - DNA, 40 bp, Bacillus atrophaeus
  source 1..40: mol_type = genomic DNA
cgatactttcaatttttcacctgccatgcagaaaaggggc

SEQ ID NO: 41191 - protein, 544 aa, Streptomyces platensis
MATSSKWHMHPDLKRALAEGKTVEDWLQGRTPCCSYARITQDRREEIGVARQHANSEEFAAKHNCAIVYRYTDNNITAADPDIERPAFLRLVRDLRARRTEEGITLCGLFVVEEERVARLPEDYLKLHRALTVDDSGVYGVSDTNTVLDVHGDSEILRGLLTSAMGEKEVRRVKRRVTRNMRDQALEGNPMGRRRFGWKGADKKLNRPTNKYLDPEESKVLREAVDLALKGKSWATIVRHFEESGLTPVRGGKWATTPVQYMLTNPALCGYRMLHGELILDRESGDPKAGNWETVCTPEEWHKLIGRCSTWFNLDGSETAYTRYRQKVKTEGKKNYRELAEATRRFLLTNILRCGYVDEEGNLCGAKMKGMGPSGTNKHDRYRCADTKCSRVSRRADLVDKAIEIVVIKVLTDQYSAVEPDDKQWYGEESLAKLRARQQEIKESYKAGIFSLAEYLEFKDANDAQISESESDRKKFYAEQSAQNFLSGFSEDKWHEDYDMRQKRKAVATVLSAVIVHPLPKGRARSAQFDPELLEPIFKAKSTE

SEQ ID NO: 41192 - DNA, 50 bp, Streptomyces platensis
  source 1..50: mol_type = genomic DNA
caagtaccttgactcaagtaccagactcagtactgttgcttaggtacttg

SEQ ID NO: 41193 - DNA, 40 bp, Streptomyces platensis
  source 1..40: mol_type = genomic DNA
gaacgggaccatgtaactgacgccggtcatcagccacttg

SEQ ID NO: 41194 - DNA, 50 bp, Streptomyces platensis
  source 1..50: mol_type = genomic DNA
caagtaccttgactcaagtaccagcatcagtactgttgcttaggtacttg

SEQ ID NO: 41195 - DNA, 40 bp, Streptomyces platensis
  source 1..40: mol_type = genomic DNA
ggatgggcccaggtgactgcagctgcccctcagcctcttg

SEQ ID NO: 41196 - protein, 511 aa, Burkholderia pseudomallei
MLLDNSLSLRDEGLSAYHQRHVTQGALGVFLRAVEDGRIPAGSVLIVEGLDRLSRAEPIQAQAQLAQIINAGITVVTASDGREYNRARLKAQPMDLVYSLLVMIRAHEESDTKSKRVKAAIRRQCQGWIAGTWRQPVRVGKDPQWIREVANQFELIPERAAAIRLIVAMYKQGHGAVRIVRELSERGLAVSDTGRTSSAHIYKILANRMLIGEKTVELDGEEYRLEGYYPAVISSAEFAELRHFAEQRFRRKGKGEIPGVVTGLGLTYCGYCGTAVTAQNIMGRRRDTERRPQPGHRRLSCFAYRTGSGCPVSGSVSVAPIERALMHYCSDQINLSRLLEGDSNSAGLSAHLAQTRQRVINIEAQIQRVTDVLLSEVDAPPAAVLRRIRELEAQLQRDRNEISSLEDRLAAESSAMPAVAQAWAELVEGVEELNYDARMQARQLVADTFSRIVVYHRGFTPRANSNTIGLLLVGKRGVTRLIKIDRKTGKWKAAEEIRIRGMVANELPLPS

SEQ ID NO: 41197 - DNA, 50 bp, Burkholderia pseudomallei
  source 1..50: mol_type = genomic DNA
ggtttatttaccctatccttcgggcacccgagggatactatacctatact

SEQ ID NO: 41198 - DNA, 40 bp, Burkholderia pseudomallei
  source 1..40: mol_type = genomic DNA
gtcgacgagggccttcgggcacccgagcgaaaccatacct

SEQ ID NO: 41199 - DNA, 50 bp, Burkholderia pseudomallei
  source 1..50: mol_type = genomic DNA
ggtttatttaccctatccttcggggtcccgagggatactatacctatact

SEQ ID NO: 41200 - DNA, 40 bp, Burkholderia pseudomallei
  source 1..40: mol_type = genomic DNA
gggcacgagggccgcgggggtcccgggcgcagtcatacct

SEQ ID NO: 41201 - protein, 456 aa, Rhodococcus aetherivorans
MVHAAIYARISQDAAGRGLGVERQREDCEALANQLGWDVVAIYEDNDISAYSGKARPGYEALLGAIERGDVNALVVFHADRLHRSPVELERFIALAQAKSLEIRTVQSGAIDLTTSAGRMVARVLGSVARQESEHASERRKRANLQKAQAGEWVSSRRTFGYTQSGEPFEPEASAVASAVRDVLAGKPIRQVVREWNDLGLRSTSGNAWNSTTVRRVLLNPKYAALRVHQGKIIGPGRWEALVTEDEHRGIVAVLNDPERWRYAKGFARKFQGTGVYLCGVCGESVVLHRPTRGGRAYKCPQNHVRRQGEALDEYISDLVIERLSRPDAIELLNDRPDVHTLHARRDVVQARLNELARQFAAGTIDGAQLASGSAELRKSADSIDAQIVAARIADPLADLVLAGAQIREVWGQAPADVRGRVIDSLMRVVILRSPKGLRRFDPSTIQIDWKQHGAD

SEQ ID NO: 41202 - DNA, 50 bp, Rhodococcus aetherivorans
  source 1..50: mol_type = genomic DNA
aggtgcacgtagtcaacattcctcggagtgatttgtcaaccgatgcgctc

SEQ ID NO: 41203 - DNA, 40 bp, Rhodococcus aetherivorans
  source 1..40: mol_type = genomic DNA
gggcggcgcaaccttcctcgggctcgagtcggccgcgcac

SEQ ID NO: 41204 - DNA, 50 bp, Rhodococcus aetherivorans
  source 1..50: mol_type = genomic DNA
aggtgcacgtagtcaacattcctcgaagtgatttgtcaaccgatgcgctc

SEQ ID NO: 41205 - DNA, 40 bp, Rhodococcus aetherivorans
  source 1..40: mol_type = genomic DNA
ggtcagcacaagcatccaggagctcgggtcggcggtgcac

SEQ ID NO: 41206 - protein, 475 aa, Streptomyces sp CMB-StM0423
MAKPQRVGIYVRISKDAKGQELGIKRQEKACRELCKQRGWPVLKVYPENDTSASTTSRRKRPEYARMMKDARAGVIDAVVVYSIDRLTRRLSELTAFLDEQKAHGFQFATTEGEDTSTANGRMILSIKGAVAQGETERMAERVNAALRQRREQGKPHAGGPRVFGFEEGSNFQRLVPEEVELIREGYRMLMTRKTTGDVARLWNERGARTSGTGTAWTIQKVKRVYRSERVGGIVTHQGQEVGDSTYPHPLTRREWENVQTVLDERSTPAHRGAGRRKHLYRGFLRCGHCGSVMSVQWMTLNGKRRRRAFCNSSQIVKETGEPGCGKVYRAYDWIEARLDEVVEAALLKRRPKPRPRPVDDDLSNEIERQERRVRDLRQRWKDGQMEDEDYYDSLGHLRETLRQLRAREAAATVAESREEVDALTVWRDDRPENLERRRTIAAGVIERVDVFSVGRGRRKPPELDSIQITPHGAA

SEQ ID NO: 41207 - DNA, 50 bp, Streptomyces sp CMB-StM0423
  source 1..50: mol_type = genomic DNA
gtgcatactgattgtccagcgacgttcgcagccggacctcatgtaggtat

SEQ ID NO: 41208 - DNA, 40 bp, Streptomyces sp CMB-StM0423
  source 1..40: mol_type = genomic DNA
caccgcctgccccgcgacgttcgtcgcggtgcgggccatg

SEQ ID NO: 41209 - DNA, 50 bp, Streptomyces sp CMB-StM0423
  source 1..50: mol_type = genomic DNA
gtgcatactgattgtccagcgacgcgcgcagccggacctcatgtaggtat

SEQ ID NO: 41210 - DNA, 40 bp, Streptomyces sp CMB-StM0423
  source 1..40: mol_type = genomic DNA
agccgcccgccccgccccgcgcgccgcggtgcgccccgag

SEQ ID NO: 41211 - protein, 554 aa, Intestinimonas butyriciproducens; identical to SEQ ID NO: 37026

SEQ ID NO: 41212 - DNA, 50 bp, Intestinimonas butyriciproducens; identical to SEQ ID NO: 37027
  source 1..50: mol_type = genomic DNA

SEQ ID NO: 41213 - DNA, 40 bp, Intestinimonas butyriciproducens
  source 1..40: mol_type = genomic DNA
gctttcccatgatataaaacagctcgtcgcaagcgttatg

SEQ ID NO: 41214 - DNA, 50 bp, Intestinimonas butyriciproducens; identical to SEQ ID NO: 37027
  source 1..50: mol_type = genomic DNA

SEQ ID NO: 41215 - DNA, 40 bp, Intestinimonas butyriciproducens
  source 1..40: mol_type = genomic DNA
gcattcccaggacttaatacagcgcctagcaagcattatt

SEQ ID NO: 41216 - protein, 477 aa, Mycolicibacterium fortuitum
MRAAIYARISADIDGNSVGVDRQMAACQELAKKAKHRVTETFTDNDISAYSGKVRPGFEKLLAAMSRSEFDVLIVWHVDRLYRSMKDLERIIDAAESGAVQIQTVESGNIDLSTAAGKMVARILGSVARQESEHHAERRREANKDRALEGQWRAEGSRPFGYTNVGTPLEPEASMIRLAASEILGGKSLHAVAREWNASGVTTVRGARWTNLHVRRVLTNARVAGLRVHRGEIVGTGKWESLIPETTWRGLVAFLSSPERKNAVSFERRYLLSGVARCGVCKKPLYAAYPHGRDRAMIYVCKAGSHVGRNGADLDEFIERTVIAYLGSEGVGRDLRNAENNVDIAELRQKRDALVATKDQLATLLRKGILDMAAVERESAVLTADIEAVNRQMADAVEIHPVAALLATDGEEPADLDGAKLIERWKAATPDRKGKIIKALMVIEVNPTKRGERVFDPDSVDVDWVLHSRMPASVSAG

SEQ ID NO: 41217 - DNA, 50 bp, Mycolicibacterium fortuitum
  source 1..50: mol_type = genomic DNA
ggtgaccaaaactcaccaccgttcgtctaaagagtagcagtttggtaacc

SEQ ID NO: 41218 - DNA, 40 bp, Mycolicibacterium fortuitum
  source 1..40: mol_type = genomic DNA
cgtgccgaagtggttctacgtctacaaccacctgcacacc

SEQ ID NO: 41219 - DNA, 50 bp, Mycolicibacterium fortuitum
  source 1..50: mol_type = genomic DNA
ggtgaccaaaactcaccaccgttcccctaaagagtagcagtttggtaacc

SEQ ID NO: 41220 - DNA, 40 bp, Mycolicibacterium fortuitum
  source 1..40: mol_type = genomic DNA
cgtgccgaggtagttctctccctacaccctgcacctcacc

SEQ ID NO: 41221 - protein, 443 aa, Mycolicibacterium fortuitum
MRVAIYARISLDSTGEEHGVDRQLDDCLARATELGATSTTEYVDNDVSAFSGAIRPNFEKLLTHLEQGRYDYLIAAHPDRLYRRLTDLGRVIEAAQNVKIVTIAAGDIDLSTASGRLNANILASVAQAESERHAERRMTANKARRSAGAWRKEGSRPFGFNPDGSHREPEATMIAEATRDILSGVSVHAIARRWNETGVTTVRGKRWTNLHVRRVLSNARIAALVVHKGEVVGPGSWEPIVDETLWRALQALFSTRANTMAFERTHLLSGVALCGICGQPLYGRYAHGKERTPTYVCRSSHVARSVPPLDKMIETLVVHHLTEQGVERDLSARDSDVSDLEERRAALTATRASLAGLLRKGLLTEEDVTADAMAIQRELDEIDQQIADRRPALVLLDGELLDRWESGTVETRAAIVDRLLYIVVHPSGPTRTFDAALVWHRWR

SEQ ID NO: 41222 - DNA, 50 bp, Mycolicibacterium fortuitum
  source 1..50: mol_type = genomic DNA
cggttatcagggtcgataaccttcacgaacaatgtagaccaagataaccg

SEQ ID NO: 41223 - DNA, 40 bp, Mycolicibacterium fortuitum
  source 1..40: mol_type = genomic DNA
ggtgtgcaggtggttgtagacgtagaaccacttcggcacg

SEQ ID NO: 41224 - DNA, 50 bp, Mycolicibacterium fortuitum
  source 1..50: mol_type = genomic DNA
cggttatcagggtcgataaccttcgggaacaatgtagaccaagataaccg

SEQ ID NO: 41225 - DNA, 40 bp, Mycolicibacterium fortuitum
  source 1..40: mol_type = genomic DNA
ggtgaggtgcagggtgtagggagagaactacctcggcacg

SEQ ID NO: 41226 - protein, 443 aa, Mycolicibacterium fortuitum
MRVAIYARISLDSTGEEHGVDRQLDDCLARATELGATSTTEYVDNDVSAFSGAIRPNFEKLLTHLEQGRYDYLIAAHPDRLYRRLTDLGRVIEAAQNVKIVTIAAGDIDLSTASGRLNANILASVAQAESERHAERRMTANKARRSAGAWRKEGSRPFGFNPDGSHREPEATMIAEATRDILSGVSVHAIARRWNETGVTTVRGKRWTNLHVRRVLSNARIAALVVHKGEVVGPGSWEPIVDETLWRALQALFSTRANTMAFERTHLLSGVALCGICGQPLYGRYAHGKERTPTYVCRSSHVARSVPPLDKMIETLVVHHLTQQGVERDLSARDSDVSDLEERRAALTATRASLAGLLRKGLLTEEDVTADAMAIQRELDEIDQQIADRRPALVLLDGELLDRWESGTVETRAAIVDRLLYIVVHPSGPTRTFDAALVWHRWR

SEQ ID NO: 41227 - DNA, 50 bp, Mycolicibacterium fortuitum; identical to SEQ ID NO: 41222
  source 1..50: mol_type = genomic DNA

SEQ ID NO: 41228 - DNA, 40 bp, Mycolicibacterium fortuitum; identical to SEQ ID NO: 41223
  source 1..40: mol_type = genomic DNA

SEQ ID NO: 41229 - DNA, 50 bp, Mycolicibacterium fortuitum; identical to SEQ ID NO: 41224
  source 1..50: mol_type = genomic DNA

SEQ ID NO: 41230 - DNA, 40 bp, Mycolicibacterium fortuitum; identical to SEQ ID NO: 41225
  source 1..40: mol_type = genomic DNA

SEQ ID NO: 41231 - protein, 467 aa, Mycolicibacterium fortuitum
MRAAVYLRQSQDRTGEQLGIDRQREDCRRLIAARGWTVASEFVDNDVSALSRKPRPQFIEMMSRVDAGEFDVIVARHMDRLLRRLSELENVIERCQARSTTIVTAADGIDTGTDGGRTVARIMASIAQGEVERKAARHRSAAVQAAQQGRRTGGGRPFGYDSDGMTIRPGEAELVRQGYSDFLAGESFGEIARRWASTGQRTPLGNEWTRYAVREVLLNPRYCGLRRHVPNGQIAEARKNPELFIVGQAQWPAIVDEPTWRAVAHIMASDDRRRAPIAAKGLLTGVGLCGVCGETVQRSGASVAAPQYRCRSRQHVTRRAEPVDEYVSMVTVARLTAPDAGALWTADAPDAGELMAEGDVLRRRRDDLAELVADGAMTPAQFRAANERVLSRLAEVESRIAAIGQSSPLAIVAENDVQASWDGLSIARQRSIIDALMVPVLHLPGRGTRTFRPETVEIRWKTDAAAE

SEQ ID NO: 41232 - DNA, 50 bp, Mycolicibacterium fortuitum
  source 1..50: mol_type = genomic DNA
ttatgtgaatgtgtggggtttgcggtagcaaccctcacggcgtaacgtaa

SEQ ID NO: 41233 - DNA, 40 bp, Mycolicibacterium fortuitum
  source 1..40: mol_type = genomic DNA
gtgaggcagtatcgagggcgtgacactgatactgctgtac

SEQ ID NO: 41234 - DNA, 50 bp, Mycolicibacterium fortuitum
  source 1..50: mol_type = genomic DNA
ttatgtgaatgtgtggggtttgcgtcagcaaccctcacggcgtaacgtaa

SEQ ID NO: 41235 - DNA, 40 bp, Mycolicibacterium fortuitum
  source 1..40: mol_type = genomic DNA
gtgaggcactatagctagctcaaaactgattttgctgaac

SEQ ID NO: 41236 - protein, 522 aa, Eubacterium rectale
MIESKSRVAIYCRLSEEDRNKQSETDDSNSIQNQKSMLLQYSLEHGWEVYNIYSDDDYTGSDRRRPEFNRLLEDAKNRKFDIVLCKTQSRFTRELELVEKYIHGLFPIWGIRFISIVDNADTANKGNKKSRQINGLVNEWYLEDMSENIKSVLTDRRKNGHHIGAFALYGYKKDPDVKGHLIIDEEAAEVVREVFTLFSQGYGKTAIARMLNDRGIPNPTEYKRLHGLRYKQPKTKNSTLWKYFAISDMLVNEIYIGNMVQGKYGSVSYKTKQNKPRPKDEWYRVEGTHEPIIDRELWDRVQALVAQKAKPFTVGTIGLFARKARCMNCGYTMRSSKNRGKHYLQCSNRHVAKDACIGSFISVDKLEKAVIDELNKLSAEYLDKDELEQNVQFNNDLRGQKEALETEIAAYQKKIAEYIKGIRELYLDKVKGILSELDYLDLSKDFSTQKERLEKLVIDTQKQLDVIERKMLIGDNRRQLIEQYTNLEHLDRETVEKLIDYVLVGKKDPVTKEVPIEIHWNF

SEQ ID NO: 41237 - DNA, 50 bp, Eubacterium rectale; identical to SEQ ID NO: 12237
  source 1..50: mol_type = genomic DNA

SEQ ID NO: 41238 - DNA, 40 bp, Eubacterium rectale
  source 1..40: mol_type = genomic DNA
caaggtagatgcagctccctctcctgctaaatattccttc

SEQ ID NO: 41239 - DNA, 50 bp, Eubacterium rectale; identical to SEQ ID NO: 36579
  source 1..50: mol_type = genomic DNA

SEQ ID NO: 41240 - DNA, 40 bp, Eubacterium rectale
  source 1..40: mol_type = genomic DNA
catagcagctgcaccacctggtcttgctaaatacaccttc

SEQ ID NO: 41241 - protein, 478 aa, Streptococcus equi
MTKIALYLRLSVDEAETDESNSITNQRHLLNHYLDQTPEFKNWERLEFVDDGFSGTSLNRPSFQRLMAAVKVGTIRHILVKDLSRFMRDYLELGNYLENIFPFLGVRFIALNDHYDSLTSEQNGLDIDVPFRNLLNDFYAKDVSEKVKSAMNSMKRSGKNMSWLPPFGYLKDPEDRFKIIIDETVAPIVRRIFALYLDGNSYQTIARLLNEEQVITPAERKMQISQTRYAKSLRLTTEQKRNVWSSNTVGQILKNEAYKGTYLFNTRTYVRGKHVFRPKSEWERIENNHEAIISSELFEQVVQLKGSKATKRKQHQIPKTSSVLTGLIRCEHCDHSLIGHYNHQGYQYFSCRYCKGQGEKMKSCRVDRIEQAIKGKLGDEAVKPHQKVSKTLVLRKIERLKTEKLACFQDYKDNLLTREDYIAKKKEMDKSVQALEEQLKEASYVQLPTDKRLSKEIVVAHVDKVVVDCLGFFTVIYK

SEQ ID NO: 41242 - DNA, 50 bp, Streptococcus equi; identical to SEQ ID NO: 35397
  source 1..50: mol_type = genomic DNA

SEQ ID NO: 41243 - DNA, 40 bp, Streptococcus equi
  source 1..40: mol_type = genomic DNA
tggctggattcaaccgggtggcaaggttaacacctcagaa

SEQ ID NO: 41244 - DNA, 50 bp, Streptococcus equi
  source 1..50: mol_type = genomic DNA
agtgtcagttacttgacataagaggtggattgtgtcataataatgacagg

SEQ ID NO: 41245 - DNA, 40 bp, Streptococcus equi
  source 1..40: mol_type = genomic DNA
tggttgaatccaacctagtgtgatggttaagagctcagat

SEQ ID NO: 41246 - protein, 644 aa, Enterobacter cloacae; identical to SEQ ID NO: 17871

SEQ ID NO: 41247 - DNA, 50 bp, Enterobacter cloacae; identical to SEQ ID NO: 37572
  source 1..50: mol_type = genomic DNA

SEQ ID NO: 41248 - DNA, 40 bp, Enterobacter cloacae
  source 1..40: mol_type = genomic DNA
tattcatggcatgccgtcctttcgttttttagcacaggat

SEQ ID NO: 41249 - DNA, 50 bp, Enterobacter cloacae
  source 1..50: mol_type = genomic DNA
tcctattgatgatcgtatgcgtccgtttgtataatctgggaacatttgcg

SEQ ID NO: 41250 - DNA, 40 bp, Enterobacter cloacae
  source 1..40: mol_type = genomic DNA
gcttcattgctttccgtctgttagtttttgggcacatgat

SEQ ID NO: 41251 - protein, 644 aa, Enterobacter cloacae; identical to SEQ ID NO: 36841

SEQ ID NO: 41252 - DNA, 50 bp, Enterobacter cloacae; identical to SEQ ID NO: 37572
  source 1..50: mol_type = genomic DNA

SEQ ID NO: 41253 - DNA, 40 bp, Enterobacter cloacae; identical to SEQ ID NO: 41248
  source 1..40: mol_type = genomic DNA

SEQ ID NO: 41254 - DNA, 50 bp, Enterobacter cloacae; identical to SEQ ID NO: 41249
  source 1..50: mol_type = genomic DNA

SEQ ID NO: 41255 - DNA, 40 bp, Enterobacter cloacae; identical to SEQ ID NO: 41250
  source 1..40: mol_type = genomic DNA

SEQ ID NO: 41256 - protein, 644 aa, Enterobacter kobei; identical to SEQ ID NO: 36831

SEQ ID NO: 41257 - DNA, 50 bp, Enterobacter kobei; identical to SEQ ID NO: 37572
  source 1..50: mol_type = genomic DNA

SEQ ID NO: 41258 - DNA, 40 bp, Enterobacter kobei; identical to SEQ ID NO: 41248
  source 1..40: mol_type = genomic DNA

SEQ ID NO: 41259 - DNA, 50 bp, Enterobacter kobei; identical to SEQ ID NO: 41249
  source 1..50: mol_type = genomic DNA

SEQ ID NO: 41260 - DNA, 40 bp, Enterobacter kobei; identical to SEQ ID NO: 41250
  source 1..40: mol_type = genomic DNA

SEQ ID NO: 41261 - protein, 572 aa, Streptomyces chartreusis
MIDTRNSARQSKTFSRSYVAPELQEHLDEGGTVEDWLAGRTPIASMARISADRLKGDAIGVGRQHRNNARNAALHNCAVVVCYEDNNITASKREVVRPAFVQMIKDITHGYEEETRIPLKGCIAVERERVWRLPRDFIALQDALVLNGTGTFIEDKTYLNLVDDDGTIIAGLVTSGTGEAEVRKIRKRTTRNSKDRAEEGAVPGGPRRFGWLGSEKREGRLGNEKKDPAEWPYLIQMIKKRADGRSWRHITGWINRERDKDGNPIFTARGGKWSEQGVKGAVTNPAWWGGRILDGEIVTDPDTGEPRLGKWEYADPEVDKVDYSTWKQIMAGVYANRLHRGMVKPPTEGETTRVGKYLFSGPLRCGRINDMSEVCYSKLSGNKATGKNAKYGDYYRCGDPNCKGVGRRVAPVDKYLTELLLAYLDKHFSGTKPKTIPWRGKEKLDGLVSQRKKIKESVADGEADWSDVHDMLTNLNRNIKTLQKEERDHLQAQSKANLLRGWSRKKWTKMELDEKKEVISLVLASVVVLPVPEERSDKAPFDPNLLQVSWRKKKQATAEDQGQESPPEPAAA

SEQ ID NO: 41262 - DNA, 50 bp, Streptomyces chartreusis
  source 1..50: mol_type = genomic DNA
cactgtggtcaacgttcatacgacgaatcgtagcatcgttaaccacggtg

SEQ ID NO: 41263 - DNA, 40 bp, Streptomyces chartreusis
  source 1..40: mol_type = genomic DNA
ccaccggccgaaatacgacgactggtcccacccgaaaggc

SEQ ID NO: 41264 - DNA, 50 bp, Streptomyces chartreusis
  source 1..50: mol_type = genomic DNA
cactgtggtcaacgttcatacgacagatcgtagcatcgttaaccacggtg

SEQ ID NO: 41265 - DNA, 40 bp, Streptomyces chartreusis
  source 1..40: mol_type = genomic DNA
ctaccggcagcaatacatcagatggacccatctgaaatgc

SEQ ID NO: 41266 - protein, 540 aa, Vibrio lentus
MPLNLQDRPAISYARYSSQGQDNNDSLRRQAEIFAKAVVETGALATDIQLVDEAKSGFKGEHIKAGSLGAFIEQLETMIFTQRPVLFIEKWDRLGRQKNSITQDVLNKLLKHVDVYDCSDGQLVTQSTENDLGASIMLLVKIHAAWQYSKNLSDRIRAAKESQFKQSMKEGALVPHGGYPRWLVVKDKKATLIPERASSIKKVFELYLSGMTLGAISKYLNTNNHLHWNRAGEDSYGSWNSCKLSQLIRQPSLYGSHVSRTWKTNGERFEEYSGWNAGGIEIKNAYPAVVSEEMYNLAQSIREQTKTNMPFNKSKSRSSTRSDGRNIYPVSTCSMCGSNYVLKMNKRKGKSYPEFLCTNKKAGGKCDSSSLSYVLAEQMLLNLVFKDLNIKKLFEKKSADSKGEKLQAQLQALSIELKELQDRVKMNSLNNKRTSATILIAIDDLEQQIEELKKQRVTTNEDYKFLRKQWRDLCSAESHIRVRALRFMETIIDSIEITSIKRGTKLVRVHLQQDRVIMATSNGRLRQGEYHIHFIDGTFK

SEQ ID NO: 41267 - DNA, 50 bp, Vibrio lentus
  source 1..50: mol_type = genomic DNA
acgtactttacattactacgcttttgcgttaatttgtgaaatacgtaatg

SEQ ID NO: 41268 - DNA, 40 bp, Vibrio lentus
  source 1..40: mol_type = genomic DNA
tacgaccacgctgcattttagcattcgttaggcgatattc

SEQ ID NO: 41269 - DNA, 50 bp, Vibrio lentus
  source 1..50: mol_type = genomic DNA
acgtactttacattactacgctttttcgttaatttgtgaaatacgtaatg

SEQ ID NO: 41270 - DNA, 40 bp, Vibrio lentus
  source 1..40: mol_type = genomic DNA
taactccctgctccattttttcattagataggagagattc

SEQ ID NO: 41271 - protein, 510 aa, Chryseobacterium carnipullorum
MKKADLYIRVSTDEQADKGYSQRDQEERLRRYCENNSIVVGQVIYEDYSAKTFNRPEWLKLLDTLKKKSSKTNLLLFTKWDRFSRNAGDAYQMINILKKLNVDPQAIEQPLDLSIPENKMMLAIYLAAPEVENDRRALNTYYGMRRARKEGRLMGRAPYGYVNKITENGKKYVTQKEPEASNMKWAFNEMAKGVYSASQIMDMMNRREGKTVKVSSFLAGLRNTAYCGKIYVEQYNDEEAHYVPSIHEPLISEELFEKVQNIMNGNANLARPNVKVLSDDNLPLRGFLLCPECGHLITGSASTGHSKKYYYYHCQSPCGYRYRAEIINNKFLELLQALEMRESIKKYLRKVLKQNFEKFIDNPQHQRKKILMEIDGLNNRLKSARNKLLEEIIDNEDYLEIKTDCKDKIEKLESNLTKVKDKNKIDFPKLLDRALSNVVDLAKAYSSGDITLKRQIISSIFPEKLEFFENHYRTIRPNVLLTYIYQINNELCAKKNRKNSELSPLSGLVP

SEQ ID NO: 41272 - DNA, 50 bp, Chryseobacterium carnipullorum
  source 1..50: mol_type = genomic DNA
attatcacctctttccggtcttgtacccataaccgaagagttatcgaaat

SEQ ID NO: 41273 - DNA, 40 bp, Chryseobacterium carnipullorum
  source 1..40: mol_type = genomic DNA
gatttcagaggattttagtacccagtaccagaatcgaact

SEQ ID NO: 41274 - DNA, 50 bp, Chryseobacterium carnipullorum
  source 1..50: mol_type = genomic DNA
attatcacctctttccggtcttgttgccataaccgaagagttatcgaaat

SEQ ID NO: 41275 - DNA, 40 bp, Chryseobacterium carnipullorum
  source 1..40: mol_type = genomic DNA
ggtctgctgggtttttagttgcaagtaccagaaaccaact

SEQ ID NO: 41276 - protein, 477 aa, Finegoldia magna
MKTAVAYVRFSSAGQREESIQAQKRAIDAYCIQNNIKLIKTYEDHAKSATTDNRPQFLKLIKESRYKEYDYVIVHKLDRFARNRYDSASYKLKLKKNGKQLLSVLENIDGSPESIIMESVLEGMAEYYSANLSREVKKGIDENMRNYKFIGGNVPYGYDIVDGQYTINEQEAKGVQKIFEMYLLHYTYADIMKYLNTNGFRTKTGNKFANNSVIYSILKRRLYKGDYVKNLGKEREFIAENVIDPIIDSKTFEEVQEIMKVKQIRSSKKSDYDYLLSGIIYHKCEDGTIHKMIGSSGRGKGGRKYYYYKCKHCNTWERADRLEKQICEFLTDVIFYKNNIEQFIQATYQSINDFTEDNNEKEVLENKIKEITKEIDQYSKAIAKGLISDQIIEKVNSLEQQKQELKFNLSKISDKERVTLDEVREYFYVNKTNLFKDRKHQKKVIQTLIKKIVASNTQVNVELSTLKACSLTTFSGR

SEQ ID NO: 41277 - DNA, 50 bp, Finegoldia magna
  source 1..50: mol_type = genomic DNA
tgttcgcttactacttttagtggcagggtactaaaaacatcaaacgaaca

SEQ ID NO: 41278 - DNA, 40 bp, Finegoldia magna
  source 1..40: mol_type = genomic DNA
aagcatgctttgttgtggcaggggatagaggacttgaacc

SEQ ID NO: 41279 - DNA, 50 bp, Finegoldia magna
  source 1..50: mol_type = genomic DNA
tgttcgcttactacttttagtggcatggtactaaaaacatcaaacgaaca

SEQ ID NO: 41280 - DNA, 40 bp, Finegoldia magna
  source 1..40: mol_type = genomic DNA
aatattgctgtgatggggcatgaaatagaggacgggaacc

SEQ ID NO: 41281 - protein, 567 aa, Sphingobium yanoikuyae
MQKAIIYIRFSTLEQREGVSLDRQKERCLEMCEANGWDVETILVDEGKSAFAGKHRDAGAAFGDFEAAARHGIHAGKVLVVERLSRLSRLDYNETYDLMRVLNKNGVTVGCWDGGRIYKANEPIEFVSVIELLVKAKTANEESQTKSDFGKDKWARRRADAASGKVATSNGPAWLQLDANRKWVVIEDRAQVVRQIFEWADQGDGSLRISRRLNEAKVQPWARYANRTPRCWERKQVSRIMANLAVIGDYQMMMEDSDGKPVPAGEPIRGYFPRIIEPDVFERVNLGADDRKIMKGGGRSVAVANLASALTRCGVCGGAMEYVRSRLKGATVIRDGKETAPLKQDQGYLYCRVANRRGDCVNRTSIAYVGFERALLDSALHLALDDASFSRVDEVGRLTVMIADKRRDYAAAFSRAETLFNAFAESASDMGMKMALEAERTAKAVQAEIDELQVQKDRASGQASAAEHLSRLNEIREQLYDDDLDVRRVARLKVAAGLNSVIEKIECQEDRRVFVRYKRGARVSIIYPGRGRRPAYSFDVNLAKPGDDHSDDPKVQALIGRMKLEAE

SEQ ID NO: 41282 - DNA, 50 bp, Sphingobium yanoikuyae
  source 1..50: mol_type = genomic DNA
tgatccgcacatggggcgagcttggtgaagctcgacctaagtgcggtggc

SEQ ID NO: 41283 - DNA, 40 bp, Sphingobium yanoikuyae
  source 1..40: mol_type = genomic DNA
ccatggccggcccacctgggtgaagctcggccatggcgat

SEQ ID NO: 41284 - DNA, 50 bp, Sphingobium yanoikuyae
  source 1..50: mol_type = genomic DNA
tgatccgcacatggggcgagcttgaggaagctcgacctaagtgcggtggc

SEQ ID NO: 41285 - DNA, 40 bp, Sphingobium yanoikuyae
  source 1..40: mol_type = genomic DNA
caaggcccagccgacctgcaggaagctctgacattgagat

SEQ ID NO: 41286 - protein, 567 aa, Sphingobium yanoikuyae
MQKAIIYIRFSTLEQREGVSLDRQKERCLEMCEANGWDVETILVDEGKSAFAGKHRDAGAAFGDFEVAARHGLHAGAILVIERLSRLSRLDYNETYDLMRALTKNGVTVACWDGGRIYKANESIEFVSVIELLVKAKTANEESQTKSDFGKDKWARRRADAASGKVATSNGPAWLQLDANRKWVVIEDRAQVVRQIFEWADQGDGSLRISRRLNEAKVQPWARYANRTPRCWERKQVSRIMANLAVIGDYQMMMEDSDGKPVPAGEPIRGYFPRIIAPDVFERVNLSADDRKIMKGGGRSVAVANLASALTRCGVCGGAMEYVRSRLKGATVIRDGKETAPLKQDQGYLYCRVANRRGDCANRTSIAYVGFERALLDSALHLALDDASFSRVDEVGRLTVLIADKRRDHAAAVSRAETLFNAFAENASEMGMKMALEAEKNAKSVQAEIDELQVQKDRASGQASAAEHLSRLNEIREQLYDDDLDVRRVARLKVAAGLNSVIEKIECQEDRRVFVRYKRGARVSIIYPGRGRRPAYSFDVNLAKPGDDHSDDPKVQALIGRMKLEAE

SEQ ID NO: 41287 - DNA, 50 bp, Sphingobium yanoikuyae; identical to SEQ ID NO: 41282
  source 1..50: mol_type = genomic DNA

SEQ ID NO: 41288 - DNA, 40 bp, Sphingobium yanoikuyae; identical to SEQ ID NO: 41283
  source 1..40: mol_type = genomic DNA

SEQ ID NO: 41289 - DNA, 50 bp, Sphingobium yanoikuyae; identical to SEQ ID NO: 41284
  source 1..50: mol_type = genomic DNA

SEQ ID NO: 41290 - DNA, 40 bp, Sphingobium yanoikuyae; identical to SEQ ID NO: 41285
  source 1..40: mol_type = genomic DNA

SEQ ID NO: 41291 - protein, 551 aa, Clostridioides difficile
MSKEKIKVYLYTRVSTSIQIDGYSLEAQKSRMKAFALYNDYEIVGEYEDAGKSGKSIEGRVQFTRMMEDIKSGKDGVSFVLVFKLSRFARNAADVLSTLQIMQDFGVNLICVEDGIDSSKDAGKLMISVLSAVAEIERENIRVQTMEGRIQKAKEGKWNGGFAPYGYQLIDGKLIINEEEAIAIRTIFDQYVNTSIGANGLSKYLENHGIRKIPRQNGKNPLFDAGLIRKILKNPVYNGKIAFGRRTLEKVHGTRNEYRQVEQDDYLVAEGIHQAIIPDELWQAAQVKLKAQAKKYEHVNKGKNMRTHLLSGIVKCPICGAGMFGNKSIKYKKDGTKYKDFYYYGCKHRLMNRGHKCTYNKQIREELLDDAVAEVIIKLVSNPKFASMIQEKINMKVDTSAIENEIDNYQNELRKSHSTKYKLIEEIDNLDVEDKHYKRRKNDLDDRLYRMYDKIEELESQLIEAKAKKETIEVEKLTGDNIYKVLIYFDKLYKVMNDVERRQLIEALISEIQIYEEKQPNGQWLKSITFKLPIIDEDLNISLENDEQVET

SEQ ID NO: 41292 - DNA, 50 bp, Clostridioides difficile; identical to SEQ ID NO: 10392
  source 1..50: mol_type = genomic DNA

SEQ ID NO: 41293 - DNA, 40 bp, Clostridioides difficile
  source 1..40: mol_type = genomic DNA
cccaaatactccacattgtgagacgtgcgtacttttgtcc

SEQ ID NO: 41294 - DNA, 50 bp, Clostridioides difficile; identical to SEQ ID NO: 17084
  source 1..50: mol_type = genomic DNA

SEQ ID NO: 41295 - DNA, 40 bp, Clostridioides difficile
  source 1..40: mol_type = genomic DNA
cccaaaatccccacaatgtcacatgtgagtctgtttgtcc

SEQ ID NO: 41296 - protein, 548 aa, Mycolicibacterium phocaicum; identical to SEQ ID NO: 13166

SEQ ID NO: 41297 - DNA, 50 bp, Mycolicibacterium phocaicum; identical to SEQ ID NO: 442
  source 1..50: mol_type = genomic DNA

SEQ ID NO: 41298 - DNA, 40 bp, Mycolicibacterium phocaicum
  source 1..40: mol_type = genomic DNA
gttactgatgtgtgtccgaggggggacttgaacccccacg

SEQ ID NO: 41299 - DNA, 50 bp, Mycolicibacterium phocaicum; identical to SEQ ID NO: 11354
  source 1..50: mol_type = genomic DNA

SEQ ID NO: 41300 - DNA, 40 bp, Mycolicibacterium phocaicum
  source 1..40: mol_type = genomic DNA
gttactgcttagtgaccaagataggatttgaacacccacc

SEQ ID NO: 41301 - protein, 497 aa, Streptococcus salivarius; identical to SEQ ID NO: 14076

SEQ ID NO: 41302 - DNA, 50 bp, Streptococcus salivarius; identical to SEQ ID NO: 14077
  source 1..50: mol_type = genomic DNA

SEQ ID NO: 41303 - DNA, 40 bp, Streptococcus salivarius
  source 1..40: mol_type = genomic DNA
cctttacgatgcgactatggggtcaggctcgctcttgctt

SEQ ID NO: 41304 - DNA, 50 bp, Streptococcus salivarius
  source 1..50: mol_type = genomic DNA
tgtgtcagtcgcttgacacgagaggagtttcgtgtcataataatgacaca

SEQ ID NO: 41305 - DNA, 40 bp, Streptococcus salivarius
  source 1..40: mol_type = genomic DNA
tcttaaagatgcaatcatggaatcaagcttgctgttgctt

SEQ ID NO: 41306 - protein, 499 aa, Streptomyces anulatus
MTRRLRSAISVANGGKPRAVIYVRISQDRTGAHLGVDRQREDCEALAERNGWDVVEVYVDNDVSAYSGKPRKRYRQMLADLELGTAAIVIAWHTDRLHRSPTELEEYINLCERRGVTTQTVQAGSLDLSTSGGRLVARMLGNVARHESEHKGERVARARMQKAKAGQWTGGLRPFGWGVPTGETTKKVDKATGEEVDVPVLDMTKLVPEESAALEVGTDMILAGGSVKGWVRWLADKGLTSTVGKPISHPAARDLLLRPRNAGIAVHRGEEVGRGLWEPAVTEPKFRAVVAILTDPNRVTTTGSEVKWLGSLIYKCGRPGCTTTVRNTKVGGAKAPSYRCQDNHGGGRNAAVLDAYIQDLIVERLSKPDAVDLLEPVPDGVNAGALQVESEAIRRRLTELAALFGAGQISMDQFTEGSDVARAQLGEVTAQLARAAVRDPLVGLVGVEDVGGAWAACDLERKRTVLRSLLEVTLRPPRQGRMPDGGYFDYDAIETRWKR

SEQ ID NO: 41307 - DNA, 50 bp, Streptomyces anulatus
  source 1..50: mol_type = genomic DNA
tgtctcaggccgagttccgggttgccgaacccctgacagagacaccgcta

SEQ ID NO: 41308 - DNA, 40 bp, Streptomyces anulatus
  source 1..40: mol_type = genomic DNA
ggcgaggagcgtcgtcttccccgccccggtgccaccgctg

SEQ ID NO: 41309 - DNA, 50 bp, Streptomyces anulatus
  source 1..50: mol_type = genomic DNA
tgtctcaggccgagttccgggttgaggaacccctgacagagacaccgcta

SEQ ID NO: 41310 - DNA, 40 bp, Streptomyces anulatus
  source 1..40: mol_type = genomic DNA
gggcaggagcgtcgtcttaagcgaacgtgtgccgccagtg

SEQ ID NO: 41311 - protein, 595 aa, Prevotella ruminicola
MRAIGYARVSTTKQDLARQRCKITNFCGENGYELEFIIEDFGISGATLDRKGYQRLNSLTDNDCDVIVVSEISRLSRKEQITEALNDIQQILNNGISVILLDDSAKVYKAKENLNISELLLLIIQLWGAAQERNEIKRKNQDGKQALFKSNPYAVVDAKIPYGFRSVPNTISNRPKYLLEQDPEEVEVVKKIFELVLDGKTLYGVMQYLNDRNIMIRKGMPSISILSRIIHNELYIGIRKRTQSYGKVKGKEDVAIQHIEPIISEEEFRRAGERIEINNKYISTARVYFNPFKGIIRCRCGRSMMVKPKKRENGVTILTYRCSCNESRNSSKFCSVNIDETSYELTNSVIKSLFIQRSQEIIDYYKETGQTRVNELNEIIDGIAKKIDIANLRKEELNNRTKQNVQKLLVATNEVFVKALEQDQAKTDADIKKVDSEVASLRRKEREIINQIYSIKKAYSNIDAYERISKISNDELTEMYHLYLEKIEYYPITTMKGFYKVLFKSGMIFYIAITKVRCSPAAYIVDADVNLETGDMTFKYDMATADGTFSFSPTQIKTVNIKDFFLSEWTEYSFAVRLNLDLSYRERYTKQLEDK

SEQ ID NO: 41312 - DNA, 50 bp, Prevotella ruminicola
  source 1..50: mol_type = genomic DNA
atgggtaaaagtcttgtgttatcctcagatagcgagaaagatttgcccat

SEQ ID NO: 41313 - DNA, 40 bp, Prevotella ruminicola
  source 1..40: mol_type = genomic DNA
gggaacctgacagcaatactcgaaaaaggcaatcatccat

SEQ ID NO: 41314 - DNA, 50 bp, Prevotella ruminicola
  source 1..50: mol_type = genomic DNA
atgggtaaaagtcttgtgttatccttagatagcgagaaagatttgcccat

SEQ ID NO: 41315 - DNA, 40 bp, Prevotella ruminicola
  source 1..40: mol_type = genomic DNA
gggcacctggcagccatatttgaatatggccctcctcctt

SEQ ID NO: 41316 - protein, 482 aa, Streptococcus suis
MPKIALYLRLSVDEATADESNSITNQRILLNQYLDRTPEFHPFKRIEFIDDGFSGKNPNRPAFNRLMSDVRVGKIRYIIVKDFSRFMRDYLEFGNYIENIFPFLGVRFIAVNDQFDSFTSENNGVEIDVPFRNLLNDFYARDVSEKVKSAMNTMKRSGKNMSWLPPFGYLKDPNDRFKIIIDESVAPVVKRIFQLCIEGVGLSRIAIILNDENTITPAERKRQISQADYQYQIVVTEKQKRNIWTRSTVSRILKNEAYKGTYLFNAKTIFNGKQVKRPKEEWERIENNHESIVTSEIFEQAQKALKSRNNRHSYQQSTKKYDVILTGFMICEHCGHKLTAYTYKKKTHHYFYCRYCKVQGISLKGCRSDRVEQKILEYLKSKKEDVPSQKSNKSLVYLMSQLKAQKFSYYQDYKDEKINRETYIYYKQEIDKKIDDIEEELNKLNNSQCMIDSSLSKETLRESVKQIIVNHAGGYRIDYKNI

SEQ ID NO: 41317 - DNA, 50 bp, Streptococcus suis
  source 1..50: mol_type = genomic DNA
tctgtcattaacttgacacaagagggggattgtgtcataataatgacagg

SEQ ID NO: 41318 - DNA, 40 bp, Streptococcus suis
  source 1..40: mol_type = genomic DNA
gatctgggttgcaactgggggcaatgtagagtccaccatc

SEQ ID NO: 41319 - DNA, 50 bp, Streptococcus suis
  source 1..50: mol_type = genomic DNA
tctgtcattaacttgacacaagagccggattgtgtcataataatgacagg

SEQ ID NO: 41320 - DNA, 40 bp, Streptococcus suis
  source 1..40: mol_type = genomic DNA
gaactaaggtgaatctgggccaaatgtaaattacaccatc

SEQ ID NO: 41321 - protein, 595 aa, Mycobacteroides abscessus
MSTRTTSADMLLGYTKRAPAGDGVDLAVTLLRVSTKKQLYTAIDIDADGNSIATQRDVTALKADALGASVAREFIEPGHSAKTVDQRPVFKELLRYLHEHPAVRYVIVYMRSRAFRNHFDAALVQSQLAKLDVRLISAKEDFGEGAAAVAMEGMVDIMNGFQNTLQGLDVQAKMGRKARAGGTVSLAKIGYLNIRAEFDGKLVNTVGLDPDRAPLLRKAWELYATGEYTIARLEATMADLGLTSRPTRTIAAGKPVSSSTLQKMLRDPYYAGFVHYKGELYPGRHEALVSQALFDQVQDVLDARSRDGQRDRVHMHYLKNTLFCERCRRNGENSRLIYTKVKGHNGSYYEYFLCRGRQEGYCDLPHQPVHLVEEAIVDYYATLGLPETFITEVRERLESTVTDNQASARELHASLTRKLATIDTKESRLIDLAADDLMPRDKIRQKLNELKQERARIEAGLTSTNEQLSIGAQVLRDALHLVEDPQRLYGDAPNHVRRHLNSAFYERFYLDDLVVADADKTPLFDDLHEAADAHHSARIRRTRPTGASSAKTQGKGPQMARNPRNAGVPSGATGLDHPNLVTVLTVPSSSTTSLV

SEQ ID NO: 41322 - DNA, 50 bp, Mycobacteroides abscessus
  source 1..50: mol_type = genomic DNA
cctagttcgagtacgaccagcctggtcggcgtcctcggaagctattcaaa

SEQ ID NO: 41323 - DNA, 40 bp, Mycobacteroides abscessus; identical to SEQ ID NO: 26588
  source 1..40: mol_type = genomic DNA

SEQ ID NO: 41324 - DNA, 50 bp, Mycobacteroides abscessus
  source 1..50: mol_type = genomic DNA
cctagttcgagtacgaccagcctgtgcggcgtcctcggaagctattcaaa

SEQ ID NO: 41325 - DNA, 40 bp, Mycobacteroides abscessus
  source 1..40: mol_type = genomic DNA
tcgcccaccgctcacctcctgctgtgtggcctgatcctaa

SEQ ID NO: 41326 - protein, 596 aa, Mycobacteroides abscessus; identical to SEQ ID NO: 12491

SEQ ID NO: 41327 - DNA, 50 bp, Mycobacteroides abscessus
  source 1..50: mol_type = genomic DNA
cctagttcgagtacgaccagcctggtcggggtcctcggctcatattcaaa

SEQ ID NO: 41328 - DNA, 40 bp, Mycobacteroides abscessus; identical to SEQ ID NO: 26588
  source 1..40: mol_type = genomic DNA

SEQ ID NO: 41329 - DNA, 50 bp, Mycobacteroides abscessus
  source 1..50: mol_type = genomic DNA
cctagttcgagtacgaccagcctgtgcggggtcctcggctcatattcaaa

SEQ ID NO: 41330 - DNA, 40 bp, Mycobacteroides abscessus; identical to SEQ ID NO: 41325
  source 1..40: mol_type = genomic DNA

SEQ ID NO: 41331 - protein, 595 aa, Mycobacteroides abscessus
MSTRHTSADLLQGYTQRAPAGDGVDLAVTLLRVSTKKQLYTAIDIDADGNSIATQRDVTALKADALGATIDREFIEPGNSGKTVDQRPVLKELLGYLHEHPEVRYVIVYMRSRAFRNHFDAALVQIQLAKIGVRLVSAKEDFGEGAAAVAMEGMVDIMNGFQNTLQGLDVQAKMGRKARAGGTVSLAKIGYLNIRAEFKGKLVNTVGLDPDRAPLLRRAWELYASGEYTIARLEATMADLGLTSRPTQTIPPGQPISSSTLQKMLRDPYYAGFVRYKDELYPGRHEALVSQALFDQVQDVLDARSRDGQRDRIHMHYLKNTLFCERCRRNGENSRLIYTKVKGHNGSYYEYFLCRGRQEGHCDLPHQPVHLVEDAIVDYYATLGLPETFITDVRERLESTVTDNQASARELHASLTRKLAAIDTKESRLIDLAADDLMPRDKIRQKLGELKQERARIEAGLTSTDEQLSIGAQVLRDALHLVEDPQRLYSDAPNNVRRHLNSTFYERFYLDDLVIADADKTPLFDDLHEAADAHHSARIRRTRPTGANSAKTPEKDPQMARNPRNAGVPSGVTGLDHPNLATVLTVPSSSTTSLV

SEQ ID NO: 41332 - DNA, 50 bp, Mycobacteroides abscessus
  source 1..50: mol_type = genomic DNA
cctagttcgagtacgaccagcctggtcgccgtcctcggctcatattcaaa

SEQ ID NO: 41333 - DNA, 40 bp, Mycobacteroides abscessus; identical to SEQ ID NO: 26588
  source 1..40: mol_type = genomic DNA

SEQ ID NO: 41334 - DNA, 50 bp, Mycobacteroides abscessus
  source 1..50: mol_type = genomic DNA
cctagttcgagtacgaccagcctgtgcgccgtcctcggctcatattcaaa

SEQ ID NO: 41335 - DNA, 40 bp, Mycobacteroides abscessus; identical to SEQ ID NO: 41325
  source 1..40: mol_type = genomic DNA

SEQ ID NO: 41336 - protein, 596 aa, Mycobacteroides abscessus; identical to SEQ ID NO: 12501

SEQ ID NO: 41337 - DNA, 50 bp, Mycobacteroides abscessus; identical to SEQ ID NO: 41327
  source 1..50: mol_type = genomic DNA

SEQ ID NO: 41338 - DNA, 40 bp, Mycobacteroides abscessus; identical to SEQ ID NO: 26588
  source 1..40: mol_type = genomic DNA

SEQ ID NO: 41339 - DNA, 50 bp, Mycobacteroides abscessus; identical to SEQ ID NO: 41329
  source 1..50: mol_type = genomic DNA

SEQ ID NO: 41340 - DNA, 40 bp, Mycobacteroides abscessus; identical to SEQ ID NO: 41325
  source 1..40: mol_type = genomic DNA

SEQ ID NO: 41341 - protein, 607 aa, Pseudoalteromonas shioyasakiensis
MKKAYSYIRYSSPQQAKGDSFRRQFSATQAYCEKNGYELDTELAVYQELGVSGVDGDQENLKRFIDDCETGKVKKGSLLIVENLDRLSRKKINKAMRQFLHLLDYVDIYTLQDQKLYSQNDDVDSETQLLDVMTSLIVMSRAYEESATKKKRLKESWDSKRKNIDNKKLTSLIPHWLELSEDRTEFRLKKDKIEIIKYIYKKSIDGMGVSQLIRHLNENLTQFPTPTHKSKLWARTSLSRILTDRSVLGEYQPHIGKHNGIGENKRKPLGDPIPDYYPQIIDEETFLKAQIARKSRVIGRGKVNRNKFSNLFRNILRCGYCDGKIEYVDKGDGSRGGKYLTCSNAKRGGDCSHNKHYKYLPLELMLLHLTTENGFMPKPEAPTDLNLRLSKLQDLNEKAESKLSFLLEEDFSIPTIREKTRELSKEIERYRSEIEELENKILTFKPDYTYSDLYQNVILEKDSVLLSSNRMTYNSYLSKKIESAYLFNDYSHFILFKMKDQHVHTVIIDEQYNFGGCSLPNNNMTHKRLNGEKTPIDEMIWQIQQNFLILIESCKDIQDKKLVNYLNRINKLISKIIVNQEIELFNQVLFQIEKAHTILEKIQTNNK

SEQ ID NO: 41342 - DNA, 50 bp, Pseudoalteromonas shioyasakiensis
  source 1..50: mol_type = genomic DNA
caagtaggtaattgacatagctatagctgattatgttataatcctacaga

SEQ ID NO: 41343 - DNA, 40 bp, Pseudoalteromonas shioyasakiensis
  source 1..40: mol_type = genomic DNA
accaggagggccaagaaacagtaaattatggccaccagca

SEQ ID NO: 41344 - DNA, 50 bp, Pseudoalteromonas shioyasakiensis
  source 1..50: mol_type = genomic DNA
caagtaggtaattgacatagctatatctgattatgttataatcctacaga

SEQ ID NO: 41345 - DNA, 40 bp, Pseudoalteromonas shioyasakiensis
  source 1..40: mol_type = genomic DNA
agcaggagcaggaagatccattacattatagccagcagca

SEQ ID NO: 41346 - protein, 539 aa, Salmonella enterica; identical to SEQ ID NO: 35306

SEQ ID NO: 41347 - DNA, 50 bp, Salmonella enterica
  source 1..50: mol_type = genomic DNA
gcgtacttactataccaattgggagcagttagtgtataatgtacgccacg

SEQ ID NO: 41348 - DNA, 40 bp, Salmonella enterica
  source 1..40: mol_type = genomic DNA
gccccatcagcagcatggaacagtcggtggtgccgccgcc

SEQ ID NO: 41349 - DNA, 50 bp, Salmonella enterica
  source 1..50: mol_type = genomic DNA
gcgtacttactataccaattgggaggagttagtgtataatgtacgccacg

SEQ ID NO: 41350 - DNA, 40 bp, Salmonella enterica
  source 1..40: mol_type = genomic DNA
gccccgccagcgggttggaggatgcggtggcgtcgtcgcc

SEQ ID NO: 41351 - protein, 556 aa, Streptococcus constellatus
MSNTKRTGQTALYERLSRDDEMQGESNSITNQKQLLESYAKRNGFVNIYHYTDDGVSGTTFDREGFQKMIKAVEENKVSTVIVKDMSRFGRDYLKVGFYTEILFKEKGVRFIAINNGIDSEKQAESDFTPFLNIMNEWYARDTSRKIQSIFRARMEEGKRVSPSVPYGYYRNPKNKQELLVDKESAKVVKRIYHLVIEGYGVTQIADILTKDKVLIPSAYAEIHYPENNHSSKKRGIDDPYFWTPTTVGYILEKREYMGHNVLGKTICLDYKTKKRRKAKEDELIIFKNTHEAIIDEETWNNAQRLRKTVRRSPKYGTTSHPFTGLLICSDCGGKLSYREPAEHKEKKYDSDYSFVCQHYRHRKGTCSMHYIKVKTVNEILLKSIKEITDFAKEEKQEFLKVMNKLSDEKREEKYQGDKEKLEKLSSRNAELTTLITKLYEDHALGKIPVKHFDRLFNTYDTEQQDLEKQIQYFENEIESYHQRKVDTDKFLKMIEKYTDIEELTVPMINEYIEKVVVHEATGGRQGKNRKQQVDVYFNFIGNCQVQQKTDIEKLA

SEQ ID NO: 41352 - DNA, 50 bp, Streptococcus constellatus
  source 1..50: mol_type = genomic DNA
ttatgtccttgacaaatctttccaaaaggattaacctcttaaggacagag

SEQ ID NO: 41353 - DNA, 40 bp, Streptococcus constellatus
  source 1..40: mol_type = genomic DNA
ttattgcgtaaccgatccgaaaggaacaatagtccttgag

SEQ ID NO: 41354 - DNA, 50 bp, Streptococcus constellatus
  source 1..50: mol_type = genomic DNA
ttatgtccttgacaaatctttccaataggattaacctcttaaggacagag

SEQ ID NO: 41355 - DNA, 40 bp, Streptococcus constellatus
  source 1..40: mol_type = genomic DNA
atattgcttaatataacccatataaacaacagtccttgag

SEQ ID NO: 41356 - protein, 662 aa, Streptomyces alfalfae
MPRGLASREGTDMGKALTRAVDTALRTTGTATLRAVDYLRVSTEEQVDGYGIAYTGKKTVRHIQKKGWEHVGTYADEGFSGSLEADDRPDLRRLMKDARKTPRPFDMVVVNEGRGIGRTGRAFWKWVWDLEDLGVYVAVVKKDYDNSTPAGRSQMRKDADYAEEERELIRERTQGGIQEKAEDGLYPGGMVPFGWDVAERGKKGVSHYVVHKEEAATLRRAREVFLERRSWEETALLLNSEKRLTRSGNGWTAKNIRCRLLGDAALESHVIWRGHNAQRDQDGNPIYGETVVIDLPSIFTDEEVQELKCAMASRPPSTKTRSRTYLLTGLMTSPCGKTYEGHQHRPTEVIYRCKGRHESYAGAGDRCTCPYLEATSIEKQVWKDVIATLGDADRMKAMAQDWLNATSHKRIDYTKRISELDQRIAETEDLIDITAATAAKRALRRGLTREEAEEAAERAAKPHEDELAGLEKLRHEAEAWQREAAEAGHWLQNLERLAEVAGRNLQDVEPAEKAELLRMMKTRAEVLRCAPRRKGVACAVREWFVAADRGVPVLTDDAWERIAPLMGGPRCTIDRRVMFEALLEKAISGARYKELTPKFGVDWKTLQTQANRWLSRGVWAEAMKLLADVESVPAWRPGPVEIKVTFAPLAIESRVGVEERDG

SEQ ID NO: 41357 - DNA, 50 bp, Streptomyces alfalfae
  source 1..50: mol_type = genomic DNA
agtaggagtcgaggaacgagacggttcggatgcgttcctaggggcccacc

SEQ ID NO: 41358 - DNA, 40 bp, Streptomyces alfalfae
  source 1..40: mol_type = genomic DNA
gtgcgccgccatgcggcggttggccaccgggctccccacg

SEQ ID NO: 41359 - DNA, 50 bp, Streptomyces alfalfae
  source 1..50: mol_type = genomic DNA
agtaggagtcgaggaacgagacggggcggatgcgttcctaggggcccacc

SEQ ID NO: 41360 - DNA, 40 bp, Streptomyces alfalfae
  source 1..40: mol_type = genomic DNA
ggtcgccgccgggcggccgggcgccccctccctccccacg

SEQ ID NO: 41361 - protein, 583 aa, Streptococcus suis
MKNNNVEIIKADSLVRRRGDNFERDSKRVAAYCRVSSDSEDQKNSYESQVRHYKDYISQRSDWELAGIYADEGISGTQVGKRQDFQRLINDCVNGEIDYIVTKAIARFARNTLDTLKYVRMLKDMQIGVYFEEENIDTLTMDGELLLTILSSVAQQEVENTSAHVKKGLKMKMQRGELVGFQGCLGYDYDVETKQLSINKKEAKIVRYIFERYLEGIGGKVIARELDELGYKSPRGLEHWNDTTVLGIIKNEKYKGDILMGKTFTVDPISKRRLSNFGEEDKYYIKDNHEPIISKEDFEKAQEIRLRRAGNKKTAANVNGKRERYSKMYAFSSMLECGFCGSILSRRSWHCRSDYRKVVWHCVTSIKKGKKFCKHSKGLEELAIEGAFMEAYRQLYHSNENLMTDLLETIESELNDNSLNKELKRITNKLRTLLKKEENLVNLRLEGKISDTIYNEKYNEISSEKVFLAEEKVNIETTLKSEIDVKKRLTEFKHLLSSQKMLTEFDRAVFESIVEKIIVGGVNSDGEIDPAMLTIIFKTGETENKDGKQFKSKRKNAKLETDKLCPQNSDGDKKLYSQEPDNT

SEQ ID NO: 41362 - DNA, 50 bp, Streptococcus suis
  source 1..50: mol_type = genomic DNA
tgtattctcaagaaccagacaacacacgtggagtgcgtagtgttgctaca

SEQ ID NO: 41363 - DNA, 40 bp, Streptococcus suis
  source 1..40: mol_type = genomic DNA
tttatttccaaatacgcatcacatagaagttgtgggatta

SEQ ID NO: 41364 - DNA, 50 bp, Streptococcus suis
  source 1..50: mol_type = genomic DNA
tgtattctcaagaaccagacaacagtcgtggagtgcgtagtgttgctaca

SEQ ID NO: 41365 - DNA, 40 bp, Streptococcus suis
  source 1..40: mol_type = genomic DNA
tttatttccaaatgccaaagtcatagaggctgagtgagga

SEQ ID NO: 41366 - protein, 583 aa, Streptococcus suis
MKTNNVEIIKADSLVRRRGVNVERHLKRVAAYCRVSSDSDDQKNSYESQVRHYKDYISQRSDWELVDIYADEGISGTQVGKRQDFQRLINDCVNGEIDYIVTKAIARFARNTLDTLKYVRMLKDMQIGVYFEEENIDTLTMDGELLLTILSSVAQQEVENTSAHVKKGLKMKMQRGELIGFQGCLGYNYDVETKQLSINKKEAKIVRYIFERYLEGIGGKVIARELDELGYKSPRGLDHWNDTTVLGIIKNEKYKGDILMGKTFTVDPISKRRLSNFGEEDKYYIKDNHEPIISKEDFEKAQEIRLRRAGNKKTAANVNGKRERYSKMYAFSSMLECGFCGSLLSRRSWHCRSDYRKVVWHCVTSIKKGKKYCKHSKGLEELAIEGAFMEAYRQLYHSNENIVSDLLETIESELNDNSLNKELKKITNKLRTLLKKEENLVNLKLEEKISDSIYNEKYNELSLEKEYLAEEKVNVETTLKSEIDVKKRLTEFKQLLSSQKMLTEFDRTVFESIVEKIIVGGVNSDGEIDPAMLTIIFKTGETQNKDGKQFKSKRKNAKLEPDKLCPQNCDEDKKLYSQGTDNT

SEQ ID NO: 41367 - DNA, 50 bp, Streptococcus suis
  source 1..50: mol_type = genomic DNA
tgtattctcaagggacagacaacacacgtggagtgcgtagtgttgctaca

SEQ ID NO: 41368 - DNA, 40 bp, Streptococcus suis; identical to SEQ ID NO: 41363
  source 1..40: mol_type = genomic DNA

SEQ ID NO: 41369 - DNA, 50 bp, Streptococcus suis
  source 1..50: mol_type = genomic DNA
tgtattctcaagggacagacaacagtcgtggagtgcgtagtgttgctaca

SEQ ID NO: 41370 - DNA, 40 bp, Streptococcus suis; identical to SEQ ID NO: 41365
  source 1..40: mol_type = genomic DNA

SEQ ID NO: 41371 - protein, 583 aa, Streptococcus suis; identical to SEQ ID NO: 15126

SEQ ID NO: 41372 - DNA, 50 bp, Streptococcus suis; identical to SEQ ID NO: 18192
  source 1..50: mol_type = genomic DNA

SEQ ID NO: 41373 - DNA, 40 bp, Streptococcus suis; identical to SEQ ID NO: 41363
  source 1..40: mol_type = genomic DNA

SEQ ID NO: 41374 - DNA, 50 bp, Streptococcus suis
  source 1..50: mol_type = genomic DNA
tgtattctcaaggaacagactacagtcgtggagtgcgtagtgttgctaca

SEQ ID NO: 41375 - DNA, 40 bp, Streptococcus suis; identical to SEQ ID NO: 41365
  source 1..40: mol_type = genomic DNA

SEQ ID NO: 41376 - protein, 583 aa, Streptococcus suis; identical to SEQ ID NO: 15121

SEQ ID NO: 41377 - DNA, 50 bp, Streptococcus suis; identical to SEQ ID NO: 18192
  source 1..50: mol_type = genomic DNA

SEQ ID NO: 41378 - DNA, 40 bp, Streptococcus suis; identical to SEQ ID NO: 41363
  source 1..40: mol_type = genomic DNA

SEQ ID NO: 41379 - DNA, 50 bp, Streptococcus suis; identical to SEQ ID NO: 41374
  source 1..50: mol_type = genomic DNA

SEQ ID NO: 41380 - DNA, 40 bp, Streptococcus suis; identical to SEQ ID NO: 41365
  source 1..40: mol_type = genomic DNA

SEQ ID NO: 41381 - protein, 583 aa, Streptococcus suis
MKKNNVEIIKADSLVRRRGDNFERESKRVAAYCRVSSDSEDQKNSYESQVRHYKDYISQRSDWELAGIYADEGISGTQVGKRQDFQRLINDCVNGEIDYIVTKAIARFARNTLDTLKYVRMLKDMQIGVYFEEENIDTLTMDGELLLTILSSVAQQEVENTSAHVKKGLKMKMQRGELIGFQGCLGYDYDVETKQLSINKKEAKIVRYIFERYLEGIGGKVIARELDELGYKSSRGLDHWNDTTVLGIIKNEKYKGDILMGKTFTVDPISKRRLSNFGEEDKYYIKDNHEPIISKEDFEKAQEIRLRRAGNKKTAANVNGKRERYSKMYAFSSMLECGFCGSILSRRSWHCRSDYRKVVWHCVTSIKKGKKFCKHSKGLEELAIEGAFMEAYRKLYHSNENLMTDLLETIESELNDNSLNKELKRITNKLRTLLKKEENLVNLRLEGKISDTIYNEKYNEISSEKEFLAEEKVNIETTLKSEIDVKKRLTEFKHLLSSQKMLTEFDRAVFESIVEKIIVGGVNSDGEIDPAMLTIIFKTGETQNKDGKQFKSKRKNAKLETDKLCPQNSDEDKKLYSQGTDYT

SEQ ID NO: 41382 - DNA, 50 bp, Streptococcus suis; identical to SEQ ID NO: 18192
  source 1..50: mol_type = genomic DNA

SEQ ID NO: 41383 - DNA, 40 bp, Streptococcus suis; identical to SEQ ID NO: 41363
  source 1..40: mol_type = genomic DNA

SEQ ID NO: 41384 - DNA, 50 bp, Streptococcus suis; identical to SEQ ID NO: 41374
  source 1..50: mol_type = genomic DNA

SEQ ID NO: 41385 - DNA, 40 bp, Streptococcus suis; identical to SEQ ID NO: 41365
  source 1..40: mol_type = genomic DNA

SEQ ID NO: 41386 - protein, 583 aa, Streptococcus suis
MKTNNVEIIKADSLVRRRGVNVERHLKRVAAYCRVSSDSDDQKNSYESQVRHYKDYISQRSDWELVDIYADEGISGTQVGKRQDFQRLINDCVNGEIDYIVTKAIARFARNTLDTLKYVRMLKDMQIGVYFEEENIDTLTMDGELLLTILSSVAQQEVENTSAHVKKGLKMKMQRGELIGFQGCLGYNYDVETKQLSINKKEAKIVRYIFERYLEGIGGKVIARELDELGYKSPRGLDHWNDTTVLGIIKNEKYKGDILMGKTFTVDPISKRRLSNFGEEDKYYIKDNHEPIISKEDFEKAQEIRLRRAGNKKTAANVNGKRERYSKMYAFSSMLECGFCGSILSRRSWHCRSDYRKVVWHCVTSIKKGKKFCKHSKGLEELAIEGAFMEAYRQLYHSNENLMTDLLETIESELNDNSLNKELKRITNKLRTLLKKEENLVNLRLEGKISDTIYNEKYNEISSEKEFLAEEKVNIETTLKSEIDVKKRLTEFKHLLSSQKMLTEFDRAVFESIVEKIIVGGVNSDGEIDPAMLTIIFKTGETQNKDGKQFKSKRKNAKLETDKLCPQNSDEDKKLYSQGPDYT

SEQ ID NO: 41387 - DNA, 50 bp, Streptococcus suis
  source 1..50: mol_type = genomic DNA
tgtattctcaaggaccagactacacacgtggagtgcgtagtgttgctaca

SEQ ID NO: 41388 - DNA, 40 bp, Streptococcus suis; identical to SEQ ID NO: 41363
  source 1..40: mol_type = genomic DNA

SEQ ID NO: 41389 - DNA, 50 bp, Streptococcus suis
  source 1..50: mol_type = genomic DNA
tgtattctcaaggaccagactacagtcgtggagtgcgtagtgttgctaca

SEQ ID NO: 41390 - DNA, 40 bp, Streptococcus suis; identical to SEQ ID NO: 41365
  source 1..40: mol_type = genomic DNA

SEQ ID NO: 41391 - protein, 583 aa, Streptococcus suis; identical to SEQ ID NO: 15131

SEQ ID NO: 41392 - DNA, 50 bp, Streptococcus suis; identical to SEQ ID NO: 18192
  source 1..50: mol_type = genomic DNA

SEQ ID NO: 41393 - DNA, 40 bp, Streptococcus suis; identical to SEQ ID NO: 41363
  source 1..40: mol_type = genomic DNA

SEQ ID NO: 41394 - DNA, 50 bp, Streptococcus suis; identical to SEQ ID NO: 41374
  source 1..50: mol_type = genomic DNA

SEQ ID NO: 41395 - DNA, 40 bp, Streptococcus suis; identical to SEQ ID NO: 41365
  source 1..40: mol_type = genomic DNA

SEQ ID NO: 41396 - protein, 583 aa, Streptococcus suis; identical to SEQ ID NO: 15116

SEQ ID NO: 41397 - DNA, 50 bp, Streptococcus suis; identical to SEQ ID NO: 18192
  source 1..50: mol_type = genomic DNA

SEQ ID NO: 41398 - DNA, 40 bp, Streptococcus suis; identical to SEQ ID NO: 41363
  source 1..40: mol_type = genomic DNA

SEQ ID NO: 41399 - DNA, 50 bp, Streptococcus suis; identical to SEQ ID NO: 41374
  source 1..50: mol_type = genomic DNA

SEQ ID NO: 41400 - DNA, 40 bp, Streptococcus suis; identical to SEQ ID NO: 41365
  source 1..40: mol_type = genomic DNA

SEQ ID NO: 41401 - protein, 583 aa, Streptococcus suis; identical to SEQ ID NO: 15121

SEQ ID NO: 41402 - DNA, 50 bp, Streptococcus suis
  source 1..50: mol_type = genomic DNA
tgtattctcaaggaacagactacacatgtggagtgcgtagtgttgctaca

SEQ ID NO: 41403 - DNA, 40 bp, Streptococcus suis; identical to SEQ ID NO: 41363
  source 1..40: mol_type = genomic DNA

SEQ ID NO: 41404 - DNA, 50 bp, Streptococcus suis
  source 1..50: mol_type = genomic DNA
tgtattctcaaggaacagactacagttgtggagtgcgtagtgttgctaca

SEQ ID NO: 41405 - DNA, 40 bp, Streptococcus suis; identical to SEQ ID NO: 41365
  source 1..40: mol_type = genomic DNA

SEQ ID NO: 41406 - protein, 552 aa, Vibrio parahaemolyticus
MTEEKQRFAVTYQRFSSVRQVGNSSLDRQTDTQKAWLRQNPNVTVIDNFVDKAMSGWSGKHLKEGSLGQLMKAIEDGIIQPGTLILVEHFSRLTRQNIDNAEELVKRIWKAGITLVTVRDNTEYPPEAVNNMSLRIRLIVEMEQAFKESEWRSAKVKASYIRREKLAKEEGKAPRIRKPFWLNPDGTLNHLHQAVKDMFNWYLDGLGQQRIVVRLREKYTDTAIQKINPSTVMRWIQSEIVRGYWRGNRVYEPAVDDQLFFDVQAIHKSRLYKNVKPDRQWPLSGLMQCGVCGRGMSIQKSGKSNPVVRCSSKQRDHSCDRKTTFPYFIVHIYMMTHVLQHAIRLHSDKSSNKGLQIELGKVERKLATTRKKLNDEKEFYNKASNEGQNTTMILQLMNETYQKVEELEEQEKSLKASLKQSNRAVSAESRDLLFTPETFNLEMHKLGFKIVVGEEELSTIGFDKPVSKMVYLGYCRKERAYKYADGSSDFVKVWPSSLVTDELLNMQMLKNYINSSSGLKYIWDHIYDDDLEEKLKKRSKEQKEKKLKEKGE

SEQ ID NO: 41407 - DNA, 50 bp, Vibrio parahaemolyticus; identical to SEQ ID NO: 14432
  source 1..50: mol_type = genomic DNA

SEQ ID NO: 41408 - DNA, 40 bp, Vibrio parahaemolyticus
  source 1..40: mol_type = genomic DNA
attggatcacttactgtgcgagctgaaagccggtcagtca

SEQ ID NO: 41409 - DNA, 50 bp, Vibrio parahaemolyticus
  source 1..50: mol_type = genomic DNA
aatatgcacacgtaatctttaagtaggctataggcgtaggtgtgcagttt

SEQ ID NO: 41410 - DNA, 40 bp, Vibrio parahaemolyticus
  source 1..40: mol_type = genomic DNA
atgggaaaaattcctttccaggcttaaagtcggtcagcca

SEQ ID NO: 41411 - protein, 523 aa, Vibrio rotiferianus
MNVVLYIRVSSNRQAEEGHSLEGQLQDLRNYCSHNEHIVVKEYIESGNSAYKGERPVFNQMLAEVTSGVFDVDAVIVYSLSRFARDLLYQLSSIKKLEDSGVKLISATEALPDDDMTFKSLTVVLGLVNEMNSKQNAINVKSRLIQTAEAGYFTGGPIPFGYESVACDPSKKNSRKKLVICEKEAEIVRNIFQLSLNGTVGKGFGVKAISKYLNDSSRLNRGSKWTTNSIHRILSSTTYIGEFVFGKNRSNADVPKVIVPVPAIIDKEMFNSVKQGLKQRDLEQIHVKSIRSNSLLTGLLKCGICGKGMMVATGKSGKYTYYACTKKIKSGVSLCNSKWVPKRALEEQVEEAVIEHVVNKEFIQSIIGEVKSTLTKNSSQSEPELLKLSRKLKLIQQKLDNTYDQIAMKQDLMDDSYAEYLAGLQNQRSELQGKIETIKAQGRLLLRKFGEKQIDNFVGVIRRVFKELDNDSKKALYLSLLKEVRVYPNKITISGSKLGMLNMVSKTKEGTSELVPSFVSMWR

SEQ ID NO: 41412 - DNA, 50 bp, Vibrio rotiferianus
  source 1..50: mol_type = genomic DNA
aactagtgccctctttcgtatcaatgtggcgggcagattgggacgagtat

SEQ ID NO: 41413 - DNA, 40 bp, Vibrio rotiferianus
  source 1..40: mol_type = genomic DNA
tctcaacgggctttctaaatgtggcggagagatagggatt

SEQ ID NO: 41414 - DNA, 50 bp, Vibrio rotiferianus
  source 1..50: mol_type = genomic DNA
aactagtgccctctttcgtatcaaattggcgggcagattgggacgagtat

SEQ ID NO: 41415 - DNA, 40 bp, Vibrio rotiferianus
  source 1..40: mol_type = genomic DNA
ttactacaggctttccaatattgcctgagtgataggcatt

SEQ ID NO: 41416 - protein, 515 aa, Bacillus thuringiensis
MKTAIYLRKSRADLEAEARGEGETLAKHRTTLLKIAKEMNLNVLSVREEIVSGESLVKRPEMLALLEEIEDNKYDVVLCMDMDRLGRGGMKEQGIILETFKRSNTKIMTPRKTYDLNDEWDEEYSEFEAFMARKELKIITRRMQRGRVASVEAGNYLGTHAPFGYDIHRLNKRERTLTINPEEASVVRMIFDWYANEDMGANAIRSKLNDLGYKSKLGNEWNPYSILDILKNNVYIGKVTWQKRKEVKRPDAVKRSCARQDKSDWIIADGKHEPIIPESLFEQVQEKLNSRYHIPYNTNGIKNPLAGIIKCSKCGYSMVQRYPKNRKETMDCKHRGCENKSSYTELIEKRLLEALKEWYINYKADFEKHKQDDKLKETQVIQMNEAALRKLEKELVDVQKQKNNLHDLLERGVYTVDMFLERSNVVSDRITEITSTMENLKKEIKTEIKKEKVKKDTIPQVEHVLDLYFKTDDPKKKNSLLKSVLEKAVYKKEKWQRLDDFELVLYPKLPQDGDI

SEQ ID NO: 41417 - DNA, 50 bp, Bacillus thuringiensis; identical to SEQ ID NO: 36447
  source 1..50: mol_type = genomic DNA

SEQ ID NO: 41418 - DNA, 40 bp, Bacillus thuringiensis
  source 1..40: mol_type = genomic DNA
cgttgccattaggcgcatgagatttaccccatttaatcct

SEQ ID NO: 41419 - DNA, 50 bp, Bacillus thuringiensis
  source 1..50: mol_type = genomic DNA
tgtcgtcaccttgttggtgtaattttgttgacgccaacatggtagcgaca

SEQ ID NO: 41420 - DNA, 40 bp, Bacillus thuringiensis
  source 1..40: mol_type = genomic DNA
ctatgccatttggagcaagttatttaccctctctaatttt

SEQ ID NO: 41421 - protein, 515 aa, Bacillus cereus
MKTAIYLRKSRADLEAEARGEGETLAKHRSTLLKIAKEMNLNVLSVREEIVSGESLVKRPEMLALLEEIEDNKYDVVLCMDMDRLGRGGMKEQGIILETFKRSNTKIMTPRKTYDLNDEWDEEYSEFEAFMARKELKIITRRMQRGRVASVEAGNYLGTHAPFGYDIHRLNKRERTLTINSEEASVVRMIFDWYANEDMGANAIRSKLNDLGYKSKLGNEWNPYSILDILKNNVYIGKVTWQKRKEVKRPDAVKRSCARQDKSDWIIADGKHEPIIPESLFEQVQEKLNSRYHVPYNTNGIKNPLAGIIKCSKCGYSMVQRYPKNRKETMDCKHRGCENKSSYTELIEKRLLEALKEWYINYKADFEKHKQDNKLKETQVIQMNEAALRKLDKELVDVQKQKNNLHDLLERGVYTVDMFLERSNVISNRITEITSTMENLKKEIKTEIKKEKVKKDTIPQVEHVLDLYFKTDDPKKKNSLLKSVLEKAVYKKEKWQRLDDFELVLYPKLPQDGDI

SEQ ID NO: 41422 - DNA, 50 bp, Bacillus cereus; identical to SEQ ID NO: 36477
  source 1..50: mol_type = genomic DNA

SEQ ID NO: 41423 - DNA, 40 bp, Bacillus cereus; identical to SEQ ID NO: 41418
  source 1..40: mol_type = genomic DNA

SEQ ID NO: 41424 - DNA, 50 bp, Bacillus cereus
  source 1..50: mol_type = genomic DNA
tgtcgtcaccttgttggtgtaattttgttgactccaacagggtgataaca

SEQ ID NO: 41425 - DNA, 40 bp, Bacillus cereus; identical to SEQ ID NO: 41420
  source 1..40: mol_type = genomic DNA

SEQ ID NO: 41426 - protein, 515 aa, Bacillus cereus; identical to SEQ ID NO: 36441

SEQ ID NO: 41427 - DNA, 50 bp, Bacillus cereus; identical to SEQ ID NO: 36447
  source 1..50: mol_type = genomic DNA

SEQ ID NO: 41428 - DNA, 40 bp, Bacillus cereus; identical to SEQ ID NO: 41418
  source 1..40: mol_type = genomic DNA

SEQ ID NO: 41429 - DNA, 50 bp, Bacillus cereus; identical to SEQ ID NO: 41419
  source 1..50: mol_type = genomic DNA

SEQ ID NO: 41430 - DNA, 40 bp, Bacillus cereus; identical to SEQ ID NO: 41420
  source 1..40: mol_type = genomic DNA

SEQ ID NO: 41431 - protein, 591 aa, Streptomyces xanthochromogenes
MGSTNKFRALPNRLGASQASAFKEHRLGTLTVPAVAVPATFAGPKARLRGIVYIRVSQEKEEGFSPEQQLWACQQYALAHNIELVGEPVEDLDLSGRDFAKRKITEIIERVRRGEANCVIVWQWSRFGRNNHKSQAYLAELKRAGGELYSATEHFDVTTATGEFSRDQMLLIAAYQSNMIGQNWKENHQRRLRNKLPHTGQPRFGYQRCDDCVRNPDSPRAYLRCSTCHGVLVVDPVRGPALAEAYEMWVLQDIPMDRVAKYMAGKGIRSLKGAEMDAASWYRVLDSGFAAGLLRSRSEPSNPEKGITYATNKPNTYDLWYPGAHFPLITSELWEAYKRKRCPEDYDSELSGFVRETEPKYGLSGLVRCGNIRDNGEICLAIMTASVTKYKSKYGTYHTDIWRCSRYVRSKQCRAISVTRPKAETEVLKWLDANSKHSETGEVAMKRAATAARAGDQAAEVKKEIQRLKEKLDRALEGYLDKIISPEDYLNKKEELEGQLEVRVSRLRLLNSEVAANQTPGADAFGTLLELWPKMEEYEKRAGAKKVISYLLVTPTPGRAPNKLTIVPRWEANQEALAGAGAPVNQEPMVA

SEQ ID NO: 41432 - DNA, 50 bp, Streptomyces xanthochromogenes
  source 1..50: mol_type = genomic DNA
gttagtcccggtgacacaccggtcggtaccgctgtatgggcagcactaac

SEQ ID NO: 41433 - DNA, 40 bp, Streptomyces xanthochromogenes
  source 1..40: mol_type = genomic DNA
gttgatccacgaggtgttcggcacgggagtgtgtccgtac

SEQ ID NO: 41434 - DNA, 50 bp, Streptomyces xanthochromogenes
  source 1..50: mol_type = genomic DNA
gttagtcccggtgacacaccggtctataccgctgtatgggcagcactaac

SEQ ID NO: 41435 - DNA, 40 bp, Streptomyces xanthochromogenes
  source 1..40: mol_type = genomic DNA
actgattaacatggtgttctacacttgagtgtttccgtaa

SEQ ID NO: 41436 - protein, 548 aa, Vibrio coralliilyticus
MPVKQSVALVRVSTAIQEHGQGLDRQDSEIANFLTTHPDYELTRTISAIGQSAFSGVVHDSDSEFGQFLSSIESKPSTAPYALLLASVDRLTRLPFFEATALVNRILDVVQELVICDSGKVYSKAGGSDLGSIMELTMKIQLSHEESSLKSRRLRAARDKRKHDVSNKVKIPNYLPFWIRWNGVDYEFTEHVKTIRKMVDLRLSGMGSVAIQSYLNERLDEYPVPQRKSKQASATRWTKSRIDDVLFKEVTITGDYVIKTTYTPEEKREAKRNNIKLPAYNRDLDFVCEDLFPAVIDKVTYAKLKSGTGKGKQTNAYYNVFRGIAECTCGSSCVTSHDTKKHDLDARLYIKCNSRNQSGRVSTCRNPSTKLFPLVRSVLNHLINSPLHEVAPVTNVSRSDEVKLELDESKRLQARLRLLVESCDESELSHYLERLRTVTATVGRLELSYETLLQDEAQSVDSNVVLNNLRHVDISTPEGRRSLNAQLRKLLDSLVIDNENSMVKVTFSDGRVTEFDPTLAGDIADTYSMQYVYDRDDEDDLSDFEFDK

SEQ ID NO: 41437 - DNA, 50 bp, Vibrio coralliilyticus
  source 1..50: mol_type = genomic DNA
agcactgctaaaaggtggttaattgtgattgttaaccttttatggcggtg

SEQ ID NO: 41438 - DNA, 40 bp, Vibrio coralliilyticus
  source 1..40: mol_type = genomic DNA
cgctgcaatatgattgatggtgaatgacacacccgctgtc

SEQ ID NO: 41439 - DNA, 50 bp, Vibrio coralliilyticus
  source 1..50: mol_type = genomic DNA
agcactgctaaaaggtggttaattaggattgttaaccttttatggcggtg

SEQ ID NO: 41440 - DNA, 40 bp, Vibrio coralliilyticus
  source 1..40: mol_type = genomic DNA
acctgcaatatgattcatcaggagagaaacactctctgta

SEQ ID NO: 41441 - protein, 530 aa, Bacillus paralicheniformis
MIGGIYARSSLGKIKQGDTVKHQVQMIQEYAKRMEFNVSFDEKFIYPDDGESGFKTTLLQRPPMKQLLEDIDSGLIDIVFFKGISRFARDSGEAIQTSKRLIQKGVRVISIEENYDSDVSDPTFFQMYAVLAEAESRKTSIRVSLGNKQKSRNGLWAGSVPPFGYIKVKDITDKAKKEELISKGVHPQTLFPHPEKADIIKKIFDMYVNQGFGRKKIVNWVNSQGIKTQYGNKIGDITIKRILMNPAYIGVIVYGKTRYNYIDSDDGLRKIQKVINVDKEDWAICEDAHPPIIEREVFMKAQRLIKQKEKAFNKGRRFNNAKHPLTGLLKCSLCGAPMICQKRTNKKADGTKVTYRYYVCSTYHQKGRDVCPQANINADELEDYIHKQISQQIEKVKNDEYFLEGYATYNPNEEINSQIKVIDREIEKNTNKSLTLLENKDLYDDQTFRDLNLKLKEEIVRLRKQKDELMDELKFAEEIMTKDDLKAKFDEFLELNLSDISRTREVFHEWINEVRVEDKKVIIDQKFKMI

SEQ ID NO: 41442 - DNA, 50 bp, Bacillus paralicheniformis
  source 1..50: mol_type = genomic DNA
tatagttagaacaaaaatccgggagagccaggtgttttgtattaactact

SEQ ID NO: 41443 - DNA, 40 bp, Bacillus paralicheniformis
  source 1..40: mol_type = genomic DNA
tttttcccaaacgcccatcgatccgctcgtatccatcatt

SEQ ID NO: 41444 - DNA, 50 bp, Bacillus paralicheniformis
  source 1..50: mol_type = genomic DNA
tatagttagaacaaaaatccgggactgccaggtgttttgtattaactact

SEQ ID NO: 41445 - DNA, 40 bp, Bacillus paralicheniformis
  source 1..40: mol_type = genomic DNA
attttctccatctcctattcttcccctggaatccatcatt

SEQ ID NO: 41446 - protein, 583 aa, Neobittarella massiliensis
MTQTQIHATISPCTPILSADPTVKEDAMLDQQKITILYCRLSNEDALDGESNSIQNQKEFLTRYAAEHGYTNLKILVDDGYTGTNFDRPGVQEGFALVKQGLVGCWLVKDLSRFGRDYLTVGQYTDIIFPSYDVRFVAVNDGVDSERGDSDGFAAIRNLFNEWYPRDTSKKVRVVFRQKGTSGKHLGKPPYGYRTDPTDKDHWIIDEDAAPVVKRIFDLAIDGKGPEQIARILEKDKVLTTKALYAKQSENHPDPKKRKKMPERPYHWIGQSVAGILERMEYTGCTCNFKTYSKSYKLKKRIPNAIEDMCIFPDTQEAIVSQAQWDRVQELRKNKRRPTKAERQGLFSGLLFCPDCGNKLHFATCKSFDGKQDHYVCSSYKSGRGTCSAHYIREDVLRELVMERIRAVNAYIRQDVEGFQEEWLQCRRSDQERNIREDRKRVEQAKKRLADLDVLLSRLYEDFVLGDLSKERYKKMTADYEAEQERLKLEIEVTEEWLETQETMSADVDAFVALTQKYVDVPELTPTIVNEYIKKIEVFAPDKSSGKRVQKVKIYFNFVDDVEIPVVSELVVAKSTPGRRKTA

SEQ ID NO: 41447 - DNA, 50 bp, Neobittarella massiliensis; identical to SEQ ID NO: 18102
  source 1..50: mol_type = genomic DNA

SEQ ID NO: 41448 - DNA, 40 bp, Neobittarella massiliensis
  source 1..40: mol_type = genomic DNA
ataaaaaagcaggcagaccttaggcctacctgctttttat

SEQ ID NO: 41449 - DNA, 50 bp, Neobittarella massiliensis; identical to SEQ ID NO: 18104
  source 1..50: mol_type = genomic DNA

SEQ ID NO: 41450 - DNA, 40 bp, Neobittarella massiliensis
  source 1..40: mol_type = genomic DNA
atgaaaaggaagacaaaacctaggcatacctatttttaat

SEQ ID NO: 41451 - protein, 493 aa, Akkermansia muciniphila
MKAVIYARYSSDSQREESIEGQLRECTAFAEKNGITVLRHYIDRAYSAKTDNRPEFQNMIKDSGKRLFDIVIVWKLDRFARNRYDSARYKATLKKNGVKVVSATEIISEGTEGIILESVLEGYAEYYSADLSEKVVRGMTDNALKCKFNGGTMPIGYVIDAEQHFQIDPLTAPFVLEAFKRYDGGETISSIMNWLNEQGLTNTRGQKMTFNSVGHILHNRRYIGEFRYRDVVVPDGIPAIVPQDLFDRVQEKLVKNKKAPARHKAEDDYLLTTKLFCGYCGAYLCGESGTSRTGKVHHYYKCVSVKKKRTECHKKPVRKEWIEDLVVGETMKMVMDDKAIEAIVSMLMDLQDRDNVNVPLYEQQLREADTAISNLLNAIQQGILTRSTKERLEELENRRDELENRLACEKLAKPKVSAEFMTFWLHRFRKLDVRQQSHRKMLIDAFINAIFLYDDKMVITFNYKEGTKTITFAELQEAISNKNGSDLDCLAAP

SEQ ID NO: 41452 - DNA, 50 bp, Akkermansia muciniphila
  source 1..50: mol_type = genomic DNA
ggttcggatttggattgccttgctgcaccaaaccaatataatccgaacca

SEQ ID NO: 41453 - DNA, 40 bp, Akkermansia muciniphila
  source 1..40: mol_type = genomic DNA
ggttcgagtcctgccaggcgcaccatttcataatcctctt

SEQ ID NO: 41454 - DNA, 50 bp, Akkermansia muciniphila
  source 1..50: mol_type = genomic DNA
ggttcggatttggattgccttgctcaaccaaaccaatataatccgaacca

SEQ ID NO: 41455 - DNA, 40 bp, Akkermansia muciniphila
  source 1..40: mol_type = genomic DNA
agttcgagaccagcctggccaaacattgcaaaaccctatc

SEQ ID NO: 41456 - protein, 493 aa, Akkermansia muciniphila
MKAVIYARYSSDSQREESIEGQLRECTAFAEKNGITVLRHYIDRAYSAKTDNRPEFQNMIKDSGKRLFDIVIVWKLDRFARNRYDSARYKATLKKNGVKVVSATEIISEGAEGIILESVLEGYAEYYSADLSEKVVRGMTDNALKCKFNGGTMPIGYVIDAEQHFQIDPLTAPFVLEAFKRYDGGETISSIMNWLNEQGLTNTRGQKMTFNSVGHILHNRRYIGEFRYRDVVVPDGIPAIVPQDLFDRVQEKLVKNKKAPARHKAEDDYLLTTKLFCGYCGAYLCGESGTSRTGKVHHYYKCVSVKKKRTECHKKPVRKEWIEDLVVGETMKMVMDDKAIEAIVSMLMDLQDRDNVNVPLYEQQLREADTAISNLLNAIQQGILTRSTKERLEELENRRDELENRLACEKLAKPKVSAEFMTFWLHRFRKLDVRQQSHRKMLIDAFINAIFLYDDKMVITFNYKEGTKTITFAELQEAISNKNGSDLDCLAAP

SEQ ID NO: 41457 - DNA, 50 bp, Akkermansia muciniphila; identical to SEQ ID NO: 41452
  source 1..50: mol_type = genomic DNA

SEQ ID NO: 41458 - DNA, 40 bp, Akkermansia muciniphila; identical to SEQ ID NO: 41453
  source 1..40: mol_type = genomic DNA

SEQ ID NO: 41459 - DNA, 50 bp, Akkermansia muciniphila; identical to SEQ ID NO: 41454
  source 1..50: mol_type = genomic DNA

SEQ ID NO: 41460 - DNA, 40 bp, Akkermansia muciniphila; identical to SEQ ID NO: 41455
  source 1..40: mol_type = genomic DNA

SEQ ID NO: 41461 - protein, 503 aa, Mycolicibacterium fortuitum
MSKALIVVRLSRVTDATTSPERQLQACRELCAHRGWEVTGIAEDLDVSAGKTSPFDRPQLGDWLTNRLGEFDVIVVYRMDRIVRRLLDLADLIRWCQAHSVKLVSATEAFLDLTAPFGDVVALLVAKVAEMELSAISERNAAAFQHNYRAGKYRGGVPPWGYLPEQVDGSWKLVQDPVQVAVITEVVDRVLAGEPLRAVAYDLTARGIPTARDRFAESQGRQPAGYEWHSRGLKRALTSPTLLGQAVTKGELVRKDDGSPVVRSTPILTPEVFARVGVELTDRGNRKEPTKRSTALLLRVIYCGVCGRPAYRLKGGDDGRSPRYRCASAQYRDSCGNLTIPLAEADQFVTEQLLELLGDSERLTRVWDSGSDHSAELAEVNDTLADLTGVLGTGAYRAGTPQRTALDRRITELARRQEQLSTEAVRPAGWTWQPTGELFADWWELQDVTGRNVWLRSMGVRFTFDHRNGTYWDINLGDLAEVEESLRLGKSARSAINKRRKKP

SEQ ID NO: 41462 - DNA, 50 bp, Mycolicibacterium fortuitum
  source 1..50: mol_type = genomic DNA
gggttgtaaaagcttgcattcgagtactcgaaagcgtagctttactccca

SEQ ID NO: 41463 - DNA, 40 bp, Mycolicibacterium fortuitum
  source 1..40: mol_type = genomic DNA
ggcaatggtgccgatggcgtactcgactgtgctcatccct

SEQ ID NO: 41464 - DNA, 50 bp, Mycolicibacterium fortuitum
  source 1..50: mol_type = genomic DNA
gggttgtaaaagcttgcattcgagctctcgaaagcgtagctttactccca

SEQ ID NO: 41465 - DNA, 40 bp, Mycolicibacterium fortuitum
  source 1..40: mol_type = genomic DNA
ggcaatggtggagatggccctttcctatctgctcatcctc

SEQ ID NO: 41466 - protein, 568 aa, Mycolicibacterium peregrinum
MRALIVVRLSRVTDATTSPERQLQTCRELCAQRGYDVVGIAEDLDVTAATAPFDRPQLGDWLTNRLGQFDVLVFYRMDRIVRRLLDLADLIRWCQEHAVSVVSATEQFLDLTAPFGDIIALLVAKVAEMELSAISERNASAARYNIRAGKYRGGVPPWGYLPQQTEAGWRYVQDPEQVGVIHEVVERVLAGEPLRSVAHDLTSRKILTPRDRFAQSQGRKVKGYEWHSGGLKRALTSQTLLGYAVARQPVLDAQGRVQRDAKGRKVFGPDAVVRNDDGSPVVRSEPILTREVFDRLAVELAERENRKEPTKRSSGLLLQVVYCGVCGKPAYRLKGGPGRKPRYRCASAQHRDPCGNKSIPLEDADEAVEALLLALLGESERLERLWDKGSDHSVELTEIDNILADLTDQLGGGVFTRGTPQRARLDARITALAARQAELAAEAVKPAGWTWQPTGEKFAHWWGRQDVTARNVWLRSMGVTLGFLYSLEGKGPTLNLDIGNLDTMTQQLETSGAAAQWQDTVKAMKENGVAGMEMFRDKVVIHGADGRRHQFDLTPGVPFEEAFNALAE

SEQ ID NO: 41467 - DNA, 50 bp, Mycolicibacterium peregrinum
  source 1..50: mol_type = genomic DNA
tgggtgtaataactaacattcgagtactcgaatgtagtggtttacaccat

SEQ ID NO: 41468 - DNA, 40 bp, Mycolicibacterium peregrinum
  source 1..40: mol_type = genomic DNA
agggatgagcacagtcgagtacgccatcggcaccattgcc

SEQ ID NO: 41469 - DNA, 50 bp, Mycolicibacterium peregrinum
  source 1..50: mol_type = genomic DNA
tgggtgtaataactaacattcgagagctcgaatgtagtggtttacaccat

SEQ ID NO: 41470 - DNA, 40 bp, Mycolicibacterium peregrinum
  source 1..40: mol_type = genomic DNA
gaggatgagcagataggaaagggccatctccaccattgcc

SEQ ID NO: 41471 - protein, 518 aa, Enterobacter sp HK169
MIKTVYCYARVSSRGQAKDGFGMSRQQKMLNDYVSSYDDSLHDRGYELGAVNWLFAEGISAYSGKNIEDGSVLKSFIDDVLDRKIINSVLVIENLDRFSRAEPIKAANLFLNLITAGCDIHEVETETIHHSSSDLSIITGGLQRAHNESKRKARLSIKNWDERIKNAIDGKAVLTNRVPSWLEVKDNGYVIKEGEKEKYNLIFQMYADGFGPAAIRDVLKEKNMLINDSEPTIAHINKIIKDERLIGKFNSTGRKKLSGLVIYPVVVDLSLFHIVDQLRKQRNPVGKIHRKANNLFAGLCICMECGRYVQVNSVEPNGESYFRCGGSLVKIDRCQERGFKYKFFENALLQYIRNFDFSSLNANESDIQIRVNHLSMELLTHIKYKDEILQDIEKEDIPDPNDRRILKNLQKKIGEIESEISNLKRLNVNVSTFDELKKYSEELRDPMNVDIRLDFNIKIKRVIKSIVIKRYSDSIFLVVNYIAINEKQAIVINSKNGEVLYMGVQNDDLKIVEHIIGS

SEQ ID NO: 41472 - DNA, 50 bp, Enterobacter sp HK169
  source 1..50: mol_type = genomic DNA
tacagtaattcactgtcaataaccaccatgatatacttattattactgtt

SEQ ID NO: 41473 - DNA, 40 bp, Enterobacter sp HK169
  source 1..40: mol_type = genomic DNA
cgcaatgatgccaatgaccaccatcagctcaatgagggtg

SEQ ID NO: 41474 - DNA, 50 bp, Enterobacter sp HK169
  source 1..50: mol_type = genomic DNA
tacagtaattcactgtcaataacctacatgatatacttattattactgtt

SEQ ID NO: 41475 - DNA, 40 bp, Enterobacter sp HK169
  source 1..40: mol_type = genomic DNA
tgaaatgatgaaaatgaactaaatcaactaagtgatggtg

SEQ ID NO: 41476 - protein, 540 aa, Dorea formicigenerans
MKQPYNTTNYNTALYLRLSRDDELQGESGSIQTQRMMLRQYAAEHGLTVVDEYIDDGWSGTNFERPSFQRMIDDIEDGKINCVVTKDLSRLGRNYILTGQYTEIYFPSKGVRYIAINDNVDTINGESELAPFLNILNEMHARQTSKKVKAAMHTRFANGAHYGAYAPLGYVKDPDKKGHLLIDPETRWIVEKIFDLAVHGRGAASITRILVEEKVPTPGWLNYERYGTFANIYAGAPAEKAYAWTIAQVKSILKEETYIGHSVHNKQSNISFKNKKKVRKPQEEWYRVENTHEAIISEEVFQKVQELIASRRRKRRNGTTQIFAGLIKCADCGWSLAYGENKQNKNPYGYYHCSKNGQGLRQCSMHYIRYDVLYAYVLARLQYWSMLAQKDEDKLLKRLLNASDRERNSAKKKQAAELKKAEKRKAEVDGLFAKMYEDWSAGRITEYNFNMLSEKYQNEQKELETKIRQLHETMEAAVQTAADAEKWIALMKQYVNPVELTAELLNTLIEKITVHEAVKGEDGSREQEVEIYYRFIGKID

SEQ ID NO: 41477 - DNA, 50 bp, Dorea formicigenerans; identical to SEQ ID NO: 3657
  source 1..50: mol_type = genomic DNA

SEQ ID NO: 41478 - DNA, 40 bp, Dorea formicigenerans
  source 1..40: mol_type = genomic DNA
tgtttctaaatgggagagaggaatctgtttgccggatgta

SEQ ID NO: 41479 - DNA, 50 bp, Dorea formicigenerans; identical to SEQ ID NO: 18389
  source 1..50: mol_type = genomic DNA

SEQ ID NO: 41480 - DNA, 40 bp, Dorea formicigenerans
  source 1..40: mol_type = genomic DNA
tgttttgaaatgggagagacttatgtatgttctgggtgtt

SEQ ID NO: 41481 - protein, 618 aa, Eubacterium rectale; identical to SEQ ID NO: 11111

SEQ ID NO: 41482 - DNA, 50 bp, Eubacterium rectale; identical to SEQ ID NO: 11112
  source 1..50: mol_type = genomic DNA

SEQ ID NO: 41483 - DNA, 40 bp, Eubacterium rectale
  source 1..40: mol_type = genomic DNA
tccttccctctgttcaatggagcttggcttccacggacag

SEQ ID NO: 41484 - DNA, 50 bp, Eubacterium rectale
  source 1..50: mol_type = genomic DNA
actgtccgcaaaaaatgaccgactactgtaggacggattttgcggacatt

SEQ ID NO: 41485 - DNA, 40 bp, Eubacterium rectale
  source 1..40: mol_type = genomic DNA
tcactccctttcttcaattacacttgctttccagggacat

SEQ ID NO: 41486 - protein, 476 aa, Streptococcus suis
MDRNKVAIYVRVSTQGQVDDGYSLDEQVDLLTNYCKLKEWTLYDVYVDPGISGKNMHRPEIERLTRDAKRKLFDIVLIYDLKRLGRSQKENIVLVEDVFNPNGIRLVSFTENFDASTPVGKMVFGMLSAYAELDRANIAERMMMGKIGRAKAGKAMSWGMPPFAYDYNKETGDLELDEVKAPIVEMIYSEFLKGASVNKIVQKLNSMSYHGKNHEWKHHAVTVIIDNPVYCGMMKYMGQTYQAKHTPIIDKKTFELAQLERKKRLSKYHDADWLGPFQRKYIGSKICYCGLCGAHLKSEKDKKNKLTGIRSISFFCPNTRSRGTGECTNPRFKQSVLEGYILNEVAKLQQNPEKLKDIKPAEDNELHNKIATYEKKIKQNSSKLSKLNDLYLNDLISLDDLKQQSKSLLNENEFMEEQIKLLSATTREDELRKKIDTFLAFPDILTADYDTQKQAVELVISRVEATKEGIDIFFNF

SEQ ID NO: 41487 - DNA, 50 bp, Streptococcus suis
  source 1..50: mol_type = genomic DNA
aaccctgttttaagacccagtattaaaatacttagcaataaaacagggga

SEQ ID NO: 41488 - DNA, 40 bp, Streptococcus suis
  source 1..40: mol_type = genomic DNA
accattctatagcagctttaagatgcgtgagggacaagat

SEQ ID NO: 41489 - DNA, 50 bp, Streptococcus suis
  source 1..50: mol_type = genomic DNA
aaccctgttttaagacccagtattgcaatacttagcaataaaacagggga

SEQ ID NO: 41490 - DNA, 40 bp, Streptococcus suis
  source 1..40: mol_type = genomic DNA
atcagtctatagcagctttgcattactttggggagaaaat

SEQ ID NO: 41491 - protein, 476 aa, Streptococcus suis
MDRNKVAIYVRVSTQGQVDDGYSLDEQVDLLTNYCKLKEWTLYDVYVDPGISGKNMHRPEIERLTRDAKRKLFDIVLIYDLKRLGRSQKENIVLVEDVFNPNGIRLVSFTENFDASTPVGKMVFGMLSAYAELDRANIAERMMMGKIGRAKAGKAMSWGMPPFAYNYNKETGDLELDEVKAPIVEMIYSEFLKGASVNKIVQKLNSMSYHGKNHEWKHHAVTVIIDNPVYCGMMKYMGQTYQAKHTPIIDKKTFELAQLERKKRLSKYHDADWLGPFQRKYIGSKICYCGLCGAHLKSEKDKKNKLTGIRSISFFCPNTRSRGTGECTNPRFKQSVLEGYILNEVAKLQQNPEKLKDIKPAEDNELHNKIATYEKKIKQNSSKLSKLNDLYLNDLITLDDIKQQSKSLLNENEFMEEQIKLLSATTREDELRKKIDTFLAFPDILTADYDTQKQAVELVISRVEATKEGIDIFFNF

SEQ ID NO: 41492 - DNA, 50 bp, Streptococcus suis
  source 1..50: mol_type = genomic DNA
aaccctgttttaagacccagcattaaaatacttaacaataaaacagggga

SEQ ID NO: 41493 - DNA, 40 bp, Streptococcus suis; identical to SEQ ID NO: 41488
  source 1..40: mol_type = genomic DNA

SEQ ID NO: 41494 - DNA, 50 bp, Streptococcus suis
  source 1..50: mol_type = genomic DNA
aaccctgttttaagacccagcattgcaatacttaacaataaaacagggga

SEQ ID NO: 41495 - DNA, 40 bp, Streptococcus suis; identical to SEQ ID NO: 41490
  source 1..40: mol_type = genomic DNA

SEQ ID NO: 41496 - protein, 476 aa, Streptococcus suis
MDRNKVAIYVRVSTQGQVDDGYSLDEQVDLLTNYCKLKEWTLYDVYVDPGISGKNMHRPEIERLTRDAKRKLFDIVLIYDLKRLGRSQKENIVLVEDVFNPNGIRLVSFTENFDASTPVGKMVFGMLSAYAELDRANIAERMMMGKIGRAKAGKAMSWGMPPFAYNYNKETGDLELDEVKAPIVEMIYSEFLKGASVNKIVQKLNSMSYHGKNHEWKHHAVTVIIDNPVYCGMMKYMGQTYQAKHTPIIDKKTFELAQLERKKRLSKYHDADWLGPFQRKYIGSKICYCGLCGAHLKSEKDKKNKLTGIRSISFFCPNTRSRGTGECTNPRFKQSVLEGYILNEVAKLQQNPEKLKDIKPAEDNELHNKIATYKKKIKQNSSKLSKLNDLYLNDLITLDDIKQQSKSLLNENEFMEEQIKLLSATTREDELRKKIDTFLAFPDILTADYDTQKQAVELVISRVEATKEGIDIFFNF

SEQ ID NO: 41497 - DNA, 50 bp, Streptococcus suis
  source 1..50: mol_type = genomic DNA
agccctgttttaagacccagcattaaaatacttagcaataaaacagggga

SEQ ID NO: 41498 - DNA, 40 bp, Streptococcus suis; identical to SEQ ID NO: 41488
  source 1..40: mol_type = genomic DNA

SEQ ID NO: 41499 - DNA, 50 bp, Streptococcus suis
  source 1..50: mol_type = genomic DNA
agccctgttttaagacccagcattgcaatacttagcaataaaacagggga

SEQ ID NO: 41500 - DNA, 40 bp, Streptococcus suis; identical to SEQ ID NO: 41490
  source 1..40: mol_type = genomic DNA

SEQ ID NO: 41501 - protein, 476 aa, Streptococcus suis
MDRNKVAIYVRVSTQGQVDDGYSLDEQVDLLTNYCKLKEWTLYDVYVDPGISGKNMHRPEIERLTRDAKRKLFDIVLIYDLKRLGRSQKENIVLVEDVFNPNGIRLVSFTENFDASTPVGKMVFGMLSAYAELDRANIAERMMMGKIGRAKAGKAMSWGMPPFAYNYNKETGDLELDEVKAPIVEMIYSEFLKGASVNKIVQKLNSMNYHGKNHDWKHHAVTVIIDNPVYCGMMKYMGQTYQAKHTPIIDKKTFELAQLERKKRLAKYHNAEWVPPFQRKYIGSKICYCGLCGAHLKSEKDKKNKLTGIRSISFFCPNTRSRGTGECTNPRFKQSVLEGYILNEVAKLQQNPEKLKDIKPAEDNELHNKIATYEKKIKQNTSKLSKLNDLYLNDLISLDDLKQQSKSLLNENEFMEEQIKLLSATTREDELRKKIDTFLAFPDILTADYDTQKQAVELVISRVEATKDGIDIFFNF

SEQ ID NO: 41502 - DNA, 50 bp, Streptococcus suis
  source 1..50: mol_type = genomic DNA
aaccctgttttaagacccagcattaaaatacttagcaataaaacagggga

SEQ ID NO: 41503 - DNA, 40 bp, Streptococcus suis
  source 1..40: mol_type = genomic DNA
accatcctatagcagctttaagatgcgtgagggacaaaat

SEQ ID NO: 41504 - DNA, 50 bp, Streptococcus suis
  source 1..50: mol_type = genomic DNA
aaccctgttttaagacccagcattgcaatacttagcaataaaacagggga

SEQ ID NO: 41505 - DNA, 40 bp, Streptococcus suis; identical to SEQ ID NO: 41490
  source 1..40: mol_type = genomic DNA

SEQ ID NO: 41506 - protein, 513 aa, Azospirillum sp
MSKKNKYQNIADEECKQAVIFARVSSEEQKKGASIDAQLKTVIDYCNNHKFKILDKFSIVESSTRGGRLKFYEMLEFVKSQKHKTAIVVNCVDRLQRGYKECVELDDLRKQGRIEIHFYKEGFYLHRDSNSSDILRWDMGILSAKMYVGALRDNVLRSQEYKREAGQWQSCAPVGYLNISKTRTTSADIIIDEERAPKVKRLFEEYAKGGRTLQDITNLARTLGLSSKMCRVNKTISRAQVQNILKNTFYIGYFTQKGKVYKHPYPLFIDKELFQIVQDTMEGRKRAPSKLYYGDKQYIFTGLVRCGCCGSLMTCETKVKDDKHSYNYLKCNKLRSKCSQKPINEAKILQQLEQELSLPINISDTMLKNIKSEVKKQLKAENINTTNLKRDITIKLNELDEEAKNLFRGYMRGKCDEKMYNELKTEIEMEKEKLQKDMDKYLEIDAETDEILANIAEIAANVGKFLKSPIISEKRDILKLILSDCKTEGKNIAFSIVKPFNELLKTPETDKWC

SEQ ID NO: 41507 - DNA, 50 bp, Azospirillum sp
  source 1..50: mol_type = genomic DNA
ctaaaaacgccagaaactgataaatggtgcgcgatactatgcaattatcg

SEQ ID NO: 41508 - DNA, 40 bp, Azospirillum sp
  source 1..40: mol_type = genomic DNA
taaaggaaggcttttttaatggtgccgctggcaagaatcg

SEQ ID NO: 41509 - DNA, 50 bp, Azospirillum sp
  source 1..50: mol_type = genomic DNA
ctaaaaacgccagaaactgataaaaagtgcgcgatactatgcaattatcg

SEQ ID NO: 41510 - DNA, 40 bp, Azospirillum sp
  source 1..40: mol_type = genomic DNA
taaagtaatgcatttttaaaagtgcctgaaccaagactca

SEQ ID NO: 41511 - protein, 496 aa, Chryseobacterium indologenes; identical to SEQ ID NO: 29931

SEQ ID NO: 41512 - DNA, 50 bp, Chryseobacterium indologenes
  source 1..50: mol_type = genomic DNA
tatcaaatagttgtctccttcagtgaacttgacaggacgctattcaaact

SEQ ID NO: 41513 - DNA, 40 bp, Chryseobacterium indologenes
  source 1..40: mol_type = genomic DNA
gcgatttcttgttgtgtgtgacctcgacaggattcaaacc

SEQ ID NO: 41514 - DNA, 50 bp, Chryseobacterium indologenes
  source 1..50: mol_type = genomic DNA
tatcaaatagttgtctccttcagtggacttgacaggacgctattcaaact

SEQ ID NO: 41515 - DNA, 40 bp, Chryseobacterium indologenes
  source 1..40: mol_type = genomic DNA
gcgagttctgggtgtgtgtgggctcggcaggccccacact

SEQ ID NO: 41516 - protein, 493 aa, Streptomyces geysiriensis
MKPQVDLYVRKSKRVSEGTDALSIRAQEDRGRRWADQNGYGVRKVWRENESAFRAVERPEFEKALAAVLSDEVPALWCFAMDRFSRKGARSVIDLLDSGKRVVFDYEDLDTSRKRDRRWIIQRAEDAFEYSDRLSYNVRTTKERQRTEGKWLARPPYGWTVDKNRKLHNNPKTWPVVKRIYAEAESGSSTRVIAKGLNADKIPGPGGGKWHSATVRQIVHHPVHEGWLTVSVKKTTPVAYLNDGKRVRCAAKDEATIPADKAARARRVISGFQLAANPEAPRRGRAETTMVGLCVCAGCGYNMARSGGSLLCNQQRSGIACPAPASVSITAIESYVVDAWSARLGASDPEDALLGIVADRYAALNAPQETAAISEAKAALRGVEQEAKQLAADYKAGMFNGALRAHFANLAADLDLRKAEAEERLSALESPRVDITFLLEGYARQAYDNAEQSTRRDLVRLAIERVTITKAPYKGARFNGAERVRIEWAETAA

SEQ ID NO: 41517 - DNA, 50 bp, Streptomyces geysiriensis
  source 1..50: mol_type = genomic DNA
agctacccaggtggttggttgaccgggggttgccgaccaccttggtagct

SEQ ID NO: 41518 - DNA, 40 bp, Streptomyces geysiriensis
  source 1..40: mol_type = genomic DNA
ggtgcagccgacggcgaccggcggcagcaccgcgtgcagc

SEQ ID NO: 41519 - DNA, 50 bp, Streptomyces geysiriensis
  source 1..50: mol_type = genomic DNA
agctacccaggtggttggttgaccaggggttgccgaccaccttggtagct

SEQ ID NO: 41520 - DNA, 40 bp, Streptomyces geysiriensis
  source 1..40: mol_type = genomic DNA
ggcggaggcgacagtgtctagcgggagctccgcgtgtagc

SEQ ID NO: 41521 - protein, 550 aa, Agrobacterium rhizogenes
MNANATPALAMPRRAALYLRVSTGRQAEQDLSIPDQRRQLVGYCEGRGIEIVAEYVEPGASATDDKRPSFQRMMDEATQKPPPFDTIIVHSFSRFFRDQFQLEFYFRRLAKNGVKLTSITQDLGEDPMSAMMRQIMALFDEYQSKENAKHTLRAMRENARQGYWNGSRPPFGYRIVAAEMRGARTKKKIEPDPALIDTVRMIFRLARLGVEGGDGPMGVRQIAHYLNGRGLRTQTGGRWGIGTVHDLLTRSTYMGVHRFNVSGKRKGTTKNPEDIVEVAVPAIIDKEEFEEVGEMMRSRAHQLKAARFVSGGTLLGGVVFCADCGGAMTLRTSGKGEEYRYYTCCTAARQGKTGCNGRSIRMDELDGLVVDHLETRLLAPKRLETVLAGIVDRRADRVDKEKDRITALRHLAADTEEKLTRLYRAIEEGLADLDDPNLKGRITELKRIRDSAKADVERAEGRDAKAPTITMDSVQEFAKAVRTQMRREDGSFRRSQIQMLVQRAEVGANQILIRGSALKLLQTLAEASGGKPRVETAGLAVRSSVLNWLP

SEQ ID NO: 41522 - DNA, 50 bp, Agrobacterium rhizogenes
  source 1..50: mol_type = genomic DNA
cggttcgcagttccgttctgaattggctccccgagacgaactataacgcg

SEQ ID NO: 41523 - DNA, 40 bp, Agrobacterium rhizogenes
  source 1..40: mol_type = genomic DNA
ggcacctaagtctgaaaatggctccccgggccggattcga

SEQ ID NO: 41524 - DNA, 50 bp, Agrobacterium rhizogenes
  source 1..50: mol_type = genomic DNA
cggttcgcagttccgttctgaatttcctccccgagacgaactataacgcg

SEQ ID NO: 41525 - DNA, 40 bp, Agrobacterium rhizogenes
  source 1..40: mol_type = genomic DNA
gggacccaagtttaaaaattcctccccccacccaatgcga

SEQ ID NO: 41526 - protein, 417 aa, Dorea formicigenerans
MIMYTLDRFARNRYDSAIYKAKLKRNGVKIFYAKQPMPDTPEGIILESVLEGYAEYYSENLARSIKRGMKENALHGIAMGSPVLGYKIGNDRQYEIAPVGAKAVRTIFTMYAEGKSKTQIVNWLNEHGFKTSRGNAFNKNSLSRILRNDKYIGVYRYDDVVLEDAVPPIIDKTLFDKVQATFRHNYTARAKAKAIEDYLLTTKVFCGHCGEPMVGESGTSKTGKVHHYYKCVNRKRKHNCEKKVEKKEWLERTVVEFTVQQVLTDENIEKISTRAMELIEKELQDTSVLIGLQERLKETNKRIKNLMSAIEQGIITPTTKERLEELEEERRDLEGQIAREEMKKPLLTKERIMYWLESFKRGDIEDVEYQRRIIDTLVNSVYVYDDGDKGRKLVLTFNISGNNTLTISSSDIERTAP

SEQ ID NO: 41527 - DNA, 50 bp, Dorea formicigenerans
  source 1..50: mol_type = genomic DNA
agttcggatattgagcgcacagctccaccaaatagtgcaaatccgaactc

SEQ ID NO: 41528 - DNA, 40 bp, Dorea formicigenerans
  source 1..40: mol_type = genomic DNA
ggttcaactcccgccaggtccactaaaaaacaagtcgaac

SEQ ID NO: 41529 - DNA, 50 bp, Dorea formicigenerans
  source 1..50: mol_type = genomic DNA
agttcggatattgagcgcacagctggaccaaatagtgcaaatccgaactc

SEQ ID NO: 41530 - DNA, 40 bp, Dorea formicigenerans
  source 1..40: mol_type = genomic DNA
ggtgtaacttccacttggtggtctaaaaaacaagttggtc

SEQ ID NO: 41531 - protein, 506 aa, Megasphaera elsdenii
MEERAKAVIYARFSSDKQREESIDGQIRECTAYAESQNLEVIGAYIDRALSARSDNRPDFLRMIADSARKAFQYVIVYQLDRFSRSRYDSAIYKNKLKKNGVRVLSAKEHIGDDPSSIILESMLEGYAEYYSAELSQKVKRGMTENILEGKWVGCRVPLGYKLTADKKLQIVPRDADAVRLIYKMYNSNERIIDIVRYLNAHRYKTAAGRTFNRSSLTKILGNKIYIGTYTWDGHVIKHFAPPILADGVWEAAQKRTKQHKQHPRPKRRSADYALTGLIYCGECGNPMTGQSGHSKNGSAYHYYRCSTKNNYHSRGKKQHINCKSRNISREKVEDLVLDATVRILSNPKAIKLIAKQAADVQRIDPTAQEQVRIAQERKTIQAKLENSIAAVEKGLCSKTIAENIERYESQISELDQKIDELKFAYAPIRIDAIAVEFFLKSLLDKKKDHDKYRLDMFRTFIRQVIIYSDKVEIRYNYTNCPPILKNPVSIALTGSPECSDKAFMV

SEQ ID NO: 41532 - DNA, 50 bp, Megasphaera elsdenii
  source 1..50: mol_type = genomic DNA
gtgttcggataaagcttttatggtgcaccatacaaaagttaatgcgaaca

SEQ ID NO: 41533 - DNA, 40 bp, Megasphaera elsdenii
  source 1..40: mol_type = genomic DNA
tctttaactatcttttggtgcgcctagaaggattcgaacc

SEQ ID NO: 41534 - DNA, 50 bp, Megasphaera elsdenii
  source 1..50: mol_type = genomic DNA
gtgttcggataaagcttttatggttgaccatacaaaagttaatgcgaaca

SEQ ID NO: 41535 - DNA, 40 bp, Megasphaera elsdenii
  source 1..40: mol_type = genomic DNA
tcattaaaattctttagtttggcatataaggattctaact

SEQ ID NO: 41536 - protein, 537 aa, Hungatella hathewayi; identical to SEQ ID NO: 1851

SEQ ID NO: 41537 - DNA, 50 bp, Hungatella hathewayi; identical to SEQ ID NO: 1852
  source 1..50: mol_type = genomic DNA

SEQ ID NO: 41538 - DNA, 40 bp, Hungatella hathewayi
  source 1..40: mol_type = genomic DNA
agtttcatgatgggaatcggacacatatctcccagacaat

SEQ ID NO: 41539 - DNA, 50 bp, Hungatella hathewayi; identical to SEQ ID NO: 1854
  source 1..50: mol_type = genomic DNA

SEQ ID NO: 41540 - DNA, 40 bp, Hungatella hathewayi
  source 1..40: mol_type = genomic DNA
actttcaagatggaaatctacaatatagcttccagaatat

SEQ ID NO: 41541 - protein, 583 aa, Amycolatopsis rubida
MTSAYADFIDELQQDVTIPIQPPMDDLAPGTRAVIYLRVSSTGQVRTDYNPEGISIPAQREACLRKARELGVTVIDEYVEPGRSGTEMTKREAFQQMLARVRSQGDVDVIIIYQLSRMARNRYDDAIVMADLRKRGVTLVSATEAIDDTPVGQLMHGILATFNEYQSRQSGADIAYKMGQKARNGGTLGRAKIGYLNHIDHSDGRVIRTIIVDPERAPFVQLGFELFATGDYTQEELADELYDRGLRTRATRRHPAKKISENKISQMLRDRYYLGYVEYDGEEIQGRHEPLIDEDLFDTVQEILESRMTAQERRRVHHHYLKGSLFCGRCQRDGIKRRMIIQRTINSKGAEYLYFFCRGRQKGLCQAPHVNVTLVEDAVERHYSAIRFSQPFIADMRDQIDAVLGEQEKSARLLRKQITAQLKELDTKEENLIDLAADSTLPRTKVKEKLRDIARERRRLEERLDTANADLTDSAQLVNAGLALLEQPDQLYRRCNDQQRRLLNQAIFHALYIEDDKITDGELREPFGELHAIQDQRAGATGAEGASKRTTRDAGGPCTPSGVAVLLRGLHSGTCSSKTSKVE

SEQ ID NO: 41542 - DNA, 50 bp, Amycolatopsis rubida
  source 1..50: mol_type = genomic DNA
ttgttctagtaagacctctaaggtggaggttaggggaccttactcgaaca

SEQ ID NO: 41543 - DNA, 40 bp, Amycolatopsis rubida
  source 1..40: mol_type = genomic DNA
agggcctctgacttgcggtggagctgaggggaatcgaacc

SEQ ID NO: 41544 - DNA, 50 bp, Amycolatopsis rubida
  source 1..50: mol_type = genomic DNA
ttgttctagtaagacctctaaggtacaggttaggggaccttactcgaaca

SEQ ID NO: 41545 - DNA, 40 bp, Amycolatopsis rubida
  source 1..40: mol_type = genomic DNA
agggcctcagacatgatgcacagctgttgggaatgtaagc

SEQ ID NO: 41546 - protein, 577 aa, Pseudoalteromonas spongiae
MGICASILTRFHKGVEMDTSNLSGNVYLYQRFSSSKQEGNSSLFRQGEAQKEWLSRHPNCVVVHLDDHPLIDEGLSAYTGEHIEHGSLGRLVAAIESNVVERGSIILVEHFSRLTRMDIDKSEELIKKIWKNGVSIVTARGNNYYPPEAVNDSKLRISLIIEIEKAHEESLWRSKKVQGSWDRREELAKEHKIPPKMRMPFWLNSDGTLNEFAPVVRDLFELHASGDGQVVIERKLRAKYGDIKPLANVNPTKIIRILKNERCIGRVYGEKLYEPVIDEATFYSAQRIHDERLYTSVRENRIWPLHGMVKCGHCGSGMSIQQTKGSLPLLRCSRKQRSGGELCESSTTFPYVVAYHFFLIYVEPVIMAMMSDSKRLQGFELERVKINQEIKKLRTALADAKAQYKSRIEAGKSALATLSIMDDLQEDIDLLEDKMSEVNGNISAQKSLKSISNDIYQLSVDNPKDYNLELNKTGFKIGLKDKKLSFKDPDTGREIASLLYVEYNRKRMSYVYKFQGIVEFYNAELFRGEVRSKDWSVEKLLHPRRKSELQPNDIAAMMHNLKIHEQSGTFFSFKVNE

SEQ ID NO: 41547 - DNA, 50 bp, Pseudoalteromonas spongiae
  source 1..50: mol_type = genomic DNA
tacttgcacatatttacatttggtgagcaatatgggaatatgtgcaagta

SEQ ID NO: 41548 - DNA, 40 bp, Pseudoalteromonas spongiae
  source 1..40: mol_type = genomic DNA
actcgatcatttaatttgtgaattaaaagctgggcaaacg

SEQ ID NO: 41549 - DNA, 50 bp, Pseudoalteromonas spongiae
  source 1..50: mol_type = genomic DNA
tacttgcacatatttacatttggtcagcaatatgggaatatgtgcaagta

SEQ ID NO: 41550 - DNA, 40 bp, Pseudoalteromonas spongiae
  source 1..40: mol_type = genomic DNA
attcaataactttaaaagtcaattaaaatctgggcaaatg

SEQ ID NO: 41551 - protein, 474 aa, Rathayibacter tritici
MTKRAAIYVRQSLDREEGIDRQIARCTEMAERRGWTVVRAYRDNDVSATKPRGPGTAWAEMLSGAASRDFDVVISVDMDRLLRGIRDLLTLIDAGVAVMTIDGEIDILTADGQLRATMMAGMARFETARKSERQKRANESRRAQGRPTPGKRRFGYETDGCTPVEEEAVTVREIFERVEKGHSLRGIALDLTDRAVPSATMKSWTPGRLRDICNRVHYAGHTLVEGVLTESTWIKPIVTSEQAERVRTILADPGRRTTPGPGTKHLLSGLAHCDLCGGKLFYSRSYICKADTSHVQIGKKFIDQQVIDACVRALLFAPVGSVETGESLASLLAELDANHALVSDAYAEKDEGLLPPAVARVRLLKLRDDREGIEARIEAQRAAQASSGILGQLRAELWGRGRVNLDRAVEVGAQVEERFHGLSLDEQRELVRTLLDVRVAKGRGADRVKIRHLVATSLDEEDWSLVEPQASTSS

SEQ ID NO: 41552 - DNA, 50 bp, Rathayibacter tritici
  source 1..50: mol_type = genomic DNA
ccacgcatataactgctgtttcgtcaccagaagtagagttgtgcgtatga

SEQ ID NO: 41553 - DNA, 40 bp, Rathayibacter tritici
  source 1..40: mol_type = genomic DNA
cacccgctggcgattcctgcagcgcaaccgcctcatcgcc

SEQ ID NO: 41554 - DNA, 50 bp, Rathayibacter tritici
  source 1..50: mol_type = genomic DNA
ccacgcatataactgctgtttcgtctccagaagtagagttgtgcgtatga

SEQ ID NO: 41555 - DNA, 40 bp, Rathayibacter tritici
  source 1..40: mol_type = genomic DNA
caacaagacgcgcttcctgctgagcaacctcctcatcgac

SEQ ID NO: 41556 - protein, 469 aa, Rathayibacter tritici
MSTQRAAAIYARQSLDRAEGIDRQLERCKELAEARGYTVVETYQDNETSASKVRGAGTAWARMLREAKDGRFDVLLAVDLDRLLRSLPDLLAITETNVAVLTVDGQLDLTSADGEFRATMLTSIARFETRRKGERQLRANEYRASKAMPNPGRRRFGYESNGREIREAEAVIVRSLFERFREGVSVRSLSQDLVTKGIDPAPGRSWSPRRVRYILQSEVYTGSALYKGQATRSEAVQPIVSAELAEEVRALLSDPTRKTTPGPGVKHLLSGLARCAICDAPLVYMRAYMCRTNLKHVSIQKKSLDPVVRAEVVKAILFAPSDTTKEANGDIPALASKLASNSATVAQLFQDRAEGLIPPDVARSQLIALKGQREAAEKALELARAASATGTFAQLRAGLFTRGWVSIADAAERANQMGAAFDALDLDRQRELVRTLLSVRVEKGRASNRVKVEHLVATSLNDDSEVESE

SEQ ID NO: 41557 - DNA, 50 bp, Rathayibacter tritici
  source 1..50: mol_type = genomic DNA
cgacgcatacaacggccgttttgtcagcactatgtaggttgtatgcgtga

SEQ ID NO: 41558 - DNA, 40 bp, Rathayibacter tritici; identical to SEQ ID NO: 41553
  source 1..40: mol_type = genomic DNA

SEQ ID NO: 41559 - DNA, 50 bp, Rathayibacter tritici
  source 1..50: mol_type = genomic DNA
cgacgcatacaacggccgttttgtctgcactatgtaggttgtatgcgtga

SEQ ID NO: 41560 - DNA, 40 bp, Rathayibacter tritici; identical to SEQ ID NO: 41555
  source 1..40: mol_type = genomic DNA

SEQ ID NO: 41561 - protein, 521 aa, Vibrio alginolyticus
MNYVAYLRVSSYNQKELGDSIDGQRQSIIDWVQAKGGNILRWYTDDGVSAFKGKRNQFELMLHELENDIVKADGLIVYSLSRFSRNLLRQLEAKKLLEKKGITLVSATEALPTNQEDNFIMVSLLGLMNEHYSIQNGKVVTDRLRDTARKGYFTGGPVPYGYCSITVSGVTSKCRKKLQIFEEEADLVKQIFSLSEKGVNGKPLGVKSIAEMLNKKLQYRRGTKWNRNSVSRLLRNTAYIGDFVYNSGGREPIIVKIPAIIDRNQFDNVQDGLKSRDIFSAESRRLRSHCLLTGLLKCQVCGGSMVVTSGKSGKYSYYQCSKQVRHAPDTCTSKRIRRDIVERVVKQKFIGELLKEDHLKKIHTRTRLRIKDANRTLVSDKSRLSKRKSNLETRYSRLIMMVADGELAPDERINKNLSEISAQIDALEHELARLSVRINFPVKNFGDARLQDFAVAVLEYLMDADDEKIKQLMLSTVTSVKVVEGAKKLIFEGSNMAVLYLIANAKTGTEFSVPVFVTKWR

SEQ ID NO: 41562 - DNA, 50 bp, Vibrio alginolyticus
  source 1..50: mol_type = genomic DNA
ttctcggttcccgttttcgtcacaaagtggcgggcagcatgggacgagta

SEQ ID NO: 41563 - DNA, 40 bp, Vibrio alginolyticus
  source 1..40: mol_type = genomic DNA
aaatgcgagctctctaaataagtggcggagagatagggat

SEQ ID NO: 41564 - DNA, 50 bp, Vibrio alginolyticus
  source 1..50: mol_type = genomic DNA
ttctcggttcccgttttcgtcacaatgtggcgggcagcatgggacgagta

SEQ ID NO: 41565 - DNA, 40 bp, Vibrio alginolyticus
  source 1..40: mol_type = genomic DNA
caaggcaagctctctaaatatgaggagaagacataagaaa

SEQ ID NO: 41566 - protein, 521 aa, Vibrio alginolyticus
MNYVAYLRVSSYNQKELGDSIDGQRQSIIDWVQAKGGNILRWYTDDGVSAFKGKRNQFELMLHELENDIVKADGLIVYSLSRFSRNLLRQLEAKKLLEKKGITLVSATEALPTNQEDNFIMVSLLGLMNEHYSIQNGKVVTDRLRDTARKGYFTGGPVPYGYCSITVSGVTSKCRKKLQIFEEEADLVKQIFSLSEKGVNGKPLGVKSIAEMLNKKLQYRRGTKWNRNSVSRLLRNTAYIGDFVYNSGGREPIIVKIPAIIDRNQFDNVQDGLKSRDIFSAESRRLRSHCLLTGLLKCQVCGGSMVVTSGKSGKYSYYQCSKQVRHAPDTCTSKRIRRDIVERVVKQKFIGELLKEDHLKKIHTRTRLRIKDANRTLVSDKSRLSKRKSNLETRYSRLIMMVADGELAPDERINKNLSEISAQIDALEHELARLSVRINFPVKNFGDARLQDFAVAVQEYLMDADDEKIKQLMLSTVTSVKVVEGAKKLIFEGSNMAVLYLIANAKTGTEFSVPVFVTKWR

SEQ ID NO: 41567 - DNA, 50 bp, Vibrio alginolyticus; identical to SEQ ID NO: 41562
  source 1..50: mol_type = genomic DNA

SEQ ID NO: 41568 - DNA, 40 bp, Vibrio alginolyticus; identical to SEQ ID NO: 41563
  source 1..40: mol_type = genomic DNA

SEQ ID NO: 41569 - DNA, 50 bp, Vibrio alginolyticus; identical to SEQ ID NO: 41564
  source 1..50: mol_type = genomic DNA

SEQ ID NO: 41570 - DNA, 40 bp, Vibrio alginolyticus; identical to SEQ ID NO: 41565
  source 1..40: mol_type = genomic DNA

SEQ ID NO: 41571 - protein, 521 aa, Vibrio alginolyticus
MNCVAYLRVSSYNQKELGDSIDGQRQSIIDWVQAKGGNILRWYTDDGVSAFKGKRNQFELMLHELENDIVKADRLIVYSLSRFSRNLLRQLEAKKLLEKKGITLVSATEALPTNQEDNFIMVSLLGLMNEHYSIQNGKVVTDRLRDTARKGYFTGGPVPYGYCSITVSGVTSKCRKKLQIFEEEADLVKQIFSLSEKGVNGKPLGVKSIAEMLNKKLQYRRGTKWNRNSVSRLLRNTAYIGDFVYNSGGREPIIVKIPAIIDRNQFDNVQDGLKSRDIFSAESRRLRSHCLLTGLLKCQVCGGSMVVTSGKSGKYSYYQCSKQVRHAPDTCTSKRIRRDIVERVVKQKFIGELLKEDHLKKIHTRTRLRIKDANRTLVSDKSRLSKRKSNLETRYSRLIMMVADGELAPDERINKNLSEISAQIDALEHELARLSVRINFPVKNFGDARLQDFAVAVQEYLMDADVEKIKQLMLSTVTSVKVVEGAKKLIFEGSNMAVLYLIANAKTGTEFSVPVFVTKWR

SEQ ID NO: 41572 - DNA, 50 bp, Vibrio alginolyticus; identical to SEQ ID NO: 41562
  source 1..50: mol_type = genomic DNA

SEQ ID NO: 41573 - DNA, 40 bp, Vibrio alginolyticus; identical to SEQ ID NO: 41563
  source 1..40: mol_type = genomic DNA

SEQ ID NO: 41574 - DNA, 50 bp, Vibrio alginolyticus; identical to SEQ ID NO: 41564
  source 1..50: mol_type = genomic DNA

SEQ ID NO: 41575 - DNA, 40 bp, Vibrio alginolyticus; identical to SEQ ID NO: 41565
  source 1..40: mol_type = genomic DNA

SEQ ID NO: 41576 - protein, 579 aa, Pseudomonas typographi
MPTAYAYIRYSSKAQGGADRDSVDRQMSSIEAITKRQNIELLPQNIFSDTGVSGYDGSNSRTGKLKELIDRINSLEIRKGDYVFVESIDRLSRQRLLQAKELVNNILEKGIVLITTIDGQRYEKPNDINGIDDLQQDILLSVISKRAHEESRTKSIRRKSAWNRAKASAETDQKIFNAHNPPYGIYYDKKTNSFKINEDEANEIRQIFESLKYVGVSQTIRDMNSTAKRKWTNKNVSHLFSTKYPLGYYMAQRRDEQKRKIFESYIENYYPQIISFELWQEVRNAMEGRKHRKNYGSHSLGNLNIFRHAIKCGECKASLLFEMNKNPKGIQYSYFHCHTRKEIKGKCNQPRFRFEYALGILLELVKNATENPNYIGEGYIDPDYVDVLDPSVWQARHNNFKELLADIMNDKGGAIANQQKLSTLEAELSKNLIIEQNLKKSFEGFADGVIPDVFINRVIKVQNAITELRTEITKLKASLNTNKTDLRIYSTKDILRLYETEQGRLELNNYFTVNEISFIFEYSKETRTLVGKVLHKGVFIQRIDKKFPLHNPLVKEYGIQNINKMSETNKAIQPSQSPN

SEQ ID NO: 41577 - DNA, 50 bp, Pseudomonas typographi
  source 1..50: mol_type = genomic DNA
gtatggagtaaacccctaccgttcgagaatggtaggtgctatcctcacac

SEQ ID NO: 41578 - DNA, 40 bp, Pseudomonas typographi
  source 1..40: mol_type = genomic DNA
ggtgctgcgcgagccgctggagtccggtgaaatcatcatc

SEQ ID NO: 41579 - DNA, 50 bp, Pseudomonas typographi
  source 1..50: mol_type = genomic DNA
gtatggagtaaacccctaccgttccagaatggtaggtgctatcctcacac

SEQ ID NO: 41580 - DNA, 40 bp, Pseudomonas typographi
  source 1..40: mol_type = genomic DNA
ggtgccactgcagcagctccagtccagtgaaaacatcttc

SEQ ID NO: 41581 - protein, 537 aa, Salinispora tropica
MAGNPTPTSPPKRRGRRAPTTPPEDSTGPCRVCIYIRRSTDDEHQPFSLLAQRTALKKYVDNHPGWVIVCEFEDDASGATTERPGLKKALDAAKAGLYDVLLVYRVDRFSRSLAHFVDLAATLDAANVRFSSATEPVDTGGAIGRMMLQFLAVFAEFERNMIIDRVKSGMTAKASKGQWAGGTRPYGYLVDKDTQRLVPHPDEAPILRDIFHLYTRDRLGTRAIATDLNARGIPNRTGKQWSGHTINRILDNPAYTGDIAYRDVYVPDAHKPLIDRDTFRRAQDIANARGDIQTQRAKSDSDYYLTGLLTCPQCGQRYIGTSAKGRNRRYRYYTCFTRTRYGKHATCTAPRLPADDLDHMILQALHDFYTTAEPVLAAMIERANSQHDSTTDDRRAELTAIAHQITATENAIDRYHTAFENGAMDDATAGPRIRELRHRLAQLQARHTELDAGLTSQPEPPPPGTVARIRDHLSTIMTSGSTTERKAAIETLIAEVQLTDQGVVPVFKIPTDTTMPPPETDEGTSKEPPVRTMVRSV

SEQ ID NO: 41582 - DNA, 50 bp, Salinispora tropica
  source 1..50: mol_type = genomic DNA
cggttcgcacaatggtgcggtcggtgtggaccggaggtaccaccatgcga

SEQ ID NO: 41583 - DNA, 40 bp, Salinispora tropica
  source 1..40: mol_type = genomic DNA
gccgcaggtccgagaagtgtgggccgccagggactcgaac

SEQ ID NO: 41584 - DNA, 50 bp, Salinispora tropica; identical to SEQ ID NO: 41582
  source 1..50: mol_type = genomic DNA

SEQ ID NO: 41585 - DNA, 40 bp, Salinispora tropica
  source 1..40: mol_type = genomic DNA
gcctcaggtcctagaatcgtggactgcctgggattccacc

SEQ ID NO: 41586 - protein, 509 aa, Proteiniphilum saccharofermentans
MKRAIRYLRFSQLGQSNSSIERQELYTDQWLTNNKVELVDTFIDRGKSARTFDRPDFNKLKAFIDKHYKSVDYLLVDQLDRFSRDAGEAMSMVKLLQKKYAIQVVSVTEGITFDYDTPGSFFRAGLQLLLAEEDNINRSIKVKGGVYTAKAKEGRFLYKTAPFGYRKEGERKERRLVVVESEAKIVRFIYDAFIRNMPIYKIKEKAYEMGFDRKGNMVIEKLLKNPAYVAQLHVDAYKNYPGGLFPANHEPIVDMTTWQLAQEKLKRPIKKRAIIDDDIPLRGILKCHCGNPISGAASRGKSGKYFYYYKCRHSRHNNVSAIKAHNQLLGAFGLMSLPDRLVTEIRNSCRLSVDTEMKANSEKLIEKKRELKEAEDKLFSLEEKWINSEVTKETYDRWYSVYHHSVFNLNAAIERLSKDQGKVFQILEKNIYMLSDLGYVYTQSDTMLKREFVNLVFDNNLYYQEGIFRTPTMLQIFTHKALEMKEKGYLIYEKKGEDFDNPPLSGERG

SEQ ID NO: 41587 - DNA, 50 bp, Proteiniphilum saccharofermentans
  source 1..50: mol_type = genomic DNA
gattttgataatccccccctcagcggagtgagaggggtcacgttcgaaca

SEQ ID NO: 41588 - DNA, 40 bp, Proteiniphilum saccharofermentans
  source 1..40: mol_type = genomic DNA
tttgtccagacctttcagcggagagagagggattcgaacc

SEQ ID NO: 41589 - DNA, 50 bp, Proteiniphilum saccharofermentans
  source 1..50: mol_type = genomic DNA
gattttgataatccccccctcagcgtagtgagaggggtcacgttcgaaca

SEQ ID NO: 41590 - DNA, 40 bp, Proteiniphilum saccharofermentans
  source 1..40: mol_type = genomic DNA
tttatccagtcctttcagtgtacagatagggaaactaagg

SEQ ID NO: 41591 - protein, 583 aa, Listeria monocytogenes; identical to SEQ ID NO: 37521

SEQ ID NO: 41592 - DNA, 50 bp, Listeria monocytogenes; identical to SEQ ID NO: 37522
  source 1..50: mol_type = genomic DNA

SEQ ID NO: 41593 - DNA, 40 bp, Listeria monocytogenes
  source 1..40: mol_type = genomic DNA
tatgtttccaatgacgacacatattgaagctgtgactgtt

SEQ ID NO: 41594 - DNA, 50 bp, Listeria monocytogenes
  source 1..50: mol_type = genomic DNA
tgtcttcccatagtagttccgacatctgtggagactattgtgttgctaca

SEQ ID NO: 41595 - DNA, 40 bp, Listeria monocytogenes
  source 1..40: mol_type = genomic DNA
aatggtaccaattctgacttctaaagaagctgtgactgct

SEQ ID NO: 41596 - protein, 583 aa, Listeria monocytogenes
MKKVEVIKASSSISKSKRGKMIECLRVAAYCRVSTDSEDQLNSYKSQKTYYTDLIQKNNEWIFVGIYADEAITGTQVTNRQDFQRMINDCMNGEIDMIVTKSISRFARNTLDTLKYVRMLKEKNIAVFFEDENINTLTMDGELLLVVLSSVAQQEVENISSNVKKGLKMKMKRGELVGFQGCLGYDYHPEDKSITVNKEEAEIVRYIFNRYIEGAGGSVIGKELENLGYLTKYGNATWAPTTVLGIIKNEKYKGDILLGKTFTVDPISKRRLENMGEEDQFYIRNHHEPIISEEVFDKAHEILNRRNKNRGKIGNGNTKREKYSRKYAFSCLLECGFCKGTLTRRKWHSGSEYSKVIWQCVTATKKGKKHCPESKGIPEQAIEDAFIESYRILSDDNKDVLDEFLKIMDETLSSSSINKQLTKVDKEIEAIEKKKSKLVDMRLEDIIDSDTYESKFSNMTNKQENLLKERIKLQETATTEKDVKRRLREFKKTLENNEVLHEFDRHVFESIVEKVIVGGYDEDGNIDPAQLVFVYKTGFKNSLDGNQFKPARKNARGNRKSNKLCSQTNDDVKDLCSYTSTNT

SEQ ID NO: 41597 - DNA, 50 bp, Listeria monocytogenes
  source 1..50: mol_type = genomic DNA
tatgttcctatactagtaccaacacatgtggagactattgtgttgataca

SEQ ID NO: 41598 - DNA, 40 bp, Listeria monocytogenes; identical to SEQ ID NO: 41593
  source 1..40: mol_type = genomic DNA

SEQ ID NO: 41599 - DNA, 50 bp, Listeria monocytogenes
  source 1..50: mol_type = genomic DNA
tatgttcctatactagtaccaacatctgtggagactattgtgttgataca

SEQ ID NO: 41600 - DNA, 40 bp, Listeria monocytogenes; identical to SEQ ID NO: 41595
  source 1..40: mol_type = genomic DNA

SEQ ID NO: 41601 - protein, 571 aa, Agrobacterium tumefaciens; identical to SEQ ID NO: 17446

SEQ ID NO: 41602 - DNA, 50 bp, Agrobacterium tumefaciens
  source 1..50: mol_type = genomic DNA
ttgcgcctaatcattaattccagttcgccgggattaatgattgcgtgcat

SEQ ID NO: 41603 - DNA, 40 bp, Agrobacterium tumefaciens
  source 1..40: mol_type = genomic DNA
cagatcttcccattccaggtcggagggacgggcatagatc

SEQ ID NO: 41604 - DNA, 50 bp, Agrobacterium tumefaciens
  source 1..50: mol_type = genomic DNA
ttgcgcctaatcattaattccagtccgccgggattaatgattgcgtgcat

SEQ ID NO: 41605 - DNA, 40 bp, Agrobacterium tumefaciens
  source 1..40: mol_type = genomic DNA
cagagcttcccagacaaggccggagagccgcggagagaac

SEQ ID NO: 41606 - protein, 455 aa, Rhodococcus fascians
MRAIIYCRVSSDQTGKAKSVADQERECRAVCEREGWPVAEVLTDNDRGASRWSTKDRPAYKRLNEVLRSGDVLVLWEASRASRDLAAYVLLRDLCASRGVKWCVSGKLLDPNSGDDRFGSGLDALLAEREAEQIRERVLRGKRSAALEGRPNGRLPYGYRRQFHPDTGKTERWVLNPVTSPIVSEIVTRFTNGESLHAVARDLTERDVPPPNGGVPWRAQRIRTMISSPTYAGLRVQHGQVIGKGNWNALFSEDVHHRILGILADPSRVTSRGNTVKHLLTGIAVCGVCRAPVRFFGPKSLKSPTYQCSEGSCVRRRVELVDDLVTEAVIGRLESLDVLVDLDDRPSVDLTAIEDARTRRSQLAGKVARGEIDLDLAQGIKAELDRMIVEHEQTLRATTYSPLVVSLAGPDARKRWIDDLEVHDRRQIIRELVTVTIKPSSVGTRRFSGDDIDVH

SEQ ID NO: 41607 - DNA, 50 bp, Rhodococcus fascians
  source 1..50: mol_type = genomic DNA
tggcaccccttgtcattgtcggcttcggccgaatgtgtcgtggggtgcag

SEQ ID NO: 41608 - DNA, 40 bp, Rhodococcus fascians
  source 1..40: mol_type = genomic DNA
ctgcaccgggtctcccgcctcgacgagctggccgttgccg

SEQ ID NO: 41609 - DNA, 50 bp, Rhodococcus fascians
  source 1..50: mol_type = genomic DNA
tggcaccccttgtcattgtcggctgaggccgaatgtgtcgtggggtgcag

SEQ ID NO: 41610 - DNA, 40 bp, Rhodococcus fascians
  source 1..40: mol_type = genomic DNA
cttcgccgggacccccgccgagccgccctcgccgccgccg

SEQ ID NO: 41611 - protein, 558 aa, Aeromonas veronii
MPKAYAYVRWSTAEQGGADRDSHTRQTSPLEAFTTATGVPVVETVIDKGVSAFRGANARIGQLKGLLDRVENGEIEKGDYIIVESIDRLTRQKLNDSLDLIQSILKKGIRLHTVIDQKTYSHDDPSRDLETLLMVGVIAKRAHEESDTKSKRLKSSWLKKRDAAETTIIRKQCPYGFRYDEQTQTFTIVEDEAQEIRHIFDLLKHMGILESIKRVNQYSKRRWTRKHIDELIKTKSPIGVLCLNRRKEDGNGRVLDRYVPGYFPKIIEEINFDAAVSAVKSRFNERKSGRRTANNYNIFRHCIQCETHKVGMIFNLQGLGAEKKRYAYLVCSNRAERVCDCNNRFRFEHVVGAFLSFVKQISENRYIDERTDKKREDFIWFSQSEYKKMDVLNDAFSRFFSARDTSAPKEEIRAKKKLLSTERQVLEMLDASIAQFNDIIPKTFMKRVAESEARITAIESDILSLEGSLVIEAENLEITTYEDILKLYESEDGRLKLNTFFISRGIIFEASKSEEDGSVFLTVKIKDEPNFTLTAHHRDTGKEPLKTFGIPDLSHIIK

SEQ ID NO: 41612 - DNA, 50 bp, Aeromonas veronii
  source 1..50: mol_type = genomic DNA
ttattagaaagtgctataccgttgaacagcggtatggtattttctaataa

SEQ ID NO: 41613 - DNA, 40 bp, Aeromonas veronii
  source 1..40: mol_type = genomic DNA
gctccccatggagacgcagaagcagttctcgaagctctcg

SEQ ID NO: 41614 - DNA, 50 bp, Aeromonas veronii
  source 1..50: mol_type = genomic DNA
ttattagaaagtgctataccgttggtcagcggtatggtattttctaataa

SEQ ID NO: 41615 - DNA, 40 bp, Aeromonas veronii
  source 1..40: mol_type = genomic DNA
ggaccacagggacacgcaggtgcaggtctagaagcccgtg

SEQ ID NO: 41616 - protein, 516 aa, Chryseobacterium gleum
MGKIADLYIRVSTDEQADKGYSLRDQEDRLRRYCELKEISVRNVYIEDYSAKTFNRPEWKKLITALRKQRNIKNVTLLLFTKWDRFSRNTSQAYQTIDILRSLRSEPQAIEQPLDMSIPESKIMLSHYLTIPEVENERRALNVFYGMRRARKEGRWMGTAPLGYVNKITEDHKKYIAIKEVEAEILIWAFDKILENSFNTNQIWKMVREKAKGMSRFSKNNFWTAIRNPIYCGKIFIPAFKDEESYFVKGLHEPIISELKFREVQDVLDGRKRDFTKPKIVSMDNLPLRGFLKCPKCERMLTGSASKGKLGRYYYYYHCSSQCGVRFRAPEVNAAFERQLSELLPRPGMSEVFIETVVEDFQSKTKKQNIERKEMLKQVEDLNARLQKALIQKVDGTLEDDDYNFIKKDTYAKIERLEFDLSHLSDQNAEISRLLKSELAKIINLYKYYIEGDMEQKRQIISSMFPEKLMFDGEKHRTPRVNSAVQLIYSKEREIRGNKKGTNLSFLDLSQQVDPQ

SEQ ID NO: 41617 - DNA, 50 bp, Chryseobacterium gleum
  source 1..50: mol_type = genomic DNA
ttttttagatttgtcccaacaagtagacccacaggtacaaagttcaaaat

SEQ ID NO: 41618 - DNA, 40 bp, Chryseobacterium gleum
  source 1..40: mol_type = genomic DNA
cttaaaaaggatggtttgtagacccacagggattcgaacc

SEQ ID NO: 41619 - DNA, 50 bp, Chryseobacterium gleum
  source 1..50: mol_type = genomic DNA
ttttttagatttgtcccaacaagtaaacccacaggtacaaagttcaaaat

SEQ ID NO: 41620 - DNA, 40 bp, Chryseobacterium gleum
  source 1..40: mol_type = genomic DNA
tttgaaaaggatagtttgaaaatccaaaggaaatcaagcc

SEQ ID NO: 41621 - protein, 522 aa, Paenibacillus macerans
MVMKDDRAYVRVSTLKDSQKDSPEHQEAFIRERASRENITISKVYEDRDTATSIVAREDVQEMIADAKRGEIKSIWFASLSRFSRDALDAISLKRILVNALKIRVVSIEDGYDSAVKDDELLFGIKSVVNQNTSGDISQSSRRGIRQSAAKGNYIGSIPPYGYRKVVVDGRKTLEVIPEQAEIVKKIFELYLNGNGEKNIVNYLNGDNEKNTPIPSYRGGVWGLTSVQRILQNENYTGYTVYGRHTTEVSYNDLSDLMDRGKKLVMKPKSEWQKTPFQTHEAIISKEVFDRAQEIRLLRGGGTRGGRRSFVNVFSKFIFCAECGTAMVSMGSKTKNKNGKDYRYLMCSRRRRTGEIGCSNGKWLPYYEFRDELIKDILERVRESIRVLEEEGASEINSQLPESNTEKDKRKLEKRIEENRKLLFEVRRQHMLGEIDDAQYEFEKAQYEKEISESEHRLAIIEANELRSLDREKVIRETKQYLKELTEMTTYDDVEKTRMLLMHMVKRIEVNKDGEVDVDTYV

SEQ ID NO: 41622 - DNA, 50 bp, Paenibacillus macerans
  source 1..50: mol_type = genomic DNA
ttgcgtgcttgatgacacatcacgaacgtaatgtattttgaaacacacaa

SEQ ID NO: 41623 - DNA, 40 bp, Paenibacillus macerans
  source 1..40: mol_type = genomic DNA
cgtacgtaatcacatttcgaatgtcatgcaaaagttgaat

SEQ ID NO: 41624 - DNA, 50 bp, Paenibacillus macerans
  source 1..50: mol_type = genomic DNA
ttgcgtgcttgatgacacatcacgaccgtaatgtattttgaaacacacaa

SEQ ID NO: 41625 - DNA, 40 bp, Paenibacillus macerans
  source 1..40: mol_type = genomic DNA
agaacataatgacatttagacagacatgcaaagcttgaac

SEQ ID NO: 41626 - protein, 543 aa, Pseudomonas alcaligenes
MGGSRVPKINARVYSYLRFSDPRQATGSSADRQLQYAQRWAADRGLLLDESLSLRDEGLSAYHQLHVKQGALGAFLKAVDEGRIPEGSVLIVEGLDRLSRAEPIQAQAQLAQIINAGITVVTASDGREYNRAGLKAQPMDLVYSLLVMIRAHEESDTKSKRVKAAIRRQCEGWKAGTYRGLIRNGKDPQWLRWDGQAWQLIPERVEAVRYAIELYKQGEGATRAVRKLAERGHVLSDWGIAGQQIYRLVKLPALWGAKRISVDGEDYLLEGYYPPVLSEAEYAELQAAAGTRHGRRGASDIVGLVTGIGITYCGYCGTAVVAQNLLSRAREDGTLVDGHRRLHCTSYSNSLGCKAASCSVVPVEKALLAYCSDQMNLSRLLQPTDDGQALRQRLLACQRRQADVERQLARVTEALLADDQGAAPLAFVRKARELEADLRQLQAEAEQLEREQAAKAQVQTPAAAELWRRLAVDAKDIYSPAREQLRQLVLDTFSRITVYMRGVVPDPKSRVIHLVLVSRAGRRVALDIDRRSGDWKASRDRQG

SEQ ID NO: 41627 - DNA, 50 bp, Pseudomonas alcaligenes
  source 1..50: mol_type = genomic DNA
agtttagataatgtgctctatgggcaccctaaggaaataaaccctacact

SEQ ID NO: 41628 - DNA, 40 bp, Pseudomonas alcaligenes
  source 1..40: mol_type = genomic DNA
gtcgacggtggccttcgggcaacccaggctgacgaagccg

SEQ ID NO: 41629 - DNA, 50 bp, Pseudomonas alcaligenes
  source 1..50: mol_type = genomic DNA
agtttagataatgtgctctatgggctccctaaggaaataaaccctacact

SEQ ID NO: 41630 - DNA, 40 bp, Pseudomonas alcaligenes
  source 1..40: mol_type = genomic DNA
ctagaccgtggccttgggcctgcccaggccgaggctgccg

SEQ ID NO: 41631 - protein, 526 aa, Acidithiobacillus ferrooxidans
MDRTRRVYSYLRFSDPKQSEGGSVDRQLDYARRWAVEHGLVLDESLTMRDEGLSAYHQRHVTRGMLGLFLAAVDEGRVPPGSVLIVEGLDRLSRAEPIQAQAQLAQIINAGITVVTASDGKEYNRQRLKDQPMDLVYSLLVMIRAHEESDTKSKRVKAAIRRQCDAWLTGKWRGIIRNGKDPAWVAWNGQAFELIPDRAESVRLAIEMFMDGHGAMAIISRLRSSGVTFAANASHLYKMIRNRALVGDRVLTVDGEEFVLPGYYPALMSEAEFAELQRLASQRHRRKGKGEIPGVITGMGICRCGYCGSAMVAQNLMSRKKRPDGKPHDGHRRLICVASSNAQACKVNGSCSVVPVEDAIMEWCADAMNLASLMSGGDAGVGLRAELAAARARVVEIERQIERVTEAMLSSDAPPSSFAKKARELENDLAHEQDIIGRCESELAARARLQIPGMADAWAALVDGVKALDYDARLKTRQLVADTFSRIDVYHSGLLPGDGKVIDIVLHGRSGAVRVLSGVLRGGTVE

SEQ ID NO: 41632 - DNA, 50 bp, Acidithiobacillus ferrooxidans
  source 1..50: mol_type = genomic DNA
ggtttatatgtaatatccttcgggcacccgagagatactacacctatact

SEQ ID NO: 41633 - DNA, 40 bp, Acidithiobacillus ferrooxidans
  source 1..40: mol_type = genomic DNA
gtccaccgtggccttggggcaaccgaggctgacgaagccg

SEQ ID NO: 41634 - DNA, 50 bp, Acidithiobacillus ferrooxidans
  source 1..50: mol_type = genomic DNA
ggtttatatgtaatatccttcgggctcccgagagatactacacctatact

SEQ ID NO: 41635 - DNA, 40 bp, Acidithiobacillus ferrooxidans; identical to SEQ ID NO: 41630
  source 1..40: mol_type = genomic DNA

SEQ ID NO: 41636 - protein, 544 aa, Pseudomonas fluorescens
MQKLCFSYVRYSSWTQRNGDSVKRQNEMVAKWLLENPEYVLSEQRYNDHGKSGYHGDHLDNAFGRLLAAVENGDIPRGSKVLIEQIDRAGRLAPMEMLPLVSKIVNAGVDLVTLDDGITYNRESANSNHLFLLVAKVQQAYQYSDNLSRRLKAAYETKRKKAAAGEGATRRMPLWIRDGKLRDDIAPFIVQVFEDFAAGIGERRILGRLKDQHSDFNTTSPSTFRRWLRNPVAIGRWNDIEDVWPAVVSKELWFRVQKRINDSSATPKAAASKYLLTGIVKCARCGKNYCVGGQKGALTMLCVSRHRFGGGAGGCTNSRSIPYAVFDFIRSQTAHAALVRAAQSQNLTTSEKRLIEIDGELAELQRQFVNVSGGLAKYGMVKAITDVLDRVTAQISKLEQERVLLNATPAPTTMDDMLGFEDILLDDDTVKLNALLQGVGYSMIVDDRTITVMESSVYSALDVQVYRYLGSDRVNGTYKLNVNDESVYHLPNLDSKVQKEQYDTQIKEEADIANEIAQLVAEGRFTKITYHYYATGEVVIKGLQ

SEQ ID NO: 41637 - DNA, 50 bp, Pseudomonas fluorescens
  source 1..50: mol_type = genomic DNA
aaatccccaagctgctgatttgtgtgcaatgattggaacgatgttatgat

SEQ ID NO: 41638 - DNA, 40 bp, Pseudomonas fluorescens
  source 1..40: mol_type = genomic DNA
agatccgcacgccgatgaatgcaatcatcggcatgcttga

SEQ ID NO: 41639 - DNA, 50 bp, Pseudomonas fluorescens
  source 1..50: mol_type = genomic DNA
aaatccccaagctgctgatttgtgggcaatgattggaacgatgttatgat

SEQ ID NO: 41640 - DNA, 40 bp, Pseudomonas fluorescens
  source 1..40: mol_type = genomic DNA
agattgggaagacagtgaaggcaaacatccgcatgctgga

SEQ ID NO: 41641 - protein, 474 aa, Bacillus licheniformis; identical to SEQ ID NO: 29146

SEQ ID NO: 41642 - DNA, 50 bp, Bacillus licheniformis
  source 1..50: mol_type = genomic DNA
tatatgtctttcataggtatcgctacgcctccaccgataatagacatatg

SEQ ID NO: 41643 - DNA, 40 bp, Bacillus licheniformis; identical to SEQ ID NO: 29148
  source 1..40: mol_type = genomic DNA

SEQ ID NO: 41644 - DNA, 50 bp, Bacillus licheniformis
  source 1..50: mol_type = genomic DNA
tatatgtctttcataggtatcgctccgcctccaccgataatagacatatg

SEQ ID NO: 41645 - DNA, 40 bp, Bacillus licheniformis
  source 1..40: mol_type = genomic DNA
gagttgcgtagtatggggtccgcttgtgccatgggcggtg

SEQ ID NO: 41646 - protein, 618 aa, Clostridium leptum; identical to SEQ ID NO: 11111

SEQ ID NO: 41647 - DNA, 50 bp, Clostridium leptum; identical to SEQ ID NO: 11112
  source 1..50: mol_type = genomic DNA

SEQ ID NO: 41648 - DNA, 40 bp, Clostridium leptum
  source 1..40: mol_type = genomic DNA
gctcactgcacggggcgaggaagtcgaccgggtgctggga

SEQ ID NO: 41649 - DNA, 50 bp, Clostridium leptum
  source 1..50: mol_type = genomic DNA
actgtccgcaaaaaatgaccgactcgtgtaggacggattttgcggacatt

SEQ ID NO: 41650 - DNA, 40 bp, Clostridium leptum
  source 1..40: mol_type = genomic DNA
cctcactgcccggggctggcgagttggccggctgctccaa

SEQ ID NO: 41651 - protein, 546 aa, Acutalibacter muris
MDIHTIRQQLKTRPIYDLPLRVTFYARVSSEKDEQLNSLGNQIAYYQELIRKNPAWEYVEGYIDEGLSAATTKNRENFHRMVEDGRAGVFDFIITKEISRFARNTLDSISYTRELLNAGVGVFFQNDNINTLDEDSELRLTIMSGIAQDELRKLSSRVKFGHAQAIKNSVVLGNSRIFGYIKDGGRLVIDEDEARMVQELFELYATGEHSMKQIETIFWEKGYRNHNGNRIAHTTMSGIISNPKYKGYYVGNKVKVVDLFTKKQKFLPPEEWVMFKDETGEIVPAIVDEELWEQANQVLHKRSEDVKNRQGICNHANLLTGKLICTHCGVAYYRRDSVSRDGKKNSKWVCSGKIKNGADACPSFAIYEEEIKPLLFQVFSKTEADAEALVEEYVEVYKSLQDDGDTARQIEDMRKRIELAQKKKSKLLGFNAMGELSDRDFLAMNKACDQEISEAEKQIYELEQSQLSRGELKKHIDTIRRVLHEAKRDAAEGIINKEFVDKYIDKIYVTPEEGRMLLQIKIFTGETTDKYLQNLRGRAGHTFKKM

SEQ ID NO: 41652 - DNA, 50 bp, Acutalibacter muris
  source 1..50: mol_type = genomic DNA
agaggtcgtgcgggtcacacgttcaagaagatgaaacccatacgaaccgc

SEQ ID NO: 41653 - DNA, 40 bp, Acutalibacter muris
  source 1..40: mol_type = genomic DNA
cgtgggcggccagatggtcaagaagatgatcgagagctac

SEQ ID NO: 41654 - DNA, 50 bp, Acutalibacter muris
  source 1..50: mol_type = genomic DNA
agaggtcgtgcgggtcacacgttcgagaagatgaaacccatacgaaccgc

SEQ ID NO: 41655 - DNA, 40 bp, Acutalibacter muris
  source 1..40: mol_type = genomic DNA
ggaggacggcgaggaggacgaggagatgatcgagagcatc

SEQ ID NO: 41656 - protein, 528 aa, Rhizobacter gummiphilus
MTLKACLYARYSTDKQSENSIDDQLRAARERVAREGWTITAIHADEGISGSTPVALRPGGKALLADALAKRFDVLVLEGLDRLSREISEAEGIVKRLEHRGLRIIGTADGYDTLARGRKVMRIARGLVNELYLDDLREKTHRGLAGQFDRGLSAGGRTYGYGSVEAPGGRRMAINEAEATTVRWIFERFADGYSTRTIAHELNARGTPSARGGTWAISALHGSSGKGLGMLNNELYIGRVVWNRRQWLKDPDTGRRRYIERPREEWQTRDAPELRIVTDELWQRVQTRARSGPARGTRTGKGAVPKTLFGGLLTCHACGGAIVAVNSQRYGCNNHRDRGNTVCSSSLTISRARLDKRLVDELRDELLDSAALAELQSSVQALLQQRSRDSSRENAGALARLNALEQEIGNLVNALATVGISPAIAARLKSAEAERAQLASVVQASALPDPKLVVDDVTARYRRMVSQLQEVLRDESDRTRTRQILTDMLGQVTIGRDLETGETFAELEDPAERLLVAAVGESLRLVAG

SEQ ID NO: 41657 - DNA, 50 bp, Rhizobacter gummiphilus
  source 1..50: mol_type = genomic DNA
cgagtctctgagattggttgcggggggacgctcttccccccggagacgga

SEQ ID NO: 41658 - DNA, 40 bp, Rhizobacter gummiphilus
  source 1..40: mol_type = genomic DNA
acctgattttggttgcgggggctggatttgaaccaacgac

SEQ ID NO: 41659 - DNA, 50 bp, Rhizobacter gummiphilus
  source 1..50: mol_type = genomic DNA
cgagtctctgagattggttgcgggatgacgctcttccccccggagacgga

SEQ ID NO: 41660 - DNA, 40 bp, Rhizobacter gummiphilus
  source 1..40: mol_type = genomic DNA
acctgtttgagggtgcgggatcttgatttgaacctcaaag

SEQ ID NO: 41661 - protein, 676 aa, Bacteroides cellulosilyticus
MDKKVLIYCRVSTQQQTTDRQKEELLKFAAENHWNVEEEDIFIDVISGFKKREFRPEYVKMLERVEYGDIDIILFSEFSRLARNATELLEQIKLFIDKGINLYFDKQKLWVRDSNKDVGSIILLHVLAVMSSYEIELFVERSLSGKITKVQAGHGGGDERAYGYMHNENKQIVINPIESKIVARIFEMYVGGYSSIQISEILNAEKVPAPYVRKLNEYKKNREAKGLEVKEYKFDTDNLKWRISTINRLMHNELYKGNRRITFYKPDPTNPLPLSERQDREIVYEYSEHVESLRIVSDELFQQAQDKLSKAHYNKNNAVRHENLLKHLMVCGECGANFSVGKSNETSKNYISGGRTYKCYGRVNRKDKPRTCTNGAELRQWKLDGLVLQLSIQMFAEINIQQTNILKIENLGKEIEELVQIKSSKNTELVEAENLYKKTLKRLIAIEDDEVAKNLISDAKHKYDETKNVLNKTMDKLSREITTKRITIDNLKRLNANPLLINKMDEIRKNRDLVKTMVDEYIDKITIFRLHELWLLVVVSYKGGEEMWGTIKCARYKKEEMFYDELHCHYGVEFQGWLLNNTEHCFSYDKSTRIITYHGGSKIYVEFKSGEYDYDTFNQMIQATGWMGCFPFYAYEDSGKDLSVPSNEDFGKSLQENRTDWKAHNDKVLERLLSKS

SEQ ID NO: 41662 - DNA, 50 bp, Bacteroides cellulosilyticus; identical to SEQ ID NO: 40127
  source 1..50: mol_type = genomic DNA

SEQ ID NO: 41663 - DNA, 40 bp, Bacteroides cellulosilyticus
  source 1..40: mol_type = genomic DNA
aactatatgctcgcaggtgtgcatgggtggatattcctgt

SEQ ID NO: 41664 - DNA, 50 bp, Bacteroides cellulosilyticus
  source 1..50: mol_type = genomic DNA
aaggatgtgttcatttcgactatatccataggtgcgattgacacatcctg

SEQ ID NO: 41665 - DNA, 40 bp, Bacteroides cellulosilyticus
  source 1..40: mol_type = genomic DNA
ctccatatgcgcgcaggactccataggtgcacattccttt

SEQ ID NO: 41666 - protein, 481 aa, Mycolicibacterium fortuitum; identical to SEQ ID NO: 18686

SEQ ID NO: 41667 - DNA, 50 bp, Mycolicibacterium fortuitum
  source 1..50: mol_type = genomic DNA
gcgggggtatctgaccattaagtggttaaacgttggtaaattgccattca

SEQ ID NO: 41668 - DNA, 40 bp, Mycolicibacterium fortuitum
  source 1..40: mol_type = genomic DNA
tggcggcgacgatggtgtggttgaaggtgattgccatatc

SEQ ID NO: 41669 - DNA, 50 bp, Mycolicibacterium fortuitum
  source 1..50: mol_type = genomic DNA
gcgggggtatctgaccattaagtgtataaacgttggtaaattgccattca

SEQ ID NO: 41670 - DNA, 40 bp, Mycolicibacterium fortuitum
  source 1..40: mol_type = genomic DNA
tgtcggccatgctggtgtgtaggaaggtgatcaccgtcac

SEQ ID NO: 41671 - protein, 528 aa, Klebsiella pneumoniae
MKVPVWSYARVSTLSQIDGFGIQRQVNTINQFIQYLVLDHRLPYTLDVDNITQMVAEGKSAFKGKNWNPKTKLGQYRKMVMDGVIPDSVLIVENIDRLTRLDPFQAVEIISGMINRGTTILEIETGMTYSRYIPESITVLTMQINRANGESKRKSIMMQKSHLNRFGKVSKVRPRWFDVVEIDGVKQYRMNDTARVIQRMYSDYANGIGPAQIVRTYGTSDNGKSWTLVTVLRALSDKRVADDARYPPIVDKSLYEKVQAMKNPLRGSTHQKNMFNIFSGMSRCPLCKQSIIVKRNSHGGLFTVCLGKRTHKTCEARSMAYNAIERPLLNAIKGLDFSEVYNREESNVLTLRDQWIRNERDIAAFRERLSKASRHEKFAILDELEQISKEQDELSIRLKSIDAPHDVQLDFNDDKLDLDVSYRIELNNRMKKLIQSIDMVRVDTGRSTYTVYCSIKYWSDFMTHLVIIDAETKRVGTGGTNMLTTSLRSVSSINSDGTFSGNPDMEAIEYWQSVMTQAFERAGVEMPK

SEQ ID NO: 41672 - DNA, 50 bp, Klebsiella pneumoniae
  source 1..50: mol_type = genomic DNA
gggtgtacatacttgactaactaggaacagttatgatagtatgtacaccc

SEQ ID NO: 41673 - DNA, 40 bp, Klebsiella pneumoniae
  source 1..40: mol_type = genomic DNA
cgggcccatcagcagcagggagcagtcggtggtcccgccg

SEQ ID NO: 41674 - DNA, 50 bp, Klebsiella pneumoniae; identical to SEQ ID NO: 41672
  source 1..50: mol_type = genomic DNA

SEQ ID NO: 41675 - DNA, 40 bp, Klebsiella pneumoniae
  source 1..40: mol_type = genomic DNA
caggccaatcagaaggagggagaagacagaggtcctgccc

SEQ ID NO: 41676 - protein, 551 aa, Eubacterium rectale
MKKQRCYIYTRVSTAMQVDGFSLDAQKEKLKKYADYQDMVVVREFSDEGKSGKNVDGRPQFKEMLELIEAGTDDIDYVLVFKLSRFGRNAADVLSSLQKMQDFGVNLICVEDGIDSSKDAGKLMISVLSAVAEIERDNILVQTMEGRKQKAREGKWNGGFAPYGYKLVDGSLFIAEDEVEVIKIIFDKYINTTMGVAAIAAFLNESGYVKKKRQNNTIDGFAASFVKGVIDNPVYCGKLAYGRRKTEKVQGKRNEFHVVKQDEFMVVDGEHEAIISAEEWKAAQDKRKTTGVKRVKTHSLEHEHILTGILKCPGCGANMYGNVNRKRHPKGGTYRDYFYYACKHPTGTTGHKCDYHKQWGQDIVNDAVAELIKKMVTSPDFEKGIREKIAARVDTSELEQELDGLKKKMRQLEVSKDKIAIQMDNLDVTDSMYEKKYDDLQKRFYDKYDEMALTENHMDEIQSRLAHIRRKQLSGDRIYNFLIAFDKLYDKLSDAEKKEFMGTFVESIELYPERLENGKFLKHIHFRFPVYYNGTVIDDISWENESTVETV

SEQ ID NO: 41677 - DNA, 50 bp, Eubacterium rectale
  source 1..50: mol_type = genomic DNA
agttgggaaaatgaaagtaccgttgagacggttgttcttctttcccaact

SEQ ID NO: 41678 - DNA, 40 bp, Eubacterium rectale
  source 1..40: mol_type = genomic DNA
tccgtttacgaaacatgtggagacggttgtcttactttcc

SEQ ID NO: 41679 - DNA, 50 bp, Eubacterium rectale
  source 1..50: mol_type = genomic DNA
agttgggaaaatgaaagtaccgttatgacggttgttcttctttcccaact

SEQ ID NO: 41680 - DNA, 40 bp, Eubacterium rectale
  source 1..40: mol_type = genomic DNA
ttcgtttaggaaatatgtaataaaagttgtcttcctctgc

SEQ ID NO: 41681 - protein, 638 aa, Escherichia coli; identical to SEQ ID NO: 13566

SEQ ID NO: 41682 - DNA, 50 bp, Escherichia coli; identical to SEQ ID NO: 13567
  source 1..50: mol_type = genomic DNA

SEQ ID NO: 41683 - DNA, 40 bp, Escherichia coli; identical to SEQ ID NO: 20453
  source 1..40: mol_type = genomic DNA

SEQ ID NO: 41684 - DNA, 50 bp, Escherichia coli
  source 1..50: mol_type = genomic DNA
actgagaataattgactgttaggcaagcctaacatataattattcactgt

SEQ ID NO: 41685 - DNA, 40 bp, Escherichia coli
  source 1..40: mol_type = genomic DNA
ggagggcgtactggtgggcaagggttctggaacaacagga

SEQ ID NO: 41686 - protein, 638 aa, Escherichia coli
MKPKLYSYVRFSSVKQREGNSLERQQDTALKIAARYNLELDTTAFHDLGMSAFKGKNAHEGKLSEFIKQIGVKVPVGSWLVVENLDRISRDDAWSALDIFKSILSKGIVVVTGMDEKVYKYADVKNNPTDLIISLLMFTRAHDESLTKKNRVEAQARSLIRHNLTREPGTPAKAIESVGQNVWWVDTKSGYVTPHSIYFAAAQKIIELKQNGETLLGIQRYLNEHYPAPKKRVYKDKTGQALTPKTEQWGKHLIRTFLNPTVHGQKIFTLDKRDESGAIIYDSESDEPLKETFIIPDYYPALMSEVDYLTLSKLDRHRAVTRSSSTYPEGNPEPEIPLLSGIGILFCGKCGSFMFKSGSSENKYRYICGSKIVQGKPCGKKGFTSYQLEHTVLQLIADHVWNNHQEDKTAWYESEIEKASEAVKKLLKLATLTDDLEELADQINANKQKKITLEREFQQYKISRSEIQTTGWDQFRNFDVHDTKNPDRKRIRLKVKQAIKRIDCYDIDGRHGHFEVTFADETKQRIVIKFNRNRSPGVSYVEAQTVNDHDLLKMQGLVLHSFIDELISPEKFAQHIKDKHEVSILNPTFITRLEDGVNRDEGNELAIKVDSTTSKSYATVNGIKYEINSLEDLETLSK

SEQ ID NO: 41687 - DNA, 50 bp, Escherichia coli
  source 1..50: mol_type = genomic DNA
actgtgaataattgactgttgggcttgcctaatgtataattattcactgt

SEQ ID NO: 41688 - DNA, 40 bp, Escherichia coli; identical to SEQ ID NO: 20453
  source 1..40: mol_type = genomic DNA

SEQ ID NO: 41689 - DNA, 50 bp, Escherichia coli
  source 1..50: mol_type = genomic DNA
actgtgaataattgactgttgggcaagcctaatgtataattattcactgt

SEQ ID NO: 41690 - DNA, 40 bp, Escherichia coli; identical to SEQ ID NO: 41685
  source 1..40: mol_type = genomic DNA

SEQ ID NO: 41691 - protein, 504 aa, Paenibacillus polymyxa
MDNTSYIIKYVALYLRKSRGEEDIDLEKHRFILREMCVKHGWKYVEYVEIANSETIEYRPKFKSLLSDVEEGIYDAVLVVDYQRLGRGELEDQGKIKRIFRDSETYIVTPEKIYNLVDDTDDLLVDVRGLLARQEYKTTTKNLQRGKKIGARLGKWTNGPAPFPYVYTAAIKGLEVVPERNVIYQEMKSRVLGGESLEAIGWDFNRRGIPGPGPKKGLWHSNTIGRILISEVHLGKIISNKTKGSGHKKKKTQPLVINPREEWVVVENCHAAVKTEEEHMKLLAMLEKNQVVPNRAKAGTYALSGLVFCGKCKKMMRYNVRSDGYTTNSIKACNKYDHFGNYCTNSGVKVNILTDFIDREIIDYEQRIIDSDNYINTDVIEKLERIIREKEAQLTKLNRALSKIKEMYEMEEYTREEYEERKAKRQQEISALESELAVHRYEINYDSREKNKERMKLINSFKDIWSSESATEHDKNMIAKMIISRIEYIHDKGTNNLNISIQFN

SEQ ID NO: 41692 - DNA, 50 bp, Paenibacillus polymyxa
  source 1..50: mol_type = genomic DNA
ttgaggcttaagaaaacatgacaccaatgacaagttgacttaagccccac

SEQ ID NO: 41693 - DNA, 40 bp, Paenibacillus polymyxa
  source 1..40: mol_type = genomic DNA
tctctccatcacatgacaccaatgacaagtcgaatagcca

SEQ ID NO: 41694 - DNA, 50 bp, Paenibacillus polymyxa
  source 1..50: mol_type = genomic DNA
ttgaggcttaagaaaacatgacacacatgacaagttgacttaagccccac

SEQ ID NO: 41695 - DNA, 40 bp, Paenibacillus polymyxa
  source 1..40: mol_type = genomic DNA
tttctccatcacactagccacatttcaagtcatatagtca

SEQ ID NO: 41696 - protein, 475 aa, Lysinibacillus sphaericus
MKCVIYVRVSTDEQAKHGFSIAAQIEKLEAYCVSQGWEIVEAPYVDDGYSAKDLNRPHFQAMLQRIQQGGIDVLLVYKLDRLTRSVPDLHTILAELDQYECKFKSATEVYDTTNAMGRLFITLVAAIAQWERENTAERVRLGMEKKVKLGYWKGGTPPYGYQVENGALIMDEDEAQIVRNIFTLAKTLGFYTIAKQLTSKGVPTRKGGQWHVDSVRDIANNPTYAGYLMFSLNPKDIKKPPRERVLFEGNHKRIIDRDEFWALQDLLDKRRTLGGKRETSNYYFSSLLKCARCGHSMAGHKAGKKKTYRCSGKKAGKACTSHMILESNLVQAIFAQWDDLVGGHFTSNEGDATFPAAQLTALQQELAVVQKLLHKKKTMFEHDIIGIDELIRDSEKLRNKEKEIQASLKKIQLLDDRHHEEIRAIIRNIDTLWINADDTERKQLMTTIFEQIVVDTKDDYRSSKQAREITIVTAK

SEQ ID NO: 41697 - DNA, 50 bp, Lysinibacillus sphaericus
  source 1..50: mol_type = genomic DNA
aatatgtcttttattggtggcggtacactgtcaccaatggaagacatata

SEQ ID NO: 41698 - DNA, 40 bp, Lysinibacillus sphaericus
  source 1..40: mol_type = genomic DNA
catttgggttggtggcggtacacttattccatgggcgctc

SEQ ID NO: 41699 - DNA, 50 bp, Lysinibacillus sphaericus
  source 1..50: mol_type = genomic DNA
aatatgtcttttattggtggcggtccactgtcaccaatggaagacatata

SEQ ID NO: 41700 - DNA, 40 bp, Lysinibacillus sphaericus
  source 1..40: mol_type = genomic DNA
cctttgggttggagatgggccacttactctctgggcgacc

SEQ ID NO: 41701 - protein, 475 aa, Lysinibacillus sphaericus
MKCVIYVRVSTDEQAKHGFSIAAQIEKLEAYCMSQGWEIVETPYVDDGYSAKDLNRPHFQAMLQRIQQGGIDVLLVYKLDRLTRSVPDLHTILAELDQYECKFKSATEVYDTTNAMGRLFITLVAAIAQWERENTAERVRLGMEKKVKLGYWKGGTPPYGYQVVNGALMMDEEEAQIVRDIFTLAKTLGFYTIAKQLTSKGVPTRKGGQWHVDSVRDIANNPTYAGYLMFSLNPKDIKKPPRERVLFEGNHERIIDRDEFWALQDLLDKRRTLGGKRETSNYYFSSLLKCARCGHSMAGHKAGKKKTYRCSGKKAGKACTSHMILESNLVQAIFAQWDDLVGGHFTSNEGDASFPAAQLTALQQELAVVQKLLHKKKTMFEHDIIGIDELIRDSEKLRNKEKEIQASLKKIQLLDDRHHEEIRAIIRNIDTLWINADDYERKQLMTTIFEQIVVDTKDDYRSSKQAREITIVTAK

SEQ ID NO: 41702 - DNA, 50 bp, Lysinibacillus sphaericus; identical to SEQ ID NO: 41697
  source 1..50: mol_type = genomic DNA

SEQ ID NO: 41703 - DNA, 40 bp, Lysinibacillus sphaericus; identical to SEQ ID NO: 41698
  source 1..40: mol_type = genomic DNA

SEQ ID NO: 41704 - DNA, 50 bp, Lysinibacillus sphaericus; identical to SEQ ID NO: 41699
  source 1..50: mol_type = genomic DNA

SEQ ID NO: 41705 - DNA, 40 bp, Lysinibacillus sphaericus; identical to SEQ ID NO: 41700
  source 1..40: mol_type = genomic DNA

SEQ ID NO: 41706 - protein, 515 aa, Leisingera methylohalidivorans
MKHEQKMEGTQLKAVIYCRVSSTKQKLDGGGLESQEQRCRAYAETQGYEVEAVFPDDASGGGDFMKRPGMVALLSYLDAQPEKNYVVIFDDLKRFARETEMHIKLRQAFKARGALVECLNFKFEDTPEGKFIETIIAAQGELEREQNRRQVMQKMKARVENGFWVFRAPIGYKYVSAKGGGGKVLVPDEPLASTVREALEGFATGRFASQAEVQRFFERCPHFPKDFPDGRLRPMTVSRLLKKVVYAGYVEAPKWGVSVRKGEHEGLISFETFERVQEALAGRARPAARKDFNEDFPLRGFVHCDDCGKPMTACWSKGCRKHYAYYLCDTRGCPSKRKSIPRAKVEDGFADILKAMQPTKQLFTLARVMFEDAWNARLQSVTASQGEIKRQLKAVEKQIESLLDRIVEANSQAVISAYETRLAKLEREKFVLAEKEASGLPPKGRLEEFIELSLKFLANPWNIYKNGDHATRQTVLRLAFVEPLQYSRNQGYRTPEISFPFKVLEGISGAKKQMV

SEQ ID NO: 41707 - DNA, 50 bp, Leisingera methylohalidivorans
  source 1..50: mol_type = genomic DNA
ggcatttcaggcgcaaaaaagcagatggtgcagctagagggagaaagttc

SEQ ID NO: 41708 - DNA, 40 bp, Leisingera methylohalidivorans
  source 1..40: mol_type = genomic DNA
ttagcgatttcagtgattaatggtgctgctggagagaatt

SEQ ID NO: 41709 - DNA, 50 bp, Leisingera methylohalidivorans
  source 1..50: mol_type = genomic DNA
ggcatttcaggcgcaaaaaagcagctggtgcagctagagggagaaagttc

SEQ ID NO: 41710 - DNA, 40 bp, Leisingera methylohalidivorans
  source 1..40: mol_type = genomic DNA
ttggtgctctcatggaaaactggtgatgctggagagaaat

SEQ ID NO: 41711 - protein, 619 aa, Coprococcus eutactus; identical to SEQ ID NO: 14616

SEQ ID NO: 41712 - DNA, 50 bp, Coprococcus eutactus; identical to SEQ ID NO: 11112
  source 1..50: mol_type = genomic DNA

SEQ ID NO: 41713 - DNA, 40 bp, Coprococcus eutactus
  source 1..40: mol_type = genomic DNA
ctcaccgtggagatcggatgaggtcgatggatcatttgcc

SEQ ID NO: 41714 - DNA, 50 bp, Coprococcus eutactus; identical to SEQ ID NO: 38139
  source 1..50: mol_type = genomic DNA

SEQ ID NO: 41715 - DNA, 40 bp, Coprococcus eutactus
  source 1..40: mol_type = genomic DNA
ctcagagtagagatctgatcagttcaatggatcttttctg

SEQ ID NO: 41716 - protein, 471 aa, Listeria monocytogenes
MTVGIYIRVSTEEQVKEGFSISAQKEKLKAYCTAQGWEDFKFYVDEGKSAKDMHRPLLQEMITHIKKGLIDTVLVYKLDRLTRSVVDLHNLLSIFDEYNCAFKSATEVYDTSSAMGRFFITIISSVAQFERENTSERVSFGMAEKVRQGEYIPLAPFGYVKGPDGKLIINEAEKEIFLHVVNMVSTGYSLRQTCEYLTNIGLKTRRSNDVWKVSTLIWMLKNPAVYGAIKWNNEIYENTHEPLIDKTTFDKLANILSIRSKSTTSRRGHVHHVFKGRLICPQCGKRLSGLRTKYVNKNKETFYNNNYRCATCKEHRRPAIQISEQKIEKAFIDYISNYTLNKANISSKKLDNNLRKQEMIQKEIISLQRKREKFQKAWAADLKNDDEFSKLMIDTKMEIDAAEDRKKEYDVSLFVSPEDIAKRNNILRELKINWTSLSPTEKTDFISMFIEGIEYVKDDENKAVITKISFL

SEQ ID NO: 41717 - DNA, 50 bp, Listeria monocytogenes; identical to SEQ ID NO: 14517
  source 1..50: mol_type = genomic DNA

SEQ ID NO: 41718 - DNA, 40 bp, Listeria monocytogenes; identical to SEQ ID NO: 7183
  source 1..40: mol_type = genomic DNA

SEQ ID NO: 41719 - DNA, 50 bp, Listeria monocytogenes
  source 1..50: mol_type = genomic DNA
tataggttttttgtcaaatacggttttgtgtactttacaaaaacactatt

SEQ ID NO: 41720 - DNA, 40 bp, Listeria monocytogenes
  source 1..40: mol_type = genomic DNA
tgcaatgctaatatatccttttgtatacccaatacccatg

SEQ ID NO: 41721 - protein, 471 aa, Listeria monocytogenes; identical to SEQ ID NO: 14516

SEQ ID NO: 41722 - DNA, 50 bp, Listeria monocytogenes; identical to SEQ ID NO: 14517
  source 1..50: mol_type = genomic DNA

SEQ ID NO: 41723 - DNA, 40 bp, Listeria monocytogenes; identical to SEQ ID NO: 7183
  source 1..40: mol_type = genomic DNA

SEQ ID NO: 41724 - DNA, 50 bp, Listeria monocytogenes; identical to SEQ ID NO: 41719
  source 1..50: mol_type = genomic DNA

SEQ ID NO: 41725 - DNA, 40 bp, Listeria monocytogenes; identical to SEQ ID NO: 41720
  source 1..40: mol_type = genomic DNA

SEQ ID NO: 41726 - protein, 471 aa, Listeria monocytogenes; identical to SEQ ID NO: 14521

SEQ ID NO: 41727 - DNA, 50 bp, Listeria monocytogenes; identical to SEQ ID NO: 14517
  source 1..50: mol_type = genomic DNA

SEQ ID NO: 41728 - DNA, 40 bp, Listeria monocytogenes; identical to SEQ ID NO: 7183
  source 1..40: mol_type = genomic DNA

SEQ ID NO: 41729 - DNA, 50 bp, Listeria monocytogenes; identical to SEQ ID NO: 41719
  source 1..50: mol_type = genomic DNA

SEQ ID NO: 41730 - DNA, 40 bp, Listeria monocytogenes; identical to SEQ ID NO: 41720
  source 1..40: mol_type = genomic DNA

SEQ ID NO: 41731 - protein, 471 aa, Listeria monocytogenes; identical to SEQ ID NO: 14571

SEQ ID NO: 41732 - DNA, 50 bp, Listeria monocytogenes; identical to SEQ ID NO: 14517
  source 1..50: mol_type = genomic DNA

SEQ ID NO: 41733 - DNA, 40 bp, Listeria monocytogenes; identical to SEQ ID NO: 7183
  source 1..40: mol_type = genomic DNA

SEQ ID NO: 41734 - DNA, 50 bp, Listeria monocytogenes; identical to SEQ ID NO: 41719
  source 1..50: mol_type = genomic DNA

SEQ ID NO: 41735 - DNA, 40 bp, Listeria monocytogenes; identical to SEQ ID NO: 41720
  source 1..40: mol_type = genomic DNA

SEQ ID NO: 41736 - protein, 471 aa, Listeria monocytogenes
MTVGIYIRVSTEEQVKEGFSISAQKEKLKAYCTAQGWEDFKFYVDEGKSAKDMHRPLLQEMITHIKKGLIDTVLVYKLDRLTRSVVDLHNLLSIFDEYNCAFKSATEVYDTSSAMGRFFITIISSVAQFERENTSERVSFGMAEKVRQGEYIPLAPFGYVKGPDGKLIINEAEKEIFLHVVNMVSTGYSLRQTCEYLTNIGLKTRRSNDVWKVSTLIWMLKNPAVYGAIKWNNEIYENTHEPLIDKTTFDKLANILSIRSKSKTNRRGHVHHVFKGRLICPQCGKRLSGLRTKYVNKNKETFYNNNYRCATCKEHRRPAIQISEQKIEKAFIDYISNYTLNKANISSKKLDNNLRKQEMIQKEIISLQRKREKFQKAWAADLMNDDEFSKLMIDTNMEIDAAEDRKKEYDVSLFVSPEDIAKRNNILRELKINWTSLSPTEKTDFISMFIEGIEYVKDDENKAVITKISFL

SEQ ID NO: 41737 - DNA, 50 bp, Listeria monocytogenes; identical to SEQ ID NO: 14517
  source 1..50: mol_type = genomic DNA

SEQ ID NO: 41738 - DNA, 40 bp, Listeria monocytogenes; identical to SEQ ID NO: 7183
  source 1..40: mol_type = genomic DNA

SEQ ID NO: 41739 - DNA, 50 bp, Listeria monocytogenes; identical to SEQ ID NO: 41719
  source 1..50: mol_type = genomic DNA

SEQ ID NO: 41740 - DNA, 40 bp, Listeria monocytogenes; identical to SEQ ID NO: 41720
  source 1..40: mol_type = genomic DNA

SEQ ID NO: 41741 - protein, 471 aa, Listeria monocytogenes
MTVGIYIRVSTEEQVKEGFSISAQKEKLKAYCTAQGWEDFKFYVDEGKSAKDMHRPLLQEMITHIKKGLIDTVLVYKLDRLTRSVVDLHNLLSIFDEYNCAFKSATEVYDTSSAMGRFFITIISSVAQFERENTSERVSFGMAEKVRQGEYIPLAPFGYVKGPDGKLIINEAEKEIFLHVVNMVSTGYSLRQTCEYLTNIGLKTRRSNDVWKVSTLIWMLKNPAVYGAIKWNNEIYENTHEPLIDKTTFDKLANILSIRSKSTTSRRGHVHHVFKGRLICPQCGKRLSGLRTKYVNKNKETFYNNNYRCATCKEHRRTAIQISEQKIEKAFIDYISNYTLNKANISSKKLDNNLRKQEMIQKEIISLQRKREKFQKAWAADLMNDDEFSKLMIDTKMEIDAAEDRKKEYDVSLFVSPEDIAKRNNILRELKINWTSLSPTEKTDFISMFIEGIEYVKDDENKAVITKISFL

SEQ ID NO: 41742 - DNA, 50 bp, Listeria monocytogenes; identical to SEQ ID NO: 14517
  source 1..50: mol_type = genomic DNA

SEQ ID NO: 41743 - DNA, 40 bp, Listeria monocytogenes; identical to SEQ ID NO: 7183
  source 1..40: mol_type = genomic DNA

SEQ ID NO: 41744 - DNA, 50 bp, Listeria monocytogenes; identical to SEQ ID NO: 41719
  source 1..50: mol_type = genomic DNA

SEQ ID NO: 41745 - DNA, 40 bp, Listeria monocytogenes; identical to SEQ ID NO: 41720
  source 1..40: mol_type = genomic DNA

SEQ ID NO: 41746 - protein, 530 aa, Phaeobacter inhibens
MQKQFVASPGSRAVIYLRVSTGKQAQKDLSIPDQRKQLKAYCKHSAYSIVGEFKDAKSGTTDKRPGFQAMVDAILYGGLECELIVVHSYSRFFRDQVVGELYIRSLAKRGVRVVSLTQQTDESPEGNLMRRILAIFDEYQSLETAKHVRRSLHENALQGFWNGGNTPFGYKVVEVERRGKARKKGLVIDERDASVVRCMFDLALKGDGSSGPMGIKAIACWLNERGYRTRRGKKWGVSGVHRHLTDRTYTGEFTFRSGENGGVEIPLQVPAIVSEDEFLQLRDFLDARNPKKTPPRVVTGDVLLTGLVTCPHCGNGMTTQTGKGGRYRYYSCSNQMRTGKSGCQGHRVPMGALDELVLQHVRADLLTSEKANALLDPLRTRQEKAEEDQAERLATRDAEVQAAKKSLDALYDMIRHGLVDLAEEDFKQRFLSAKEHHLRAKKERDQVAAELAPEARVSHQKVSAFVSGIQESLAQPSIAGKRGFLRAIIDEIKVGADQITILGRRSQLERAIVSGETIASTVPTFVRKWR

SEQ ID NO: 41747 - DNA, 50 bp, Phaeobacter inhibens
  source 1..50: mol_type = genomic DNA
ttcccacttttgttcgtaagtggcgggccgagtgggataaaagtgagaac

SEQ ID NO: 41748 - DNA, 40 bp, Phaeobacter inhibens
  source 1..40: mol_type = genomic DNA
ttggtttagatgttatggcggagagacagggattcgaacc

SEQ ID NO: 41749 - DNA, 50 bp, Phaeobacter inhibens
  source 1..50: mol_type = genomic DNA
ttcccacttttgttcgtaagtggctggccgagtgggataaaagtgagaac

SEQ ID NO: 41750 - DNA, 40 bp, Phaeobacter inhibens
  source 1..40: mol_type = genomic DNA
tgggtctagatgtgctgtctgggagtcagggactagaatc

SEQ ID NO: 41751 - protein, 558 aa, Pseudomonas kunmingensis
MPKAYAYVRWSTAEQGGLDRDSHTRQTTPLEAFTATTGVEVVETIIDKGVSAFRGANARIGQLKGLLDRIGSGEIEAGDYIIVESIDRLTRQRLNDSVELIQSILRKGVRIHTAIDNKTYSYDDPNRDLETLLMVGVIAKRAHEESDTKSKRLKSSWVKKRNAAETKIIRKQCPYGFAYDDKEEQFVIVEDEANEIRTIFERLKYVGILEAIKEVNQTSKRKWTRKHIDELVKTKSPIGVLALQRREDDGEGRIFDRYVPNYYPKIVDENTFEAAVAAIKKRFNEKKSGRRAPNNYNIFRHCIKCKDHDVGMFFNLQGLGKEKKRYAYLVCSNRAERVCECGNRIRFELVFGIFLCAIQKMYENRYIDERTEKKRKDFTWFSENDYASFDSFNNAFGKFFAAKDNSKQKEEIRSKQTELLIEKNSLSMLDASLAQFDGIIPKTFIQRIANSEARIAELEKDIVNLEGDLIVEGEVLEATTPKEIIELYQTEIGRMKLNSFFINRGIQFYIYYDKEVGMVSLTIKLKDEPDFKLSVWHKFAEKSPLKEFGIDDLSNIIK

SEQ ID NO: 41752 - DNA, 50 bp, Pseudomonas kunmingensis
  source 1..50: mol_type = genomic DNA
ttattagtaaacgctagaccgctgaacagcggtgtagtagtatctaataa

SEQ ID NO: 41753 - DNA, 40 bp, Pseudomonas kunmingensis
  source 1..40: mol_type = genomic DNA
gccatcgatggtgccgtggaacaacacctcgaaggccagc

SEQ ID NO: 41754 - DNA, 50 bp, Pseudomonas kunmingensis
  source 1..50: mol_type = genomic DNA
ttattagtaaacgctagaccgctggccagcggtgtagtagtatctaataa

SEQ ID NO: 41755 - DNA, 40 bp, Pseudomonas kunmingensis
  source 1..40: mol_type = genomic DNA
gggaatgatggtgccctgggccaccacatcaaagcacagc

SEQ ID NO: 41756 - protein, 486 aa, Flavonifractor plautii
MSTYERLVNSQNFFSPYLTQEDLSRLGRNQLHTGLYIEERFPMFGVRYIAINDNVDTDQSESTELMPFKNLFNEWFIRDTSRKIRAVQRAKAERGERLGTRAPYGYRKDEQDRKKLVVDDEAAAVVRRIFALCAAGQGPSQIARLLKREQVLCPTTYAYKTFGVAHSSLNLNDPYGWSDSTIANMLENEIYLGNTINLRYSTRSYKDKRKIEHPREECMVLENTHPALVSQEVWDIVQRVRQHKRRPTKMDEQNKYSGLVVCADCGSTMVLHRAHTMSRSYNHFTCRTYKKDGTLCTAHYIRECILDDVVLEDLRRVTAMAREHTQEFAAYIGSKQSADIRKEMRGLERELTTMKKRSRELDSIFKRLYEDSVLGRITAEQFQTLSGSYTQEMEMLSKVIPEKETTIQKLREQVSGTDHFISLAKRYTDIQELTPELLRLFIQKIVVHEKDVKWSKHAQQTVEIHYNDIGCVELTQPEVQSTTKGA

SEQ ID NO: 41757 - DNA, 50 bp, Flavonifractor plautii
  source 1..50: mol_type = genomic DNA
agttacccctgtcagggggaaccaaaaggcacccccgcaaaaggacaaca

SEQ ID NO: 41758 - DNA, 40 bp, Flavonifractor plautii
  source 1..40: mol_type = genomic DNA
gcaaaaaggcccggaaccaaatcggttccgggcctttttt

SEQ ID NO: 41759 - DNA, 50 bp, Flavonifractor plautii
  source 1..50: mol_type = genomic DNA
agttacccctgtcagggggaaccaccaggcacccccgcaaaaggacaaca

SEQ ID NO: 41760 - DNA, 40 bp, Flavonifractor plautii
  source 1..40: mol_type = genomic DNA
gcagaaaggccccaaatgacctcagatgcaggccttttct

SEQ ID NO: 41761 - protein, 555 aa, Vibrio coralliilyticus
MKLAYSYIRFSSPEQAKGDSLRRQTESARDYCERKGLKLADLTLKDLGLSAYHGVHFKDGALGEFIKAVEAEQIPKGAYLLVESIDRFSREKIHVAYRRFSELLELGINIVTLQDERVYTEASLNNLGDIMISLVTMSRAFEESDVKAKRLREAHAAKRAAARKSKTPTGYRPPDWLMQTSQGYEPIPERVAIVRRIFQLTIDGLGAIAISKMLNRDGIPTWGRSKTGWQTTYIKKLLRTRTVLGEYQPHKTVNRKREPDGEPIHGYYPPIIDPQTFRKADLAIRSRDRRPVSVRKAAVNNIFTGLVKCKNCGNTMHYVNKGRDPVKGGQYLVCSMARTGAVVNGRRCSYSSMRYQVIEDAVLQIASIISLDLSPPDNSQKLQDLKNELAIAESVRAEIESTVESLIDKLEKVDDDELLLNRYNKRSQELKEQRQACTELVKAIDALECKPTESHIFQKLSETLKKLKTEAADRENVVLRTRINNQLVSMLESIDIDGSNKLVSINVDGIRIIDLRFDKRQNNYMIKPSWDEREFPPKTFAVKYATGSFRTQLFS

SEQ ID NO: 41762 - DNA, 50 bp, Vibrio coralliilyticus
  source 1..50: mol_type = genomic DNA
gtgattccagttatcaaactcttatagattgtctggaataaccccaaatt

SEQ ID NO: 41763 - DNA, 40 bp, Vibrio coralliilyticus
  source 1..40: mol_type = genomic DNA
aggtaaccacaacttgttatttttaggcccgcctgggacg

SEQ ID NO: 41764 - DNA, 50 bp, Vibrio coralliilyticus
  source 1..50: mol_type = genomic DNA
gtgattccagttatcaaactcttaccgattgtctggaataaccccaaatt

SEQ ID NO: 41765 - DNA, 40 bp, Vibrio coralliilyticus
  source 1..40: mol_type = genomic DNA
aggaagccactacatcctgcctttagtcccgcctgtcacg

SEQ ID NO: 41766 - protein, 598 aa, Vibrio mediterranei
MDEKPRIAHIYSRVSKGTQVKGDGLRRQIEIASKFIEDVNMSNSRDGLPVYTLADSPIYDRGLSAYFGLNTDENAGLGAFLKAAENGQVEKGTLLIVEAIDRISRLPVDDARALFARFKKYGIDVAICRFNLIIYHDKSSDLGQDLLITTAIHLAHLESEQKSKRIRARFTHKRLLEKEGGARRTSISPSWIELSKDKTHFVLIPERARIVRKMVDLKLQGWGAHRITVYLNERGYPCWNRSKAWYTKIVEKYLKMIQLVGDFQPVEHVHGEKGMRKEPVGDVIKGYYPALITEEEWIRLKASFKRSGGRQTGAFSNLFSYMLYCPTCGTCMSYFKPNRGRIKVRCRKQIDKQGCDQRALNYEEIEPRLIKALAGLDYAKINNNSFASLQKELNTLEAQVAELEASADDIKTQMLEESDPRIISAYVNKLKAVYTEQDKAKARFEKLSTQTSDYDVNTLEQLQLERNEDRERYNGFVRSFVKYVIASDSKLDKPLRIVFKSEAVGEVPVFFNDDINNKAISDIFTAQKDVNEAAPIRLINMSRVHGNLGKLAAIDTVPVPDDLDDPLERIKYLFAVRQVVRQNPEKWQAIADEARLFE

SEQ ID NO: 41767 - DNA, 50 bp, Vibrio mediterranei; identical to SEQ ID NO: 37012
  source 1..50: mol_type = genomic DNA

SEQ ID NO: 41768 - DNA, 40 bp, Vibrio mediterranei
  source 1..40: mol_type = genomic DNA
agcaatggttattccgacgaatgaagagtttgtgattgca

SEQ ID NO: 41769 - DNA, 50 bp, Vibrio mediterranei
  source 1..50: mol_type = genomic DNA
tgcaatactaatagaaacccaaccgatgaagagtgggtgatagcatcgca

SEQ ID NO: 41770 - DNA, 40 bp, Vibrio mediterranei
  source 1..40: mol_type = genomic DNA
agcactggttacttatactgaggaagagtttgtctttcca

SEQ ID NO: 41771 - protein, 506 aa, Streptomyces albus
MSTVTNCLLYARISEDPREQERGVRRQVHDLRAFAQLRGWQVVDVFTDNDISAYNGDERPGYESLIARIAEGGIDVVVGLHPSRLWRRRVERALAIDTFHLHGLKVAFETGGFFDCTKAVERSQLATVGESDTLESEVKAERVAREALARAEEGRANGAVSYGWCRVYEYDRTGRVTGFRDDVDSEQADIVREVINRLLTGDTLNKVTQDLNLRGVLPPGANIVMKRKKRAQGNEDGSKWNKTSVKKLALRPANGGYRQHRGQLYPAAWPALVDEEKWRQVVALLTAPERSVKRDGQRKHLLSWGIGECGVCGAVLKVAKRGNRKRGHLTLLYVCDAPKSCIGRSEAYVDAWVGAVVVARLARPDAVEVFGPDEDRLGRLRASVAGMRKRLDDAADDYAEGLLTRDQLRKVSAKLKQQIAGVEEEIKRSTPTLDLGAMGNLLSVPLEVAEAAWEALDVVQKRKVLEVLNVRVRIQPTGRRGPGFNPDYVEVLAGDGTPFAEYAPAA

SEQ ID NO: 41772 - DNA, 50 bp, Streptomyces albus
  source 1..50: mol_type = genomic DNA
tgttcgccctggaccaccggggaacagtcaacggtctccctgggtaatat

SEQ ID NO: 41773 - DNA, 40 bp, Streptomyces albus
  source 1..40: mol_type = genomic DNA
tgcccaccccaccggggaacaggcagtcgccggtgaacac

SEQ ID NO: 41774 - DNA, 50 bp, Streptomyces albus
  source 1..50: mol_type = genomic DNA
tgttcgccctggaccaccggggaaaagtcaacggtctccctgggtaatat

SEQ ID NO: 41775 - DNA, 40 bp, Streptomyces albus
  source 1..40: mol_type = genomic DNA
tgcccagcctactggtgcaaaggcagtccccagccaaaac

SEQ ID NO: 41776 - protein, 551 aa, Syntrophomonas wolfei
MNNRHSSTIATDKITALYCRLSRDDELQGDSNSILNQKAILQKFAADNGLGNTQYFVDDGYSGTNFDRPDWQRLMALVDEGKVGTIIVKDMSRLGRDYLKVGMYTEMIFPNADIRFIAINNGVDSANQQDSDFTPFINIFNEFYAKDTSKKIRAVFKAKGESGKPLCTNVPYGYKKDPDDKHHWLVDKDAAKVVREIFKLCMDGYGPTQIAKLLTERRIENPTSHAKRNGLNPPVRQFYDDPYLWRDTTVTHILSRMEYIGHTVNFKTYRKSYKNKKQMHNDPSQWQIFKNTHEAIIDEAVFEIVQKIRDGRRRVTPLGEMPILSGMLFCADCGAKLYQVRGRGWEHSKEYFVCATYRKIKGGCSSHQIRNVVIEEALLDDIRRITAFAREHEDEFLQMVTQKTKSALDRSLRENKRELEQATQRIRKLDEIIQRLYEDNIEGKISDERFAKMTANYEAEQHTLEQRVAELRASIATEKESALNADHFLTLVRKYTEIPELTAEIIREFVERVYVYKAEKVDGKRVQRIKIIYNCIGEFALPDATTNEKTA

SEQ ID NO: 41777 - DNA, 50 bp, Syntrophomonas wolfei
  source 1..50: mol_type = genomic DNA
acaaatccctatgcccacccgctaaaagggagttgcggttagggattagc

SEQ ID NO: 41778 - DNA, 40 bp, Syntrophomonas wolfei
  source 1..40: mol_type = genomic DNA
gggtatacaaacacccaaaaaagggggtgcttttttgcaa

SEQ ID NO: 41779 - DNA, 50 bp, Syntrophomonas wolfei
  source 1..50: mol_type = genomic DNA
acaaatccctatgcccacccgctaggagggagttgcggttagggattagc

SEQ ID NO: 41780 - DNA, 40 bp, Syntrophomonas wolfei
  source 1..40: mol_type = genomic DNA
gggattacaaaaacaaaaaggaggtgttactttttttaaa

SEQ ID NO: 41781 - protein, 612 aa, Cohnella xylanilytica
MRTNTGNPQDSQLFRLCRFMQRYHSRSEKSCTMNKPLCGTVDRLPRYAISWNEQRSKIHYTEISRHVAGKGRRMKKQQRTRTAIYCRLSRDDEQSGESMSIENQRILLQRYAKDNGFEVTDVYIDDGWSGTNFDRPDFQRMKRDIESGGIDIVLVKDLSRLGRNQIETSLCIQVFFPEYQVRFIAVSENIDTAKGEDDFMELRNLFNEWFVRDTSRKVKSGYRQRALNGDYTGAFAPYGYRKDEQNKHKLIPDENTAPIVQRIFRLAVEGHSPYKIGRLLRADRILTPRAYLAEQHQRYLKVVNARHPYDWGATTVKVILQNKVHLGHMVSHKTTKPSFKRKGLAAVPEDEWIEVPNTHEPLVDEETFALAQKVIRVKKRPTKTGEHQIFAGLLKCSTCGQGLSFARGGSSKTSGGKGGRGSFACNQSRTRGKAYCSFHYISYVDVYEIILADIQRHARAAREQESAFVEMVAAMSHSQQKKQWGAAMKERDKLKKREDELQTIQRKLYEDNALGRITDDQYVALSRDFTAEQAQLKERLKLLEEQLNQVESKRENTTRFLELVRAYTDMKELTKPILNELIDKVVVFDAEKVNGKRVQRIDIYYRFVGLIS

SEQ ID NO: 41782 - DNA, 50 bp, Cohnella xylanilytica
  source 1..50: mol_type = genomic DNA
ttacctcgttaaaaatagattactccggtattctgttttttacgaggtga

SEQ ID NO: 41783 - DNA, 40 bp, Cohnella xylanilytica
  source 1..40: mol_type = genomic DNA
cgaatatgcggagaacaatccggtgaaggccatctatcaa

SEQ ID NO: 41784 - DNA, 50 bp, Cohnella xylanilytica
  source 1..50: mol_type = genomic DNA
ttacctcgttaaaaatagattactttggtattctgttttttacgaggtga

SEQ ID NO: 41785 - DNA, 40 bp, Cohnella xylanilytica
  source 1..40: mol_type = genomic DNA
catacatgaagagaaaaatttggtggtggccatctatgag

SEQ ID NO: 41786 - protein, 477 aa, Fusobacterium mortiferum
MRDSKSKTVIIYNRVSTIMQDKNESLTEQTDECIRYCKTNGYEIYKILKDVKSGTKDDRAGYLELKKHIRRRDFDILVVLETSRIARKMKELVLFFSLLNENNIEYISIREPNYNTTTPDGKFAMNIRLGLIQFERDNTAERVTDRLYFKASKGQWVNGKPPIGYKLVNKRLEIDEEKAEIVKNIYEDFLNGYSLNQINNKLQFSWGSKQVKRILTNPTYKGYIRYGTRSNRKKNNREAFIVKGWHEAIIPEDKWEKVQEMYKSLNRKASNTKPTLLSGLLKCKECGNNYIRKRGGSYDKNLYYGCNLNNLRYSDKFFYKDIPECSSATIKGDLLEKAVIDTLKKQINDLNFNDIEIDKKRQVNIKQIDSSINKFKNRLNKIYELYIEDEIPKDKYLKDKKDIEARIISLEKQKKSFGEIEVEKSNNEMIQEYFSKIDLSNIEEANRILKIIVNKIVVYKKKKTPKDDFEVEIYLNI

SEQ ID NO: 41787 - DNA, 50 bp, Fusobacterium mortiferum
  source 1..50: mol_type = genomic DNA
aacatacacataaagacgcacgtagatacgtgagttcctacccacttgtt

SEQ ID NO: 41788 - DNA, 40 bp, Fusobacterium mortiferum
  source 1..40: mol_type = genomic DNA
aaatactccacctgtagtagatacgtgtgtcccaataaat

SEQ ID NO: 41789 - DNA, 50 bp, Fusobacterium mortiferum; identical to SEQ ID NO: 41787
  source 1..50: mol_type = genomic DNA

SEQ ID NO: 41790 - DNA, 40 bp, Fusobacterium mortiferum
  source 1..40: mol_type = genomic DNA
aaaaactaaatctgtaggagatatgactgccccaagaaat

SEQ ID NO: 41791 - protein, 535 aa, Flavonifractor plautii
MELRSNQTMTALYCRLSQEDELAGESNSIHNQKQILQEYAERNGFQNPRFFVDDGYSGVTFDRPAYLEMMGEVEAGHVSTIIVKDHSRLGRNRLVVGILLEETFAQHHVRYIAINDGVDTINGIDDSIAVRDLFNEWHARDTSKKVKAVIMAAARRGERIGTSAPYGYKKDEGNLKRLIPDEETAPVVARIFELCAGGLGPDRIARMLTREQVLTPTAYIYRTRGVRHSALNLDKPYAWSGSTVAAILEHEEYIGNTINCRTYTPSFKSKKSLLNPPDKILRFEGTHEPLIDLDTWEIVRRVRQGKRRPTKMGQPDMLSGLVYCKDCGSRHYFCRCGSWDENRYTFVCGKYHCHKEDCTPHTIKAVDLRQIVLSEIQRVSIEAREHWDELFQRLTSSHQSRAKKELAAKQRELDKGERRLKDLETMFRRSFEELALGHLSDGQFQTLVQGYEQEKAELEAKEEMLRNEIANRQDTLLNADRFRRLVDKYTDITELTPELVRAFIQRIEVHERSGRCKKKHYTQQVDIYFNFIGQA

SEQ ID NO: 41792 - DNA, 50 bp, Flavonifractor plautii
  source 1..50: mol_type = genomic DNA
aaacatctttatctggaaggacgcttcgccccatatggataaggatgtta

SEQ ID NO: 41793 - DNA, 40 bp, Flavonifractor plautii
  source 1..40: mol_type = genomic DNA
tgaaaaaggctggaaccggtttggttccagccttttttat

SEQ ID NO: 41794 - DNA, 50 bp, Flavonifractor plautii
  source 1..50: mol_type = genomic DNA
aaacatctttatctggaaggacgcctcgccccatatggataaggatgtta

SEQ ID NO: 41795 - DNA, 40 bp, Flavonifractor plautii
  source 1..40: mol_type = genomic DNA
tgaaaaaggtgggaaactgctatgttacagtctgttttaa

SEQ ID NO: 41796 - protein, 650 aa, Vibrio splendidus
MLHPYLRVSSDKQVESLSLTIQGDEALFEELAKKFNTTAGPKTYRDEGKSAYKGEHLKGALGELLVDIENNVIKDGDIIVLRHLDRLSRLDFDSSMTLFTNIINKGVQIYTVMDGRHYHNKKPNMERAIDNALVGFAFSTANEESLRKSWYTNKNASYRIKQFQDSDIPENGTAYDIGVGRTPFFVQVIDKVVQKSEHFDLMREIIELSLDGVGIGRCQAHLKKSGFDMSFSALGKLLRSEALFGTLKITLDGQVFELKNYYPAVCTEAEFYQIQGQKKNNTHERKRNKISNLAGIKRMFCGCGRAMSAGRDVQRNVEYYKCTKGTQLNNGMCYTPLRQDIVDKIVLGLIEHHLFEPAPVDTSTLLSLESEYEEKHKKFIVKQQFVFDNIDLFTDEIKQQLRDMESEIKNLRERISSERQKVLSADKEVQLSDYEEWQSNITNFVNGDNEEKQACRELIQRLVKRIEIDDRHMFTVTLIDDKQERAMLLNSRSKDKQRTRYFLPIRIVDVEYRAQIEEHQPELLAKYITEEMIDTYDIKTEDVDGNLKRLIHQPVYAVRDYEKEFFNLLQGHGILEWKRAYILKHTKATTTQWQAFKESDVSKYGWTKRDIEITTKSYTKQRKTIAYQQSLEEHDICNTLQCRSFTLLPD

SEQ ID NO: 41797 - DNA, 50 bp, Vibrio splendidus
  source 1..50: mol_type = genomic DNA
atcgactgaactgactctttagcatcgcgaaacgaacagtatcagtcgaa

SEQ ID NO: 41798 - DNA, 40 bp, Vibrio splendidus
  source 1..40: mol_type = genomic DNA
taaacagctctgtttagcatcaccaaacagcatctgcgta

SEQ ID NO: 41799 - DNA, 50 bp, Vibrio splendidus
  source 1..50: mol_type = genomic DNA
atcgactgaactgactctttagcaaagcgaaacgaacagtatcagtcgaa

SEQ ID NO: 41800 - DNA, 40 bp, Vibrio splendidus
  source 1..40: mol_type = genomic DNA
taaagagctctgtacagcaaaagaaaccaccatcagagtg

SEQ ID NO: 41801 - protein, 587 aa, Bacteroides thetaiotaomicron; identical to SEQ ID NO: 15186

SEQ ID NO: 41802 - DNA, 50 bp, Bacteroides thetaiotaomicron
  source 1..50: mol_type = genomic DNA
tctcgtgggtatttttgactatttatattcgtttaacataacgcacttgc

SEQ ID NO: 41803 - DNA, 40 bp, Bacteroides thetaiotaomicron
  source 1..40: mol_type = genomic DNA
tcgccggtatttgacaagaatattcaaaaaatgcaatgac

SEQ ID NO: 41804 - DNA, 50 bp, Bacteroides thetaiotaomicron
  source 1..50: mol_type = genomic DNA
tctcgtgggtatttttgactattttgattcgtttaacataacgcacttgc

SEQ ID NO: 41805 - DNA, 40 bp, Bacteroides thetaiotaomicron
  source 1..40: mol_type = genomic DNA
tcacttgtaattaacaaaatgagtcaaatactgcaaagac

SEQ ID NO: 41806 - protein, 513 aa, Phocaeicola dorei
MSKKKSKEKVVEFSKLTNKVAAVWTRVSTERQADTNGSLESQRRICTEYAESHAIRIKKYYGGTNESAKVEGKLYREMIAEVARDKEINIILVYSFDRFSRAGYEAMMTKAYLKAKGIYVVSATQATDPDSAAGGFMEDVIFLFNQFENNLRKDKCITGMVECLRNGNWYSKPPLGYDKLKVGREHVLTVNEKGKILRNAFIWKATEGIKDIEIVHRLKGLGLSIDRKHLNKILHNPFYCGYIQHSLLGDEIIKGNQEILIDEATFNKVNDISNAGYEHKEITEPFPLKRHIICSDCGGYLTGYTVKARGRDYYKCNKKGCKSNHSTEKLHQKYINLLNEYNIPDELIPILTDVLRKVFEEYNQSKGETKKVLLKRKTECENRINAVKVRFGLGEINSEIYTATMSELNSRLAEIRRELEDAGKNLSNMMKYINQTIEMSCKLGGLWSDSNFSNRQKIQNLVYSSGIYFDKENDDYRTENENEVFKIFRRFTASCEGGKEKATTDFARLSPSV

SEQ ID NO: 41807 - DNA, 50 bp, Phocaeicola dorei; identical to SEQ ID NO: 40042
  source 1..50: mol_type = genomic DNA

SEQ ID NO: 41808 - DNA, 40 bp, Phocaeicola dorei; identical to SEQ ID NO: 29683
  source 1..40: mol_type = genomic DNA

SEQ ID NO: 41809 - DNA, 50 bp, Phocaeicola dorei
  source 1..50: mol_type = genomic DNA
ttttgctcgtttgtcgccttctgtaggctacactatcgaattatcgaaca

SEQ ID NO: 41810 - DNA, 40 bp, Phocaeicola dorei
  source 1..40: mol_type = genomic DNA
cttttgttctttgaattgtaggaatgagataagcaattga

SEQ ID NO: 41811 - protein, 604 aa, Mediterranea massiliensis; identical to SEQ ID NO: 3331

SEQ ID NO: 41812 - DNA, 50 bp, Mediterranea massiliensis; identical to SEQ ID NO: 3332
  source 1..50: mol_type = genomic DNA

SEQ ID NO: 41813 - DNA, 40 bp, Mediterranea massiliensis
  source 1..40: mol_type = genomic DNA
gggcacctggaaggaatactcggccagggcaatggcccac

SEQ ID NO: 41814 - DNA, 50 bp, Mediterranea massiliensis
  source 1..50: mol_type = genomic DNA
ttgggtttttctattttattatacgagcttaactaaacagacttgcccaa

SEQ ID NO: 41815 - DNA, 40 bp, Mediterranea massiliensis
  source 1..40: mol_type = genomic DNA
gcctacctgggagcaacatgaagccaggggaatggccccc

SEQ ID NO: 41816 - protein, 679 aa, Bacteroides eggerthii
MNNMDKKVLIYCRVSTQQQTTDRQKEELLKFAAENHWNVEEEDIFIDVISGFKKGEFRPEYVKMLERVEYGDIDIILFSEFSRLARNATELLEQIKLFIDKGINLYFDKQKLWVRDSNKDVGSIILLHVLAVMSSYEIELFVERSLSGKITKVQAGHGGGDERAYGYMHNENKQIVINPIESKIVTRIFEMYVGGYSSIQISEILNAEKVPAPYVRKLNEYKKNREAKGLEVKEYKFDTDNLKWRISTINRLMHNELYKGNRRITFYKPDPTNPLPLSERQDREIVYEYSEHVESLRIVSDELFQQAQDKLSKAHYNKNNAVRHENLLKHLMVCGECGANFSVGKSNETSKNYISGGRTYKCYGRVNRKDKPRTCTNGAELRQWKLDGLVLQLSIQMFAEINIQQTNILKIENLGKEIEELVQIKSSKNTELVEAENLYKKTLKRLIAIEDDEVAKNLISDAKHKYDETKNVLNKTMDKLSREITTKRITIDNLKRLNANPLLINKMDEIRKNRDLVKTMVDEYIDKITIFRLHELWLLVVVSYKGGEEMWGTIKCARYKKEEMFYDELHCHYGVEFQGWLLNNTEHCFSYDKSTRIITYHGGSKIYVEFKSGEYDYDTFNQMIQATGWMGCFPFYAYEDSGKDLSVPSNEDFGKSLQENRTDWKVHNDKVLERLLSKS

SEQ ID NO: 41817 - DNA, 50 bp, Bacteroides eggerthii; identical to SEQ ID NO: 10987
  source 1..50: mol_type = genomic DNA

SEQ ID NO: 41818 - DNA, 40 bp, Bacteroides eggerthii
  source 1..40: mol_type = genomic DNA
aatgatgtgttcgcaggtatgcatggggggatactcctgc

SEQ ID NO: 41819 - DNA, 50 bp, Bacteroides eggerthii
  source 1..50: mol_type = genomic DNA
aagggtgtgttcatttcgactgtattcataggtgcgattgacacatcctg

SEQ ID NO: 41820 - DNA, 40 bp, Bacteroides eggerthii
  source 1..40: mol_type = genomic DNA
agtgatgtatttgcatgtatttatgtgaggatattcacgc

SEQ ID NO: 41821 - protein, 659 aa, Vibrio harveyi
MRQTTNSLDLSTTKAYSYIRFSTTRQKKGDSLRRQTELAERYAIQQGLCLQDLSFEDLGVSAYRGSNSIEGALSCFIAAVRDGEIDRGSWLLVESVDRLSRQATEDALSLFTTIINLGITLVTLQDCEVYRKGELSMSKLMLLLVKAQAAFEESDKKGKRSKANWDTKRAKMRAGKKFKVATTPQWLTWDKAKERYEIKQEAAATLQRLFNLTIDGYGARAIASTFNDEAIPMLNGAPAKWLASTVNRLQNDKKVIGIYQPKSRGLDGSRTPIGAPVENFYPSVIDKQDFYEAMRIRESKRRGESGSYRRGSMRNLFTGLLRCGLCGNPLHVVQQNNKARVERYGVQYRLVCSTKKELGCASASIKYLTFERMVSSALAYIPELMAGQLDNTSVLKSLDKQLGAANAELKDLTIQGKRVLDMLLTRQESEVLTQRFDSIEQSKLNLQDRIAELQTSKLEASSVEGFFKQAQVMFNEVNSEQAITSVDWRQRFNTQLKRILSKLVVYMSKEGVSVWAVDKSDNTVLSLVGGRRMRLMAGESDMKGNHYGRLVDGDSSIEGDEEGILVYLRNRKEDHNVERVANSTELHANEDMCVEYFDWFESQSLSFVKGTRQAAPTIQDYFYWQRENFIRWGETDEYICRWEDNMVKALAYCGVAWLK

SEQ ID NO: 41822 - DNA, 50 bp, Vibrio harveyi
  source 1..50: mol_type = genomic DNA
gcaggtgtttctagcgcgccttcaaccaaaggaaagtacgaaacaccgac

SEQ ID NO: 41823 - DNA, 40 bp, Vibrio harveyi
  source 1..40: mol_type = genomic DNA
aaaggtggtgttgccttctacggtatggaatacctgcgcg

SEQ ID NO: 41824 - DNA, 50 bp, Vibrio harveyi
  source 1..50: mol_type = genomic DNA
gcaggtgtttctagcgcgccttcatgcaaaggaaagtacgaaacaccgac

SEQ ID NO: 41825 - DNA, 40 bp, Vibrio harveyi
  source 1..40: mol_type = genomic DNA
aaagcaagtgttgctttcttgggaagggaataactacaca

SEQ ID NO: 41826 - protein, 551 aa, Anaerobutyricum hallii; identical to SEQ ID NO: 9941

SEQ ID NO: 41827 - DNA, 50 bp, Anaerobutyricum hallii; identical to SEQ ID NO: 9937
  source 1..50: mol_type = genomic DNA

SEQ ID NO: 41828 - DNA, 40 bp, Anaerobutyricum hallii
  source 1..40: mol_type = genomic DNA
gatcagtaagagtacggtacataaggattgcgtagaacgc

SEQ ID NO: 41829 - DNA, 50 bp, Anaerobutyricum hallii
  source 1..50: mol_type = genomic DNA
ccgttctaattagtgacaaccaaatatatggaagtaacaatatagaacgg

SEQ ID NO: 41830 - DNA, 40 bp, Anaerobutyricum hallii
  source 1..40: mol_type = genomic DNA
gatgaggaaatgtatggcatataaggattgcttagtaggg

SEQ ID NO: 41831 - protein, 551 aa, Anaerobutyricum hallii
MHIRNILKKGYSLFCYLQLYFRWYNKVVTERLKYNRKVLDMNIAAYCRVSTDKADQLNSLEAQKQFFSEYTQRTGDNLVRLYADEGISGTKIKNRKEFLRMMADAEHGLFDMVVVKDISRFARNTVDLLQNVRKLKALGIETQFLTANMTSMGNSEFVLTIFGALAQEESANTSKRVKFGKKMNAEKGRVPNIVYGYDKTIGDYFNLAINEEEAAVIRQIYKWYIEEGYGAAKIANMLNAKGIRTKRNCQWSQNATCRILTNELYTGKIINGKQEVADFLTGQRTEKDETEWMVTERPELRIIEPEMYEKAQEILECRSKTFKLTKERQSNKYLFSTLIKCKECGWSFRRTVRTYKNTYIRWVCSGHNGRGADSCPNAQTVDEEELIEVLSEYFSELLKAKKNVIRHVTGEFQRVYKAKDENLNYEKELNAQLHKLQKMRQKYMDMYTDDLITREELNEKIGGTKQEIERLENELKMVAYHLTKGEQLEIILNRTFKEIEDISDVHQMTNAQLKRIIQKIEVDKDGNVDIYLRIFGDLGLDETVLISDNQT

SEQ ID NO: 41832 - DNA, 50 bp, Anaerobutyricum hallii; identical to SEQ ID NO: 15517
  source 1..50: mol_type = genomic DNA

SEQ ID NO: 41833 - DNA, 40 bp, Anaerobutyricum hallii; identical to SEQ ID NO: 41828
  source 1..40: mol_type = genomic DNA

SEQ ID NO: 41834 - DNA, 50 bp, Anaerobutyricum hallii
  source 1..50: mol_type = genomic DNA
ccgttctaattagtgacaaccaaatatatagaagtaacaaaatagaacgg

SEQ ID NO: 41835 - DNA, 40 bp, Anaerobutyricum hallii; identical to SEQ ID NO: 41830
  source 1..40: mol_type = genomic DNA

SEQ ID NO: 41836 - protein, 551 aa, Blautia massiliensis; identical to SEQ ID NO: 41831

SEQ ID NO: 41837 - DNA, 50 bp, Blautia massiliensis; identical to SEQ ID NO: 9937
  source 1..50: mol_type = genomic DNA

SEQ ID NO: 41838 - DNA, 40 bp, Blautia massiliensis; identical to SEQ ID NO: 41828
  source 1..40: mol_type = genomic DNA

SEQ ID NO: 41839 - DNA, 50 bp, Blautia massiliensis; identical to SEQ ID NO: 41829
  source 1..50: mol_type = genomic DNA

SEQ ID NO: 41840 - DNA, 40 bp, Blautia massiliensis; identical to SEQ ID NO: 41830
  source 1..40: mol_type = genomic DNA

SEQ ID NO: 41841 - protein, 511 aa, Blautia massiliensis
MNIAAYCRVSTDKADQLNSLEAQKEFFSEYTQRTGDNLVRLYADEGISGTKIKNRKEFLRMMADAEHGLFDMVVVKDISRFARNTVDLLQNVRKLKALGIETQFLTANMTSMGNSEFVLTIFGALAQEESANTSKRVKFGKKMNAEKGRVPNIVYGYDKTIGDYFNLAINEEEAAVIKQIYKWYIEEGYGAAKIANMLNAKGIRTKRNCQWSQNATCRILTNELYTGKIINGKQEVADFLTGQRTEKDETEWMVTERPELRIIEPEMYEKAQEILESRSKVFKLTKERQSNKYLFSTLIKCKECGWSFRRTVRTYKNTYIRWVCSGHNGRGADSCPNAQTVDEEELIEVLSEYFSGLLKAKKNVIRHVTGEFQRVYKAKDENLNYEKELNAQLTKLKKMRQKYMDMYTDDLITREELNEKIGGTKQEIERLENELKMVAYHLTKGEQLETILNRTFKEIEDISDVHQMTNAQLKRIIQKIEVDKDGNVDIYLRIFGDLGLDETVLISDNQT

SEQ ID NO: 41842 - DNA, 50 bp, Blautia massiliensis; identical to SEQ ID NO: 9937
  source 1..50: mol_type = genomic DNA

SEQ ID NO: 41843 - DNA, 40 bp, Blautia massiliensis; identical to SEQ ID NO: 41828
  source 1..40: mol_type = genomic DNA

SEQ ID NO: 41844 - DNA, 50 bp, Blautia massiliensis; identical to SEQ ID NO: 41829
  source 1..50: mol_type = genomic DNA

SEQ ID NO: 41845 - DNA, 40 bp, Blautia massiliensis; identical to SEQ ID NO: 41830
  source 1..40: mol_type = genomic DNA

SEQ ID NO: 41846 - protein, 537 aa, Aneurinibacillus thermoaerophilus
MKAGIYARVSTGQQVEEGTSLDSQVKLCMNKAKQLGFSDEQIQVYREEGMTGEDIDIRPAMTKLRHDVADGIITHIIITHPDRLSRDMTDKLIVCREFEKNGAELIFTDTEFSKTPEGILFFNIISAIAAYELALIKKRTIRGRLQAVEKDKKIMPMRVAPYGYDWLESKLVINEQEAEFVRKIYRWYVFDNLTLREIGEKLYKMGAIPKRKESPNWSASSIRRILTSEIYIGKFYYNRRKTKKVRGERTETGKPKKTYEYRDESDWICIEVPAIIDPSLFDMAQVQKDKNTRRAGNVKYQYLLKGLIKCSCGRTWEATAYSGRINKETGERKKYLAYRCPNLAPKKYGPEVKKCIAPSIRADEFEAYIWNLIVETLSDPEDYRFQLKENLDTNQHDFHTEIEKQKRRLHDKEKQKEKVKYMFLEDLIDQEAMKKDIEKLNRELKEIESEIKKYETLIETKKNNALTKERIEEMIKAAQKLLTSKDALAFEERRYIIEKLVDQILIDYTKAGEFEVKIVGALEELFGSSSIRLKTQP

SEQ ID NO: 41847 - DNA, 50 bp, Aneurinibacillus thermoaerophilus
  source 1..50: mol_type = genomic DNA
gcatccgtttgaagacacaaccttaagagattgtgaactcaaacgaaagt

SEQ ID NO: 41848 - DNA, 40 bp, Aneurinibacillus thermoaerophilus
  source 1..40: mol_type = genomic DNA
tttggtggctcatatcgtcaagaaatttgaaaacacaggg

SEQ ID NO: 41849 - DNA, 50 bp, Aneurinibacillus thermoaerophilus
  source 1..50: mol_type = genomic DNA
gcatccgtttgaagacacaaccttaggagattgtgaactcaaacgaaagt

SEQ ID NO: 41850 - DNA, 40 bp, Aneurinibacillus thermoaerophilus
  source 1..40: mol_type = genomic DNA
tttcatctctcaaatcagcagaaagtttgaaaacaaaggg

SEQ ID NO: 41851 - protein, 512 aa, Bacteroides fragilis
MNANVIIYCRVSSDEQTLGASLDVQEERLRKYCNQMGYNIINNIPYREDESAKTFEKRPVIQGIMNYIRKNKGRVNKLLFLRWDRYSRDIISASENLKELLKLGVEPNAIEAPLDFNSDTWPLLLGVHIGSAQCDNIKRSKATMDGIHGTLAKGKCANKAPRGYQNVRISKHETHVEIDTNTAPFIQAMFKEVAKGIETPCYIRRKFARKGYNIPESSFLEMLRNKFYIGKIRVPAYKGEPEYYVNGEHEAIIDEETFYKVQEILDGKRKKTPKLSKAINPDLYLRKFLICPVCGCALTGATSSGNGGKYTYYFCCNNQKHIRMRAENVNEEFARYTAQLKPNKTVLDLYNEILKDLQSERKGESKKEVAALQNELSTIQKRINSIEDKYLDGDLTKEEYNRMLERYTKEASAMQQQIEMRENPNRSNIEPKLNYSINLINNIDSYIRNASVGVKIKLISSMFPEKIEFDGKTYRTNSYNKVLDLIYQQTNELRGVEKKSGESFSTFSASVP

SEQ ID NO: 41852 - DNA, 50 bp, Bacteroides fragilis
  source 1..50: mol_type = genomic DNA
tttttcaactttctccgcctcagtacccctaagcgttcttttctcgaacc

SEQ ID NO: 41853 - DNA, 40 bp, Bacteroides fragilis
  source 1..40: mol_type = genomic DNA
acttagcttttttcttcgtacccagacccggtacaagcca

SEQ ID NO: 41854 - DNA, 50 bp, Bacteroides fragilis
  source 1..50: mol_type = genomic DNA
tttttcaactttctccgcctcagttcccctaagcgttcttttctcgaacc

SEQ ID NO: 41855 - DNA, 40 bp, Bacteroides fragilis
  source 1..40: mol_type = genomic DNA
cctctccttttttccttgttcctagaccccgcacaagaca

SEQ ID NO: 41856 - protein, 549 aa, Clostridium kluyveri
MIIIKAAIYSRKSLFTGKGESIENQIQLCKEYGEKNLNLKNDNFIIYEDEGFSGGNTNRPKFQELLKDVKKRKFDVLMCYRLDRISRNVADFSTTLELLQQHNISFVSIKEQFDTSTPMGKAMVYISSVFAQLERETIAERIRDNMIQLAKTGRWLGGQTPLGFDSQKILYYNSEMKEKSMYKLSPVKEELKKVKLIYNKYIEFGSISLVLKYLLSNNIRGKNGGDFASMSINDILRNPVYVKSDDGVFKYLSDSGIITCGTPNGNGIMTYNKRNSKYVPKKKTEWIAAIGKHEGVIDSNTWLEVQFRLNKNKKKANPRQGTSKKSLLSGVLKCALCGAPMRVCYGRPKKDGSERIYYYMCTMKAHSAKSRCDNPNVKGPELEKAIIENIKQLNTTKILKELQVAKNEAAVSIENNFTETITKEIKDKSDQINTLLEQLAHTNANNSIASEFITSKIESLGNEIKKLNLKLEKSKDTKQENIQKKLNFEIIEKSLHEFNSSFDMIKDTSKKRLILENIIDKVYWNGNTGDVDIQLWGSKKKHTLRPVVR

SEQ ID NO: 41857 - DNA, 50 bp, Clostridium kluyveri
  source 1..50: mol_type = genomic DNA
tgtcgcaatacaatacgtcatgctcattcatgacttatagtattgcgaca

SEQ ID NO: 41858 - DNA, 40 bp, Clostridium kluyveri
  source 1..40: mol_type = genomic DNA
aaattttccaagtcacaatcacgcctggctgtatgatgta

SEQ ID NO: 41859 - DNA, 50 bp, Clostridium kluyveri
  source 1..50: mol_type = genomic DNA
tgtcgcaatacaatacgtcatgctctttcatgacttatagtattgcgaca

SEQ ID NO: 41860 - DNA, 40 bp, Clostridium kluyveri
  source 1..40: mol_type = genomic DNA
aaatcttccaagtccccttctctccttcatctatgatata

SEQ ID NO: 41861 - protein, 468 aa, Amedibacterium intestinale
MLEQIINIIPANKVEEKNEKKEVRVVIYVRVSTSKKEQVRSFNNQIDYFRKKIDKREDWRLVNIYADEGTTGTSTKNRSQFLQMIEDAKKGEFDLILTKSISRFARNTLDTIKYTRLLKSLNVGVYFEKDNLWTLSGDGEFILTVIAAVAQEESRSISENTKWGMRRKMSKGIGCVPFSNFWGYDRGEDGGYLINEKQAEIVKRIYNDFLNGYTLKDITLLLEKDDIKTVKGKDKWGTSTISSILQNEKYKGDCLLQKYYVLDPITKKLLKNNGEIDQIYVINHHKAIIDNDTWEKVQFRLTKAANKTHASALLKRNFFMGMLYCSICDRRCSKMMYTKVEHSGTNYETCSYVKTTCEQKGTSLKIKEKILILIIYDSILEYHGIKKEETKSRKPIFENKYIQVRTEEKIEISLLLIHRLIDRIIVLPDTKLRINYYDGKIDVVNYADYECDERLKQAKDFIYTQDEI

SEQ ID NO: 41862 - DNA, 50 bp, Amedibacterium intestinale
  source 1..50: mol_type = genomic DNA
ttgtatcactataacgatataataaacccttcgattttaaattgatacga

SEQ ID NO: 41863 - DNA, 40 bp, Amedibacterium intestinale
  source 1..40: mol_type = genomic DNA
gttacaagctgatatactgaaagttggacatcatggaagt

SEQ ID NO: 41864 - DNA, 50 bp, Amedibacterium intestinale
  source 1..50: mol_type = genomic DNA
ttgtatcactataacgatataatacacccttcgattttaaattgatacga

SEQ ID NO: 41865 - DNA, 40 bp, Amedibacterium intestinale
  source 1..40: mol_type = genomic DNA
gtttcaagctgataaacatcaagttggaattctacgatgt

SEQ ID NO: 41866 - protein, 511 aa, Halobacillus litoralis
MDIYKESQESKVNYDEYPYLIYVRVSTDKDEQKDSVPNQIDICRYWLEQNNFEWTGNAILKDDGLSGTYFLERKAMQLILQKARNREIKMVVFKSIHRLARDLKDALEIKEVLIGHGVRVVTIEENYDSHLEGKNDMKFEMYSMFAAQYPKTLSVSISASLAAKVRRGDHIGKIPFGYDRVKHKLVINKDEAKVIKQIFDWYTEDKYGFKAITHKLNEGVQNRSILPPKESNYWGVTSVQRIIKNPVFCGMFILNKYTNIKVDGKKKQIVNPKEKWTIFEKHHPAIVSKEQWNKANNKDITKFNTKIAKWNEFRGLMKCNECGSNMVTMVSYKKRKSDGHKTTWRYLKCSAYRRGGKAACVNHTPITYEDFREFILESLVNKWDGLELDLENNLGKNNKEKIKKIEANIHVLEKKQARLVDMYLNEMLDKNEYMKRKNAFENEIDKLNDEMFIYGDQENSNIQIKSIKEAFISLQNREQDLTRIFNEIIDHIDIAQNGEIEITYRIESFPR

SEQ ID NO: 41867 - DNA, 50 bp, Halobacillus litoralis
  source 1..50: mol_type = genomic DNA
ggttcgcaaaaggtacgcacctcaaatgaaatgaaacccatttgcaaact

SEQ ID NO: 41868 - DNA, 40 bp, Halobacillus litoralis; identical to SEQ ID NO: 26363
  source 1..40: mol_type = genomic DNA

SEQ ID NO: 41869 - DNA, 50 bp, Halobacillus litoralis
  source 1..50: mol_type = genomic DNA
ggttcgcaaaaggtacgcacctcagttgaaatgaaacccatttgcaaact

SEQ ID NO: 41870 - DNA, 40 bp, Halobacillus litoralis
  source 1..40: mol_type = genomic DNA
ttctcggaacggcatttaagttgccctgcagatgcaagaa

SEQ ID NO: 41871 - protein, 598 aa, Vibrio parahaemolyticus
MDEKPRIAHIYSRVSKGTQVKGDGLRRQIEIASKFIEDVNISNSRDGLPVYTLADSPIYDRGLSAYFGLNTDENAGLGAFLKAAENGQVEKGTLLIVEAIDRISRLPVDDARALFARFKKYGIDVAICRFNLIIYHDKSSDLGQDLLITTAIHLAHLESEQKSKRIRARFTHKRLLEKEGGERRTSMSPSWIELSKDKTHFVLIPERARIVRKMVDLKLQGWGAHRITVYLNEQGFPCWNRSNTWYTKIVEKYLKMIQLVGDFQPVEHVHGEKGVRKEPVGDVIKGYYPALITEEEWIRLKASFKRSGGRQTGAFSNLFSYMLYCPTCGSCMSYFKPNRGRIKVRCRKQIDKQGCDQRALNYEEIEPRLIKALAGLDYAKINNNSFTSLQKELNTLEAQVAELEASADDIKTQMLEESDPRIISVYVNKLKAIYTEQDKAKARFEKLSTQTSDYDVNTLEQLQLERNEDRERYNGFVRSFVKYVIASDSKLGKPLRIVFKSEAVGEVPVFFNDDKNNKAISDIFTAQKDVNEAAPIRLINMSRVHGNLGKLAAIDTVPVPDDLGDALERIKYLFAVRQAVLQNPEKWQAIADDARLFE

SEQ ID NO: 41872 - DNA, 50 bp, Vibrio parahaemolyticus
  source 1..50: mol_type = genomic DNA
tgcgatactaatggaaacccaaccaatgaagagtgggtgatagcatcgca

SEQ ID NO: 41873 - DNA, 40 bp, Vibrio parahaemolyticus
  source 1..40: mol_type = genomic DNA
agcactggttattcctaccaacgaagagtgggtaatcgct

SEQ ID NO: 41874 - DNA, 50 bp, Vibrio parahaemolyticus
  source 1..50: mol_type = genomic DNA
tgcgatactaatggaaacccaacccatgaagagtgggtgatagcatcgca

SEQ ID NO: 41875 - DNA, 40 bp, Vibrio parahaemolyticus
  source 1..40: mol_type = genomic DNA
agcactattttttccttcccacaattactgggtaatcagt

SEQ ID NO: 41876 - protein, 598 aa, Vibrio parahaemolyticus; identical to SEQ ID NO: 9666

SEQ ID NO: 41877 - DNA, 50 bp, Vibrio parahaemolyticus; identical to SEQ ID NO: 9667
  source 1..50: mol_type = genomic DNA

SEQ ID NO: 41878 - DNA, 40 bp, Vibrio parahaemolyticus; identical to SEQ ID NO: 41873
  source 1..40: mol_type = genomic DNA

SEQ ID NO: 41879 - DNA, 50 bp, Vibrio parahaemolyticus
  source 1..50: mol_type = genomic DNA
tgcgatactaatagaaacccaacccatgaagagtgggtgatagcatcgca

SEQ ID NO: 41880 - DNA, 40 bp, Vibrio parahaemolyticus; identical to SEQ ID NO: 41875
  source 1..40: mol_type = genomic DNA

SEQ ID NO: 41881 - protein, 496 aa, Clostridium thermobutyricum
MKCAIYIRVSTNRDEQKDSLVNQEKFFLDYITKHGYSLYNVYSDVASGTSTKNRLSFLELIEDVKNRKIDIVLAKEIARLGRSVIDTMKFYELCRDNEVHLIAFNNGINTLKNDVQYISLYSALAQIESENISNRIKMALHTIAGSGKFKGSIAPYGYYVENKTLKVRNDYTPTIVRRIFKEYISGKGVDTIARHLTRDGIPTPATLAQKRNAGKFWTGRTIQLILSNRNYSGDLTQCTTYVSSIRTKKRKKRNPQDFVIVENTHEAIIYKEDFELVQELLAKRSRKQNNHRKSTHLFSNLLFCADCKKGMHFKKNRRGYVCGTYDKHGKYAGCTSHIIREKDLEDIILKDIQVILKDIKITYIDKINSKFEKEKLSLEKNINIYKNKIESLKEIKNNALKKLCSNIITDIEYKSITGEIDIEISNINSNIETLVKNLDKLNSLTKDDFIKLANELSSIKKLNKDILNRLIKRIEIKENGDVKIFYRFSYLHSTYK

SEQ ID NO: 41882 - DNA, 50 bp, Clostridium thermobutyricum
  source 1..50: mol_type = genomic DNA
actaacttcgttataacctcaccatgtcctgacgctatatcgtagtcaaa

SEQ ID NO: 41883 - DNA, 40 bp, Clostridium thermobutyricum
  source 1..40: mol_type = genomic DNA
tttaactacagtctcaccatgtggtgtattagggaacata

SEQ ID NO: 41884 - DNA, 50 bp, Clostridium thermobutyricum
  source 1..50: mol_type = genomic DNA
actaacttcgttataacctcaccagctcctgacgctatatcgtagtcaaa

SEQ ID NO: 41885 - DNA, 40 bp, Clostridium thermobutyricum
  source 1..40: mol_type = genomic DNA
ttaagctccagtatgcccagctggagtcttatgtaacata

SEQ ID NO: 41886 - protein, 584 aa, Flavonifractor plautii
MTETFDIAGYARISVDDELDRDNVSIENQKAIIADFVKQKFPGSSLTFYEDRDRSGYTFEQREGYQAMRKGLMSHQYDILIVKDFSRFSRRNSRGLVELEDLRDAGARIISIGDNIDFPNDDDWLKIQFQFLINEMPVTDTSKKVKNVIKRRQADGKWICAAPYGYIVNKKQEFEVVPTEAEVVRTIFRLYNEEGWGYKKIANYLTDQGIPTPRMAERDRKEAAGEDYNRPVKSVWAIVTVQGILDNDFYIGTLRQGKYTRQKINGRDVRRDEGEQIVIEHHHQAIIDYRAFATTRALREKRSTSHYRGVKKYDNTYSGFLVCGDCGAPMFAMSRKDLKSAYTCGTYHRRGRAGCTSHHIRADKLDELMKLYLRQVMDHSAEMLQRINEDLAREREDVAETEESADRLAELLAELQEELKVTKRQRIRDIMKHPEREGLLEETYDELESDLQKKIEGVSHQIEMLSDKRNTIIQVNRAARTAMEVFSDVLHKETLERRDLELIIQKIKVYEDHLEIQLQADVDSILRSGTLPTEEAVAAMAEVKGGTVNFKDGMGQLPSVTLVQTAPKRPDKVFHANVISDGDP

SEQ ID NO: 41887 - DNA, 50 bp, Flavonifractor plautii
  source 1..50: mol_type = genomic DNA
gccaatgttatcagtgacggtgatccgtcacagattacattgacacggtg

SEQ ID NO: 41888 - DNA, 40 bp, Flavonifractor plautii
  source 1..40: mol_type = genomic DNA
gaggatccgcgaaggcgacccgctggagatctacacagat

SEQ ID NO: 41889 - DNA, 50 bp, Flavonifractor plautii
  source 1..50: mol_type = genomic DNA
gccaatgttatcagtgacggtgatttgtcacagattacattgacacggtg

SEQ ID NO: 41890 - DNA, 40 bp, Flavonifractor plautii
  source 1..40: mol_type = genomic DNA
taggatcacccaaagcaatttcctggagatctacaaagag

SEQ ID NO: 41891 - protein, 546 aa, Ruminococcus lactaris
MRIFIYSRKSKWTGRGESIENQVSMCKDYVLYNIDGADQAEIVVYEDEGFSGKNTKRPQFQLMMQEIKKGSCDYLVCYKLDRLGRNIADLANLIETLNKLNVSFISIKERFDTSTPIGKAMLYFAGVLAQMEREQIAERVRDNMIMLARKGRWLGGNTPLGYEAQAEEKVLINGKSRKSFRLITNEDDMKVARFIFSEYLEKQSLVGIVKYFLSHDIKTKRGNEYATTTVKDILTNPVYCIADKDAYEYFTNLGCQVCMDEEEADGKYGLIAYAKTSSSQYKNKNNKPEKWIIAKGKHKGIVSGKDFSKIQKILARNSSKGDMWHKPQNPVSLLSGILYCSCGHLMRPKNYSSKQVTDKGERKFSYLCPYKDWTHGEKCSVPNVQGNTLDELVCREVLRYNEENSNINQMLKEVISKMQNTKEKKVTSSDLLDQEIRKKKNEVKNLVRALAKSDADEAFVDQIEKEILRLNQECARLESEKTEMGEETVSIQGEKQQIEFLMEQLSSFQNLFDTLSVPEKREYLRMIIDKVVWDGEQAHIFIYGSH

SEQ ID NO: 41892 - DNA, 50 bp, Ruminococcus lactaris
  source 1..50: mol_type = genomic DNA
tgtttccgctggtcacacatcgcattgccgatggtatagtagtggaaaca

SEQ ID NO: 41893 - DNA, 40 bp, Ruminococcus lactaris
  source 1..40: mol_type = genomic DNA
cagtgagagcagagtagatttgccgcagccggacggaccg

SEQ ID NO: 41894 - DNA, 50 bp, Ruminococcus lactaris
  source 1..50: mol_type = genomic DNA
tgtttccgctggtcacacatcgcaaggccgatggtatagtagtggaaaca

SEQ ID NO: 41895 - DNA, 40 bp, Ruminococcus lactaris
  source 1..40: mol_type = genomic DNA
cagagggagcagagtaatgaggcagtagctggagggacag

SEQ ID NO: 41896 - protein, 513 aa, Blautia obeum
MRNYVIALYIRLSVEDFKTESLSIPNQKLILREKAMSLPEWDCSEILEFIDNGHTGTNFERPAVQELLTMVQAGKINCIIVKDLSRFGRNSIETGYFIERVFPLYHTRFISVSDDFDTANFKGDTGGIDIAFKYLISECYSRDMSMKTKSAKYAKMRRGEYQSVICPYGYRKSADGRMELDEDVAPNVQMIFQWASEGNTAAEITRKLYAMNIPTPGEYRKLKGKDYYNVSRTNGVWSTSTVLRILEDQRYIGTYVIGKRKVKEIGSRHTQLKDESEWFKIPNHHPAIISVDLFEKANASIKRFSLSNKKPRDYLLRGKVFCGCCDHAMSLRNGAWFYCRHSEVAETLPCHGVRIKMADLEQVVFETIRAQMCPALGIDSNKDKLDLQTVQQAEHEEKLRSIQDSKRHLYEQYALGEIDLETYRTRKAVYDTELVQAKNVHAVITAQTKQIKSDYEIKLKQQEIMQEVGNANMLTKALIDRLINKVYVFPGDRIEIEYATQDFLETKESEKEV

SEQ ID NO: 41897 - DNA, 50 bp, Blautia obeum; identical to SEQ ID NO: 14627
  source 1..50: mol_type = genomic DNA

SEQ ID NO: 41898 - DNA, 40 bp, Blautia obeum
  source 1..40: mol_type = genomic DNA
caagagtgaaatgtggctgtgacggagatcgtgaatgcgg

SEQ ID NO: 41899 - DNA, 50 bp, Blautia obeum
  source 1..50: mol_type = genomic DNA
tttgtcgtgggcttgacatacgggaaccgttacggtataataacgacaaa

SEQ ID NO: 41900 - DNA, 40 bp, Blautia obeum
  source 1..40: mol_type = genomic DNA
catgaataaattgagtgtgaagtggagatggtgaatgcgg

SEQ ID NO: 41901 - protein, 591 aa, Bacteroides fragilis
MIMEKKKRAIGYIRVSTTAQDAARQRLQIEDFCRDNGYSLNDVLKDEGISGAVKNRPSYLKLLTLTADDADVVVVSELSRLSRQTEILSVMNDVNSLLQNGLDVIFIDTKAHYKGGKVLDLVDIMRIAIAAEYARAERLKITERMRSGKVRCFLQSEELMCKGSVVPFGYSAVPNPNYVRGKTPKSILVRDENAPVVQEIFKMCIDGLTAKEIQREMISRGIKTVKGNDFFSENIYRILHNPCYKGVWRIMPNRDGKNKTEQARREPIERKGDALIPEETWDKVQAILNQNRIVDVPNNGVNYNALRYILKCPCGKNMYIVRQTGTGLRYYRCAVKKNKYDETICANGGVNADIALKTIWVIVKTAIAKDEFMEMSNEKIAKITKEIANLTSRIQSLNADISTAKSEQASILESIKILTNPALLLHQQQQYENKEKFISVAEDEIKQLKAERHQKEVSKAELANDVAIETLDNFSIEDKARLFKKYLNRVVYYSETQKRGTFVVDFKNGTRKIVCIHIKAKSAEVVELPHSFQFDEQNRSILVPIPHRVPDNKFALPTIKNTPYTAKEVMDMLVNQKEYWIEGIANQPYFE

SEQ ID NO: 41902 - DNA, 50 bp, Bacteroides fragilis
  source 1..50: mol_type = genomic DNA
agttacacctttaacgcacaattgtacaactgtgatttgtgggtgtaact

SEQ ID NO: 41903 - DNA, 40 bp, Bacteroides fragilis
  source 1..40: mol_type = genomic DNA
agtgtctacgatcaagaaatatatcgacatggcttcgatg

SEQ ID NO: 41904 - DNA, 50 bp, Bacteroides fragilis
  source 1..50: mol_type = genomic DNA
agttacacctttaacgcacaattgctcaactgtgatttgtgggtgtaact

SEQ ID NO: 41905 - DNA, 40 bp, Bacteroides fragilis
  source 1..40: mol_type = genomic DNA
agtgttaactaacaaaatacttatctacatgaattagatg

SEQ ID NO: 41906 - protein, 456 aa, Mycolicibacterium monacense
MRAAVYTRISEDQTGQRLGVTRQLEDCLALADRLGWEVVTRFDDNDLSAFNGKSRPAFEAMLDAMKAGEFGALLCWHTDRLYRSMKDLERLIDIADERRVQIRTVNGGDLDLSTSAGRMLARILGSVARQESEHKGERQKRANEQKAAAGKWQTANRPFGYTMTGTPLEPEATLFRTAVADVLAGKSLRKVCAEWNGRGVTTSLGNAWNSRQVRGVLLNPRYAALRVHRGKVVGPGDWEPLIDTDTHYGLAAFLTDPSRRRSMGFERKYIGTGVYRCGKCGGLMKACQPAASRQRAYVCRDFGHVLRQRETLDEYVEMVVLEYLKGTDIHSKLTRDNGVDLAALHTKRTVLQARLDDLAAMFADGEIDASQLRRGTTELREQLAEVDAVLTDLARTSPVANLLAAGEAVTEHWNALSADLKGKIVDELMVVTVLPSPRGTKGFHPEYIDIDWRGAQ

SEQ ID NO: 41907 - DNA, 50 bp, Mycolicibacterium monacense
  source 1..50: mol_type = genomic DNA
ggacgcatgactcgctgggtcctgcacctgaacagacgggtcatgcactg

SEQ ID NO: 41908 - DNA, 40 bp, Mycolicibacterium monacense
  source 1..40: mol_type = genomic DNA
ggacgtgcgctgggtcctgcacctggacatggacgcgttc

SEQ ID NO: 41909 - DNA, 50 bp, Mycolicibacterium monacense
  source 1..50: mol_type = genomic DNA
ggacgcatgactcgctgggtcctgtccctgaacagacgggtcatgcactg

SEQ ID NO: 41910 - DNA, 40 bp, Mycolicibacterium monacense
  source 1..40: mol_type = genomic DNA
ggaagtgcactgtgtcttgtccctggagatggccggcccc

SEQ ID NO: 41911 - protein, 582 aa, Enterococcus gallinarum
MSDVQVIKANRSENRIRGRKVEVLRVAAYCRVSTDSEDQLNSYKSQVTYYTDLIKKKHEWTLADIYADEAITGTQVAKREDFQRMINDCMNGDIDMVITKSISRFARNTLDTLKYVRMLKEKGIAVFFEDENINTLTMDGELLLVVLSSVAQQEVENISSNVKKGLKMKMQRGELVGFQGCLGYDYHKDTKSISVNEKEAEIVRYIFNRYIEGAGCTVIGNELENLGYKTKYGSSKWVQSTVIGIIKNEKYKGDLLLGKTFTVDPISKRRLENFGEEDKFYIRDHHEPIISEEIFEEAQKILAKRNTNRNVHQEGQKRNKFSRKYAFSCMIKCGFCGGTLTRRNWHSSSAYTKTIWQCVTATKNGKRHCPHCKGIPEEVIEKAFVKSYQLLCTDQQEIVDEFLQKVEGILNDDTSLKRLPKIEKEMADLHRRKEKLLDLRLDNNIDRDIYEKKNQELSEQLKKLQEEQERLMELSRNQDNTRTRLREFRKVLGSGEILESFDRVVFESVVEKIVIGGYNNEGVEEPLKITFEYKTGIHSNFNGKDFKPKRKNAAAVHNDAELCSYTSDEAEKLCLHSSSDTC

SEQ ID NO: 41912 - DNA, 50 bp, Enterococcus gallinarum
  source 1..50: mol_type = genomic DNA
tgtgtttacatagtagttccgacacatgtagagactattgtgttgataca

SEQ ID NO: 41913 - DNA, 40 bp, Enterococcus gallinarum
  source 1..40: mol_type = genomic DNA
tctattcccacaaaccactcatgtggaatgtgtggtcttg

SEQ ID NO: 41914 - DNA, 50 bp, Enterococcus gallinarum; identical to SEQ ID NO: 41912
  source 1..50: mol_type = genomic DNA

SEQ ID NO: 41915 - DNA, 40 bp, Enterococcus gallinarum
  source 1..40: mol_type = genomic DNA
tcaattctcacaaaaccctcatgaggaaggagttgctttg

SEQ ID NO: 41916 - protein, 527 aa, Vibrio parahaemolyticus
MMKVAAYVRVSSYNQKQTGDSISGQKEYIKNWAYLTGNEIIKWYIDESASAFRDLRRYNFNLMLQDIENPNSEIEAIVVYSLSRFSRNLENQLTAQNLLETYNVRLISASEGIPDDHNTARLHTSFLGILNEHYSRQNSAVVTDRLQDTARKGYFCGGPIPLGYRSVEIEGDTSKKRKVLAVNDDEAPIVKEIFSLAEKGIDGKPMGVKAISIYMNNKGVLNRGKRWNRNSIDRVLTRRDYFGEHIHGKNRDPRKGLEPIIVNVPAIINKDQFFNVQDGLKSRELKNNENKCYRSDSLLVGMLKCSICNSNMVVVSGKGGKYKYYECSKKIRQDVKSCSSKMLPKPLIDNAVRRLLSERVITEENINYIYKDLKSRIRNLVEKSARNVASINRRINNNNFKVNNIIEQIASRQLEPNAQINKYITDKRNELESLNRELVTALKGTKLPIKQFGQTQVAQLVKNLKEIVLTGDEARVKQILLILLKEVEITPQKKISILGFNMALVFLASHAKTGTDFSVPVIDTIWR

SEQ ID NO: 41917 - DNA, 50 bp, Vibrio parahaemolyticus; identical to SEQ ID NO: 15062
  source 1..50: mol_type = genomic DNA

SEQ ID NO: 41918 - DNA, 40 bp, Vibrio parahaemolyticus
  source 1..40: mol_type = genomic DNA
gcttttttctaaaagtggcggagagatagggatttgaacc

SEQ ID NO: 41919 - DNA, 50 bp, Vibrio parahaemolyticus
  source 1..50: mol_type = genomic DNA
ttcccgtaatcgacactatatggcgagctacatgggacgattatgggaac

SEQ ID NO: 41920 - DNA, 40 bp, Vibrio parahaemolyticus
  source 1..40: mol_type = genomic DNA
acttttttttaaaagtggagaaaagccggtgatctgaagc

SEQ ID NO: 41921 - protein, 618 aa, Streptococcus suis; identical to SEQ ID NO: 11111

SEQ ID NO: 41922 - DNA, 50 bp, Streptococcus suis; identical to SEQ ID NO: 11112
  source 1..50: mol_type = genomic DNA

SEQ ID NO: 41923 - DNA, 40 bp, Streptococcus suis
  source 1..40: mol_type = genomic DNA
tgtcgtcgatacatcaacagaagtcggacgtgcaatgtca

SEQ ID NO: 41924 - DNA, 50 bp, Streptococcus suis; identical to SEQ ID NO: 37649
  source 1..50: mol_type = genomic DNA

SEQ ID NO: 41925 - DNA, 40 bp, Streptococcus suis
  source 1..40: mol_type = genomic DNA
tgacatcgattcaacaacagctttcggaagttcacagtca

SEQ ID NO: 41926 - protein, 681 aa, Streptomyces spongiicola
MRNSVALALETSARAVGGQAALRAVDYLRVSTEQQTKGYGITYTGRATAAHIRRKGWEHLDTFKDEGESGTLPWQERPGASQIMELAQRTPRPFDVVVVFETRAIGRKNRVFWDWVWTLQDLGVFVAIVDEDIDNTTEDGEARMQEKAHEAFKELARIRKRTQGGIQQKALMGGFPGGQARYGYRIENRGKKGEQVLVVDDCDGGDACTRTDPCTTMHEAPALRFARKAAVRAKGNFGQVARSLNAEGFLTRSGRPWAAPHIRGILMNDDLLDARFVFRGRSSKVNPDGTPVWGESVVMDLDPVFSPDEVAEFRRVTANKVRHWAASRVYTLTGRIASPCGRHYVGCAPSGEAPHYVCAGKTAEHPGAPTCSCSQLDASGVEEWAWKELCVLLGDGARLRAMADQWVGRSSGERVDYSSRLADLDQKIAAQDEAVDIATVVAAKRAAGKGLIGSEAEAAVERIVKPLCDELDELKRSRREIEGWKAEAARADGRSNDLQELAQMAHDRLEGLEPEQQREFFHLLDVEITLTGPNPGMHRGARCPIGEWFRANEQPVPILCDHSWALVMESEKFPNGGTEPRQKGGLAPRTVLEAFLKKARTGAAWPELNTEYGSTGLIGHWGRWYKSGRWERVMQAMSACEGTPPAPLHPLPPMHMKGKIRPGVILAVSDRETHGQASGPS

SEQ ID NO: 41927 - DNA, 50 bp, Streptomyces spongiicola
  source 1..50: mol_type = genomic DNA
aacccacggccaggcatcgggcccttcggaagagttcgcgatcatggggt

SEQ ID NO: 41928 - DNA, 40 bp, Streptomyces spongiicola
  source 1..40: mol_type = genomic DNA
gcccttcggcatcgggcccttcggcagcggcatgttgctc

SEQ ID NO: 41929 - DNA, 50 bp, Streptomyces spongiicola
  source 1..50: mol_type = genomic DNA
aacccacggccaggcatcgggcccggcggaagagttcgcgatcatggggt

SEQ ID NO: 41930 - DNA, 40 bp, Streptomyces spongiicola
  source 1..40: mol_type = genomic DNA
gcccgtcggcctcgggccaggaggcaggggcgttttaggc

SEQ ID NO: 41931 - protein, 494 aa, Ruthenibacterium lactatiformans
MNRAVIYARYSSDMQREESVEAQIRACKYYAQQNGIDIIGIYADRAKSGMYHSEKREEFQALLNAAPRKEYDIVLVHKLNRFGRAGVKALNDRDYLERLGIEIISVTERLENTPEGRLMLYVITGMNEYYSRNLAGEVLKGLRENAYKGITTGGTPALGYNLGADKKLVINEQEAAAVRLIFKMYISGAGYGEIIDELNSRGFRTKRGAKFGKNSIYDILRNERYTGRFTYGKTKTVNGHRSQHKKEKEYISIEGGCPAIISADEWERVQRLMDVKKHDAASGKAKELYILSGKLFCGHCGARMVGNSRVSRGERYLYYDCNAKLRKKTCTKHAVKKNEIEQAVIQKLNQLAFSDDLIERFVDEAYKAQDNEMPDISGKIADIDKKISNLVTAIENGADVGPIKQRMADLSAQKDALLSSNVPKGDFLTRDEIRSRFKKFLNIADLPPAQQKFIISEYVTRIEVFDYDGGGHFCRITLSNNTSVDTDVLGSSAP

SEQ ID NO: 41932 - DNA, 50 bp, Ruthenibacterium lactatiformans
  source 1..50: mol_type = genomic DNA
accgatgtactcggttcatctgctccatcatatcaacaacaagttgaagt

SEQ ID NO: 41933 - DNA, 40 bp, Ruthenibacterium lactatiformans
  source 1..40: mol_type = genomic DNA
tcgattcccatcatctgctccaaaaggcagcatctgcgga

SEQ ID NO: 41934 - DNA, 50 bp, Ruthenibacterium lactatiformans
  source 1..50: mol_type = genomic DNA
accgatgtactcggttcatctgctatatcatatcaacaacaagttgaagt

SEQ ID NO: 41935 - DNA, 40 bp, Ruthenibacterium lactatiformans
  source 1..40: mol_type = genomic DNA
tagattctgatgatctcctattaacagcggcatctgcaga

SEQ ID NO: 41936 - protein, 553 aa, Roseburia hominis
MSKRARTLLRVSSRQQLHDDDIPIQRAEAEQFIAKQKDWVFDKEYLEKGISAYHNGVEDRAVLQEIMQDAKQGEFEILLTYMSDRIGRQEEYSFYVAELNRMGIEVWTIKDGQLKTEEHIDKLLNYIRFWQNEGESKKTGMRVHDTMVEMVKDGRFVGGKAPYGYKLVLSGEISNHGRALHKLVIVPEQAEIVREIFDYAVNQGMGFQKIAKTLNEKAVPAPILEQWKNGTVRSILTNPIYMGVVAYNRRKNGHANSTRLDRKEWTYAREQNPEIAIVSQELWERAQEIREARKNKINAARQATNELHMEQYNVPFSTRGRLALTGMVYCGYCGKRLKNTGYANHWTCKKTGEKKVSYVGRYGCPNGCKPRSTYSQEYLESIVFATVESYLENLKKIDISKELEDMQAQQTKDIKREIKDLEKTIKSLTADIETLEEKLPEAIRGEFAFSVDKLSVIISDKETSKKEIEANKIRLQKQLDEVSVQSNELLAYVDAMPKWSEIFKSSDVATKQMILSTLIDKIIVKDDDITIKFKIRLDNFLDEKLLENDSPDV

SEQ ID NO: 41937 - DNA, 50 bp, Roseburia hominis
  source 1..50: mol_type = genomic DNA
ttacttgaaaacgatagccccgatgtaggtaggcaaatagtttcaagtaa

SEQ ID NO: 41938 - DNA, 40 bp, Roseburia hominis; identical to SEQ ID NO: 23633
  source 1..40: mol_type = genomic DNA

SEQ ID NO: 41939 - DNA, 50 bp, Roseburia hominis
  source 1..50: mol_type = genomic DNA
ttacttgaaaacgatagccccgatgcaggtaggcaaatagtttcaagtaa

SEQ ID NO: 41940 - DNA, 40 bp, Roseburia hominis
  source 1..40: mol_type = genomic DNA
atggtggatacaaggaatggcccagaaacaaagttaacag

SEQ ID NO: 41941 - protein, 540 aa, Pseudomonas tolaasii
MSSKIAHSYIRFSSAQQSTGDSLKRQQDLLAKWMVAHPDHTLSSTRFTDLGISGFTAKHLQNGFGKLLAAIEHGDIASGDVVLIEAIDRAGRFNPNNMLHTLTGITKAGVRLITLDDGLEYNDDPNNANNLFLLVAKCQQAHQYSAALSSRVKAAYAAKREKAAKGEGATRRTPLWLDADGKLVEDLAPLIVSIFQDYADGIGERRILARVRGQHLLLDNLNPTTIKKWLRNPTAIGRWQPRPIDGVEQAPIEGVYPAVVSKELWHRVQKRLASGTKIKSASTLYLLSGLVKCGRCGKNFGVVNVKRSPAVMLCMGRHRLGEAGCSNSRSIPMHVLDFIRNQTMWGAMQRAAASQNLSSGEKRMIEIDGELSELRRRESNAAEAVVQYGMSKVFTDVLDKVLAQIGELEQEKALLNAAPAPSTLDEMMDLQHTLLDDDQQRLNALLQGVGYTIVCDGTTITVNEPHMNTEGESQVYEYKGSHRPTETYRLIENNHTEHQLDMPNSKQVAAARAELEATPITKWMQWNGVDFDEYDHDPNA

SEQ ID NO: 41942 - DNA, 50 bp, Pseudomonas tolaasii
  source 1..50: mol_type = genomic DNA
tatcccaacagtgccgactatagcggaatgaagtcggtagtgttaggatg

SEQ ID NO: 41943 - DNA, 40 bp, Pseudomonas tolaasii
  source 1..40: mol_type = genomic DNA
gatcaacacccccatcaagggcgtggtggcgttgaagatg

SEQ ID NO: 41944 - DNA, 50 bp, Pseudomonas tolaasii
  source 1..50: mol_type = genomic DNA
tatcccaacagtgccgactatagcgcaatgaagtcggtagtgttaggatg

SEQ ID NO: 41945 - DNA, 40 bp, Pseudomonas tolaasii
  source 1..40: mol_type = genomic DNA
tatgcacaccaccaccatggccgtgattgctttgacgatg

SEQ ID NO: 41946 - protein, 576 aa, Anaerostipes hadrus
MEIKFIKGNKVALGAFRKTVRKLRVAAYCRVSTDSEDQIKSYNSMIKYYTDLIEKNDEWEFVGIYADKAITGTNVKKRNDFKRLIEDCTNGEIDMIITKSIPRFARNTLDTLKYVRMLKEMNVAVYFEVEKINTLKDGEFLTTILSSVAQQEVENTSAYVKKGLKMKMKRGEMVGSHRCFGYEVDKETRQLKIVEEEATAVRYIFNRYLEGAGGRVIANELNKKGIFTINNVEWSAPTVLGIIKNEKYKGDMLQGKTFTIDPISKRRLHNNGEEDKYYVIDHHEPIVSKEIFDKAQKLRKAKSTKKLANGTDQVVINRRYAFSSMLKCGYCGKNLVRKQWHSNSKYSKAVWYCSEPCRKGVKYCPNAKAISESVLEEAFVESYNRLCDNKQDVLEDLLAKIKTILKKEKIEEAIKQTDESIQKIKVRRNKLLNEYLNGTISQDIYEENERLLKTTLLNKKNELKYLKKQLDEKDNISNRISEFRKNIMNNPILEEFDRVVFESIVEKAIVGGFDENGNKDPYKITFIYKTGIQDEIKEAKKKFVAKAYEQKEKDTEMYSFSSNDQNNMCTNDNGNI

SEQ ID NO: 41947 - DNA, 50 bp, Anaerostipes hadrus; identical to SEQ ID NO: 39847
  source 1..50: mol_type = genomic DNA

SEQ ID NO: 41948 - DNA, 40 bp, Anaerostipes hadrus
  source 1..40: mol_type = genomic DNA
gtgctgttttatttctacatcgataggaacatccatggga

SEQ ID NO: 41949 - DNA, 50 bp, Anaerostipes hadrus
  source 1..50: mol_type = genomic DNA
tgtgtacaaatgataatggcaacaagcgtcgagattacaatgggaacaaa

SEQ ID NO: 41950 - DNA, 40 bp, Anaerostipes hadrus
  source 1..40: mol_type = genomic DNA
gttctgctctgtttctataaggataaggaactccatgaga

SEQ ID NO: 41951 - protein, 510 aa, Chryseobacterium gleum
MKKADLYIRVSTDEQADKGYSQRDQEERLKRYCENNNIKVGQIIYEDYSAKTFIRPEWIKLLDTLKKKSSKTDLLLFTKWDRFSRNAGDAYQMINILRKINVEPQAIEQPLDLSIPENKMMLAIYLAAPEVENDRRALNTYYGMRRAKKEGRLMGRAPYGYANRITENGKKYVIPKEPEASNMKWAFNEMSKGVYSASQIMDMMNRKDGKSVKISAFLASLRNTAYCGKIYVEQFNEEEAHFVKSIHEPLISEELFEKVQCIMDGNVNPARPNVKVLSDDNLPLRGFLVCPECGHLITGSASTGRSGNKYYYYHCQSPCSYRYKSEIINSKFLEILQSLEMRASIKNYLKKVLRQNFEKLINNPQRERKAILLEIDRLNNRLKQARNKLMEEVIDDEDYLEIKTDCKVQIEKLEVKLTKGKDNKKIDFQKLLDQALSNLVNLAKVYTDGDIEVKRKIIGSIFPEKLQFSENHYRTTRPNVLLSYIYQINNELGAKKNRKESELSPLSGLV

SEQ ID NO: 41952 - DNA, 50 bp, Chryseobacterium gleum
  source 1..50: mol_type = genomic DNA
attatcacctctttccggtcttgtacacataaacgaagagatatcgaaac

SEQ ID NO: 41953 - DNA, 40 bp, Chryseobacterium gleum
  source 1..40: mol_type = genomic DNA
gatttcagaggttttttgtacccaggaccgggatcgaacc

SEQ ID NO: 41954 - DNA, 50 bp, Chryseobacterium gleum
  source 1..50: mol_type = genomic DNA
attatcacctctttccggtcttgttcacataaacgaagagatatcgaaac

SEQ ID NO: 41955 - DNA, 40 bp, Chryseobacterium gleum
  source 1..40: mol_type = genomic DNA
gtgttcagaggtttttttttcccaggacagggagtgggtt

SEQ ID NO: 41956 - protein, 481 aa, Bacillus wiedmannii
MKYAVYVRVSTDRDEQVSSVQNQIDICRYWLEKNDYEWDSNAVYFDDGISGTAWLERHAMQLILEKARRNELDTVVFKSIHRLARDLRDALEIKEILIGHGIRLVTIEENYDSLYEGGNDIKFEMFAMFAAQLPKTLSVSISAAMQAKARRGEAIGKPGLGYDVIDKRLVINEKEAEVVRGIFDLSKKGFGYKKIASILNDKGMYTKLGQLWSDTTIAKVLKNQKYKGDLVLNRYKTVKVDGRKKRIHTPKDRLTIIEDHYPAIVSKELWGAVNDNRLSQKKTKLDMKNEFRGMIFCNHCGGSITVKYSGRYSKKNKKEWVYLKCSNFLRYHQCVNFKPIYYDEIREVVIYRLKQKEKELEIHFNPKIHEKREAKSMEIKKYITLLKAKKEKLIDLYVDGLIDKDVFSKRDLNFENEIKEQELELLKLMDQNKRMKEDQQIKKAFSMLDEEKDMHEVFKILIKKITLSKDKYIEIEYTFSL

SEQ ID NO: 41957 - DNA, 50 bp, Bacillus wiedmannii
  source 1..50: mol_type = genomic DNA
agttggttattggttactgtaagatttattacagtaaccaataaccaact

SEQ ID NO: 41958 - DNA, 40 bp, Bacillus wiedmannii
  source 1..40: mol_type = genomic DNA
ggttgggggataggtatcgttatacacggtttgacaacat

SEQ ID NO: 41959 - DNA, 50 bp, Bacillus wiedmannii; identical to SEQ ID NO: 41957
  source 1..50: mol_type = genomic DNA

SEQ ID NO: 41960 - DNA, 40 bp, Bacillus wiedmannii
  source 1..40: mol_type = genomic DNA
gattggatcataggtgtggtttttcacggtttaacaccat

SEQ ID NO: 41961 - protein, 515 aa, Lachnospira eligens
MADNVIAIYLRLSCEDTDINSKDESNSITNQRNLIMEYIKSDAVLSTYTVREYIDDGISGTRFDREAFEEMMTQVKEGNIQVIITKDYSRLGRDYLEVGRYLEFVFPVLKVRYISVNDNYDSNNFTGATGGMEVAVKNVINMMYSRDASKKVRSARTTLAKAGKFIGPQAPYGYKRSESDKQKLVIDEEPAQVVRLIFEMAIEGKKYKQIARYLNANNIDTRVQYKERHGKKWNHPRNYEIKQWSASAVMNILFNEIYTGTIIYGKTACNAQTGYKSKKMNPDSWIIVENCHEPIVSKQTFEEAHKVINKTTCNRTKKQGSYKKAIIICGCCGKGLANSYGYYKCSCNYDPSKYNCRNVRMKTEEFEAGVMQYIKTTAAGMLEHLQAYKRQRSSCVELQKEIDKLQQMKSKAETQKFQLYDDYTKGIVQRDIMISERTRLTEHIGEIEIELHELESKIQLEQCIDKAGEEETIELLSKMETFDLDLIRQVVKRITMYDDGNIQFEWNVDDFIQVK

SEQ ID NO: 41962 - DNA, 50 bp, Lachnospira eligens
  source 1..50: mol_type = genomic DNA
tttggtctttacttgacacaagcagatgaatgcgatataatagggacaag

SEQ ID NO: 41963 - DNA, 40 bp, Lachnospira eligens
  source 1..40: mol_type = genomic DNA
ggcacaagtgatacagcacgagatagaccattgttgtggg

SEQ ID NO: 41964 - DNA, 50 bp, Lachnospira eligens
  source 1..50: mol_type = genomic DNA
tttggtctttacttgacacaagcaattgaatgcgatataatagggacaag

SEQ ID NO: 41965 - DNA, 40 bp, Lachnospira eligens
  source 1..40: mol_type = genomic DNA
gtcacaaatgatataggaaatgttaggccattgtagtaag

SEQ ID NO: 41966 - protein, 493 aa, Intestinimonas butyriciproducens
MKAVIYARYSSDSQREESIEGQLRECTAFAEKNGITVLQHYIDRAYSAKTDNRPEFQNMIKDSGKRLFDIVIVWKLDRFARNRYDSARYKATLKKNGVKVVSATEIISEGAEGIILESVLEGYAEYYSADLSEKVVRGMTDNALKCKFNGGMMPIGYVIDAEQHFQIDPLTAPFVLEAFKRYDGGETISSIMNWLNEQGLTNTRGRKMTFNSVGHILHNRRYIGEFRYRDVIVPDGIPAIVPQDLFDRVQEKLAKNKKAPARHKAEDDYLLTTKLFCGYCGAYLCGESGTSRTGKVHHYYKCVSVKKKRTECHKRPVRKEWIEDLVVGETMKMVMDDKAIEAIVSMLMDLQDRENVNVPLYEQQLREADTAISNLLNAIQQGILTRSTKERLEELENRRDELENRLACEKLAKPKVSAEFMTFWLHRFRKLDVRQQSHRKMLIDAFINAIFLYDDKMVITFNYKEGTKTITFAELQEAISNKNGSDLDCLAAP

SEQ ID NO: 41967 - DNA, 50 bp, Intestinimonas butyriciproducens; identical to SEQ ID NO: 41452
  source 1..50: mol_type = genomic DNA

SEQ ID NO: 41968 - DNA, 40 bp, Intestinimonas butyriciproducens
  source 1..40: mol_type = genomic DNA
ggttcgagtcccttcaggcgcaccataaaccaagtcaaca

SEQ ID NO: 41969 - DNA, 50 bp, Intestinimonas butyriciproducens
  source 1..50: mol_type = genomic DNA
ggttcggatttggattgccttgctgtaccaaaccaatataatccgaacca

SEQ ID NO: 41970 - DNA, 40 bp, Intestinimonas butyriciproducens
  source 1..40: mol_type = genomic DNA
agttctactccttttaggcgtaccagaaaacaaggtatca

SEQ ID NO: 41971 - protein, 485 aa, Thermosipho africanus
MKRAAAYARYSSTQQQDISIEAQFSRIEEFAKRNNYIIVARYEDRAISGFSSRRPGLQQLLADAKLGKFETVIVWEFARLARDRTISRNYKEQFRKLGIELISVTEHIPDSPEGVIIESLYEGMAEYYSRKLARDSMRGLIQTVKDGYVHGGYPPFGLKFVKDEKGKSKYAIEENEAKAVRKMFEMAAKGETLLAIARWLNDNGYKPRRSQKFNVESVRDILKNPKYIGKIIFNKRRGKGKFNPFNEIIEVEAPEIAIIDEDLFIKVQQRLSKNKHKPARRNYILRGLVQCGICGHPLSGAIRQGNNAYYYCTYCWRNNNKKVSIGADKLENIVINFVKSHFEHLDTEELTCRINKKIKQKLNPAALKTFQQNLDEVNNAIKNITKAIEMGAFSNELLIRLNELEREKMKLEKDIRSALTQIKSLRELTTEEVEHLKQSVLKELTNRSTARELLINLIEHITVNFETTEILFTTKFGDYVVKYNK

SEQ ID NO: 41972 - DNA, 50 bp, Thermosipho africanus
  source 1..50: mol_type = genomic DNA
tcgtggttttctcggggtctgcccgcccagaccatcattgtaaaccacgg

SEQ ID NO: 41973 - DNA, 40 bp, Thermosipho africanus
  source 1..40: mol_type = genomic DNA
cgtgggttcaagtcccaccgcccagaccacatctagtttc

SEQ ID NO: 41974 - DNA, 50 bp, Thermosipho africanus
  source 1..50: mol_type = genomic DNA
tcgtggttttctcggggtctgcccttccagaccatcattgtaaaccacgg

SEQ ID NO: 41975 - DNA, 40 bp, Thermosipho africanus
  source 1..40: mol_type = genomic DNA
catggctgcaagttccaggttctagcccacatctactttt

SEQ ID NO: 41976 - protein, 513 aa, Sphingobacterium siyangense
MIADLYIRVSTDEQADKGYSQRDQEERLRLHCDRLAITIDRVIFEDHSAKSFDRPEWKNYLQSFKRSRGYREERLILFTKWDRFSRNTSEAYQMIGHLKKNNILPQAIEQPLDLSIPENKVLLAIYLSTPEVENDRRALNVTNGMRRAIKEGRLMGIAPYGYVNKCTEDGRKYVAVKEPEASNIIWAFEQVAKGHLPTAKVRVEMNKREGKNISSNAFMVALRNVTYCGKIYVRAYKNEEEDIVPGKHEALISEELFLKVQYVLKKKGTKDLRLPGGRIINEERYPLRGLLLCPNCGKNLTASSSKGHTKHYYYYHCTTACGFRHHSDKVNKLFKEELSKYDFPTGVLEILKKIIVKNTKSTSENFDGERSTLKSRISELNDRISKARDMYLSDKIDEEDFRDIKNRYKGELDDLEYKLSLLVKSERKEGVEDKIGKALKIVGNISERYINASPIDKRAIVSLIYPEKIIFDGSDFQTSKINSFVDSIFLIRKELSKQKKGDLNSKNLNPRLV

SEQ ID NO: 41977 - DNA, 50 bp, Sphingobacterium siyangense
  source 1..50: mol_type = genomic DNA
gaaaaatttaaacccccgtcttgtgaacttgacagtaggctacccacact

SEQ ID NO: 41978 - DNA, 40 bp, Sphingobacterium siyangense
  source 1..40: mol_type = genomic DNA
gcgattagcttttttctgtgatcccgctgggattcgaacc

SEQ ID NO: 41979 - DNA, 50 bp, Sphingobacterium siyangense
  source 1..50: mol_type = genomic DNA
gaaaaatttaaacccccgtcttgtttacttgacagtaggctacccacact

SEQ ID NO: 41980 - DNA, 40 bp, Sphingobacterium siyangense
  source 1..40: mol_type = genomic DNA
gctttcaactttttttttttttctagctaggatttgaacc

SEQ ID NO: 41981 - protein, 499 aa, Microbacterium sp BH-3-3-3
MTPKSQTRAAIYARQSVAADELLADQIARCRDLASAKGFDVVEVYSDNNVSGYKAREAGTAFSRMLEDARAGRFDVLIVRKLDRLGRSLAALEAFAAARVAVVTIDENIDLTTVNGRLMANLLTSVARAEVEIKAERRVNANNARRARESGGIPTSGRVPYGYRWVPTKDRGDGDAYVIDGPKGEPGTPAERDNDRAADVREIYSAFLAGVALGSIARDLNARGRRTVPTKSHPEGVPFTPTTLRRMLMSPYYCARMPLEAAEKYDQRALTRGTTTPGRWEPIVSVEEWEAAKARLEHPERKTSPGPSRRWLLSGIAVCGVCRMPIRAGGGEKGVHSYRCGSMAHFMRRGDPLDRFVERVIVARLARPDAVDLLDDRERGDADALRAERERLATAIRQAGDDEMDGLIDRAERVRLTKRANARVAEIDEKLRSGADVDALAGIVGASDVRATWDTLSLGRKRAILEALATVIVHSVGQGNRRNMSDEAMAKTVDFEWHD

SEQ ID NO: 41982 - DNA, 50 bp, Microbacterium sp BH-3-3-3
  source 1..50: mol_type = genomic DNA
ctacgcctcaatgggtcaatagtggcggcaattgtcgcattagggcatgc

SEQ ID NO: 41983 - DNA, 40 bp, Microbacterium sp BH-3-3-3
  source 1..40: mol_type = genomic DNA
gtacgcggtcgccacgatggccgccgtcgccttcgcggga

SEQ ID NO: 41984 - DNA, 50 bp, Microbacterium sp BH-3-3-3
  source 1..50: mol_type = genomic DNA
ctacgcctcaatgggtcaatagtgtcggcaattgtcgcattagggcatgc

SEQ ID NO: 41985 - DNA, 40 bp, Microbacterium sp BH-3-3-3
  source 1..40: mol_type = genomic DNA
ggacgtggtccccccgaagtccaccgtcgtgttcacgggg

SEQ ID NO: 41986 - protein, 643 aa, Streptomyces calvus
MRAAILERVSTEEQTRGYGLDVQDDACRAYVERKGWRLHDVYKDEGVSGSLIKRPGFDRLMADVKAGLVDVVVVHKFDRVGRTGRAFWRWVWQLEDLETAIVSVTQDIDTTTTTGKFMLQQFAALAEMEYNLIRERTQGGLQKKAESGGWTGGAPPYGYRIEGKGKRGSFLVIDEHEAAILKAARTMAVEEGMNTREMAARLNALGMVTRSGKPWSHSNLRAKLISESTLKAIVTFRNPNRAHAGHGAALNKDGTAKHGPTVVIKLDPIFTPEEAADLSAAMGRLGNGKPKPKPQGYPLSKRLFNEHTGCNSHHVGMARTSREGRWYRCTGLAAKYPGDPICTCKMVDADAMEAAVWGEVVNLLGDPDRLKAMAAEWVGMAQGDQTNHADRIADLDRQIKEREQAITTTVTDYAKAGLPAVAVAAATRALTDELEQLQAMRDEAAAWLEETEATAQRARDLEALATVARTRLADMDPAHQAEVLALLDVRVTITGPVPKPKLGLSCSMAEWFKEHDRLVPDELTDEAWALVEPIVKAWEPEHPNRRLIPSRPMLDAMFYKARTGCRWEDLPERFGLWKSIHSRYKRWRSEGVWDAIMAALPDAGQPVWTPSLVPPFRVEGRVDPRVLTDADAGAETAPAETGV

SEQ ID NO: 41987 - DNA, 50 bp, Streptomyces calvus
  source 1..50: mol_type = genomic DNA
acggcacccgcagaaacaggcgtccccacacctctttccgggggtaccac

SEQ ID NO: 41988 - DNA, 40 bp, Streptomyces calvus
  source 1..40: mol_type = genomic DNA
acgccacacgatgggggtcccgggaccggccaccagcggc

SEQ ID NO: 41989 - DNA, 50 bp, Streptomyces calvus; identical to SEQ ID NO: 41987
  source 1..50: mol_type = genomic DNA

SEQ ID NO: 41990 - DNA, 40 bp, Streptomyces calvus
  source 1..40: mol_type = genomic DNA
acgccacaccatgctggtgcccggacccgccccctgggcc

SEQ ID NO: 41991 - protein, 470 aa, Mycolicibacterium setense
MSKANRIPAAIYVRISQDRSGAGLGVERQEQDCRKLAESLGWRVVQVFCDNDTSAYSGRRRPQYEALLAAIEAGEVKGVLAWHPDRLHRSVLELEHYVAVSRKHGFDTHTAQAGHWDLSTPSGRAIAITLSAWAQHESEHKGERIRRAREQQAKAGRFHGGIRPFGFESDGVTVRPVEAAEVVKMVESVVGGISLRSIVRDLNERGVLTATGKPWRSQYVRELICAPRIAGLSVHHGEIAGIAVWPALVPRETWEAARHILNDPRRRTNPGGGPAPKHLGSGIYICGVCGERTLRVGRASGQEPAYRCGNRDVRFTGGHVSRRAAQLDGYVEAVMVERLSRPGLIDSAKRRDDSAELAALRTEQDAIRLRLEQLAEAFADGEIDRAQLAAGTKKLTARDTAITATLAHLGGRSPLDFITDTTVDIPELWQSLTMGQRRAIVDYLADVKIVRLGRGTKGFSPDGVCITWKR

SEQ ID NO: 41992 - DNA, 50 bp, Mycolicibacterium setense
  source 1..50: mol_type = genomic DNA
aagtgtcttgggaccgcccccgccttcacggctctgcagttatgacacac

SEQ ID NO: 41993 - DNA, 40 bp, Mycolicibacterium setense
  source 1..40: mol_type = genomic DNA
cgggggcaccaacccggccttgccgccccggatgtcgttc

SEQ ID NO: 41994 - DNA, 50 bp, Mycolicibacterium setense
  source 1..50: mol_type = genomic DNA
aagtgtcttgggaccgcccccgccaccacggctctgcagttatgacacac

SEQ ID NO: 41995 - DNA, 40 bp, Mycolicibacterium setense
  source 1..40: mol_type = genomic DNA
cgggcgcccccgcccggccacgccccctcggatgccccgc

SEQ ID NO: 41996 - protein, 528 aa, Cupriavidus taiwanensis
MPRIAIYARFSTDKQDRTSVDDQINLCRRRAESFDDARVTGIFKDEAVSGSTPVEHRLGGAAMMQAARNGEFDILILEGLDRLARNLVDQEQVMKYFDWQRIRVLGVIDGSDSENKQAKMTRQMRGAFNEQYIDDVRDKTRRGLSGQVSRGYVVTGRAYGYDLQRDDHGTKYVINENEAKWVRWIFERFADGDSPRVIAAELNRLSVPSPRGGTWMQSGIYGSPAKGAGILNNSSYIGEYIWNRSSCEKNPMTQKKERRDRPESEWMRVARPEYRIVSDELWQRAHARYKKAKYLGGTKGNGPYARTLFGGLLRCPHCDGAVVAIDARSYGCLTRKERGNIVCPGILVSRKHVDENLLHALQTLLLDNGGEDEINGYINEILATHAEHKREGKDEIRQRLAKIEHDLPKLIDAITSTGNRVEYIVAKIDALSAEQKELKAALAHVESEAVKWENYAPLIRAKMAELRETLRNTSADNAMRAREKIAAMLGPITLYEGEGGVYGRCFDPLQQVALNVIGEAQIFLVAGA

SEQ ID NO: 41997 - DNA, 50 bp, Cupriavidus taiwanensis
  source 1..50: mol_type = genomic DNA
agcgcagatattcttggttgcgggggcacgttttagtcaacatctgcaca

SEQ ID NO: 41998 - DNA, 40 bp, Cupriavidus taiwanensis
  source 1..40: mol_type = genomic DNA
gccaggcgttggttgcgggggcaggacttgaacctgcgac

SEQ ID NO: 41999 - DNA, 50 bp, Cupriavidus taiwanensis; identical to SEQ ID NO: 41997
  source 1..50: mol_type = genomic DNA

SEQ ID NO: 42000 - DNA, 40 bp, Cupriavidus taiwanensis
  source 1..40: mol_type = genomic DNA
acctggccttggttgcagtggctggacctgcacctgcatc

SEQ ID NO: 42001 - protein, 568 aa, Massilia oculi
MKGYSYSRYSSDAQKKGTSIARQQTLARKWCKDNGVELSERVFADEAVSGFHGANADSGALGEFIAAVKSGEIDSKCCLIIEHLDRLTRMKPMQAVGLLSDITELGVTVVTLRPEMKFTSDWDTMQLLQAVLHLDNAHKESARKSDLGKIEWAKRFQRARESKHHIGGRVSNWLTLGKDGAYIVNEHAYAVGRIFELCLQGLGSTAISQTLNSEGYRTFNKGERWGTTAVLSILQNRAAIGELALKDGGDPIPGYFPAVVDAATFEAAHGRIAARKTGSIPKQSAAFNVWGKLVFCGACGSAMHIIQRTKFKYLMCANKRYGQCNGARNVRLDESEDVFMCMLRELDALHFAMPDPERLSRELSAAEGRLLLEREKLAILADKVAQHPESETFTNLMLQAESKVVATRGEVERLKAELTGSGDKLSLAEIRAKVDMNDKDMRRRANAFLHRLGVKVHIADGYLVTQGDEARAMFAVSKNRIGCLGLEDDPHDFADEVAADVIAENVKTLLVKPDDSSEYRSEIPNLVAANAIAASVKTLLDKPGGGFVYRGVVTTPNGRGTRRVKVDS

SEQ ID NO: 42002 - DNA, 50 bp, Massilia oculi
  source 1..50: mol_type = genomic DNA
aggggcgttttacagcggtagatgtacaggtggtgatgtaaaacgtccct

SEQ ID NO: 42003 - DNA, 40 bp, Massilia oculi
  source 1..40: mol_type = genomic DNA
gaacagcacggtttccttgtacttgtgctgcaggcccttg

SEQ ID NO: 42004 - DNA, 50 bp, Massilia oculi
  source 1..50: mol_type = genomic DNA
aggggcgttttacagcggtagatgaccaggtggtgatgtaaaacgtccct

SEQ ID NO: 42005 - DNA, 40 bp, Massilia oculi
  source 1..40: mol_type = genomic DNA
gaagggtcctgttgtctcgaccttgtgcagcaggctcttg

SEQ ID NO: 42006 - protein, 613 aa, Pseudomonas moraviensis
MTSKPKAYSYIRFSSPEQARGDSRRRQSAAAIEYAKEHGLELVKDAEYAFADLGVSAYRGDQVNRLSSNLGRFYEYVKAGKIEPGSYLLVESLDRLSREQVPEALSRFLLLLNADIIVVTFGDGTVYKKSSDSIQLIMSIIHMGRAHQESHWKGSRVSDAWQEKQALARSEGKPLGAACPQWLKYDGEKYQVIPERVEVVERVFNLTIQGYGQRAIVKLFNNEGVPVFGTKNRNKSGLWGNSSIAKILGNRSVLGEYQPNIWKDNKRAPSGNVIEGYYPAVIDQDIFYAAWNERKVRDVSKVTNQSANFNVWSKIAICSYCGSAMHLVNKGKPPKGQKYLRCSKSSKGACDNKSIRLDRSELIFKEMLAKINLIGVVKNDVVALRNNIAGLSGRISATSSKLQDLNDLIKEYPSASLAQSIKEVDSQIQTFIAERDRLTGLVAAQHVIDKAQFMADLDLKTYEGRYLANQQVRRQQIKVRMKRDEVRIQFNVQSNSIPKLTFVWDHGKDWIVVPLSGESLRASIRQNDMAKTALIERLPKLMESVRLDESMQPYLENLPFEEKRYKTDYKLSERDAQRVQAATDRWLATLNQNSPTSDIDETLLLGGEDPKLA

SEQ ID NO: 42007 - DNA, 50 bp, Pseudomonas moraviensis
  source 1..50: mol_type = genomic DNA
ttgggtgtattgagccacatgatcaacaagttgtgtgataatacaccacg

SEQ ID NO: 42008 - DNA, 40 bp, Pseudomonas moraviensis
  source 1..40: mol_type = genomic DNA
tcccggaggcccgctgaacaacaagttgtgcgcccccgct

SEQ ID NO: 42009 - DNA, 50 bp, Pseudomonas moraviensis
  source 1..50: mol_type = genomic DNA
ttgggtgtattgagccacatgatccccaagttgtgtgataatacaccacg

SEQ ID NO: 42010 - DNA, 40 bp, Pseudomonas moraviensis
  source 1..40: mol_type = genomic DNA
tcccagaggcctggcgaaccccagctcgtgagcccccacc

SEQ ID NO: 42011 - protein, 566 aa, Pseudomonas atacamensis
MKPKAYSYIRFSSPEQAKGDSQRRQREAAENYCKEHGLELANTREYRFFDSGRSAYTGEHVDDSGELARFLTHVDSGTIVAGSYLLVESLDRLSRDKVMIALSQFTDLLRKGIKIVTLSDKRVYSEDSPSIAMELIISITVMMRAHEESATKGKRVSAAWQNKRDLAREKKVPLGNACPAWLQLEDGAYKPVDERVQVVHRIFNMTIQGYGQAAISKRLNEDGIPVFGSVGAKGRNLSGAWGTSSVSKILNNRSLLGEYQPMHIIGGVRCNDGEVVTGFYPSVIEEDIFLQAKAARTQRLTSKATKQTKNFNVWQGLAKCHLCGDAMHLVNKGKPPKGYVYLKCHSTKKGICKNGIIRIEQAELVFKEVLVKVDSMSLVHGRSAEILKNLEVVEGRLTGVRKKLEQAIEAQAAFPSNAGGKLLHDLELEHEQHSIKRDELRQQLASSHVISKEDFFQKLDLVTYEGRAAANSLLKRLRIVVLFKRHSPNNFRCWVLDKSDEEITEDTDQFLFGILFKDGALTVHAFDNDIYERQIEQGEITAEGVNRDYETGIDGQWFGSPFGKRK

SEQ ID NO: 42012 - DNA, 50 bp, Pseudomonas atacamensis
  source 1..50: mol_type = genomic DNA
attggtgcaataggacacaacctgttactgttgtgaaacaatacacctaa

SEQ ID NO: 42013 - DNA, 40 bp, Pseudomonas atacamensis; identical to SEQ ID NO: 27203
  source 1..40: mol_type = genomic DNA

SEQ ID NO: 42014 - DNA, 50 bp, Pseudomonas atacamensis
  source 1..50: mol_type = genomic DNA
attggtgcaataggacacaacctgggactgttgtgaaacaatacacctaa

SEQ ID NO: 42015 - DNA, 40 bp, Pseudomonas atacamensis
  source 1..40: mol_type = genomic DNA
ggtgggggctcacgagctggggttcgccaggcctctggga

SEQ ID NO: 42016 - protein, 501 aa, Bacillus pumilus
MSLDKIQRVAIYLRKSRNKDGEESEETLANHKKRLLDIAQKNNWRYEVFAEVGNSMDKNRPMYQEMLSKLQENLFDAVLSINLARVTRDDAETPRFMSLLRQEDILFITDSERIYNLEVQEDWQALKFTGFVNNWEYENIKAQLRKGKIDSAKQGKWSNGTPNYGYNYNRLERTLEIDEEKAKAVKLAFQLVIDGVGVDEIAITLNKLGYRTNKNNTFYGAAITRMIRSSIYKGTIESNKTKGRNIYQGKLRPKEEWIIINNAHPSIVDEKTWSLANEALDERQALSPVLKKRMHGLSGLLRCAFCGRTHTIALKDAERNYRVFQPCRTKDPFGVKCVNKGIKYDTVMGILIESIEQKKNEIIKELNNLKSNTNPLLKTKEIKQKNLESQIKKCRKALDILQLQLEEELIDLISFKERRKQRLLELESFEKELKSISAKKEKDAINEKTSYAALLDYFLKNWQDLNDSDLNIAFRKIITQLTWERHINKNEPGKIEIIWKS

SEQ ID NO: 42017 - DNA, 50 bp, Bacillus pumilus
  source 1..50: mol_type = genomic DNA
tgggtagctaaaagaacatgtcactgatcacatgtatgtatagctacctt

SEQ ID NO: 42018 - DNA, 40 bp, Bacillus pumilus
  source 1..40: mol_type = genomic DNA
tggctatgccacttgtcactggtgccacgtcatggcacac

SEQ ID NO: 42019 - DNA, 50 bp, Bacillus pumilus
  source 1..50: mol_type = genomic DNA
tgggtagctaaaagaacatgtcaccaatcacatgtatgtatagctacctt

SEQ ID NO: 42020 - DNA, 40 bp, Bacillus pumilus; identical to SEQ ID NO: 12440
  source 1..40: mol_type = genomic DNA

SEQ ID NO: 42021 - protein, 573 aa, Flavonifractor sp An10
MDIHTIRMMLKTRSIYDIPLRVTYYARVSSESDEQLNSLGNQIAYYEDLIRKNLTWTFVPGYIDEGLSGISTKKRENFNRMIDDAAMDKFDLVITKEISRFARNTLDSIRFTRQLLGYGVGVFFQNDNINTFDEDSELRLSIMSSIAQDELRKLSSRVKFGHQQAIKSNVVLGNSRIFGYTKADGKLVIDETEAPMVRELFERYATGEYSMKQLETIFWDKGYRNHNGNKIAHTTMSNMIANPKYKGYYVGNKVKVVDMFTKKQKFLPPEEWVMFKDETGEIVPAIVTEEIWDQANAVLKKRSEDVKARQGISNHANLLTGKLYCTHCGAAYYRRDTVDRSGNKNSKWVCSGKIKNGSDSCPSFAVYESEIKPLLLEVLRDTEADAKAQIARYMELYTSLAGSGGITEQIQEQEQIIELTEKKKQKLLQLAATGEMSDRDFLSMNKQCTAEIDTARELLAELYAQRESADDLKKHLDTIRQVLKEAERDAVKGVVNKDFVDKFIDRIFATMVDETTMQLQIKIFTGEVTEKYLANLRVRAGNIIGASEKPSENAVAAIAVADDSRTGQTFKKM

SEQ ID NO: 42022 - DNA, 50 bp, Flavonifractor sp An10
  source 1..50: mol_type = genomic DNA
gatagtcgtacgggtcaaacgttcaagaagatgagtcccgtacgaactgc

SEQ ID NO: 42023 - DNA, 40 bp, Flavonifractor sp An10
  source 1..40: mol_type = genomic DNA
tgtgggcggccagatggtcaagaagatgattcaggcttac

SEQ ID NO: 42024 - DNA, 50 bp, Flavonifractor sp An10
  source 1..50: mol_type = genomic DNA
gatagtcgtacgggtcaaacgttcatgaagatgagtcccgtacgaactgc

SEQ ID NO: 42025 - DNA, 40 bp, Flavonifractor sp An10
  source 1..40: mol_type = genomic DNA
tggggaaggggataaggtcatgcagatgcttcagacttac

SEQ ID NO: 42026 - protein, 515 aa, Brevibacterium oceani
MQMYTGVMGQIGVIYGRASKDARHTGTSVDKQIERGERWARGEGIDLLKPIRDDNMGATRGSRERPGFKKVRELIERQAIDVLILWEVSRSTRDASESAALLDAAEDNNVVIASDGKCYDPADEADRLQLQIMFLMAESEGRRTKKRNVDSVTTNAQRGTPHGRLPYGYRRVYDSTSGALLKQTPYDDHGQLLFEAKVLADAAHEVLRGVPIRRVCKQLNDQGVPSPRKPRAKTQKERPEDIVTLWERATLRQLLLNPTIAGRRVHQGKDIGPAQWEPIVEYGTWLKLRALLTDPSRLTVSIPRGPSPRHLLTGIAQCGECGARLKAAVNAKRMKKAYVCRHEGCMKVTVTGEKVDALIESAVLALFASAGFRASLTSAYRERVESEAKAPDIASQIAELEAERDELEAMRAEDPPTITKRAYIAEDLRIETAIDKLRESEVATITSPALRRMLSESDLESSWKSADLMDRREIIRILFDITINRAERNTGQRFDPNRVVVGPSAFLRDDVLHGS

SEQ ID NO: 42027 - DNA, 50 bp, Brevibacterium oceani
  source 1..50: mol_type = genomic DNA
caccttccctttgaactgttcgccccggcgagcagttaattaggtatatg

SEQ ID NO: 42028 - DNA, 40 bp, Brevibacterium oceani
  source 1..40: mol_type = genomic DNA
ggccgacgagatgttcgccccggcgagcaggggcagcgtg

SEQ ID NO: 42029 - DNA, 50 bp, Brevibacterium oceani
  source 1..50: mol_type = genomic DNA
caccttccctttgaactgttcgccatggcgagcagttaattaggtatatg

SEQ ID NO: 42030 - DNA, 40 bp, Brevibacterium oceani
  source 1..40: mol_type = genomic DNA
agccgtccttctgtccaccatggcgagcagggccagcgtc

SEQ ID NO: 42031 - protein, 523 aa, Sinorhizobium fredii
MKRAVIYARYSTDLQNDQSVEDQIRLCKAHAERLGLIVVGEFSDRAKSGASMFGRPGLAKLMQKADSDTFDVLVAEHPDRISRDIADLAHIHKTLRFRRIEMNCVNGGAMDTVQIGMYGVVGQMQREEGAKKVKRGMVGVVRSGRNAGGKAYGYRPVPGRKGELEIVEEEAAIVRRIFSLYASGIAPRAIAATLNDENVPAPRGKRWNASTLNGNGQRGNGLLLNPMYAGKLIWNRVHMVKDPSTGRRISRINPGTEHEEIEAPHLRIIDDAVFEAVQQRKSSRGGPHSRSTPKYKRLLSGLLRCGACGGGMAINGSDRSGPRIICSTHKESGSCTNGGRYYVEKIEQQVIDTLRAQFADTRIIDIYVKEYEAERRREAAEKRRNRSTLERQLEETKTAITRIVERLAKGLIEDDDAAAILPGLRADRDRFQRELEEVEPVSNVIEIQPRAVRAFKANIERLAETISKRGETPPVELAQAFREMIAGVIVEPRKAGEPYRIEIKGYLSGLVSPELSSVLMVAE

SEQ ID NO: 42032 - DNA, 50 bp, Sinorhizobium fredii
  source 1..50: mol_type = genomic DNA
gtcgtctgttctaatggtagcggaggtccgttctggtcagaacagacgac

SEQ ID NO: 42033 - DNA, 40 bp, Sinorhizobium fredii
  source 1..40: mol_type = genomic DNA
aaggtgtgttggtagcggaggagggattcgaacccccgac

SEQ ID NO: 42034 - DNA, 50 bp, Sinorhizobium fredii
  source 1..50: mol_type = genomic DNA
gtcgtctgttctaatggtagcggaactccgttctggtcagaacagacgac

SEQ ID NO: 42035 - DNA, 40 bp, Sinorhizobium fredii
  source 1..40: mol_type = genomic DNA
agagtttgtaggtaggggaactggtattggaacccctgtc

SEQ ID NO: 42036 - protein, 523 aa, Ensifer aridi
MRRAVIYARYSTDLQNDQSVEDQIRLCKAHAERLGLNVVQEYFDRAKSGASMFGRPGLSSLMQAAEMGAFEVLVSEAPDRISRDIADLAHIHKSLTFRGVEMNCVNGGRMDTVQIGMYGVIGQMQREEGAKKVKRGMVGVMRSGRNAGGKAYGYRPVLGKRGELEIVEDEAATVRRIFELYATGIAPRAIAATLNADGIPAPRGLRWNGSTINGNGQRGNGILRNPIYAGRLIWNRVHMVKDPSTGRRISRINPESEYEEIDAPHLRIVDQSLFDAVQARKEATGGPRPRDVPKSKRLLSGLLRCGCCGGGMALMGVDRSGPRIQCSTYRESRSCTNGARYYIERIERQVLDSLRMQFADTAIIDEYVKAYREERRRIEAEARRNRNTSEKALADAKAGITRIVDRIAKGLIEDEEAAALLLPLRQERERLERELAASESPSNVIELHPQAVKRFKENVEQLADIVATKTGTLDVGAASAFRQLVAAVIVHPREKGEPYTIQIKGYLSSLIDSTLSAKSLVAE

SEQ ID NO: 42037 - DNA, 50 bp, Ensifer aridi
  source 1..50: mol_type = genomic DNA
gtcggctaaatcgttggtagcggaggtccgttctggtcataatagccgaa

SEQ ID NO: 42038 - DNA, 40 bp, Ensifer aridi; identical to SEQ ID NO: 42033
  source 1..40: mol_type = genomic DNA

SEQ ID NO: 42039 - DNA, 50 bp, Ensifer aridi
  source 1..50: mol_type = genomic DNA
gtcggctaaatcgttggtagcggaactccgttctggtcataatagccgaa

SEQ ID NO: 42040 - DNA, 40 bp, Ensifer aridi; identical to SEQ ID NO: 42035
  source 1..40: mol_type = genomic DNA

SEQ ID NO: 42041 - protein, 523 aa, Ensifer aridi
MNRAVIYARYSTDLQNDQSVEDQIKLCRAHAERLGLLVVGEFYDRAKSGASMFGRPGLANLMQAVERDEFEVLLSEAPDRISRDIADLAHIHKMLKFRGIEMNCVNGGAMDTVQIGMYGVIGQMQREEGAKKVKRGMAGVVRSGRNAGGKAYGYRPVIGKKGELEIVDEEAVVVRRIFNLYAGGVAPRSIAAILNGENVPAPRGDRWNASTINGNGQRGNGILRNPIYAGRIVWNRVRMIKDPSTGRRISRVNPESEHEEIAAPHLQIVNEDLFQAVQQRKEATGGADRAKAPRSKRILSGLLRCGACGGGMALVGPDRSGNRIQCSTFRESGSCGNGRRYYVERIETEVVDSLRRQFADTSIIEAYVEAYQAEQKRLRGDAQRARANAQRAMQDAKDGITKIVEKISKGLIEDEEAAALLAPLRAERDRQKAILETTEEPPNVIEIQPKAVKRFRENIESLAQIVREQDGEPSPEIAAPFRQLVAAVVVNPTEKGQPYEINIKGYLSSLIDSELSVIKLVAE

SEQ ID NO: 42042 - DNA, 50 bp, Ensifer aridi
  source 1..50: mol_type = genomic DNA
gtcggtgataaagctggtagcggaggtccgttctggtcagaacagacgac

SEQ ID NO: 42043 - DNA, 40 bp, Ensifer aridi; identical to SEQ ID NO: 42033
  source 1..40: mol_type = genomic DNA

SEQ ID NO: 42044 - DNA, 50 bp, Ensifer aridi
  source 1..50: mol_type = genomic DNA
gtcggtgataaagctggtagcggaactccgttctggtcagaacagacgac

SEQ ID NO: 42045 - DNA, 40 bp, Ensifer aridi; identical to SEQ ID NO: 42035
  source 1..40: mol_type = genomic DNA

SEQ ID NO: 42046 - protein, 457 aa, Mycobacterium marseillense
MRAAVYLRQSVDKLADERAIDRQRKDCLTLCGKRGWTAVEYVDNDTSASSRKPRPAYQQMLADIESGAVGAVVVWHLDRLHRKPAELEHFVDLADRHHLALATVTGDVDLSTAQGRLHARIMGAVARNEVEQKSARQIAAMRQLAESGKPNKTARPFGYTKDRQQLVEAEAAAVREGYAMVLAGVALYSIARQWNDANLKTTYGKSWSGRTVREALLNPRYAALRAYKNEVLEGVKATWPAVVSEDIWRSAVAILTDPNRPGGARPRRHLLSGLAVCGKCGGLLSSGVKGRGDGGVYVCKHCFGVYRKADLIDPLVADLVVGFLASPDAAELLIDRKRADLNELRQQERALLQQLDQLAVDYDEGNLTGRQVKIATERKQQRLEAVRAEMRDANKSRVFDGLIGVANVRKVWDNLSLDRQRAVVSTLMEITIKPIGSGRYHFDPDKHVGIRWLTGDE

SEQ ID NO: 42047 - DNA, 50 bp, Mycobacterium marseillense
  source 1..50: mol_type = genomic DNA
aaccatcccaacccgatggacgcgagacatcacatccgtctaggatggtt

SEQ ID NO: 42048 - DNA, 40 bp, Mycobacterium marseillense
  source 1..40: mol_type = genomic DNA
tgtggtcctgacggaggagagccgtcgggaccacacagtc

SEQ ID NO: 42049 - DNA, 50 bp, Mycobacterium marseillense
  source 1..50: mol_type = genomic DNA
aaccatcccaacccgatggacgcgacacatcacatccgtctaggatggtt

SEQ ID NO: 42050 - DNA, 40 bp, Mycobacterium marseillense
  source 1..40: mol_type = genomic DNA
tgtggtcctgaggtaggagacgggactggactccagagac

SEQ ID NO: 42051 - protein, 404 aa, Mycobacterium tuberculosis; identical to SEQ ID NO: 12861

SEQ ID NO: 42052 - DNA, 50 bp, Mycobacterium tuberculosis; identical to SEQ ID NO: 12862
  source 1..50: mol_type = genomic DNA; mol_type = genomic DNA

SEQ ID NO: 42053 - DNA, 40 bp, Mycobacterium tuberculosis
  source 1..40: mol_type = genomic DNA; mol_type = genomic DNA
agcccacctcgaccatggacaaccccgcaccaacagttac

SEQ ID NO: 42054 - DNA, 50 bp, Mycobacterium tuberculosis
  source 1..50: mol_type = genomic DNA; mol_type = genomic DNA
gaatgttcttcagcagtccacggctaaccgtggacctgtgagatacacta

SEQ ID NO: 42055 - DNA, 40 bp, Mycobacterium tuberculosis
  source 1..40: mol_type = genomic DNA; mol_type = genomic DNA
agcccatctaaaccctggctaaccccactcccacggttcc

SEQ ID NO: 42056 - protein, 509 aa, Coprococcus comes
MYVIYLRKSRKDSDLEALGIDVLKRHEETLLELARARSLPIGAIYREVVSGDSIDARPEMVRLLSEVESGIWEGVLVMEVERLARGDTIDQGRVQRAFFYSNTLIVTPGKTYNPAIENDNEYFEFSLFMSRREYATIKRRMQAGRIRSVKDGYYVGNIAPYGWRRVKADDCKHFTLVPDEKENPVLKLMYDFMGNKKYGFQKTCSALTGMGIVSRSGKPFNPATVKTIISNPVNIGMLRWNYRKSQKAIVNGKIATSRPKADDYILAKGKHPGCISEDLYYRANSVNSSMTAPVKRSCRIQNPFAGIVRCSCCGRVMVRKKMSAKQPRDYLICQYAGCATVAIELDELENAVLEWIRNYIADYKVNNFESADDSEQESLRSILVNLEKEKETTLKQRGSLFDLLEQGIYTKEIFFERSTALEDKIKDFDKKIESVNADIVRLDLSKKNRSTFVPKCQELLNAWDTFDAADKNTALKNVIERIDFTKTEKNARGQRHSSFSIDVFPRISR

SEQ ID NO: 42057 - DNA, 50 bp, Coprococcus comes
  source 1..50: mol_type = genomic DNA; mol_type = genomic DNA
tacttccatcttgtatgtgctgattcgtttgcacatacaagatggaagta

SEQ ID NO: 42058 - DNA, 40 bp, Coprococcus comes
  source 1..40: mol_type = genomic DNA; mol_type = genomic DNA
catttccatgtgggcaagttcctctgtgccaatatcggtt

SEQ ID NO: 42059 - DNA, 50 bp, Coprococcus comes
  source 1..50: mol_type = genomic DNA; mol_type = genomic DNA
tacttccatcttgtatgtgctgatgtgtttgcacatacaagatggaagta

SEQ ID NO: 42060 - DNA, 40 bp, Coprococcus comes
  source 1..40: mol_type = genomic DNA; mol_type = genomic DNA
cgtgtccatgtgtgcatgtgtctctgtgcctgtgcctgtg

SEQ ID NO: 42061 - protein, 514 aa, Micrococcus luteus
MFTARLSSMPHRAVIYARISVTSEESVSIERQLEAARQYAAARGWEVAAVFTDEGISATHNSPEARSGWSALLRYDQPYDFVVVWKIDRVARRITDFWDAVKTLQGRDRALVSIGDNLDMSSTVGQIVAGVLAGFAQMEAEAISSRVAAARRHLLQNGRLPGGAVPYGWRSVPNPDGAGKVLAQDPERIEYVRGAADRVRGGATLYSVVQWLDEVEAPLPRASQSRRREGSGWSYTTVERLLRNPVLAGMVPYNPGNSSKMRGSDVLRDENGLPVVDPAVAVMTPTEWRAMVAALDANDTGRAKPHALRAKTSALLSGLVWCGHCEDSDGHPVRMHRGTTQGRESYSCPRCHQTISRIQDYVVEQFLWAKGEHVRWTPVREVYESGAAVLPEIEARLDELDAAIRDAPDRAARRRLQEQQDALLDLRDEKRAEAPRTVLKYEDAGFFAQAWAEAEGVEAQRAVLDDALERITVRRGRTGRGLDKSRLTFSWRHPDQVGPLPEPSQEELARWAEG

SEQ ID NO: 42062 - DNA, 50 bp, Micrococcus luteus
  source 1..50: mol_type = genomic DNA; mol_type = genomic DNA
cacgcttgttcttcctcgggctgggtggcaccaggctgggaacaagtatg

SEQ ID NO: 42063 - DNA, 40 bp, Micrococcus luteus; identical to SEQ ID NO: 28358
  source 1..40: mol_type = genomic DNA; mol_type = genomic DNA

SEQ ID NO: 42064 - DNA, 50 bp, Micrococcus luteus
  source 1..50: mol_type = genomic DNA; mol_type = genomic DNA
cacgcttgttcttcctcgggctggggggcaccaggctgggaacaagtatg

SEQ ID NO: 42065 - DNA, 40 bp, Micrococcus luteus
  source 1..40: mol_type = genomic DNA; mol_type = genomic DNA
ggtggtcctgcctgcctgtggtgccccgtccaccaggttc

SEQ ID NO: 42066 - protein, 539 aa, Pseudomonas putida
MTKKCYPYVRFSSTRQEDGSTRNRQNELIDAFVSKHGLEVDRHLEDAGTSAYHGKNAGSEGVLGKFLKEVRMGEIDKGSYLLIENFDRLSRDKIVRTNKIFTDLIFSGIKIVILDKNKIYEEENLDFADWVNALLEFERANAESKRKSDFSSKAWRINRGRMREGEIVTKKVPTWLKVENNAFVIDHEKVERINTLFKLSLSKGLQEATREYNDLYSEKLAIHQTQYLLSNRKLIGEHSPQKIHYDESGQLKRKDEGDSIPNYYPAVVDEQLFYQVQELIKSRRPFAGRYSNQRYNVFRDLIYCKWCGGTIRYMNKGERDYFICTNSMTGKCDLNSHFGQQSIRGKKLFGMFFAFTDGLNVSALLEENTNAKEIKTEVLKLEAKRNQIANRLQDFKVEVKTMILDGKTIPSTYNEVIAELESNRNHIDSEIDTRTKELDQIYISEKSFMGLKDIDVSGIIYDRTNEAVEKRVQYNNELKKIIKHIRIDFLNTAIEIEFANKLCRLVNSDGDVIDYVIDHVPEDFTTIYNYDKDYINPDA

SEQ ID NO: 42067 - DNA, 50 bp, Pseudomonas putida
  source 1..50: mol_type = genomic DNA; mol_type = genomic DNA
gtggaacctattactgaacacgtccagacatgctacgctatacgttccat

SEQ ID NO: 42068 - DNA, 40 bp, Pseudomonas putida
  source 1..40: mol_type = genomic DNA; mol_type = genomic DNA
gcgggcatagcagtagatacagccatgttcgcagccacgg

SEQ ID NO: 42069 - DNA, 50 bp, Pseudomonas putida; identical to SEQ ID NO: 42067
  source 1..50: mol_type = genomic DNA; mol_type = genomic DNA

SEQ ID NO: 42070 - DNA, 40 bp, Pseudomonas putida
  source 1..40: mol_type = genomic DNA; mol_type = genomic DNA
gggggcatagaagcagatgcagcgcagtccccagcctcgg

SEQ ID NO: 42071 - protein, 558 aa, Pseudomonas furukawaii; identical to SEQ ID NO: 38406

SEQ ID NO: 42072 - DNA, 50 bp, Pseudomonas furukawaii; identical to SEQ ID NO: 38407
  source 1..50: mol_type = genomic DNA; mol_type = genomic DNA

SEQ ID NO: 42073 - DNA, 40 bp, Pseudomonas furukawaii
  source 1..40: mol_type = genomic DNA; mol_type = genomic DNA
tccgtcgatggagccatggaacagcacctcgaaggccagc

SEQ ID NO: 42074 - DNA, 50 bp, Pseudomonas furukawaii; identical to SEQ ID NO: 38409
  source 1..50: mol_type = genomic DNA; mol_type = genomic DNA

SEQ ID NO: 42075 - DNA, 40 bp, Pseudomonas furukawaii
  source 1..40: mol_type = genomic DNA; mol_type = genomic DNA
ttcctccatgcagccagggttcagaacctctgagccgagc

SEQ ID NO: 42076 - protein, 458 aa, Staphylococcus aureus; identical to SEQ ID NO: 11826

SEQ ID NO: 42077 - DNA, 50 bp, Staphylococcus aureus; identical to SEQ ID NO: 18812
  source 1..50: mol_type = genomic DNA; mol_type = genomic DNA

SEQ ID NO: 42078 - DNA, 40 bp, Staphylococcus aureus
  source 1..40: mol_type = genomic DNA; mol_type = genomic DNA
atgtatggaggcacttgtatcaacataggatgtatacctt

SEQ ID NO: 42079 - DNA, 50 bp, Staphylococcus aureus
  source 1..50: mol_type = genomic DNA; mol_type = genomic DNA
ttgtgcggaactacgaacagtttatgaatacgaagtgtacaaacttccat

SEQ ID NO: 42080 - DNA, 40 bp, Staphylococcus aureus
  source 1..40: mol_type = genomic DNA
atgttaggagggacttctatgaacatggaaaatatacgat

SEQ ID NO: 42081 - protein, 548 aa, Brevibacillus laterosporus
MVIIVIKFIGDYTITIDEIHEMLGNIKALIYTRVSTVDQVDKFSLSSQVDQCVSFAFEQFGYLENELVILVEEGESGDDPNRPALNNGLLLLEKGVGKKLIVLHPDRLSRSLSLQTRVSEKIWGLGCDIEFVQFELDPNNPESVLMYNIQGSIAQYNKAKILANSKRGRLKKIQSNQMMGIRRIYGYSYDKTHDILAINEEEEKAINKMVDYLLNQELSISEIAKKLSEEYVKAPLGNVWYQSTISKILKNETYTGNFYYGKTESKQVNGKKTKVDKPREEWMKIEIPAIIDQSTFDRIQEKIRKLTKTKTGRPSKENGLIRGVARCGRCGSAVSINNISKLKDKTLRYYGCNRKAKKGYKVGSGEVSHKLCKGKTWRADIVDRFVWQWLCDKLQFPEKIFAEIVESQSDNKKIQELELKKERFELLLNEKNLMYDKFLDLYASGIIKTKEALEQKINPIQNQIDEVNNDLLNVREKLNAIQAGYDELETIKQQIKKWSFLINNQVLEFSDQKRFTQMVIRKVVLHDDNTIEIHTPWASFNGEYGLGK

SEQ ID NO: 42082 - DNA, 50 bp, Brevibacillus laterosporus
  source 1..50: mol_type = genomic DNA; mol_type = genomic DNA
cacatataaaatcattccttcatcaaggcgatggaatagatttatatgtg

SEQ ID NO: 42083 - DNA, 40 bp, Brevibacillus laterosporus
  source 1..40: mol_type = genomic DNA; mol_type = genomic DNA
agcagttgattgtctaacaaaggcgatggaagatcataaa

SEQ ID NO: 42084 - DNA, 50 bp, Brevibacillus laterosporus
  source 1..50: mol_type = genomic DNA; mol_type = genomic DNA
cacatataaaatcattccttcatcggggcgatggaatagatttatatgtg

SEQ ID NO: 42085 - DNA, 40 bp, Brevibacillus laterosporus
  source 1..40: mol_type = genomic DNA; mol_type = genomic DNA
agcatttgattttctgagaggtgctacagaacataataaa

SEQ ID NO: 42086 - protein, 552 aa, Lachnoclostridium sp An196
MNRQPNIAALDNKITALYCRLSRDDELQGDSNSIKNQKSILQKYADDQGFRNTQFFVDDGVSGTTFEREGFQRMMAEMDAGRIGTIIVKDMSRLGRDYLKVGYYTEIAFPQADVRFIAINNGVDSINQQESDFTPFLNIINEFYAKDTSKKIRAVFKAKGQAGKPLCTNPPYGYRKDMEDKTHWIVDKDAADVVREIFRLCMNGYGPTQIAKELRKRKIETPAEYGKRMGVNVPAAAYRENDDPYRWTTSTVVHILERQEYLGRTVNFKTYRKSYKLKKQMKNDPSEWQVFENTHEAIIDKETFDIVQRIRDGRRRVTPMGEMPILSGMVYCADCGQKLYQVRSRDWEHDKEHFVCATYRKKGKHECPSHQIRNVVIEQLLLADLQQVTAFAREHEIEFVEVVTKSKSREIDRSLRECRKEYEQARARISKLDTIVQRLYEDNIEGKISDERFAKMTATYDAEQKQLESRVVELQAFLDEAKEKSLNTEYFLSLVRKYTDIKELDAEIIREFVERIIVFQAEKVDGHRQQRIQIVYNYIGALDIPSKTEKTA

SEQ ID NO: 42087 - DNA, 50 bp, Lachnoclostridium sp An196
  source 1..50: mol_type = genomic DNA; mol_type = genomic DNA
tgaaatccctaagtcgcacccacttttggcggtgcaacaaagggattttc

SEQ ID NO: 42088 - DNA, 40 bp, Lachnoclostridium sp An196
  source 1..40: mol_type = genomic DNA; mol_type = genomic DNA
gtataaaaaaagaaccgctttgcgggttctttttttatgc

SEQ ID NO: 42089 - DNA, 50 bp, Lachnoclostridium sp An196
  source 1..50: mol_type = genomic DNA; mol_type = genomic DNA
tgaaatccctaagtcgcacccactgatggcggtgcaacaaagggattttc

SEQ ID NO: 42090 - DNA, 40 bp, Lachnoclostridium sp An196
  source 1..40: mol_type = genomic DNA; mol_type = genomic DNA
aaaaaaaaaaaaaaacgcagagagttttctttttttctgc

SEQ ID NO: 42091 - protein, 536 aa, Streptococcus suis
MQVEGFSLDAQETRIHQYANAFDIEIVKTYQDAGKSGKTMLGRTEFMAMISDIEAEKDKVDYVLVFKLSRFGRNAADTLKSLAIMESHGVNLICVDDGLDSSKDSGKLVITILSAVAEMERENIISQAMEGRRQKARAGQWNGGFAPVGYSLVNGQLQVNQEEAESVKMIFDLFANSDMGTIAIAKHLANLDIKKPIRHNSTLPYFSSSGIARILDNPVYNGKIAFGRRESTRDKVSGETKVKQSENYILTDGIHEAIIDDETWKKVRKKREANAHKYKRENPSKNDSIYVLSGLIKCPLCHAGLYGNKSIKRNKNKKDEYYKNYYYYACKHRKHVDGHKCIFNKQLKTGNLDHEVLSIISKLVSRPDFARKLQEKINIQVDTSRIDSEIEQYKSLFRQLNATKLNLIQQIDSLNFEDPHFQQKSIDLDMRLNTIYDKLADVEMLIETSESKREVILKDKMTADNIYKILVNFASFMDVMEDIDKKRLCQMLIEKVEIYDDKNKAGRWVKAIHFKLPIIEEDLEISLDNSTPVEAV

SEQ ID NO: 42092 - DNA, 50 bp, Streptococcus suis
  source 1..50: mol_type = genomic DNA; mol_type = genomic DNA
agtttggacaatagtacaccggttgaggcggttgtgaaattgtccaaacg

SEQ ID NO: 42093 - DNA, 40 bp, Streptococcus suis
  source 1..40: mol_type = genomic DNA; mol_type = genomic DNA
tccccacacagcacggacagaggctgttgttaaactaaac

SEQ ID NO: 42094 - DNA, 50 bp, Streptococcus suis
  source 1..50: mol_type = genomic DNA; mol_type = genomic DNA
agtttggacaatagtacaccggttgcggcggttgtgaaattgtccaaacg

SEQ ID NO: 42095 - DNA, 40 bp, Streptococcus suis
  source 1..40: mol_type = genomic DNA; mol_type = genomic DNA
tccccaaacagaaaagtcagctgttgttatttaacaaaac

SEQ ID NO: 42096 - protein, 538 aa, Streptococcus suis
MQVEGFSLDAQETRIHQYANAFDIEIVKTYQDAGKSGKTMLGRTEFMAMISDIEAEKDKVDYVLVFKLSRFGRNAADTLKSLAIMESHGVNLICVDDGLDSSKDSGKLVITILSAVAEMERENIISQAMEGRRQKARAGQWNGGFAPVGYSLVNGQLQVNQEEAESVKMIFDLFANSDMGTIAIAKHLANLDIKKPIRHNSTLPYFSSSGIARILDNPVYNGKIAFGRRESTRDKISGETKVIQSENYILTDGIHEAIIDDEIWNKVRKKREANAHKYKRENPSKGDSIYILSGLIKCPLCHAGLYGNKSIKRNKNKKDEYYKNYYYYACKHRKHVDGHKCTFNKQLKTGNLDHEVLSIISKLVSRPDFARKLQEKINIQVDTSRIDSEIEQYKSLFRQLNATKLNLIQQIDSLNFEDPHFQQKSIDLDMRLNTIYDKIADVEILIETSESKREVILKDKMTADNIYKILVNFASFMDVMEDIDKKRLCQMLIEKVEIYDDKNKAGRWVKAIHFKLPIIEEDLEISLDNSTPVEAVVK

SEQ ID NO: 42097 - DNA, 50 bp, Streptococcus suis
  source 1..50: mol_type = genomic DNA; mol_type = genomic DNA
agtttggacaatagtacaccggttgaggcggttgttaaattgtccaaacg

SEQ ID NO: 42098 - DNA, 40 bp, Streptococcus suis; identical to SEQ ID NO: 42093
  source 1..40: mol_type = genomic DNA; mol_type = genomic DNA

SEQ ID NO: 42099 - DNA, 50 bp, Streptococcus suis
  source 1..50: mol_type = genomic DNA; mol_type = genomic DNA
agtttggacaatagtacaccggttgcggcggttgttaaattgtccaaacg

SEQ ID NO: 42100 - DNA, 40 bp, Streptococcus suis; identical to SEQ ID NO: 42095
  source 1..40: mol_type = genomic DNA; mol_type = genomic DNA

SEQ ID NO: 42101 - protein, 581 aa, Erysipelothrix rhusiopathiae
MCAKKEVVRYMAKVEIIKANKELSNRNKKGPIEILRVGAYCRVSTDSEDQISSYKSQVAYYDDLIDNNPNWIKVDIYADEAITGTQVTKRTDFQRLINDCMNHEIDMVITKSISRFARNTLDTLKYVRMLKENNVAVYFEDEKINTLTMDGELLLVVLSSVAQQEVENISANVKKGLKMRMSRGELIGFNGCLGYDYHAEDKSLSVNEEEAETVRYIFNRYIEGAGCFVIARELENLGYKTAGGKTKWFDSSVRGIIKNEKYVGDIRAGKTFTVDPISKRRLKNLGEEDQFYIRDHHEPIISREVFDKAHEILNIRAESYKRYERGKSSRNKFTRQYAFSCIMECGYCGARLTRRHWMGKNGYSKIIWQCVTYARKGHKNCPYCKGVAESLIEEAFVKSYQYLFETNRYLIDDFMLKLEQNLSRKNYEKERDELSRKLSDLSKKRNALIDMKLDSVIDDQAYESKYYDLTDKINLATTKLESIEKSIVDDLDEKERLQEIRKVLSNNQTIETFDRKVFESIVSKVIVGGFDAEGNACPYNVTFILKSGLSDYPYTIGMKPETSEVIPSNNHSPHKETPTCG

SEQ ID NO: 42102 - DNA, 50 bp, Erysipelothrix rhusiopathiae
  source 1..50: mol_type = genomic DNA; mol_type = genomic DNA
ctcgccacataaagaaacccccacacgtggagactgttgtaagactaaca

SEQ ID NO: 42103 - DNA, 40 bp, Erysipelothrix rhusiopathiae; identical to SEQ ID NO: 23703
  source 1..40: mol_type = genomic DNA

SEQ ID NO: 42104 - DNA, 50 bp, Erysipelothrix rhusiopathiae
  source 1..50: mol_type = genomic DNA
ctcgccacataaagaaacccccacaagtggagactgttgtaagactaaca

SEQ ID NO: 42105 - DNA, 40 bp, Erysipelothrix rhusiopathiae
  source 1..40: mol_type = genomic DNA
atgttcccacaaaagacacaagttcattcttttttatggc

SEQ ID NO: 42106 - protein, 500 aa, Bacillus subtilis; identical to SEQ ID NO: 18376

SEQ ID NO: 42107 - DNA, 50 bp, Bacillus subtilis
  source 1..50: mol_type = genomic DNA
caccccccttttgtaattacaatctcattatcaattacattagggggggg

SEQ ID NO: 42108 - DNA, 40 bp, Bacillus subtilis; identical to SEQ ID NO: 20773
  source 1..40: mol_type = genomic DNA

SEQ ID NO: 42109 - DNA, 50 bp, Bacillus subtilis
  source 1..50: mol_type = genomic DNA
caccccccttttgtaattacaatcctattatcaattacattagggggggg

SEQ ID NO: 42110 - DNA, 40 bp, Bacillus subtilis
  source 1..40: mol_type = genomic DNA
gcccaagtgaatgagtattctatattgaatacaactaata

SEQ ID NO: 42111 - protein, 500 aa, Bacillus subtilis
MIAIYVRVSTEEQAIKGSSIDSQIEACIKKAGTKDVLKYADEGFSGELLERPALNRLREDASKGLISQVICYDPDRLSRKLMNQLIIDDELRKRNIPLIFVNGEYANSPEGQLFFAMRGAISEFEKAKIKERTSSGRLQKMKKGMIIKDSKLYGYKFVKEKRTLEIYEEEAKIIRMIFNYFTDHKSPFFGRVNGIALHLTQMGVKTKKGAKVWHRQVVRQILMNSSYKGEHRQYKYDTEGSYVSKQAGNKSIIKIRPEEEQITVAIPVIVPAEQWDYAQELLGQSKRKHLSISPHNYLLSGLVRCGKCGNTMTGKKRKSHGKDYYVYTCRKNYSGAKDRGCGKEMSENKLNRHVWGEIFKFITNPQKYASFKEVEQSNHLSDELELIQKEIEKTKKGRKRLLTLISLSDDDDLDIDEIKAQIIELQKKQNQLTEKCNEIQSKMKVLDDTSSSENALKRAIDYFQSIGADNLTLEDKKTIVNFIVKEVTVVDSDIVYIETY

SEQ ID NO: 42112 - DNA, 50 bp, Bacillus subtilis; identical to SEQ ID NO: 39542
  source 1..50: mol_type = genomic DNA

SEQ ID NO: 42113 - DNA, 40 bp, Bacillus subtilis; identical to SEQ ID NO: 20773
  source 1..40: mol_type = genomic DNA

SEQ ID NO: 42114 - DNA, 50 bp, Bacillus subtilis
  source 1..50: mol_type = genomic DNA
caccccccttttgtaattacaatcctattattaattacaaaaggggggcg

SEQ ID NO: 42115 - DNA, 40 bp, Bacillus subtilis; identical to SEQ ID NO: 42110
  source 1..40: mol_type = genomic DNA

SEQ ID NO: 42116 - protein, 500 aa, Bacillus subtilis; identical to SEQ ID NO: 18376

SEQ ID NO: 42117 - DNA, 50 bp, Bacillus subtilis; identical to SEQ ID NO: 39542
  source 1..50: mol_type = genomic DNA

SEQ ID NO: 42118 - DNA, 40 bp, Bacillus subtilis; identical to SEQ ID NO: 20773
  source 1..40: mol_type = genomic DNA

SEQ ID NO: 42119 - DNA, 50 bp, Bacillus subtilis; identical to SEQ ID NO: 42114
  source 1..50: mol_type = genomic DNA

SEQ ID NO: 42120 - DNA, 40 bp, Bacillus subtilis; identical to SEQ ID NO: 42110
  source 1..40: mol_type = genomic DNA

SEQ ID NO: 42121 - protein, 500 aa, Bacillus subtilis
MIAIYVRVSTEEQAIKGSSIDSQIEACIKKAGTKDVLKYADEGFSGELLERPALNRLREDASKGLISQVICYDPDRLSRKLMNQLIIDDELRKRNIPLIFVNGEYANSPEGQLFFAMRGAISEFEKAKIKERTSSGRLQKMKKGMIIKDSKLYGYKFVKEKRTLEIYEEEAKIIRMIFNYFTDHKSPFFGRVNGIALHLTQMGVKTKKGAKVWHRQVVRQILMNSSYKGEHRQYKYDTEGSYVSKQAGNKSIIKIRPEEEQITVAIPVIVPAEQWDYAQELLGQSKRKHLSISPHNYLLSGLVRCGKCGNTMTGKKRKSHGKDYYVYTCRKNYSGAKDRGCGKEMSENKLNRHVWGEIFKFITNPQKYASFKEIEHSNHLSEELELIQKEIEKTKKGRKRLLTLISLSDDDDLDIDEIKAQIIELQKKQNQLTEKCSEIQSKMKVLDDTSSSENALKRAIDYFQSIGADNLTLEDKKTIVNFIVKEVTVVDSDTVYIETY

SEQ ID NO: 42122 - DNA, 50 bp, Bacillus subtilis; identical to SEQ ID NO: 12727
  source 1..50: mol_type = genomic DNA

SEQ ID NO: 42123 - DNA, 40 bp, Bacillus subtilis; identical to SEQ ID NO: 20773
  source 1..40: mol_type = genomic DNA

SEQ ID NO: 42124 - DNA, 50 bp, Bacillus subtilis
  source 1..50: mol_type = genomic DNA
caccccccttttgtaattacaatcctattattaattacaaaaggggggtg

SEQ ID NO: 42125 - DNA, 40 bp, Bacillus subtilis; identical to SEQ ID NO: 42110
  source 1..40: mol_type = genomic DNA

SEQ ID NO: 42126 - protein, 500 aa, Bacillus subtilis
MIAIYVRVSTEEQAIKGSSIDSQIEACIKKAGTKDVLKYADEGFSGELLERPALNRLREDASKGLISQVICYDPDRLSRKLMNQLIIDDELRKRNIPLIFVNGEYANSPEGQLFFAMRGAISEFEKAKIKERTSSGRLQKMKKGMIIKDSKLYGYKFVKEKRTLEIFEEEAKIIRMIFNYFTDHKSPFFGRVNGIALHLTQMGVKTKKGAKVWHRQVVRQILMNSSYKGEHRQYKYDTEGSYVSKQAGNKSIIKIRPEEEQITVAIPAIVPAEQWDYAQELLGQSKRKHLSISPHNYLLSGLVRCGKCGNTMTGKKRKSHGKDYYVYTCRKNYSGAKDRGCGKEMSENKLNRHVWDEIFKFITNPQKYASFKEIEQSNHLSDELELIQKEIEKTKKGRKRLLTLISLSDDDDLDIDEIKAQIIELQKKQNQLTEKCNEIQSKMKVLDDTSSSENALKRAIDYFQSIGADNLTLDDKKTIVNFIVKEVTVVDSDTVYIETY

SEQ ID NO: 42127 - DNA, 50 bp, Bacillus subtilis; identical to SEQ ID NO: 12727
  source 1..50: mol_type = genomic DNA

SEQ ID NO: 42128 - DNA, 40 bp, Bacillus subtilis; identical to SEQ ID NO: 20773
  source 1..40: mol_type = genomic DNA

SEQ ID NO: 42129 - DNA, 50 bp, Bacillus subtilis; identical to SEQ ID NO: 42124
  source 1..50: mol_type = genomic DNA

SEQ ID NO: 42130 - DNA, 40 bp, Bacillus subtilis; identical to SEQ ID NO: 42110
  source 1..40: mol_type = genomic DNA

SEQ ID NO: 42131 - protein, 500 aa, Bacillus subtilis
MIAIYVRVSTEEQAIKGSSIDSQIEACIKKAGTKDVLKYADEGFSGELLERPALNRLREDASKGLISQVICYDPDRLSRKLMNQLIIDDELRKRNIPLIFVNGEYANSPEGQLFFAMRGAISEFEKAKIKERTSSGRLQKMKKGMIIKDSKLYGYKFVKEKRTLEIFEEEAKIIRMIFNYFTDHKSPFFGRVNGIALHLTQMGVKTKKGAKVWHRQVVRQILMNSSYKGEHRQYKYDTEGSYVSKQAGNKSIIKIRPEEEQITVAIPAIISAEQWDYAQELLGQSKRKHLSISPHNYLLSGLVRCGKCGNTMTGKKRKSHGKDYYVYTCRKNYSGAKDRGCGKEMSENKLNRHVWGEIFKFITNPQKYASFKEIEQSNHLSDELELIQKEIEKTKKGRKRLLTLISLSDDDDLDIDEIKAQIIELQKKQNQLTEKCNEIQSKMKVLDDTSSSENALKRAIDYFQSIGADNLTLEDKKTIVNFIVKEVIVVDSDTVYIETY

SEQ ID NO: 42132 - DNA, 50 bp, Bacillus subtilis; identical to SEQ ID NO: 12727
  source 1..50: mol_type = genomic DNA

SEQ ID NO: 42133 - DNA, 40 bp, Bacillus subtilis; identical to SEQ ID NO: 20773
  source 1..40: mol_type = genomic DNA

SEQ ID NO: 42134 - DNA, 50 bp, Bacillus subtilis; identical to SEQ ID NO: 42124
  source 1..50: mol_type = genomic DNA

SEQ ID NO: 42135 - DNA, 40 bp, Bacillus subtilis; identical to SEQ ID NO: 42110
  source 1..40: mol_type = genomic DNA

SEQ ID NO: 42136 - protein, 500 aa, Bacillus subtilis; identical to SEQ ID NO: 39546

SEQ ID NO: 42137 - DNA, 50 bp, Bacillus subtilis; identical to SEQ ID NO: 12727
  source 1..50: mol_type = genomic DNA

SEQ ID NO: 42138 - DNA, 40 bp, Bacillus subtilis; identical to SEQ ID NO: 20773
  source 1..40: mol_type = genomic DNA

SEQ ID NO: 42139 - DNA, 50 bp, Bacillus subtilis; identical to SEQ ID NO: 42124
  source 1..50: mol_type = genomic DNA

SEQ ID NO: 42140 - DNA, 40 bp, Bacillus subtilis; identical to SEQ ID NO: 42110
  source 1..40: mol_type = genomic DNA

SEQ ID NO: 42141 - protein, 500 aa, Bacillus subtilis; identical to SEQ ID NO: 18376

SEQ ID NO: 42142 - DNA, 50 bp, Bacillus subtilis
  source 1..50: mol_type = genomic DNA
gcacccccttttgtaattacaatctcattattaattacaaaaggggggtg

SEQ ID NO: 42143 - DNA, 40 bp, Bacillus subtilis; identical to SEQ ID NO: 20773
  source 1..40: mol_type = genomic DNA

SEQ ID NO: 42144 - DNA, 50 bp, Bacillus subtilis
  source 1..50: mol_type = genomic DNA
gcacccccttttgtaattacaatcctattattaattacaaaaggggggtg

SEQ ID NO: 42145 - DNA, 40 bp, Bacillus subtilis; identical to SEQ ID NO: 42110
  source 1..40: mol_type = genomic DNA

SEQ ID NO: 42146 - protein, 500 aa, Bacillus subtilis
MIAIYVRVSTEEQAIKGSSIDSQIEACIKKAGTKDVLKYADEGFSGELLERPALNRLREDASKGLISQVICYDPDRLSRKLMNQLIIDDELRKRNIPLIFVNGEYANSPEGQLFFAMRGAISEFEKAKIKERTSSGRLQKMKKGMIIKDSKLYGYKFVKEKRTLEILEEEAKIIRMIFDYFTDHKSPFFGRVNGIALHLTQMGVKTKKGAKVWHRQVVRQILMNSSYKGEHKQYKYDTEGSYVSKQAGNKSIIKIRPEEEQITVAIPAIVPAEQWDYAQELLGQSKRKHLSISPHNYLLSGLVRCGKCGNTMTGKKRKSHGKDYYVYTCRKNYSGAKDRGCGKEMSENKLNRHVWGEIFKFITNPQKYASFKEIEQSNHLSDELELIQKEIEKTKKGRKRLLTLISLSDDDDLDIDEIKAQIIELQKKQNQLTEKCNEIQSKMKVLDDTSSSENALKRAVDYFQSIGADNLTLEDKKTIVNFIVKEVTVVDSDTVYIETY

SEQ ID NO: 42147 - DNA, 50 bp, Bacillus subtilis; identical to SEQ ID NO: 12727
  source 1..50: mol_type = genomic DNA

SEQ ID NO: 42148 - DNA, 40 bp, Bacillus subtilis; identical to SEQ ID NO: 20773
  source 1..40: mol_type = genomic DNA

SEQ ID NO: 42149 - DNA, 50 bp, Bacillus subtilis; identical to SEQ ID NO: 42124
  source 1..50: mol_type = genomic DNA

SEQ ID NO: 42150 - DNA, 40 bp, Bacillus subtilis; identical to SEQ ID NO: 42110
  source 1..40: mol_type = genomic DNA

SEQ ID NO: 42151 - protein, 500 aa, Bacillus subtilis
MIAIYVRVSTEEQAIKGSSIDSQIEACIKKAGTKDVLKYADEGFSGELLERPALNRLREDASKGLISQVICYDPDRLSRKLMNQLIIDDELRKRNIPLIFVNGEYANSPEGQLFFAMRGAISEFEKAKIKERTSSGRLQKMKKGMIIKDSKLYGYKFVKEKRTLEIFEEEAKIIRMIFNYFTDHKSPFFGRVNGIALHLSQMGVKTKKGAKVWHRQVVRQILMNSSYKGEHKQYKYDTEGSYVSKQAGNKSIIKIRPEEEQITVAIPAIVPAEQWDYAQELLGQSKRKHLSISPHNYLLSGLVRCGKCGNTMTGKKRKSHGKDYYVYTCRKNYSGAKDRGCGKEMSENKLNRHVWGEIFKFITNPQKYASFKEIEQSNHLSDELELIQKEIEKTKKGRKRLLTLISLSDDDDLDIDEIKAQIIELQKKQNQLTEKCNEIQSKMKVLDDTSSSENALKRAIDYFQSIGADNLTLEDKKTIVNFIVKEVTIVDSDTIYIETY

SEQ ID NO: 42152 - DNA, 50 bp, Bacillus subtilis; identical to SEQ ID NO: 12727
  source 1..50: mol_type = genomic DNA

SEQ ID NO: 42153 - DNA, 40 bp, Bacillus subtilis; identical to SEQ ID NO: 20773
  source 1..40: mol_type = genomic DNA

SEQ ID NO: 42154 - DNA, 50 bp, Bacillus subtilis; identical to SEQ ID NO: 42124
  source 1..50: mol_type = genomic DNA

SEQ ID NO: 42155 - DNA, 40 bp, Bacillus subtilis; identical to SEQ ID NO: 42110
  source 1..40: mol_type = genomic DNA

SEQ ID NO: 42156 - protein, 500 aa, Bacillus subtilis; identical to SEQ ID NO: 29016

SEQ ID NO: 42157 - DNA, 50 bp, Bacillus subtilis; identical to SEQ ID NO: 12727
  source 1..50: mol_type = genomic DNA

SEQ ID NO: 42158 - DNA, 40 bp, Bacillus subtilis; identical to SEQ ID NO: 20773
  source 1..40: mol_type = genomic DNA

SEQ ID NO: 42159 - DNA, 50 bp, Bacillus subtilis; identical to SEQ ID NO: 42124
  source 1..50: mol_type = genomic DNA

SEQ ID NO: 42160 - DNA, 40 bp, Bacillus subtilis; identical to SEQ ID NO: 42110
  source 1..40: mol_type = genomic DNA

SEQ ID NO: 42161 - protein, 500 aa, Bacillus subtilis; identical to SEQ ID NO: 18376

SEQ ID NO: 42162 - DNA, 50 bp, Bacillus subtilis; identical to SEQ ID NO: 12727
  source 1..50: mol_type = genomic DNA

SEQ ID NO: 42163 - DNA, 40 bp, Bacillus subtilis; identical to SEQ ID NO: 20773
  source 1..40: mol_type = genomic DNA

SEQ ID NO: 42164 - DNA, 50 bp, Bacillus subtilis; identical to SEQ ID NO: 42124
  source 1..50: mol_type = genomic DNA

SEQ ID NO: 42165 - DNA, 40 bp, Bacillus subtilis; identical to SEQ ID NO: 42110
  source 1..40: mol_type = genomic DNA

SEQ ID NO: 42166 - protein, 500 aa, Bacillus subtilis
MIAIYVRVSTEEQAIKGSSIDSQIEACIKKAGTKDVLKYADEGFSGELLERPALNRLREDASKGLISQVICYDPDRLSRKLMNQLIIDDELRKRNIPLIFVNGEYANSPEGQLFFAMRGAISEFEKAKIKERTSSGRLQKMKKGMIIKDSKLYGYKFVKEKRTLEIFEEEAKIIRMIFNYFTDHKSPFFGRVNGIALHLTQMGVKTKKGAKVWHRQVVRQILMNSSYKGEHRQYKYDTEGSYVSKQAGNKSIIKIRPEEEQITVAIPAIVPAEQWDYAQELLGQSKRKHLSISPHNYLLSGLVRCGKCGNTMTGKKRKSHGKDYYVYTCRKNYSGAKDRGCGKEMSENKLNRHVWDEIFKFITNPQKYASFKEIEQSNHLSDELELIQKEIEKTKKGRKRLLTLISLSDDDDLDIDEIKAQIIELQKKQNQLTEKCNEIQSKMKVLDDTSSSENALKRAVDYFQSIGADNLTLEDKKTIVNFIVKEVTVVDSDTVYIETY

SEQ ID NO: 42167 - DNA, 50 bp, Bacillus subtilis; identical to SEQ ID NO: 12727
  source 1..50: mol_type = genomic DNA

SEQ ID NO: 42168 - DNA, 40 bp, Bacillus subtilis; identical to SEQ ID NO: 20773
  source 1..40: mol_type = genomic DNA

SEQ ID NO: 42169 - DNA, 50 bp, Bacillus subtilis; identical to SEQ ID NO: 42124
  source 1..50: mol_type = genomic DNA

SEQ ID NO: 42170 - DNA, 40 bp, Bacillus subtilis; identical to SEQ ID NO: 42110
  source 1..40: mol_type = genomic DNA

SEQ ID NO: 42171 - protein, 500 aa, Bacillus subtilis
MIAIYVRVSTEEQAIKGSSIDSQIEACIKKAGTKDVLKYADEGFSGELLERPALNRLREDASKGLISQVICYDPDRLSRKLMNQLIIDDELRKRNIPLIFVNGEYANSPEGQLFFAMRGAISEFEKAKIKERTSSGRLQKMKKGMIIKDSKLYGYKFVKEKRTLEILEEEAKIIRMIFNYFTDHKSPFFGRVNGIALHLTQMGVKTKKGAKVWHRQVVRQILMNSSYKGEHKQYKYDTEGSYVSKQAGNKSIIKIRPEEEQITVAIPAIVPAEQWDYAQELLGQSKRKHLSISPHNYLLSGLVRCGKCGNTMTGKKRKSHGKDYYVYTCRKNYSGAKDRGCGKEMSENKLNRHVWGEIFKFITNPQKYASFKEIEQSNHLSDELELIQKEIEKTKKGRKRLLTLISLSDDDDLDIDEIKAQIIELQKKQNQLTEKCNEIQSKMKVLDDTSSSENALKRAIDYFQSIGADNLTLEDKKTIVNFIVKEVTIVDSDTIYIETY

SEQ ID NO: 42172 - DNA, 50 bp, Bacillus subtilis; identical to SEQ ID NO: 12727
  source 1..50: mol_type = genomic DNA

SEQ ID NO: 42173 - DNA, 40 bp, Bacillus subtilis; identical to SEQ ID NO: 20773
  source 1..40: mol_type = genomic DNA

SEQ ID NO: 42174 - DNA, 50 bp, Bacillus subtilis; identical to SEQ ID NO: 42124
  source 1..50: mol_type = genomic DNA

SEQ ID NO: 42175 - DNA, 40 bp, Bacillus subtilis; identical to SEQ ID NO: 42110
  source 1..40: mol_type = genomic DNA

SEQ ID NO: 42176 - protein, 500 aa, Bacillus subtilis
MIAIYVRVSTEEQAIKGSSIDSQIEACIKKAGTKDVLKYADEGFSGELLERPALNRLREDASKGLISQVICYDPDRLSRKLMNQLIIDDELRKRNIPLIFVNGEYANSPEGQLFFAMRGAISEFEKAKIKERTSSGRLQKMKKGMIIKDSKLYGYKFVKEKRTLEILEEEAKIIRMIFNYFTDHKSPFFGRVNGIALHLTQMGVKTKKGAKVWHRQVVRQILMNSSYKGEHRQYKYDTEGSYVSKQAGNKSIIKIRPEEEQITVTIPAIVPAEQWYYAQELLGQSKRKHLSISPHNYLLSGLVRCGKCGNTMTGKKRKSHGKDYYVYTCRKNYSGAKDRGCGKEMSENKLNRHVWGEIFKFITNPQKYVSFKEAEQSNHLSDELELIEKEIEKTKKGRKRLLTLISLSDDDDLDIDEIKAQIIELQKKQNQLTEKCNEIQSKMKVLDDTSSSENALKRAIDYFQSIGADNLTLEDKKTIVNFIVKEVTIVDSDTIYIETY

SEQ ID NO: 42177 - DNA, 50 bp, Bacillus subtilis; identical to SEQ ID NO: 12727
  source 1..50: mol_type = genomic DNA

SEQ ID NO: 42178 - DNA, 40 bp, Bacillus subtilis; identical to SEQ ID NO: 20773
  source 1..40: mol_type = genomic DNA

SEQ ID NO: 42179 - DNA, 50 bp, Bacillus subtilis; identical to SEQ ID NO: 42124
  source 1..50: mol_type = genomic DNA

SEQ ID NO: 42180 - DNA, 40 bp, Bacillus subtilis; identical to SEQ ID NO: 42110
  source 1..40: mol_type = genomic DNA

SEQ ID NO: 42181 - protein, 500 aa, Bacillus subtilis
MIAIYVRVSTEEQAIKGSSIDSQIEACIKKAGTKDVLKYADEGFSGELLERPALNRLREDASKGLISQVICYDPDRLSRKLMNQLIIDDELRKRNIPLIFVNGEYANSPEGQLFFAMRGAISEFEKAKIKERTSSGRLQKMKKGMIIKDSKLYGYKFVKEKRTLEIFEEEAKIIRMIFNYFTDHKSPFFGRVNGIALHLTQMGVKTKKGAKVWHRQVVRQILMNSSYKGEHRQYKYDTEGSYVSKQAGNKSIIKIRPEEEQITVAIPAIVPAEQWDYAQELLGQSKRKHLSISPHNYLLSGLVRCGKCGNTMTGKKRKSHGKDYYVYTCRKNYSGAKDRGCGKEMSENKLNRHVWGEIFKFITNPQKYASFKEIEQSNHLSDELELIQKEIEKTKKGRKRLLTLISLSDDDDLDIDEIKAQIIELQKKQNQLTEKCNEIQSKMKVLDDTSSSENALKRAIDYFQSIGADNLTLEDKKTIVNFIVKEVTIVDSDTIYIETY

SEQ ID NO: 42182 - DNA, 50 bp, Bacillus subtilis; identical to SEQ ID NO: 12727
  source 1..50: mol_type = genomic DNA

SEQ ID NO: 42183 - DNA, 40 bp, Bacillus subtilis; identical to SEQ ID NO: 20773
  source 1..40: mol_type = genomic DNA

SEQ ID NO: 42184 - DNA, 50 bp, Bacillus subtilis; identical to SEQ ID NO: 42124
  source 1..50: mol_type = genomic DNA

SEQ ID NO: 42185 - DNA, 40 bp, Bacillus subtilis; identical to SEQ ID NO: 42110
  source 1..40: mol_type = genomic DNA

SEQ ID NO: 42186 - protein, 500 aa, Bacillus subtilis
MIAIYVRVSTEEQAIKGSSIDSQIEACIKKAGTKDVLKYADEGFSGELLERPALNRLREDASKGLISQVICYDPDRLSRKLMNQLIIDDELRKRNIPLIFVNGEYANSPEGQLFFAMRGAISEFEKAKIKERTSSGRLQKMKKGMIIKDSKLYGYKFVKEKRTLEILEEEAKIIRMIFNYFTDHKSPFFGRVNGIALHLTQMGVKTKKGAKVWHRQVVRQILMNSSYKGEHRQYKYDTEGSYVSKQAGNKSIIKIRPEEEQITVSIPAIIPAEQWDYAQELLGQSKRKHLSISPHNYLLSGLVRCGKCGNTMTGKKRKSHGKDYYVYTCRKNYSGAKDRGCGKEMSENKLNRHVWGEIFKFITNPQKYASFKEIEQSNHLSDELEFIQKEIEKTKKGRKRLLTLISLSDDDDLDIDEIKAQIIELQKKQNQLTEKCNEIQSKMKVLDDTSSSENALKRAIDYFQSIGADNLTLEDKKTIVNFIVKEVTVVDSDTVYIETY

SEQ ID NO: 42187 - DNA, 50 bp, Bacillus subtilis; identical to SEQ ID NO: 12727
  source 1..50: mol_type = genomic DNA

SEQ ID NO: 42188 - DNA, 40 bp, Bacillus subtilis; identical to SEQ ID NO: 20773
  source 1..40: mol_type = genomic DNA

SEQ ID NO: 42189 - DNA, 50 bp, Bacillus subtilis; identical to SEQ ID NO: 42124
  source 1..50: mol_type = genomic DNA

SEQ ID NO: 42190 - DNA, 40 bp, Bacillus subtilis; identical to SEQ ID NO: 42110
  source 1..40: mol_type = genomic DNA

SEQ ID NO: 42191 - protein, 500 aa, Bacillus subtilis; identical to SEQ ID NO: 42166

SEQ ID NO: 42192 - DNA, 50 bp, Bacillus subtilis
  source 1..50: mol_type = genomic DNA
caccccccttttgtaattacaatctcattattcattacaaaaggggggtg

SEQ ID NO: 42193 - DNA, 40 bp, Bacillus subtilis; identical to SEQ ID NO: 20773
  source 1..40: mol_type = genomic DNA

SEQ ID NO: 42194 - DNA, 50 bp, Bacillus subtilis
  source 1..50: mol_type = genomic DNA
caccccccttttgtaattacaatcctattattcattacaaaaggggggtg

SEQ ID NO: 42195 - DNA, 40 bp, Bacillus subtilis; identical to SEQ ID NO: 42110
  source 1..40: mol_type = genomic DNA

SEQ ID NO: 42196 - protein, 500 aa, Bacillus subtilis
MIAIYVRVSTEEQAIKGSSIDSQIEACIKKAGTKDVLKYADEGFSGELLERPALNRLREDASKGLISQVICYDPDRLSRKLMNQLIIDDELRKRNIPLIFVNGEYANSPEGQLFFAMRGAISEFEKAKIKERTSSGRLQKMKKGMIIKDSKLYGYKFVKEKRTLEIFEEEAKIIRMIFNYFTDHKSPFFGRVNGIALHLTQMGVKTKKGAKVWHRQVVRQILMNSSYKGEHRQYKYDTEGSYVSKQAGNKSIIKIRPEEEQITVAIPAIIPAEQWDYAQELLGQSKRKHLSISPHNYLLSGLVRCGKCGNTMTGKKRKSHGKDYYVYTCRKNYSGAKDRGCGKEMSENKLNRHVWGEIFKFITNPQKYASFKEIEQTNHLSDELELIQKEIEKTKKGRKRLLTLISLSDDDDLDIDEIKTQIIELQKKQNQLTEKCNEIQSKMKVLDDTSSSENALKRAIDYFQSIGADNLTLEDKKTIINFIVKEVTVVDSDTVYIETY

SEQ ID NO: 42197 - DNA, 50 bp, Bacillus subtilis; identical to SEQ ID NO: 12727
  source 1..50: mol_type = genomic DNA

SEQ ID NO: 42198 - DNA, 40 bp, Bacillus subtilis; identical to SEQ ID NO: 20773
  source 1..40: mol_type = genomic DNA

SEQ ID NO: 42199 - DNA, 50 bp, Bacillus subtilis; identical to SEQ ID NO: 42124
  source 1..50: mol_type = genomic DNA

SEQ ID NO: 42200 - DNA, 40 bp, Bacillus subtilis; identical to SEQ ID NO: 42110
  source 1..40: mol_type = genomic DNA

SEQ ID NO: 42201 - protein, 500 aa, Bacillus subtilis
MIAIYVRVSTEEQAIKGSSIDSQIEACIKKAGTKDVLKYADEGFSGELLERPALNRLREDASKGLISQVICYDPDRLSRKLMNQLIIDDELRKRNIPLIFVNGEYANSPEGQLFFAMRGAISEFEKAKIKERTSSGRLQKMKKGMIIKDSKLYGYKFVKEKRTLEIFEEEAKIIRMIFKYFTDHKSPFFGRVNGIALHLTQMGVKTKKGAKVWHRQVVRQILMNSSYKGEHRQYKYDTEGSYVSKQAGNKSIIKRRPEEEQITVSIPAIIPAEQWDYAQELLGQSKRKHLSISPHNYLLSGLVRCGKCGNTMTGKKRKSHGKDYYVYTCRKNYSGAKDRGCGKEMSENKLNRHVWGEIFKFITNPQKYASFKEIEQSNHLSDELELIQKEIEKTKKGRKRLLTLISLSDDDDLDIDEIKAQIIELQKKQNQLTEKCNEIQSKMKVLDDTSSSENALKRAIDYFQSIGADNLTLEDKKTIVNFIVKEVTVVDSDTVYIETY

SEQ ID NO: 42202 - DNA, 50 bp, Bacillus subtilis; identical to SEQ ID NO: 42192
  source 1..50: mol_type = genomic DNA

SEQ ID NO: 42203 - DNA, 40 bp, Bacillus subtilis; identical to SEQ ID NO: 20773
  source 1..40: mol_type = genomic DNA

SEQ ID NO: 42204 - DNA, 50 bp, Bacillus subtilis; identical to SEQ ID NO: 42194
  source 1..50: mol_type = genomic DNA

SEQ ID NO: 42205 - DNA, 40 bp, Bacillus subtilis; identical to SEQ ID NO: 42110
  source 1..40: mol_type = genomic DNA

SEQ ID NO: 42206 - protein, 500 aa, Bacillus subtilis
MIAIYVRVSTEEQAIKGSSIDSQIEACIKKAGTKDVLKYSDEGFSGELLERPALNRLREDASKGLISQVICYDPDRLSRKLMNQLIIDDELRKRNIPLIFVNGEYANSPEGQLFFAMRGAISEFEKAKIKERTSSGRLQKMKKGMIIKDSKLYGYKFVKEKRTLEIFEEEAKIIRMIFNYFTDHKSPFFGRVNGIALHLTQMGVKTKKGAKVWHRQVVRQILMNSSYKGEHKQYKYDTEGSYVSKQAGNKSIIKIRPEEEQITVAIPAIVPAEQWDYAQELLGQSKRKHLSISPHNYLLSGLVRCGKCGNTMTGKKRKSHGKDYYVYTCRKNYSGAKDRGCGKEMSENKLNRHVWGEIFKFITNPQKYASFKEIEQSNHLSDELELIQKEIEKTKKGRKRLLTLISLSDDDDLDIDEIKAQIIELQKKQNQLTEKCNEIQSKMKVLDDTSSSENALKRAIDYFQSIGADNLTLEDKKTIVNFIVKEVTVVDSDTVYIETY

SEQ ID NO: 42207 - DNA, 50 bp, Bacillus subtilis; identical to SEQ ID NO: 39562
  source 1..50: mol_type = genomic DNA

SEQ ID NO: 42208 - DNA, 40 bp, Bacillus subtilis; identical to SEQ ID NO: 20773
  source 1..40: mol_type = genomic DNA

SEQ ID NO: 42209 - DNA, 50 bp, Bacillus subtilis
  source 1..50: mol_type = genomic DNA
caccccccttttgtaattacaatcctattattaattacaaaaaggggggg

SEQ ID NO: 42210 - DNA, 40 bp, Bacillus subtilis; identical to SEQ ID NO: 42110
  source 1..40: mol_type = genomic DNA

SEQ ID NO: 42211 - protein, 500 aa, Bacillus subtilis
MIAIYVRVSTEEQAIKGSSIDSQIEACIKKAGTKDVLKYADEGFSGELLERPALNRLREDASKGLISQVICYDPDRLSRKLMNQLIIDDELRKRNIPLIFVNGEYANSPEGQLFFAMRGAISEFEKAKIKERTSSGRLQKMKKGMIIKDSKLYGYKFVKEKRTLEILEEEAKIIRMIFNYFTDHKSPFFGRVNGIALHLTQMGVKTKKGAKVWHRQVVRQILMNSSYKGEHKQYKYDTEGSYVSKQAGNKSIIKIRPEEEQITVAIPAIVPAEQWDYAQELLGQSKRKHLSISPHNYLLSGLVRCGKCGNTMTGKKRKSHGKDYYVYTCRKNYSGAKDRGCGKEMSENKLNRHVWGEIFKFITNPQKYASFKEIEQSNHLSDELELIQKEIEKTKKGRKRLLTLISLSDDDDLDIDEIKAQIIELQKKQNQLTEKCNEIQSKMKVLDDTSSSENALKRAIDYFQSIGADNLTLEDKKTIINFIVKEVTVVDSDTVYIETY

SEQ ID NO: 42212 - DNA, 50 bp, Bacillus subtilis; identical to SEQ ID NO: 12727
  source 1..50: mol_type = genomic DNA

SEQ ID NO: 42213 - DNA, 40 bp, Bacillus subtilis; identical to SEQ ID NO: 20773
  source 1..40: mol_type = genomic DNA

SEQ ID NO: 42214 - DNA, 50 bp, Bacillus subtilis; identical to SEQ ID NO: 42124
  source 1..50: mol_type = genomic DNA

SEQ ID NO: 42215 - DNA, 40 bp, Bacillus subtilis; identical to SEQ ID NO: 42110
  source 1..40: mol_type = genomic DNA

SEQ ID NO: 42216 - protein, 500 aa, Bacillus subtilis
MIAIYVRVSTEEQAIKGSSIDSQIEACIKKAGTKDVLKYADEGFSGELLERPALNRLREDASKGLISQVICYDPDRLSRKLMNQLIIDDELRKRNIPLIFVNGEYANSPEGQLFFAMRGAISEFEKAKIKERTSSGRLQKMKKGMIIKDSKLYGYKFVKEKRTLEIFEEEAKIIRMIFNYFTDHKSPFFGRVNGIALHLTQMGVKTKKGAKVWHRQVVRQILMNSSYKGEHKQYKYDTEGSYVSKQAGNRSIIKIRPEEEQITVAIPAIIPAEQWDYAQELLGQSKRKHLSISPHNYLLSGLVRCGKCGNTMTGKKRKSHGKDYYVYTCRKNYSGAKDRGCGKEMSENKLNRHVWSEIFKFITNPQKYASFKEIEQSNHLSDELELIQKEIEKTKKGRKRLLTLISLSDDDDLDIDEIKTQIIELQKKQNQLTEKCNEIQSKMKVLDDTSSSENALKRAIDYFQSIGAENLTLEDKKTIVNFIVKEVTVVDSDTVYIETY

SEQ ID NO: 42217 - DNA, 50 bp, Bacillus subtilis; identical to SEQ ID NO: 12727
  source 1..50: mol_type = genomic DNA

SEQ ID NO: 42218 - DNA, 40 bp, Bacillus subtilis; identical to SEQ ID NO: 20773
  source 1..40: mol_type = genomic DNA

SEQ ID NO: 42219 - DNA, 50 bp, Bacillus subtilis; identical to SEQ ID NO: 42124
  source 1..50: mol_type = genomic DNA

SEQ ID NO: 42220 - DNA, 40 bp, Bacillus subtilis; identical to SEQ ID NO: 42110
  source 1..40: mol_type = genomic DNA

SEQ ID NO: 42221 - protein, 500 aa, Bacillus subtilis
MIAIYVRVSTEEQAIKGSSIDSQIEACIKKAGTKDVLKYADEGFSGELLERPALNRLREDASKGLISQVICYDPDRLSRKLMNQLIIDDELRKRNIPLIFVNGEYANSPEGQLFFAMRGAISEFEKAKIKERTSSGRLQKMKKGMIIKDSKLYGYKFVKEKRTLEIFEEEAKIIRMIFNYFTDHKSPFFGRVNGIALHLTQMGVKTKKGAKVWHRQVVRQILMNSSYKGEHRQYKYDTEGSYVSKQAGNKSIIKIRPEEEQITVAIPAIVPAEQWDYAQELLGQSKRKHLSISPHNYLLSGLVRCGKCGNTMTGKKRKSHGKDYYVYTCRKNYSGAKDRGCGKEMSENKLNRHVWDEIFKFITNPQKYASFKEIEQSNHLSDELELIQKEIEKTKKGRKRLLTLISLSDDDDLDIDEIKAQIIELQKKQNQLTEKCNEIQSKMKVLDDTSSSENALKRAIDYFQSIGADNLTLEDKKTIVNFIVKEVTIVDSDTIYIETY

SEQ ID NO: 42222 - DNA, 50 bp, Bacillus subtilis; identical to SEQ ID NO: 39542
  source 1..50: mol_type = genomic DNA

SEQ ID NO: 42223 - DNA, 40 bp, Bacillus subtilis; identical to SEQ ID NO: 20773
  source 1..40: mol_type = genomic DNA

SEQ ID NO: 42224 - DNA, 50 bp, Bacillus subtilis; identical to SEQ ID NO: 42114
  source 1..50: mol_type = genomic DNA

SEQ ID NO: 42225 - DNA, 40 bp, Bacillus subtilis; identical to SEQ ID NO: 42110
  source 1..40: mol_type = genomic DNA

SEQ ID NO: 42226 - protein, 500 aa, Bacillus subtilis
MIAIYVRVSTEEQAIKGSSIDSQIEACIKKAGTKDVLKYADEGFSGELLERPALDCLREDAGKGLISQVICYDPDRLSRKLMNQLIIDDELRKRNIPLIFVNGEYANSPEGQLFFAMRGAISEFEKAKIKERTSSGRLQKMKKGMIIKDSKLYGYKFVKEKRTLEILEEEAKIIRMIFNYFTDHKSPFFGRVNGIALHLTQMGVKTKKGAKVWHRQVVRQILMNSSYKGEHRQYKYDTEGSYVSKQAGNKSIIKIRPEEEQITVTIPAIVPAEQWDYAQELLGQSKRKHLSISPHNYLLSGLVRCGKCGNTMTGKKRKSHGKDYYVYTCRKNYSGAKDRGCGKEMSENKLNRHVWGEIFKFITNPQKYVSFKEAEQSNHLSDELELIEKEIEKTKKGRKRLLTLISLSDDDDLDIDEIKAQIIELQKKQNQLTEKCNEIQSKMKVLDDTSSSENALKRAIDYFQSIGADNLTLEDKKTIVNFIVKEVTIVDSDTIYIETY

SEQ ID NO: 42227 - DNA, 50 bp, Bacillus subtilis; identical to SEQ ID NO: 39537
  source 1..50: mol_type = genomic DNA

SEQ ID NO: 42228 - DNA, 40 bp, Bacillus subtilis; identical to SEQ ID NO: 20773
  source 1..40: mol_type = genomic DNA

SEQ ID NO: 42229 - DNA, 50 bp, Bacillus subtilis
  source 1..50: mol_type = genomic DNA
caccccccttttgtaattacaatcctattattcattacaaaaaggggggg

SEQ ID NO: 42230 - DNA, 40 bp, Bacillus subtilis; identical to SEQ ID NO: 42110
  source 1..40: mol_type = genomic DNA

SEQ ID NO: 42231 - protein, 500 aa, Bacillus subtilis
MIAIYVRVSTEEQAIKGSSIDSQIEACIKKAGTKDVLKYADEGFSGELLERPALNRLREDASKGLISQVICYDPDRLSRKLMNQLIIDDELRKRNIPLIFVNGEYANSPEGQLFFAMRGAISEFEKAKIKERTSSGRLQKMKKGMIIKDSKLYGYKFVKEKRTLEILEEEAKIIRMIFNYFTDHKSPFFGRVNGIAQHLTQMGVKTKKGAKVWHRQVVRQILINSSYKGEHRQYKYDTEGSYVSKQAGNKSIIKIRPEEEQITVAIPAIVPAEQWNYAQELLGQSKRKHLSISPHNYLLSGLVRCGKCGNTMTGKKRKSHGKDYYVYTCRKNYSGAKDRGCGKEMSENKLNRHVWGEIFKFITNPQKYASFKEIEQSNHLSDELELIQKEIEKTKKGRKRLLTLISLSDDDDLDIDEIKAQIIGLQKKQNQLTEKCNEIQSKMKVLDDTSSSENALKRAVDYFQSIGADNLTLEDKKTIVNFIVKEVTVVDSDTVYIETY

SEQ ID NO: 42232 - DNA, 50 bp, Bacillus subtilis; identical to SEQ ID NO: 12727
  source 1..50: mol_type = genomic DNA

SEQ ID NO: 42233 - DNA, 40 bp, Bacillus subtilis; identical to SEQ ID NO: 20773
  source 1..40: mol_type = genomic DNA

SEQ ID NO: 42234 - DNA, 50 bp, Bacillus subtilis; identical to SEQ ID NO: 42124
  source 1..50: mol_type = genomic DNA

SEQ ID NO: 42235 - DNA, 40 bp, Bacillus subtilis; identical to SEQ ID NO: 42110
  source 1..40: mol_type = genomic DNA

SEQ ID NO: 42236 - protein, 500 aa, Bacillus subtilis
MIAIYVRVSTEEQAIKGSSIDSQIEACIKKAGTKDVLKYADEGFSGELLERPALNRLREDASKGLISQVICYDPDRLSRKLMNQLIIDDELRKRNIPLIFVNGEYANSPEGQLFFAMRGAISEFEKAKIKERTSSGRLQKMKKGMIIKDSKLYGYKFVKQKRTLEIFEEEAKIIRMIFNYFTDHKSPFFGRVNGIALHLTQMGVKTKKGAKVWHRQVVRQILMNSSYKGEHKQYKYDTEGSYVSKQAGNKSIIKIRPEEEQITVAIPAIVPAEQWDYAQELLGQSKRKHLSISPHNYLLSGLVRCGKCGNTMTGKKRKSHGKDYYVYTCRKNYSGAKDRGCGKEMSENKLNRHVWGEIFKFITNPQKYASFKEIEQSNHLSDELELIQKEIEKTKKGRKRLLTLISLSDDDDLDIDEIKAQIIELQKKQNQLTEKCNEIQSKMKVLDDTSSSENALKRAIDYFQSIGADNLTLEDKKTIVNFIVKEVIVVDSETVYIETY

SEQ ID NO: 42237 - DNA, 50 bp, Bacillus subtilis; identical to SEQ ID NO: 12727
  source 1..50: mol_type = genomic DNA

SEQ ID NO: 42238 - DNA, 40 bp, Bacillus subtilis; identical to SEQ ID NO: 20773
  source 1..40: mol_type = genomic DNA

SEQ ID NO: 42239 - DNA, 50 bp, Bacillus subtilis; identical to SEQ ID NO: 42124
  source 1..50: mol_type = genomic DNA

SEQ ID NO: 42240 - DNA, 40 bp, Bacillus subtilis; identical to SEQ ID NO: 42110
  source 1..40: mol_type = genomic DNA

SEQ ID NO: 42241 - protein, 500 aa, Bacillus subtilis; identical to SEQ ID NO: 18376

SEQ ID NO: 42242 - DNA, 50 bp, Bacillus subtilis; identical to SEQ ID NO: 42192
  source 1..50: mol_type = genomic DNA

SEQ ID NO: 42243 - DNA, 40 bp, Bacillus subtilis; identical to SEQ ID NO: 20773
  source 1..40: mol_type = genomic DNA

SEQ ID NO: 42244 - DNA, 50 bp, Bacillus subtilis; identical to SEQ ID NO: 42194
  source 1..50: mol_type = genomic DNA

SEQ ID NO: 42245 - DNA, 40 bp, Bacillus subtilis; identical to SEQ ID NO: 42110
  source 1..40: mol_type = genomic DNA

SEQ ID NO: 42246 - protein, 500 aa, Bacillus subtilis; identical to SEQ ID NO: 42201

SEQ ID NO: 42247 - DNA, 50 bp, Bacillus subtilis; identical to SEQ ID NO: 12727
  source 1..50: mol_type = genomic DNA

SEQ ID NO: 42248 - DNA, 40 bp, Bacillus subtilis; identical to SEQ ID NO: 20773
  source 1..40: mol_type = genomic DNA

SEQ ID NO: 42249 - DNA, 50 bp, Bacillus subtilis; identical to SEQ ID NO: 42124
  source 1..50: mol_type = genomic DNA

SEQ ID NO: 42250 - DNA, 40 bp, Bacillus subtilis; identical to SEQ ID NO: 42110
  source 1..40: mol_type = genomic DNA

SEQ ID NO: 42251 - protein, 549 aa, Pasteurella multocida
MSKEKIKVYLYTRVSTSIQIDGYSLEAQKSRMKAFALYNDYEIVGEYEDAGKSGKSIEGRIQFTRMMEDIKSGKDGVSFVLVFKLSRFARNAADVLSTLQTMQDFGVNLICVEDGIDSSKDAGKLMISVLSAVAEIERENIRVQTMEGRIQKAREGKWNGGFAPYGYQLVDGKLFINEEEAVAIRTIFDQYVNTAIGANGLSKYLENHGIRKIPRQNGKNPLFDAGLIRKILKNPVYNGKIAFGRRTLEKVHGTRNEYKQVEQDEYLIAEGIHEAIISDELWQAAQVKLKSQAKKYEHVNKGKDVRTHLLSGIVKCPICGAGMFGNKCIKRRKDGTKYKDFYYYGCKHRLMNRGHKCTYNKQIREELLDDAVAEVIVKIVSNPKFASMMQEKINMKVDTSEIEKEIDNYQKELRKSHSTKFKLIEEIDNLDVDDKHYKRRKQDLDDRLYRMYDKIEELESLLIDAKAKKQTIEAEKLTGDNIYKVLIYFDKLYKVMNDVERRQLITALISEIQIYEEKQPNGQWLKSITFKLPIIEENLNISLDNDEHV

SEQ ID NO: 42252 - DNA, 50 bp, Pasteurella multocida
  source 1..50: mol_type = genomic DNA
agtttggacaatgatgagcatgtggagacggtagcattattgtccaaact

SEQ ID NO: 42253 - DNA, 40 bp, Pasteurella multocida
  source 1..40: mol_type = genomic DNA
cccgcatacttctcactatgaagtgctgtgtttactggaa

SEQ ID NO: 42254 - DNA, 50 bp, Pasteurella multocida
  source 1..50: mol_type = genomic DNA
agtttggacaatgatgagcatgtgaggacggtagcattattgtccaaact

SEQ ID NO: 42255 - DNA, 40 bp, Pasteurella multocida
  source 1..40: mol_type = genomic DNA
tctgcatatttcttaatgaagagtgctgtttttacttaaa

SEQ ID NO: 42256 - protein, 489 aa, Faecalibacterium prausnitzii
MTAVIYARYSTDSQREESIEGQIRECTAYAEKNGFTVVKHYIDRAVSAKTDNRPQFQQMIKDSERGIFDVIIVWKLDRFARNRYDSARYKTQLKRNGVKLVSATEVISAGPEGIILESVLEGYAEYYSADLSEKVVRGMTENALKGIYNGGTIPFGYMIDETRHYQPDPLLAPYVEQTFQKYADGATMTDLRDWLKAHNIKNSMGGEMSYNTIQRMLSNRRYIGELRLRDVVQPNAIPALVSEELFNKVQKKLAKNKKAPARHKAEEIYLLTTKLYCGKCGALMFGESGVSHTGKMYTYYKCAAAKKKKTCDKKAVRKQWLEDLVVNETMKLVEDDASMNAIIVKVMELQNQESTDLPIYEKQLKETEVGITNMLNAIQMGILTSSTKERLEALEDQRKELQARIAEERLAKPKMKEEFVRFWLLRFRKLDMTQPEQRQALVDTFINAIYLYDDKVLITFNYKEGTETVAFGEAVKAEKSSDMSARGVP

SEQ ID NO: 42257 - DNA, 50 bp, Faecalibacterium prausnitzii
  source 1..50: mol_type = genomic DNA
agttcggatatgagtgcgcgaggtgcaccacaacaacaaaatccgaactt

SEQ ID NO: 42258 - DNA, 40 bp, Faecalibacterium prausnitzii
  source 1..40: mol_type = genomic DNA
ggttcgagtccctggaggtgtaccagattttgaacgtcaa

SEQ ID NO: 42259 - DNA, 50 bp, Faecalibacterium prausnitzii
  source 1..50: mol_type = genomic DNA
agttcggatatgagtgcgcgaggtgtaccacaacaacaaaatccgaactt

SEQ ID NO: 42260 - DNA, 40 bp, Faecalibacterium prausnitzii
  source 1..40: mol_type = genomic DNA
tgttagcattcctggaagcgtaccagattgtgaagctcaa

SEQ ID NO: 42261 - protein, 542 aa, Subdoligranulum variabile
MERINAYNYMPRAFGYCRKSTTGQREESIEAQQRAIVSYAAASGFELVKVYKDHGNSGRNGERPQFTQMVQDAINGGAQFIIVHKLDRFFRNAERQTLVEAQLRRYGVRVLSASEHFDDTPQGQFMRNVTKAINQWYSANLAQEVVKGLRENAMSARNTGGPPPLGYAVDKTTGKFVIAPREAEAVQLIFRLYLQDVGYAGILDALNAGGYTTRRGRPFGKNSLYDILRNEKYTGLYIWNRLAPADFEGKTSRRRLKPRDEWVCVENGMPRIIDPADWQRVQDEMEKRRHRNAQHKAKAFYLLSGLVVCGGCGGQMGGEMRRYKSHGQPVEYRYYSCINKKRLHDDGAHVRAVPADKLEKAVVDYLQHVVLRPETMDAICAAVLGATQPGTPPAERASELRKEIGILQQKIDRLYAAIENGLDAPLTIQRINDLRKQQATLQAEVDALGEDVRKTADTVEQLRRVWANIRLENMQPEQLRAFIREFVEKIIVYDDDDGGHRVRIVLDPAHVAPDKLPENLITAPLSELDTFLDTTGNGLPLP

SEQ ID NO: 42262 - DNA, 50 bp, Subdoligranulum variabile
  source 1..50: mol_type = genomic DNA
tttttggatacgaccggcaacggtctacccctgccatccatatccggaaa

SEQ ID NO: 42263 - DNA, 40 bp, Subdoligranulum variabile
  source 1..40: mol_type = genomic DNA
gccgagggttcgaatccttctacccctgccaaaaaccgcg

SEQ ID NO: 42264 - DNA, 50 bp, Subdoligranulum variabile
  source 1..50: mol_type = genomic DNA
tttttggatacgaccggcaacggtggacccctgccatccatatccggaaa

SEQ ID NO: 42265 - DNA, 40 bp, Subdoligranulum variabile
  source 1..40: mol_type = genomic DNA
gcccaaggttccactccttggaatccggccaagaacccca

SEQ ID NO: 42266 - protein, 505 aa, Pedobacter suwonensis
MKKAIRYLRFSDKHQSNGSIERQELYTDQWAKNNQVQLVDTFIDRGKSARTFDRPDFKKLEAFIRKHYRSVDYLLVDQLDRFSRDAGEAIKMVKKLQMEFSIQIVSVTEGITYDYSTPGSFFRTGLQLLLAEEDNINRSIKVRGGLYTAKAKEGRYVYKNPPYGYYKDGVGKERHLVINEREAEIVRYIYDAYLNNVPIYIIFDKAREMGFSRNGNEAIQRVLSNPVYAGMQYVEPFKDYPGGLFKALHQPIIDYVTWQNVQFKMKKVDKPKVTVIDELPLCGVLKCHCGKLLTGAPSRGRWGGYYYYYKCNKTTHLNLSAKKAHQQLEEIFDLMSLPENIIRAIKDESDTAVNLRIKNNKSLLAEKQRELACEEKKLLSIEEKWITNTINHETYQKWYNIITNNMLSLNAAIGRLNQNQDKVYTKLYENLERLTNLGYIYRHAETLDKQELVRLGFDNNLYYQNGLYRTPTMIEELSHNYLIMKEKGLLIYEKKRGNCKIPRSA

SEQ ID NO: 42267 - DNA, 50 bp, Pedobacter suwonensis
  source 1..50: mol_type = genomic DNA
gaattgtaaaattccccgctcagcggactgggcgggagtacaatcgaacc

SEQ ID NO: 42268 - DNA, 40 bp, Pedobacter suwonensis
  source 1..40: mol_type = genomic DNA
aaaaatcacccctttcagcggagagagagggattcgaacc

SEQ ID NO: 42269 - DNA, 50 bp, Pedobacter suwonensis
  source 1..50: mol_type = genomic DNA
gaattgtaaaattccccgctcagcaaactgggcgggagtacaatcgaacc

SEQ ID NO: 42270 - DNA, 40 bp, Pedobacter suwonensis
  source 1..40: mol_type = genomic DNA
aattatcaacactttgagaaagaagagagggtttcgaatc

SEQ ID NO: 42271 - protein, 583 aa, Citrobacter freundii; identical to SEQ ID NO: 37621

SEQ ID NO: 42272 - DNA, 50 bp, Citrobacter freundii; identical to SEQ ID NO: 37612
  source 1..50: mol_type = genomic DNA

SEQ ID NO: 42273 - DNA, 40 bp, Citrobacter freundii
  source 1..40: mol_type = genomic DNA
aagagtgtgcgttaatggcaagacagaaatgatgattctc

SEQ ID NO: 42274 - DNA, 50 bp, Citrobacter freundii
  source 1..50: mol_type = genomic DNA
attcgcatcaaacataattatggccagccataatataaatagatgccaat

SEQ ID NO: 42275 - DNA, 40 bp, Citrobacter freundii
  source 1..40: mol_type = genomic DNA
aacattttctgtaaagggccagacagtgatgatgattcta

SEQ ID NO: 42276 - protein, 583 aa, Citrobacter portucalensis; identical to SEQ ID NO: 37611

SEQ ID NO: 42277 - DNA, 50 bp, Citrobacter portucalensis; identical to SEQ ID NO: 37612
  source 1..50: mol_type = genomic DNA

SEQ ID NO: 42278 - DNA, 40 bp, Citrobacter portucalensis; identical to SEQ ID NO: 42273
  source 1..40: mol_type = genomic DNA

SEQ ID NO: 42279 - DNA, 50 bp, Citrobacter portucalensis; identical to SEQ ID NO: 42274
  source 1..50: mol_type = genomic DNA

SEQ ID NO: 42280 - DNA, 40 bp, Citrobacter portucalensis; identical to SEQ ID NO: 42275
  source 1..40: mol_type = genomic DNA

SEQ ID NO: 42281 - protein, 583 aa, Citrobacter portucalensis
MKKLYSYIRWSSQKQTVGTSLARQTEAARNYATENGLEYAEIRDAGISAFKGKNITHGALGSFIQAVKDGVIEKDSTIFIENLDRLTRSGVGTAQKLLLDLLDLGLTVVTGMDQRVYTMESANENPTDMLISLLMFSRANEESKTKQNRTNNTARALVARFKQGQPTNIKNMSNDPWWFDSSGSKYEAVKPHPVHWVAAQKAVELFLMGWGCFRVTAYLNSHLDLYPAPKPTKRQIDQGVKKWAVPNLVTMRKNPALMGVKKLTIEGYEHKLDGYYPALVTPEQFARIQDIRTGNKFVQGEQKKMISLLSGLGVLKCGLCGGPMIAYSREGRLRYVCSNGKIQKSSCKVWSVNGSIVENLTARALVYGYTHCILLGNTKTEDLTPLIESKETELGLVKKQLTNQAQAISTIGPIQELIEQVAVLSQREQSLLLELDSLKQKLALQGSENELDELIIKTLSLFSDELLGDVTHTDRMQIREVVRKCLPEITISKLKDKALRIDFRFHDYSHMTFQGVMQGKEKSYTLTRTPHDQLYTKIAAVFSDVLETSLDATDIDGYMAASDRMVAALGLPEPLGRDFFSKR

SEQ ID NO: 42282 - DNA, 50 bp, Citrobacter portucalensis; identical to SEQ ID NO: 37612
  source 1..50: mol_type = genomic DNA

SEQ ID NO: 42283 - DNA, 40 bp, Citrobacter portucalensis; identical to SEQ ID NO: 42273
  source 1..40: mol_type = genomic DNA

SEQ ID NO: 42284 - DNA, 50 bp, Citrobacter portucalensis; identical to SEQ ID NO: 42274
  source 1..50: mol_type = genomic DNA

SEQ ID NO: 42285 - DNA, 40 bp, Citrobacter portucalensis; identical to SEQ ID NO: 42275
  source 1..40: mol_type = genomic DNA

SEQ ID NO: 42286 - protein, 583 aa, Citrobacter portucalensis; identical to SEQ ID NO: 37616

SEQ ID NO: 42287 - DNA, 50 bp, Citrobacter portucalensis; identical to SEQ ID NO: 37612
  source 1..50: mol_type = genomic DNA

SEQ ID NO: 42288 - DNA, 40 bp, Citrobacter portucalensis; identical to SEQ ID NO: 42273
  source 1..40: mol_type = genomic DNA

SEQ ID NO: 42289 - DNA, 50 bp, Citrobacter portucalensis; identical to SEQ ID NO: 42274
  source 1..50: mol_type = genomic DNA

SEQ ID NO: 42290 - DNA, 40 bp, Citrobacter portucalensis; identical to SEQ ID NO: 42275
  source 1..40: mol_type = genomic DNA

SEQ ID NO: 42291 - protein, 504 aa, Mammaliicoccus sciuri
MQIEDKIKHVAMYVRKSRAEEGEKDLENHMMHLKLRCEANEWTYELYKEVGSGSSIDDRPQMIKLLDDIEKKLYDAVLVVDFDRLTRGTGADNDRIMHSLMISDTLIVVEKPYHVLDPHNESDQDSMLMQGFMANFEYRKINKRMREGKKIAQYKGQWVNSVPPYGYTVDKQSKKLTPDEEESKIVLRIKEMFFENKSTAEIAWILNKEGVRPRKALEWRASRIGDILQNEVYVGTLVYNKSEGNRNKANSKYSQSRPFRNLPESEWKRVYNCHPKLFTDEEFKRIQDYFKNSSYSHKGARAKVYALTGLCKTPDGKTLKVHQGKSNQKKLYLITKANKFGDPTIYKGVSYNLVQEYIKHSIEQLKVMIDSQLDQGVNNLEKDELNKKIVYKQKELDSLNDEKARITQGYLKGIFDDDEMIELKKVKTEEINKVEKELEELQEDVENASLVKVELRKTKVETLLENIKNSKSDRETNEYLKTIIKEIIVDRTTDDEIKLTVNFL

SEQ ID NO: 42292 - DNA, 50 bp, Mammaliicoccus sciuri
  source 1..50: mol_type = genomic DNA
tacatgaccatactaagtgtacttggatgaacacgtagtagggtaaggta

SEQ ID NO: 42293 - DNA, 40 bp, Mammaliicoccus sciuri; identical to SEQ ID NO: 28448
  source 1..40: mol_type = genomic DNA

SEQ ID NO: 42294 - DNA, 50 bp, Mammaliicoccus sciuri
  source 1..50: mol_type = genomic DNA
tacatgaccatactaagtgtacttgaatgaacacgtagtagggtaaggta

SEQ ID NO: 42295 - DNA, 40 bp, Mammaliicoccus sciuri
  source 1..40: mol_type = genomic DNA
ggatgtgaaactgggacttgatccagaggaggctggtggg

SEQ ID NO: 42296 - protein, 504 aa, Mammaliicoccus sciuri
MQIEDKIKHVAMYVRKSRAEEGEKDLENHMMHLKLRCEANEWTYELYKEVGSGSSIDDRPQMIKLLDDIEKKLYDAVLVVDFDRLTRGTGADNDRIMHSLMISDTLIVVEKPYHVLDPHNESDQDSMLMQGFMANFEYRKINKRMREGKKIAQYKGQWVNSVPPYGYTVDKQSKKLTPDEEESKIVLRIKEMFFENKSTAEIAWILNKEGIRPRKALEWRASRIGDILQNEVYVGTLVYNKSEGNRNKANSKYTQSRPFRNLPESEWKRVYNCHPKLFTEEEFKRIQDYFKNSSYSHKGARAKVYALTGLCKTPDGKTLKVHQGKSNQKKLYLITKANKFGDPTIYKGVSYNLVQEYIKHSIEQLKVMIDSQLDQGVNNLEKDELNKKIVYKQKELDSLNDEKARITQGYLKGIFDDEEMIELKKVKTEEINKVEKELEELQEDVENASLVKVELRKTKVETLLENIKNSKSDRETNEYLKTIIKEIIVDRTTDNEIKLTVNFL

SEQ ID NO: 42297 - DNA, 50 bp, Mammaliicoccus sciuri
  source 1..50: mol_type = genomic DNA
tacatgaccacacaatgtgtacttggatgagcacgtagtagggtaaggta

SEQ ID NO: 42298 - DNA, 40 bp, Mammaliicoccus sciuri
  source 1..40: mol_type = genomic DNA
ggatgtgcgactggtacttggtacagagcaggcgagggat

SEQ ID NO: 42299 - DNA, 50 bp, Mammaliicoccus sciuri
  source 1..50: mol_type = genomic DNA
tacatgaccacacaatgtgtacttgaatgagcacgtagtagggtaaggta

SEQ ID NO: 42300 - DNA, 40 bp, Mammaliicoccus sciuri; identical to SEQ ID NO: 42295
  source 1..40: mol_type = genomic DNA

SEQ ID NO: 42301 - protein, 504 aa, Staphylococcus sciuri
MQIEDKIKHVAMYVRKSRAEEGEKDLENHMMHLKLRCEANEWTYELYKEVGSGSSIDDRPQMIKLLEDIEKKLYDAVLVVDFDRLTRGTGADNDRIMHSLMISDTLIVVEKPYHVLDPHNESDQDSMLMQGFMANFEYRKINKRMREGKKIAQYKGQWVNSVPPYGYTVDKQTKKLTPDEEESKIVLRIKEMFFENKSTAEIAWILNKEGVRPRKALEWRASRIGDILQNEVYVGTLVYNKSEGNRNKANSKYSQSRPFRNLPESEWKRVYNCHPKLFTDEEFKRIQDYFKNSSYSHKGARAKVYALTGLCKTPDGKTLKVHQGKSNQKKLYLITKANKFGDPTIYKGVSYNLVQEYIKHSIEQLKVMIDSQLDQGVNNLEKDELNKKIVYKQKELDSLNDEKARITQGYLKGIFDDDEMIELKKVKTEEINKVEKELEELQEDVENASLVKVELRKTKVETLLENIKNSKSDRETNEYLKTIIKEIIVDRTTDDEIKLTVNFL

SEQ ID NO: 42302 - DNA, 50 bp, Staphylococcus sciuri
  source 1..50: mol_type = genomic DNA
tacctgaccatacaatgtgtacttggatgaacacgtagtagggtaaggta

SEQ ID NO: 42303 - DNA, 40 bp, Staphylococcus sciuri; identical to SEQ ID NO: 28448
  source 1..40: mol_type = genomic DNA

SEQ ID NO: 42304 - DNA, 50 bp, Staphylococcus sciuri
  source 1..50: mol_type = genomic DNA
tacctgaccatacaatgtgtacttgaatgaacacgtagtagggtaaggta

SEQ ID NO: 42305 - DNA, 40 bp, Staphylococcus sciuri; identical to SEQ ID NO: 42295
  source 1..40: mol_type = genomic DNA

SEQ ID NO: 42306 - protein, 563 aa, Tissierella praeacuta
MSKVQVIQAQKEKIDRSTGKTINKARVAAYCRVSTDSDEQMNSYQSQVNHYTELIKKNKEWEFIDIYADSGISGTQSNNRDEFQRMISDANNDLIDIIITKSISRFARNTMDTLKYVRMLKDENVSIIFEKENINTLTMNGEMLLTILSSLAQQESESLSANTKMGLKMKMKKGELVGQASCLGYDYDKEEKKLIINEEEAKIVRYIFNRYTSGIGCFVLARELTEMRAKTKKGNTTWSDSSVRGIIKNEKYVGDILMGKTFTLDPISKRRLDNFGEEEKYYIKNNHEPIISREQFNKAKEILEKRSRNHNQGRMKKHSLKYAFSSMMTCAYCGGSITRRRWHSGTDKQKDVWLCTTAIRKGKKSCPECKAVEEKIIENAFVKAFNILCRDNKTIVEEFLENIEKELQSKDNKKLLKQIDGDIRNVENKISKLLDLRLEDQIDKENYEVKYTELKEELQELKTEKEELYIVEDEEKTIKERIASFRKLFESKEPLIEFDREVFKTVVEEVIIGGYKEDGSIDPYMLTFIFKTELASKIDGQKQVGKTKQNTALQKCTYQEDNP

SEQ ID NO: 42307 - DNA, 50 bp, Tissierella praeacuta
  source 1..50: mol_type = genomic DNA
aatgcacctatcaagaggacaacccacgtagagtgcgtggtaggaataca

SEQ ID NO: 42308 - DNA, 40 bp, Tissierella praeacuta
  source 1..40: mol_type = genomic DNA
cattatcatcgcttcaaggcatgttgaagttatcgtgaag

SEQ ID NO: 42309 - DNA, 50 bp, Tissierella praeacuta
  source 1..50: mol_type = genomic DNA
aatgcacctatcaagaggacaaccttcgtagagtgcgtggtaggaataca

SEQ ID NO: 42310 - DNA, 40 bp, Tissierella praeacuta
  source 1..40: mol_type = genomic DNA
catcatcatctcataatggttttctgaagttatcttcaaa

SEQ ID NO: 42311 - protein, 488 aa, Clostridium perfringens; identical to SEQ ID NO: 6331

SEQ ID NO: 42312 - DNA, 50 bp, Clostridium perfringens
  source 1..50: mol_type = genomic DNA
tactataatttgaataaacctcttttaccaagtgtatttaaattatagtg

SEQ ID NO: 42313 - DNA, 40 bp, Clostridium perfringens; identical to SEQ ID NO: 6333
  source 1..40: mol_type = genomic DNA

SEQ ID NO: 42314 - DNA, 50 bp, Clostridium perfringens
  source 1..50: mol_type = genomic DNA
tactataatttgaataaacctcttgaaccaagtgtatttaaattatagtg

SEQ ID NO: 42315 - DNA, 40 bp, Clostridium perfringens
  source 1..40: mol_type = genomic DNA
aattcttgcttttaagcctgaacaaagtttaagagtaacc

SEQ ID NO: 42316 - protein, 532 aa, Vibrio owensii
MSNFNMTPNQPPAKCYSYVRFSTVSQGKEGKDSYIRQTLAAKEYAERMGLEYQDKSFSDLGISGFRSSKKRDGLSSMLEAIQSGAIEPTSTICIDGFDRLSRASFEHTYDTVRLIVGTGVKLHVVQDDMTLDKSSLNDLISIVRLALQSDLAHQESAKKSYLIKQSRLRAREAHRVTGKLPAWIKRDDSTPTGFAFNEMVDCIKELVRLRVEGKSLQSIAKNLNAMGYRTTTGAPWSSAGCRSIIESRALHGSKSYHETDPETGRMLLEPVDIVAGIFPALIDFDVWKSIQQKSKSAPTKVTKVSKKGAYSGLLRCGCCSAGMVMRTTTYTPKESGVPEVRMYRKCIRATEGSCTQTEQVREPETYIDLALSNLKYVTSEKRHVSRVPEIREQIATLEKTEDILLQRGMAEKLADLYMKIDDLKTKLVEAQEEDSKHKVPTEISFAKVIEIKDLEHRNMVLRGLLRGVYFTLLWKYKTQSKWKVTIEQINGLKTTFILSQKHGFGNSHIELLADPLRWTNLVQSDLEPWEVN

SEQ ID NO: 42317 - DNA, 50 bp, Vibrio owensii
  source 1..50: mol_type = genomic DNA
acatatgagactatgtgtagaataaaggttctatacagactctgatacgt

SEQ ID NO: 42318 - DNA, 40 bp, Vibrio owensii
  source 1..40: mol_type = genomic DNA
attcggttggcacgttgttaaggtgttataccgcacttaa

SEQ ID NO: 42319 - DNA, 50 bp, Vibrio owensii
  source 1..50: mol_type = genomic DNA
acatatgagactatgtgtagaatattggttctatacagactctgatacgt

SEQ ID NO: 42320 - DNA, 40 bp, Vibrio owensii
  source 1..40: mol_type = genomic DNA
attctgttgatagtttgttttgctgtgaaacagctcttaa

SEQ ID NO: 42321 - protein, 534 aa, Vibrio owensii
MSNFNMTPNQPPAKCYSYVRFSTVSQGKEGKDSYIRQTLAAKEYAERMGLEYQDKSFSDLGISGFRSSKKRDGLSSMLEAIQSGAIEPTSTICIDGFDRLSRASFEHTYDTVRLIVGTGVKLHVVQDDMTLDKSSLNDLISIVRLALQSDLAHQESAKKSYLIKQSRLRAREAHRVTGKLPAWIKRDDSTPTGFAFNEMVDCIKELVRLRVEGKSLQSIAKNLNAMGYTTTTGAPWSSAGCRSIIESRALHGSKSYHETDPETGRMLLEPVDIVAGIFPALIDFDVWKSIQQKSKSAPTKVTKVSKKGAYSGLLRCGCCSAGMVMRTTTYTPKGSGVPEVRMYRKCIRATEGSCTQTEQVREPETYIDLALSNLKYVTSEKRHVSRVPEIREQIATLEKTEDILLQRGMAEKLADVYIKIDDMKTKLVEAQEEDSKHKVPTETSFAKVIEIKDLEHRNMVLRGLLRGVYFTLLWKYKTQSKWKVTIEQINGLKTTFILSQKHGFGNSHIELLSDPLRWTNLVQSDLQPWELDRD

SEQ ID NO: 42322 - DNA, 50 bp, Vibrio owensii
  source 1..50: mol_type = genomic DNA
acatatgagactctgtgtagaataaaggttctatacagactctgatacgt

SEQ ID NO: 42323 - DNA, 40 bp, Vibrio owensii; identical to SEQ ID NO: 42318
  source 1..40: mol_type = genomic DNA

SEQ ID NO: 42324 - DNA, 50 bp, Vibrio owensii
  source 1..50: mol_type = genomic DNA
acatatgagactctgtgtagaatattggttctatacagactctgatacgt

SEQ ID NO: 42325 - DNA, 40 bp, Vibrio owensii; identical to SEQ ID NO: 42320
  source 1..40: mol_type = genomic DNA

SEQ ID NO: 42326 - protein, 581 aa, Escherichia coli; identical to SEQ ID NO: 1621

SEQ ID NO: 42327 - DNA, 50 bp, Escherichia coli
  source 1..50: mol_type = genomic DNA
aatgtatttcttgattttttgggcagcctaatgatataaatccaatctta

SEQ ID NO: 42328 - DNA, 40 bp, Escherichia coli
  source 1..40: mol_type = genomic DNA
tcaacaaggttttttggacagccaagggaaacaaagccga

SEQ ID NO: 42329 - DNA, 50 bp, Escherichia coli
  source 1..50: mol_type = genomic DNA
aatgtatttcttgattttttgggctccctaatgatataaatccaatctta

SEQ ID NO: 42330 - DNA, 40 bp, Escherichia coli
  source 1..40: mol_type = genomic DNA
tccacaaggatttttggattcctaaggggaaaagagagaa

SEQ ID NO: 42331 - protein, 503 aa, Desulfitobacterium hafniense
MKKLRIRAALYARYSSDNQREESTIAQLRAGREHAKKKDYVIVAEYKDEELTGRNDRRDDFQRMIRDAKRGLFDVVIIHKFNRFARNRYDSAVYKRMLKKAGVRVESVLQPLDDSPESVLLEALLEGMDEYYSLDLGREVMKGMFENADQGIHTGGRPPYGLKVNPETRRYEIDETKYKAVQIYFECRRDGVSRKNIAKKLNDLGYRTQTGKKFTRDSFYGWDTNRKYQGDYVFNVASSKDLDGRRNTNKKKPIEEQVIKKGIIPKILNPKLFGEVNEMIKQRQFKPGQMKAQVNYLLTGKVFCGQCGATYNGNSYRNSKSKDNTILSYYKCSGRCKNASVRKENLERIVIEQLTYHCFSRQAMDNIVVKVKELYDERRKETQADISPIKKEIKNLEATIENWIQALGKGIRGLEERIVEAQNRIALLNEELEHITMLQEETTINDKMIIQLLTEKKDALYSDDENEKKRIIQEYVDKVIINPSDNINTLDVEITYRVFNGGG

SEQ ID NO: 42332 - DNA, 50 bp, Desulfitobacterium hafniense
  source 1..50: mol_type = genomic DNA
tacagggtttttaatggtggaggcgaccttacactatacaaaaccctgca

SEQ ID NO: 42333 - DNA, 40 bp, Desulfitobacterium hafniense
  source 1..40: mol_type = genomic DNA
cgttcattttggtggaggcgaggggaattgcacccctgta

SEQ ID NO: 42334 - DNA, 50 bp, Desulfitobacterium hafniense
  source 1..50: mol_type = genomic DNA
tacagggtttttaatggtggaggcaaccttacactatacaaaaccctgca

SEQ ID NO: 42335 - DNA, 40 bp, Desulfitobacterium hafniense
  source 1..40: mol_type = genomic DNA
tgtttattttagtggaggcaagagaaattgaatttctgtt

SEQ ID NO: 42336 - protein, 475 aa, Streptococcus pneumoniae; identical to SEQ ID NO: 1521

SEQ ID NO: 42337 - DNA, 50 bp, Streptococcus pneumoniae
  source 1..50: mol_type = genomic DNA
ttctgtattttagtcaaagtaattatgataagttagagttagtaacagta

SEQ ID NO: 42338 - DNA, 40 bp, Streptococcus pneumoniae
  source 1..40: mol_type = genomic DNA
agacgttaaacgcccaatcatgataactttattatacata

SEQ ID NO: 42339 - DNA, 50 bp, Streptococcus pneumoniae
  source 1..50: mol_type = genomic DNA
ttctgtattttagtcaaagtaattcagataagttagagttagtaacagta

SEQ ID NO: 42340 - DNA, 40 bp, Streptococcus pneumoniae
  source 1..40: mol_type = genomic DNA
agccattataatcacaagccataaaactttattatacaaa

SEQ ID NO: 42341 - protein, 475 aa, Streptococcus pneumoniae; identical to SEQ ID NO: 1481

SEQ ID NO: 42342 - DNA, 50 bp, Streptococcus pneumoniae; identical to SEQ ID NO: 37457
  source 1..50: mol_type = genomic DNA

SEQ ID NO: 42343 - DNA, 40 bp, Streptococcus pneumoniae; identical to SEQ ID NO: 42338
  source 1..40: mol_type = genomic DNA

SEQ ID NO: 42344 - DNA, 50 bp, Streptococcus pneumoniae; identical to SEQ ID NO: 42339
  source 1..50: mol_type = genomic DNA

SEQ ID NO: 42345 - DNA, 40 bp, Streptococcus pneumoniae; identical to SEQ ID NO: 42340
  source 1..40: mol_type = genomic DNA

SEQ ID NO: 42346 - protein, 475 aa, Streptococcus pneumoniae; identical to SEQ ID NO: 1551

SEQ ID NO: 42347 - DNA, 50 bp, Streptococcus pneumoniae; identical to SEQ ID NO: 42337
  source 1..50: mol_type = genomic DNA

SEQ ID NO: 42348 - DNA, 40 bp, Streptococcus pneumoniae; identical to SEQ ID NO: 42338
  source 1..40: mol_type = genomic DNA

SEQ ID NO: 42349 - DNA, 50 bp, Streptococcus pneumoniae; identical to SEQ ID NO: 42339
  source 1..50: mol_type = genomic DNA

SEQ ID NO: 42350 - DNA, 40 bp, Streptococcus pneumoniae; identical to SEQ ID NO: 42340
  source 1..40: mol_type = genomic DNA

SEQ ID NO: 42351 - protein, 475 aa, Streptococcus pneumoniae; identical to SEQ ID NO: 1486

SEQ ID NO: 42352 - DNA, 50 bp, Streptococcus pneumoniae; identical to SEQ ID NO: 42337
  source 1..50: mol_type = genomic DNA

SEQ ID NO: 42353 - DNA, 40 bp, Streptococcus pneumoniae; identical to SEQ ID NO: 42338
  source 1..40: mol_type = genomic DNA

SEQ ID NO: 42354 - DNA, 50 bp, Streptococcus pneumoniae; identical to SEQ ID NO: 42339
  source 1..50: mol_type = genomic DNA

SEQ ID NO: 42355 - DNA, 40 bp, Streptococcus pneumoniae; identical to SEQ ID NO: 42340
  source 1..40: mol_type = genomic DNA

SEQ ID NO: 42356 - protein, 475 aa, Streptococcus pneumoniae; identical to SEQ ID NO: 1521

SEQ ID NO: 42357 - DNA, 50 bp, Streptococcus pneumoniae; identical to SEQ ID NO: 37457
  source 1..50: mol_type = genomic DNA

SEQ ID NO: 42358 - DNA, 40 bp, Streptococcus pneumoniae; identical to SEQ ID NO: 42338
  source 1..40: mol_type = genomic DNA

SEQ ID NO: 42359 - DNA, 50 bp, Streptococcus pneumoniae; identical to SEQ ID NO: 42339
  source 1..50: mol_type = genomic DNA

SEQ ID NO: 42360 - DNA, 40 bp, Streptococcus pneumoniae; identical to SEQ ID NO: 42340
  source 1..40: mol_type = genomic DNA

SEQ ID NO: 42361 - protein, 475 aa, Streptococcus pneumoniae; identical to SEQ ID NO: 1516

SEQ ID NO: 42362 - DNA, 50 bp, Streptococcus pneumoniae; identical to SEQ ID NO: 42337
  source 1..50: mol_type = genomic DNA

SEQ ID NO: 42363 - DNA, 40 bp, Streptococcus pneumoniae; identical to SEQ ID NO: 42338
  source 1..40: mol_type = genomic DNA

SEQ ID NO: 42364 - DNA, 50 bp, Streptococcus pneumoniae; identical to SEQ ID NO: 42339
  source 1..50: mol_type = genomic DNA

SEQ ID NO: 42365 - DNA, 40 bp, Streptococcus pneumoniae; identical to SEQ ID NO: 42340
  source 1..40: mol_type = genomic DNA

SEQ ID NO: 42366 - protein, 475 aa, Streptococcus pneumoniae; identical to SEQ ID NO: 1481

SEQ ID NO: 42367 - DNA, 50 bp, Streptococcus pneumoniae; identical to SEQ ID NO: 37457
  source 1..50: mol_type = genomic DNA

SEQ ID NO: 42368 - DNA, 40 bp, Streptococcus pneumoniae
  source 1..40: mol_type = genomic DNA
agacgttaaacgcccaatcaagataactttattatacata

SEQ ID NO: 42369 - DNA, 50 bp, Streptococcus pneumoniae; identical to SEQ ID NO: 42339
  source 1..50: mol_type = genomic DNA

SEQ ID NO: 42370 - DNA, 40 bp, Streptococcus pneumoniae; identical to SEQ ID NO: 42340
  source 1..40: mol_type = genomic DNA

SEQ ID NO: 42371 - protein, 475 aa, Streptococcus pneumoniae; identical to SEQ ID NO: 37456

SEQ ID NO: 42372 - DNA, 50 bp, Streptococcus pneumoniae; identical to SEQ ID NO: 37457
  source 1..50: mol_type = genomic DNA

SEQ ID NO: 42373 - DNA, 40 bp, Streptococcus pneumoniae; identical to SEQ ID NO: 42368
  source 1..40: mol_type = genomic DNA

SEQ ID NO: 42374 - DNA, 50 bp, Streptococcus pneumoniae; identical to SEQ ID NO: 42339
  source 1..50: mol_type = genomic DNA

SEQ ID NO: 42375 - DNA, 40 bp, Streptococcus pneumoniae; identical to SEQ ID NO: 42340
  source 1..40: mol_type = genomic DNA

SEQ ID NO: 42376 - protein, 475 aa, Streptococcus pneumoniae; identical to SEQ ID NO: 1501

SEQ ID NO: 42377 - DNA, 50 bp, Streptococcus pneumoniae; identical to SEQ ID NO: 37457
  source 1..50: mol_type = genomic DNA

SEQ ID NO: 42378 - DNA, 40 bp, Streptococcus pneumoniae; identical to SEQ ID NO: 42368
  source 1..40: mol_type = genomic DNA

SEQ ID NO: 42379 - DNA, 50 bp, Streptococcus pneumoniae; identical to SEQ ID NO: 42339
  source 1..50: mol_type = genomic DNA

SEQ ID NO: 42380 - DNA, 40 bp, Streptococcus pneumoniae; identical to SEQ ID NO: 42340
  source 1..40: mol_type = genomic DNA

SEQ ID NO: 42381 - protein, 475 aa, Streptococcus pneumoniae; identical to SEQ ID NO: 1516

SEQ ID NO: 42382 - DNA, 50 bp, Streptococcus pneumoniae; identical to SEQ ID NO: 37457
  source 1..50: mol_type = genomic DNA

SEQ ID NO: 42383 - DNA, 40 bp, Streptococcus pneumoniae; identical to SEQ ID NO: 42368
  source 1..40: mol_type = genomic DNA

SEQ ID NO: 42384 - DNA, 50 bp, Streptococcus pneumoniae; identical to SEQ ID NO: 42339
  source 1..50: mol_type = genomic DNA

SEQ ID NO: 42385 - DNA, 40 bp, Streptococcus pneumoniae; identical to SEQ ID NO: 42340
  source 1..40: mol_type = genomic DNA

SEQ ID NO: 42386 - protein, 475 aa, Streptococcus pneumoniae; identical to SEQ ID NO: 1481

SEQ ID NO: 42387 - DNA, 50 bp, Streptococcus pneumoniae; identical to SEQ ID NO: 42337
  source 1..50: mol_type = genomic DNA

SEQ ID NO: 42388 - DNA, 40 bp, Streptococcus pneumoniae; identical to SEQ ID NO: 42368
  source 1..40: mol_type = genomic DNA

SEQ ID NO: 42389 - DNA, 50 bp, Streptococcus pneumoniae; identical to SEQ ID NO: 42339
  source 1..50: mol_type = genomic DNA

SEQ ID NO: 42390 - DNA, 40 bp, Streptococcus pneumoniae; identical to SEQ ID NO: 42340
  source 1..40: mol_type = genomic DNA

SEQ ID NO: 42391 - protein, 475 aa, Streptococcus pneumoniae
MKTTNKVAIYVRVSTTSQVEEGYSIDEQKDKLEAYCKIKDWKIYDVYVDGGFSGANTQRPELERLISDVKRKKVDIVLVYKLDRLSRSQKDTLFLIEDVFAKNDVAFISLQENFDTSTPFGKASIGMLSVFAQLEREQIKERMMLGKEGRAKNGKSMSWTTIPFGYDYSKETGVLSVNPTQALIVNRIFTEYLNGKPVVKIIRDLNAEGHVGRKRPWGETITKYLLKNETYLGKVKYKDKVYEGQHEPIITQELFDLVQLEVERRQISAYEKYNNPRPFRAKYMLSGLMKCGYCGASLGLRYTRKDKNGISHHKYQCRNRHSKDLEKRCESGWYSKEELERGVIKELERIKFDPKYKNETLAKKEETIKVEEIKKQLERINNQVSKLTELYLDEIITRKELDEKNDKIKTERQFLEEQLKNQKSNVLSIRKRKLTRLLKDFDVEKLSYEDASKIVKNIIKEIIVTKDGMSITLDF

SEQ ID NO: 42392 - DNA, 50 bp, Streptococcus pneumoniae; identical to SEQ ID NO: 42337
  source 1..50: mol_type = genomic DNA

SEQ ID NO: 42393 - DNA, 40 bp, Streptococcus pneumoniae; identical to SEQ ID NO: 42368
  source 1..40: mol_type = genomic DNA

SEQ ID NO: 42394 - DNA, 50 bp, Streptococcus pneumoniae; identical to SEQ ID NO: 42339
  source 1..50: mol_type = genomic DNA

SEQ ID NO: 42395 - DNA, 40 bp, Streptococcus pneumoniae; identical to SEQ ID NO: 42340
  source 1..40: mol_type = genomic DNA

SEQ ID NO: 42396 - protein, 475 aa, Streptococcus pneumoniae; identical to SEQ ID NO: 1516

SEQ ID NO: 42397 - DNA, 50 bp, Streptococcus pneumoniae; identical to SEQ ID NO: 42337
  source 1..50: mol_type = genomic DNA

SEQ ID NO: 42398 - DNA, 40 bp, Streptococcus pneumoniae; identical to SEQ ID NO: 42368
  source 1..40: mol_type = genomic DNA

SEQ ID NO: 42399 - DNA, 50 bp, Streptococcus pneumoniae; identical to SEQ ID NO: 42339
  source 1..50: mol_type = genomic DNA

SEQ ID NO: 42400 - DNA, 40 bp, Streptococcus pneumoniae; identical to SEQ ID NO: 42340
  source 1..40: mol_type = genomic DNA

SEQ ID NO: 42401 - protein, 475 aa, Streptococcus pneumoniae; identical to SEQ ID NO: 1476

SEQ ID NO: 42402 - DNA, 50 bp, Streptococcus pneumoniae; identical to SEQ ID NO: 37457
  source 1..50: mol_type = genomic DNA

SEQ ID NO: 42403 - DNA, 40 bp, Streptococcus pneumoniae; identical to SEQ ID NO: 42368
  source 1..40: mol_type = genomic DNA

SEQ ID NO: 42404 - DNA, 50 bp, Streptococcus pneumoniae; identical to SEQ ID NO: 42339
  source 1..50: mol_type = genomic DNA

SEQ ID NO: 42405 - DNA, 40 bp, Streptococcus pneumoniae; identical to SEQ ID NO: 42340
  source 1..40: mol_type = genomic DNA

SEQ ID NO: 42406 - protein, 475 aa, Streptococcus pneumoniae; identical to SEQ ID NO: 1486

SEQ ID NO: 42407 - DNA, 50 bp, Streptococcus pneumoniae; identical to SEQ ID NO: 37457
  source 1..50: mol_type = genomic DNA

SEQ ID NO: 42408 - DNA, 40 bp, Streptococcus pneumoniae; identical to SEQ ID NO: 42368
  source 1..40: mol_type = genomic DNA

SEQ ID NO: 42409 - DNA, 50 bp, Streptococcus pneumoniae; identical to SEQ ID NO: 42339
  source 1..50: mol_type = genomic DNA

SEQ ID NO: 42410 - DNA, 40 bp, Streptococcus pneumoniae; identical to SEQ ID NO: 42340
  source 1..40: mol_type = genomic DNA

SEQ ID NO: 42411 - protein, 475 aa, Streptococcus pneumoniae; identical to SEQ ID NO: 1476

SEQ ID NO: 42412 - DNA, 50 bp, Streptococcus pneumoniae; identical to SEQ ID NO: 42337
  source 1..50: mol_type = genomic DNA

SEQ ID NO: 42413 - DNA, 40 bp, Streptococcus pneumoniae; identical to SEQ ID NO: 42338
  source 1..40: mol_type = genomic DNA

SEQ ID NO: 42414 - DNA, 50 bp, Streptococcus pneumoniae; identical to SEQ ID NO: 42339
  source 1..50: mol_type = genomic DNA

SEQ ID NO: 42415 - DNA, 40 bp, Streptococcus pneumoniae; identical to SEQ ID NO: 42340
  source 1..40: mol_type = genomic DNA

SEQ ID NO: 42416 - protein, 475 aa, Streptococcus pneumoniae
MKTTNKVAIYVRVSTTSQVEEGYSIDEQKDKLEAYCKIKDWKIYDVYVDGGFSGANTQRPELERLISDVKRKKVDIVLVYKLDRLSRSQKDTLFLIEDVFAKNDVAFISLQENFDTSTPFGKASIGMLSVFAQLEREQIKERMMLGKEGRAKTGKSMSWTTIPFGYDYSKETGVLSVNPTQALIVNRIFTEYLNGKPVVKIIRDLNAEGHVGRKRPWGETITKYLLKNETYLGKVKYKDKVYEGQHEPIITQELFDLVQLEVERRQISAYEKYNNPRPFRAKYMLSGLMKCGYCGASLGLRYTRKDKNGISHHKYQCRNRHSKDLEKRCESGWYSKEELERIVIKELERIKFDPKYKNETLAKKEETIKVEEIKKQLERINNQVSKLTELYLDEIITRKELDEKNDKIKTERQFLEEQLENQKSNVLSIRKRKLTRLLKDFDVEKLSYEDASKIVKNIIKEIIVTKDGMSITLDF

SEQ ID NO: 42417 - DNA, 50 bp, Streptococcus pneumoniae; identical to SEQ ID NO: 42337
  source 1..50: mol_type = genomic DNA

SEQ ID NO: 42418 - DNA, 40 bp, Streptococcus pneumoniae; identical to SEQ ID NO: 42338
  source 1..40: mol_type = genomic DNA

SEQ ID NO: 42419 - DNA, 50 bp, Streptococcus pneumoniae; identical to SEQ ID NO: 42339
  source 1..50: mol_type = genomic DNA

SEQ ID NO: 42420 - DNA, 40 bp, Streptococcus pneumoniae; identical to SEQ ID NO: 42340
  source 1..40: mol_type = genomic DNA

SEQ ID NO: 42421 - protein, 475 aa, Streptococcus pneumoniae; identical to SEQ ID NO: 1481

SEQ ID NO: 42422 - DNA, 50 bp, Streptococcus pneumoniae; identical to SEQ ID NO: 42337
  source 1..50: mol_type = genomic DNA

SEQ ID NO: 42423 - DNA, 40 bp, Streptococcus pneumoniae; identical to SEQ ID NO: 42338
  source 1..40: mol_type = genomic DNA

SEQ ID NO: 42424 - DNA, 50 bp, Streptococcus pneumoniae; identical to SEQ ID NO: 42339
  source 1..50: mol_type = genomic DNA

SEQ ID NO: 42425 - DNA, 40 bp, Streptococcus pneumoniae; identical to SEQ ID NO: 42340
  source 1..40: mol_type = genomic DNA

SEQ ID NO: 42426 - protein, 475 aa, Streptococcus pneumoniae; identical to SEQ ID NO: 1486

SEQ ID NO: 42427 - DNA, 50 bp, Streptococcus pneumoniae
  source 1..50: mol_type = genomic DNA
ttctgtattttagtcaaagtaattatgataagttagaattagtaacagta

SEQ ID NO: 42428 - DNA, 40 bp, Streptococcus pneumoniae; identical to SEQ ID NO: 42338
  source 1..40: mol_type = genomic DNA

SEQ ID NO: 42429 - DNA, 50 bp, Streptococcus pneumoniae
  source 1..50: mol_type = genomic DNA
ttctgtattttagtcaaagtaattcagataagttagaattagtaacagta

SEQ ID NO: 42430 - DNA, 40 bp, Streptococcus pneumoniae; identical to SEQ ID NO: 42340
  source 1..40: mol_type = genomic DNA

SEQ ID NO: 42431 - protein, 535 aa, Eubacterium rectale
MSKKQFVQNDNNMAIAYYRFSSHAQNEQSIDQQRELAEKYAEEHGLTIVKEYPDEALSGRDDTRPQYQLMLSEIKTIKPAVLILWKTDRLGRDRYDLLIAKKIIRDAGCSIECVAEPFLDPNDPTSIFIEGMLDAQAEYYSANLTQNVMRGLNFNAKNCYYNGVKVFGYTTEDLPITGKGGRHKKVYALDPVTSPVVRRVFEDFAKGKPLQEIIDDLNNQGLRTTKGGLFNPNGLRHILMNRMYLGEYHYGGVVVPDGVPRIIPDDLFEEVQKRFVLNKHKPKAPEARNLEATEPRFWLTGKLFCGECKESMQGISGTSKSGRIHYYYVCKNHRKHKCKLKPVRKEFIEWTVIEILREFLSDQGNLASLAVDVSEYAKRMHSDDTYLKSLQAELAQAKKEIKNIVDAIKQGLVSKALQESLTELETKQDALSDAIDTEKAKLALANNDYGIKHYFEMYAKADFEDDETRRLIFEYFIDKIYVFEDKLIVDMFYSENHVEVSLDAFLASEEYAKESIKDLKFNKGAVFDQNADRST

SEQ ID NO: 42432 - DNA, 50 bp, Eubacterium rectale
  source 1..50: mol_type = genomic DNA
tgttcgaccaaaatgcggaccgctccactataccgtgttttgacgaacac

SEQ ID NO: 42433 - DNA, 40 bp, Eubacterium rectale
  source 1..40: mol_type = genomic DNA
ggttcgactcccgtctagtccactaattcaaatccaattg

SEQ ID NO: 42434 - DNA, 50 bp, Eubacterium rectale
  source 1..50: mol_type = genomic DNA
tgttcgaccaaaatgcggaccgctagactataccgtgttttgacgaacac

SEQ ID NO: 42435 - DNA, 40 bp, Eubacterium rectale
  source 1..40: mol_type = genomic DNA
gctccctcacccctctagtagactaattctaaaccatatg

SEQ ID NO: 42436 - protein, 582 aa, Streptococcus cristatus
MSNNVEIIKANPLVTRRNDNSGSLSRRVAAYCRVSSDSDDQKNSYDSQVRHYREYISQHQDWILVDIYADEGISGTQVGKRQDFQRLISDCLDGKIDYIITKAIARFARNTLDTLKYVRLLKDKQIGVFFEEENIDTLTMDGELLLTILSSVAQQEVENTSAHVKKGLKMKMQRGELIGFQGCLGYDYNQDTKSISINEKEAKIVRYIFERYIDGIGGRAIARELDELGYKTPRGLDHWQDTTVLGIIKNEKYKGDILMGKTFTVDPISKRRLINFGEEDKYYIKNNHDAIISPEIFTQAQEIRLRRSGNKKTIANIKGKRERYSRMYPFSSRLECGFCGTVLSRRSWHSSSEYKKIIWHCTTSIKRGKKYCTHSKGIEEKAIENAFLQSYQQLFYENNNLTEDFLEIIKEELTDDTLKVELTKIVSKLNSLYKKEEKLVSMNLDGKISDSVYEDKFNQIQIEKEKLLEEKVNLEVTLKSEVDIKSRLENFKEILTSQKTLTEFDKDIFESIVEKIIVGGINSDGEIDPAMLTIIFKTGDSSTKDAKSYKSKRKNAKIDNDKLCFNSVTDEEKKCTNKENNA

SEQ ID NO: 42437 - DNA, 50 bp, Streptococcus cristatus
  source 1..50: mol_type = genomic DNA
agtgtacaaataaagaaaacaacgcacgtggagtgtgtagtgttgctaca

SEQ ID NO: 42438 - DNA, 40 bp, Streptococcus cristatus
  source 1..40: mol_type = genomic DNA
tttatttccgcagacgcatcatgttgaggcggtagcactg

SEQ ID NO: 42439 - DNA, 50 bp, Streptococcus cristatus
  source 1..50: mol_type = genomic DNA
agtgtacaaataaagaaaacaacgaacgtggagtgtgtagtgttgctaca

SEQ ID NO: 42440 - DNA, 40 bp, Streptococcus cristatus
  source 1..40: mol_type = genomic DNA
tgtattcccacctacccagaaggttgaggcgggaggactg

SEQ ID NO: 42441 - protein, 514 aa, Vibrio vulnificus
MKAYIYSRISSAIQKKGHGLDRQQDIALTYATQLGFDISEEVLQDVASGYHGKQMEGRLGVFLEGIKRGKIESPAALIVESLDRLGREHTMDALPRFIDIVNHGVEIHEVSTGIVYNREETHKIHIAIAIMERAHNESLMKSKRARAAANKRLQRAQQGENVVINVNLPCWIRSQDGKLELVPEYAVVIRRIFELYLEGKGSNKVAQILREENHPYFTSNIHSKKIRSRVWTDQRVMDIIKKDSTCGVFRSTANPDTVIDGYYPAAIDKATFERAQVLRMSRVRTAKKSKKGLNILSGLLRCGHCGSSLQYTRSYSNKKKTRMYENLRCRDRAARMNCDSRSVPLRPLEKLILGWVGTIPLFDIKAASNDELEQKKAELTQLEQQAENLVELLATGLTRVKDKYLQLEQQIDSAKKEISSLSVTNSSSIDKIDYFQAIDLENEEYREQVQQELALIIDRVSVKCDGEDAEIDIYLNSRIHNHQRFIGKKKQLDKARQTMRTLRPSAAHVDSFVE

SEQ ID NO: 42442 - DNA, 50 bp, Vibrio vulnificus
  source 1..50: mol_type = genomic DNA
tacagtggtttacattggaacagcatgctgttagcatgtataccacagtt

SEQ ID NO: 42443 - DNA, 40 bp, Vibrio vulnificus
  source 1..40: mol_type = genomic DNA
taaagtccattatcatggcatgcttacggatggaactgta

SEQ ID NO: 42444 - DNA, 50 bp, Vibrio vulnificus
  source 1..50: mol_type = genomic DNA
tacagtggtttacattggaacagccagctgttagcatgtataccacagtt

SEQ ID NO: 42445 - DNA, 40 bp, Vibrio vulnificus
  source 1..40: mol_type = genomic DNA
tagagttcattataattgccagtttatcgattgatctata

SEQ ID NO: 42446 - protein, 503 aa, Clostridium intestinale
MLRIAIYSRKSVYREQSISIESQIELCKKYFEGKECSFEIFEDEGFSGGNTSRPSFQRMMNKIKSKLFDVVAVYKIDRMSRNLLDFWDTYSLISRHGVQFISISENINTTTTIGQMIMLQYAGMAALERDNIKQRVKDSMESLGRMGRWSGGTPPTGYRVIEVEQHGKKAKYLELDEAIAPMIERMFKLYSTGSTIYEIQKALNVPNKTILNILRNPVYCESDYVSAKYLELQGYSVYGEINGNGYLPYNRRQRKDGKKETKSKDQLVSVSKHKAIIDSKLWVNVQEKLNEKASDPKPRISDKTFLAHLVKCKCGSGMFVYPGKTKKDGSTVIYFRCSGKKNGSECNSKFLRADFVEKKVLESLSNIELDKSLFNTSDMNKYDSQIKNLNKNLAKNKKMIDNLLNRLALASDDIAKSILDKVEDINSENKNLEFKLLELERLNLESMNTKNNKEAFYAQVKSILDTFDTLPVSEQQKMISTIIKNVVWDSDTKKIRLEIFEGI

SEQ ID NO: 42447 - DNA, 50 bp, Clostridium intestinale
  source 1..50: mol_type = genomic DNA
tgaaggtatttagtctgggctgtacagccagtccagtttaaattacagta

SEQ ID NO: 42448 - DNA, 40 bp, Clostridium intestinale
  source 1..40: mol_type = genomic DNA
agctgtaatagcagctgcgcagccagcccatccaccgcca

SEQ ID NO: 42449 - DNA, 50 bp, Clostridium intestinale
  source 1..50: mol_type = genomic DNA
tgaaggtatttagtctgggctgtactgccagtccagtttaaattacagta

SEQ ID NO: 42450 - DNA, 40 bp, Clostridium intestinale
  source 1..40: mol_type = genomic DNA
agctgcagccgcagcagatctgccagcccctccaccgctg

SEQ ID NO: 42451 - protein, 417 aa, Ruminococcus lactaris
MIMYTLDRFARNRYDSAIYKAKLKRNGVKIFYAKQPMPDTPEGIILESVLEGYAEYYSENLARSIKRGMKENALHGIAMGSPVLGYKIGNDRQYEIDPVGAKAVRTIFTMYAEGKSKTQIVNWLNEHGFKTSRGNAFNKNSLSRILRNDKYIGVYRYDDVVLEDAVPPIIDKTLFDKVQATFRHNYTARAKAKAIEDYLLTTKVFCGHCGEPMVGESGTSKTGKVHHYYKCVNRKRKHNCEKKVEKKEWLERIVVEFTVQQVLTDENIEKISTRAMELIEKELQDTSVLIGLQERLKETNKRIKNLMSAIEQGIITPTTKERLEELEEERRDLEGQIAREEMKKPLLTKERIMYWLESFKRGDIEDVEYQRRIIDTLVNSVYVYDDGDKGRKLVLTFNISGNNTLTISSSDIERTAP

SEQ ID NO: 42452 - DNA, 50 bp, Ruminococcus lactaris
  source 1..50: mol_type = genomic DNA
ttcggatattgagcgcacagctccaccaaatagtgcaaatccgaactcat

SEQ ID NO: 42453 - DNA, 40 bp, Ruminococcus lactaris
  source 1..40: mol_type = genomic DNA
ttcgactctcgtattctccactttaaagaatccggattca

SEQ ID NO: 42454 - DNA, 50 bp, Ruminococcus lactaris
  source 1..50: mol_type = genomic DNA
ttcggatattgagcgcacagctccgacaaatagtgcaaatccgaactcat

SEQ ID NO: 42455 - DNA, 40 bp, Ruminococcus lactaris
  source 1..40: mol_type = genomic DNA
ttctactttcttgatgtcagatttagataatccagattca

SEQ ID NO: 42456 - protein, 497 aa, Anaerostipes caccae
MDAIYARQSIDKKDSISIETQINFCKRESTSPDGYKIFRDKGFSGKNMKRPDFQRMLTEIRSGIIKRVIVYKMDRFSRSILDFSETWNILQEFGVEFISMNEKFDTTTPMGRAMLYIIMVFAQLERETISERCTDNYYERIKNGVWPGGPAPFGFKNAEIINEGYRMSTLNSDSDLEIMIDNFQEYEKEGMSLGKLAKKRTQQNLKTNKDIVWNNISLSRLFRNPVYVKADILVYMYLKEKGYSFSNPVEEWDGTKAAHVVGKKQYISNGNRINTKAPRQTVSLLNIPGTIDSSLWLACNRKLDHNAQIKNSGAGKHTWLTGLIKCGQCGYALRITTYKNKENKIMKYLMCSGHSNLHCCDVKKFDLLVEDLEELVAEELNKAIEETKVEQIEMTDQTMDNDKKIRLAEIEEKIDRLIQAISEASDITMKYLNKEIEKLDSEKKQIMGNLEGHVQKRDRIKPIVFSELDFEGKKQIAQNYIRKILVYKDKMDIIWKV

SEQ ID NO: 42457 - DNA, 50 bp, Anaerostipes caccae
  source 1..50: mol_type = genomic DNA
tttttttaatctgtatggtcacaggatacggaccatacaaattaaaacag

SEQ ID NO: 42458 - DNA, 40 bp, Anaerostipes caccae
  source 1..40: mol_type = genomic DNA
agtcattcagtggtccgttgacagcctggactggaaagac

SEQ ID NO: 42459 - DNA, 50 bp, Anaerostipes caccae
  source 1..50: mol_type = genomic DNA
tttttttaatctgtatggtcacagcttacggaccatacaaattaaaacag

SEQ ID NO: 42460 - DNA, 40 bp, Anaerostipes caccae
  source 1..40: mol_type = genomic DNA
atgccttcagtgggtgattctctgcctggtctgcaaagac

SEQ ID NO: 42461 - protein, 562 aa, Pseudomonas simiae
MGKVFSYIRFSSAKQSAGDSYARQVRAAKTFCDDNDLELADPREYLFFDAGRSAFKGKHLDDTGELARFLSFVEDGTIPPGSYLVVESLDRLSRERVRDALPRFLDLLAKGINVYTSVDKRLYTRDYNELDLIISIISMSRAHEESATKGGRVSSAWRAKQKDARTTGKPLGKLRPLWLDVTPDRYVLNPDKAAIVRRIFDLSTKGHGSRIIAATLNQEGIPAFSTGRKNFSGLWGFSTVRHILDSRTTLGEYQPHIFIDGKRTPDGEPIKGYFPAVVTEDEFYLAHAARSSRKTHTVTKTTTNFNVLTGILNCYKCGAAMHLQGQRGRKYYKCSKATRGLCDAGIISAPRTEEVFKEMLPKVDSLSLVQDSSGRLQKSLQVVEGRIASLKARQNDAEASHAEFPSRITAKLLHELEAEIGALESERATISEQLASDKVMNKDDFFQKLDLVSFEGRVAANNLIKRLGLYIFVNKNGRTDETYWISKNNAIPLPFSSESPNLLFYLMHRGKEIRFEAMYDEYVDLQVAQDELSEVEAIFAKTESWDELPPELLALWKARHGV

SEQ ID NO: 42462 - DNA, 50 bp, Pseudomonas simiae
  source 1..50: mol_type = genomic DNA
ggtaggtatttgtggcagaaattcaagaagtgttgttacaattacctacc

SEQ ID NO: 42463 - DNA, 40 bp, Pseudomonas simiae; identical to SEQ ID NO: 34698
  source 1..40: mol_type = genomic DNA

SEQ ID NO: 42464 - DNA, 50 bp, Pseudomonas simiae
  source 1..50: mol_type = genomic DNA
ggtaggtatttgtggcagaaattctagaagtgttgttacaattacctacc

SEQ ID NO: 42465 - DNA, 40 bp, Pseudomonas simiae
  source 1..40: mol_type = genomic DNA
gggtagtgagcagagattttagaagtgctgttttctcaac

SEQ ID NO: 42466 - protein, 461 aa, Staphylococcus pseudintermedius
MKVAIYTRVSTHEQSLHGFSIEEQERKLKQFCEFNDWKVYKIYTDAGYSGAKRDRPALNQLIQDVDKLDLVLVYKLDRLTRSVRDLLDILEILEKNDVSFRSATEVYDTSTAMGRLFVTLVGAMAEWERTTIQERTFMGRRAAAQKGLIKTTPPFFYDRVDNKFIPNEYSKVLRFAVDEIKKGTSLREITIKLNNSNYKPPIGNRWHRSVLRNALKSPVARGHYYFSDVFVENTHEPIISDEEYEEIRERISERTNSVVVRHTSVFRGKLVCPVCGNRCTLNTNKHVTQKRGTWYSKHYYCDRCKCDKSVENFNFSEEEVLKQFYTYISNFDLTNYEVEMAEEEEPEIEIDIDKINEERKRYHILFAKGLMREDELTPLIKDLDDMVAAYNKQIKENKIKVYDYEQIKNFKYSLLEGWERMDLELKAEFIKRAIKSIKIEYIKGVRGKRPNSINILDVDFY

SEQ ID NO: 42467 - DNA, 50 bp, Staphylococcus pseudintermedius
  source 1..50: mol_type = genomic DNA
aattgggggtatgtcttacttattagcgtacctatttcgcacccccaata

SEQ ID NO: 42468 - DNA, 40 bp, Staphylococcus pseudintermedius
  source 1..40: mol_type = genomic DNA
taaaggcggcgttccaataagcgtacccaagcccccaata

SEQ ID NO: 42469 - DNA, 50 bp, Staphylococcus pseudintermedius
  source 1..50: mol_type = genomic DNA
aattgggggtatgtcttacttattcccgtacctatttcgcacccccaata

SEQ ID NO: 42470 - DNA, 40 bp, Staphylococcus pseudintermedius
  source 1..40: mol_type = genomic DNA
taagagcagggttccaattcccaaatccatgcccccaaaa

SEQ ID NO: 42471 - protein, 461 aa, Staphylococcus pseudintermedius
MKVAIYTRVSTHEQSLHGFSIEEQERKLKQFCEFNDWKVYKVYTDAGYSGAKKERPALNQLIQDVDKLDLVLVYKLDRLTRSVRDLLDILEVLEKNDVSFRSATEVYDTSTAMGRLFVTLVGAMAEWERTTIQERTFMGRRAAAQKGLVKTTPPFYYDRVDDKFVPNEYSKVLRFAVDEIKKGTSLREITIKLNNSNYKAPIGNRWHRSVLRNALKSPVARGHYCFSDVFIENTHEPIITDAEYEEIKERISERTNSVVVRHISAFRGKLVCPTCGNRCTLNTNKHVTQKKGTWYSKHYYCDRCKYDKSVENFSFSEEEALKQFYTYISNFDLTNYEIEMNEEKEPEIEIDIDKINEERKRYHILFAKGLMREDELEPLIKDLDDMVVVYNKQKKEDDRKVYDYEQIKDFKYSLLDGWERMDLELKAEFIKRAIKSIKIEYVKGIRGKKPNSINILDVDFY

SEQ ID NO: 42472 - DNA, 50 bp, Staphylococcus pseudintermedius
  source 1..50: mol_type = genomic DNA
aatcgggggtatgttttaccaattagcaaacatattacagacccccattt

SEQ ID NO: 42473 - DNA, 40 bp, Staphylococcus pseudintermedius; identical to SEQ ID NO: 42468
  source 1..40: mol_type = genomic DNA

SEQ ID NO: 42474 - DNA, 50 bp, Staphylococcus pseudintermedius
  source 1..50: mol_type = genomic DNA
aatcgggggtatgttttaccaattcccaaacatattacagacccccattt

SEQ ID NO: 42475 - DNA, 40 bp, Staphylococcus pseudintermedius; identical to SEQ ID NO: 42470
  source 1..40: mol_type = genomic DNA

SEQ ID NO: 42476 - protein, 461 aa, Staphylococcus pseudintermedius; identical to SEQ ID NO: 42466

SEQ ID NO: 42477 - DNA, 50 bp, Staphylococcus pseudintermedius; identical to SEQ ID NO: 42467
  source 1..50: mol_type = genomic DNA

SEQ ID NO: 42478 - DNA, 40 bp, Staphylococcus pseudintermedius; identical to SEQ ID NO: 27863
  source 1..40: mol_type = genomic DNA

SEQ ID NO: 42479 - DNA, 50 bp, Staphylococcus pseudintermedius; identical to SEQ ID NO: 42469
  source 1..50: mol_type = genomic DNA

SEQ ID NO: 42480 - DNA, 40 bp, Staphylococcus pseudintermedius; identical to SEQ ID NO: 42470
  source 1..40: mol_type = genomic DNA

SEQ ID NO: 42481 - protein, 461 aa, Staphylococcus pseudintermedius
MKVAIYTRVSTHEQSLHGFSIEEQERKLKQFCEFNDWKVYKIYTDAGYSGAKRDRPALNQLIQDVDKLDLVLVYKLDRLTRSVRDLLDILEILEKNDVSFRSATEVYDTSTAMGRLFVTLVGAMAEWERTTIQERTFMGRRAAAQKGLIKTTPPFFYDRVDNKFIPNEYSKVLRFAVDEIKKGTSLREITIKLNNSNYKPPIGNRWHRSVLRNALKSPVARGHYYFSDVFVENTHEPIISDEEYEEIRERISERTNSVVVRHTSVFRGKLVCPVCGNRCTLNTNKHVTQKRGTWYSKHYYCDRCKCDKSVENFNFSEEEVLKQFYTYISNFDLTNYEVEMAEEEEPEIEIDIDKINEERKRYHILFAKGLMREDELTPLIKDLDDMVAAYNKQIKENKIKVYDYEQIKNFKYSLLEGWERMELELKAEFIKRAIKSIKIEYIKGVRGKRPNSINILDVDFY

SEQ ID NO: 42482 - DNA, 50 bp, Staphylococcus pseudintermedius
  source 1..50: mol_type = genomic DNA
aattgggggtatgtcttacttattagcgtacctatttcgtacccccaata

SEQ ID NO: 42483 - DNA, 40 bp, Staphylococcus pseudintermedius; identical to SEQ ID NO: 42468
  source 1..40: mol_type = genomic DNA

SEQ ID NO: 42484 - DNA, 50 bp, Staphylococcus pseudintermedius
  source 1..50: mol_type = genomic DNA
aattgggggtatgtcttacttattcccgtacctatttcgtacccccaata

SEQ ID NO: 42485 - DNA, 40 bp, Staphylococcus pseudintermedius; identical to SEQ ID NO: 42470
  source 1..40: mol_type = genomic DNA

SEQ ID NO: 42486 - protein, 579 aa, Phocea massiliensis
MTNSQNLGTIEATNPVLAVAPLKEETEMLRATDKITALYCRLSVEDMKEDKKGGKEDVSNSIQNQKMILLQYAKENRFPNPTFFVDDGYSGTNYDRPGFQAMLAEIEAGRVAVCITKDLSRLGRNSSLTGLYINFTFPKYNVRYIAINDHFDTIDPNSTDSDIAGIKNWFNEFFAKDTSRKIRAVQKAKGERGVPLTTNVPFGYLKDPADKTKWIVDEAAAMVVRRIFKLCMEGRGPMQIAKLLQEEKVLNPTAYKRRAGIKTPSPETDVPYHWNTNTVVHILERREYTGCTVNFKTYTNSIWDKKQRETPLDKQAVFYNTHPAIIEQEVFDKVQEIRQQRHRRTKTGKSSLFSGVVYCADCGAKMRYCTTNYFEKRQDHFVCANYRSNTGSCSAHFIRAVVLEDLVWMHMKAVIFYVTRYENHFRAVMEHKLLLSSEEKICASVKRLEQAQRRMGELDRLFIRIYEDNVAGRINDERFSMMSRSYETEQEQLKVEIQTLQQDIEVQERQIENLEQFIQRVHKYKDLDELTPYALRELVKGVYIEAPDKSSGKRRQNIRISYDLVGFIPLNELMKEETA

SEQ ID NO: 42487 - DNA, 50 bp, Phocea massiliensis
  source 1..50: mol_type = genomic DNA
ttactttcttacgacccccgaccattacacgggtgctcataagaaagtaa

SEQ ID NO: 42488 - DNA, 40 bp, Phocea massiliensis
  source 1..40: mol_type = genomic DNA
agagaaagagccccggtttttacgaggggccattttggag

SEQ ID NO: 42489 - DNA, 50 bp, Phocea massiliensis
  source 1..50: mol_type = genomic DNA
ttactttcttacgacccccgaccaaaacacgggtgctcataagaaagtaa

SEQ ID NO: 42490 - DNA, 40 bp, Phocea massiliensis
  source 1..40: mol_type = genomic DNA
agagaaagggctccagttaaaactagtggccagctgtgag

SEQ ID NO: 42491 - protein, 485 aa, Bacillus pseudomycoides
MIKLKYAVYVRVSTDRDEQESSVENQIDICRYWLEKNGYEWNQSSVYFDDGISGTAWLERHAMQLILEKARKKELDTVVFKSIHRLARDLKDALEIKEILLGHGIRLVTIEENYDSLYEGKNDMKFEMYAMFASQLPKTLSVSISAALTAKVRRGEHTGKIPFGYDRVDKKLVINQDEATIVKKIFDLYEKGTGYKTIAKYLNEQGTRTKTGNIWSAPTVKSILVNSLYKGESIMNKYSTVKIDGRKKRIKNPMEKWTVLENHHPEIISNTQWSRVNNVDKLRQNKTKVDKRNEFRGMMYCAHCGTAIRAVYSGKYTKGEKREWVYMKCARYKRYGTCVNHEPIQYHDIRQVILSMLKEKEKYVDIQLSPQNGDRNQEKIKTIKREIKQLKSKKDKLIELYIEELIGREVFSKRDARLDNDIKEKELQLIKLNDIKAQTEEKKEVKKAFSLLHEKQDLYEVFNILINRITLYQNKKLQIEYTFGV

SEQ ID NO: 42492 - DNA, 50 bp, Bacillus pseudomycoides
  source 1..50: mol_type = genomic DNA
cgttagttattggtatgaatctcacatgatatccatattaataactaacc

SEQ ID NO: 42493 - DNA, 40 bp, Bacillus pseudomycoides
  source 1..40: mol_type = genomic DNA
aggtggtgttaatacaacacacgacacattaacaccgatt

SEQ ID NO: 42494 - DNA, 50 bp, Bacillus pseudomycoides
  source 1..50: mol_type = genomic DNA
cgttagttattggtatgaatctcaggtgatatccatattaataactaacc

SEQ ID NO: 42495 - DNA, 40 bp, Bacillus pseudomycoides
  source 1..40: mol_type = genomic DNA
agatggttttaatcaaaaaggctagacaataacaaggatt

SEQ ID NO: 42496 - protein, 502 aa, Mediterraneibacter faecis; identical to SEQ ID NO: 3516

SEQ ID NO: 42497 - DNA, 50 bp, Mediterraneibacter faecis; identical to SEQ ID NO: 14317
  source 1..50: mol_type = genomic DNA

SEQ ID NO: 42498 - DNA, 40 bp, Mediterraneibacter faecis
  source 1..40: mol_type = genomic DNA
gctaatgctacaccgatgcttcccattgttttaatacaaa

SEQ ID NO: 42499 - DNA, 50 bp, Mediterraneibacter faecis
  source 1..50: mol_type = genomic DNA
tttgtaccccttgtacaccgatgctagcaacggtgtacaaagggaacata

SEQ ID NO: 42500 - DNA, 40 bp, Mediterraneibacter faecis
  source 1..40: mol_type = genomic DNA
tttaagtcttctccaatactacccattgtttaaatccaaa

SEQ ID NO: 42501 - protein, 515 aa, Bacillus cereus; identical to SEQ ID NO: 26551

SEQ ID NO: 42502 - DNA, 50 bp, Bacillus cereus
  source 1..50: mol_type = genomic DNA
gtcaccttgttggtgtaattagattgacgccaacatggtagcaacaatga

SEQ ID NO: 42503 - DNA, 40 bp, Bacillus cereus
  source 1..40: mol_type = genomic DNA
gccattaggcgcatgaggtttaccccattaagccctaaag

SEQ ID NO: 42504 - DNA, 50 bp, Bacillus cereus; identical to SEQ ID NO: 42502
  source 1..50: mol_type = genomic DNA

SEQ ID NO: 42505 - DNA, 40 bp, Bacillus cereus
  source 1..40: mol_type = genomic DNA
gctattaggtgcttgagattgtcaacaaaaagccataaag

SEQ ID NO: 42506 - protein, 561 aa, Paenibacillus tyrfis
MVLALKLDHKIKAGSYSRISRDEDKKNYDTILAQNSINENYAKTKFDVEIVDYYIDDNYSGYTLERPDFNRLKRDVETGRINTIIVKDLSRVGRHNAYTLIFFEEMKKKGIRIIAVTDAYDSFVDDDDLIGIKTWYNEMYVKDISKKTKNNIATKMEVGKYVSAVPFGYKRHPIEKHIILIDENCAWVVKKIFKLYLEGHGYRSIAAILTEAGDPTPSVILKRQKEEKGKAYKKNVTYEWSQKMVMIILHNDFYIGVLRQGKYKTIEINGQSVETSDEEQHIFINNHDAIISEEDFALAQKITQKRSASNYRGGGKKHQNLFSGFMYCADCGSYMTALNKSGKNKSYICGTYNRRGKKFCSTHYVLDSKLIIGLKEHLSKVRAKLYVTIIKMKTNVDESINSHENFDFTIRRLEKELKLAGDELKVLYSQKIKDIAKSPDMEEFVAETYGELEKDKQRKLQSIKSQLDELYKLKGQEGKIEKDAKTALQVFDDILMKEQIEKRDLELIVEKIVIDIEGIPTFYLKGDIDFILNGSPDPTNPNGGGPLESQGTLSLHKRGLT

SEQ ID NO: 42507 - DNA, 50 bp, Paenibacillus tyrfis
  source 1..50: mol_type = genomic DNA
aggtacattaagcctacataagcgggggcttacggaagcacaatgtatct

SEQ ID NO: 42508 - DNA, 40 bp, Paenibacillus tyrfis
  source 1..40: mol_type = genomic DNA
ggagccgatggataaagccggggcttacggcatccaaggc

SEQ ID NO: 42509 - DNA, 50 bp, Paenibacillus tyrfis
  source 1..50: mol_type = genomic DNA
aggtacattaagcctacataagcgaaggcttacggaagcacaatgtatct

SEQ ID NO: 42510 - DNA, 40 bp, Paenibacillus tyrfis
  source 1..40: mol_type = genomic DNA
ggagcagatggagaaagccaaggcatatgcagccaacggc

SEQ ID NO: 42511 - protein, 519 aa, Ruminococcus torques
MNIAAYCRVSTDKADQLNSLEAQKEFFSEYTKRTGDTLVRLYADEGISGTKIKNRKEFLRMMTDAEHGLFDMVVVKDISRFARNTVDLLQNVRKLKSLGIETQFLTANMTSMGNSEFVLTIFGALAQEESANTSKRVKFGKKMNAEKGRVPNIVYGYDKTIGDYFNLAINKEESKVVQQIYKWYTEEGYGAAKIANMLNEKGYKTKRNCKWSQNATCRILTNEIYTGKIINGKQEVSDFLTGQRRDKDETEWMVVERPELRIIEDETFEKAQEILRGRHDAFNLSHERQSNKHLFSTLIKCKECGWSFRRTVRTYKNTYVRWVCSGRNGRGVDSCPNKTVVDEEELIEVLQEYFTNVLKQKKKVIAHVVNEFQRVYKAKDENVEYEKELNAELAKLQKTRQKYMDMYTDDLISREELNEKIGGSRQEMERIENELKMVSYHLTKGEQLENILNNTFKEIEDITDVHQMTNQQLKRLIQKIEVDKEGNVDIYLRLLGDLGLDESVLIEENETVLNCDDQT

SEQ ID NO: 42512 - DNA, 50 bp, Ruminococcus torques
  source 1..50: mol_type = genomic DNA
ccgttctaaattgtgacgaccaaacatatggttgtaacaatatagaactg

SEQ ID NO: 42513 - DNA, 40 bp, Ruminococcus torques
  source 1..40: mol_type = genomic DNA
gatcagtaaaagtacggtacataaagatgtaaccgaacga

SEQ ID NO: 42514 - DNA, 50 bp, Ruminococcus torques
  source 1..50: mol_type = genomic DNA
ccgttctaaattgtgacgaccaaagatatggttgtaacaatatagaactg

SEQ ID NO: 42515 - DNA, 40 bp, Ruminococcus torques
  source 1..40: mol_type = genomic DNA
gatcagtacaattacggtagataaacatgggaagaaaggc

SEQ ID NO: 42516 - protein, 506 aa, Mesorhizobium opportunistum
MLQPRDLKGRRAISYARWSSGKQASGDSLDRQTKNAKEFCAIHGVTLDSELVDDGVSAFKGANLEASLGKFVGDVRSGKIPSEVVLIVENIDRITRVKPTRAIRYFLDLLDTGLTLVTLTDQRVHTSEGYDDNFSNLMMSLMAMQAAHEYSAKLSYRVGEAWKRKAEKARAAVASGSGARIKVAKVPFWIDRETNELNGRAVDARLLFALAKEGHGQQSITQILNTRGIASPSGKTWAQAVVGEVLRSPAAYGCLVLKGEEVPGYFPALISETEWLATRQRTKARRHSRQQGRTSNLFSRMVHCGHCGSPMVLTSSKKGGAVWGYFTCTGKTFKRTECTAPNWRYDQFEQEMIDRIGFLAIPIPQDQTTPDLSRQLEETIGALEAKQSNVLAGIAEADTPEVRKVLLGQADQLARQIEAKRKEILAIRENDARYRESAAAVIDFEADQDEIRRLAKEDRKGAQGLISNLVQRIDLESDSKTLRRAVVTMRGGYSHTLIFDSTGEPG

SEQ ID NO: 42517 - DNA, 50 bp, Mesorhizobium opportunistum
  source 1..50: mol_type = genomic DNA
attccgtaaaataaaagctaagtctggcatagactttaattctgcagagt

SEQ ID NO: 42518 - DNA, 40 bp, Mesorhizobium opportunistum
  source 1..40: mol_type = genomic DNA
gatctgcaagagccagacttggcacaagctctgatcttgc

SEQ ID NO: 42519 - DNA, 50 bp, Mesorhizobium opportunistum
  source 1..50: mol_type = genomic DNA
attccgtaaaataaaagctaagtcgagcatagactttaattctgcagagt

SEQ ID NO: 42520 - DNA, 40 bp, Mesorhizobium opportunistum
  source 1..40: mol_type = genomic DNA
catctgcaagagctgcagtgagcaaatgctttgagcttgg

SEQ ID NO: 42521 - protein, 586 aa, Clostridium symbiosum
MQQSNSKAKIYYATDTGLRYSKKDRAKIAFIYVRISREDDLEAESYSIQNQIKLLTQLAQEYGYTVLIIFMDDGITGVISKRPGFQDMLAKLEQGYASALFVKDLSRLYRNRTEADKLIDDFLPEHEIRLVSVGDSIDTAEGDDEFIFLRNWANEQYARDISKKRRLSNRVRGNAGEPLSPPPYGYTKAPDNPKRWIVDEEAAAVVRRVYSMTLDGYGTEQIAAALSADKILTPMFYWRSKGVKRPGKVTDRIPHKWNSSSVVKILSLQEYCGDVINFKTYSKSFKHKERLPNSEENWAVFKDVHDPIIDRGIWEQVQQKRGKVRKRVTNEGEKNMFSGLLRCADCGKNLWYHFNQKNPEIRYFNCSNYKGNRGTCTSTHYVRVDFLEQVVLGEVRRLTQFASRYENDFVKAAIGQSQQNIVTEREALRRELKDLQKRDAELDNLFERIYEDNVSGKLTDERFSKMSAKYEAEQAEIAGRVKTLQMEIDKETDKSMSTDMFISKVRKYTRAKKLTQRMLNELVDYIEVYQAEKIDGVHVQKLKIHYNCVGSIEIPNVLPLSQPEVLIQTRKGVALSYSQSQKIVNL

SEQ ID NO: 42522 - DNA, 50 bp, Clostridium symbiosum
  source 1..50: mol_type = genomic DNA
caaatgctgtaagaacactcgtaatggtacgagtggcgatacagcacttt

SEQ ID NO: 42523 - DNA, 40 bp, Clostridium symbiosum
  source 1..40: mol_type = genomic DNA
caagtcctgtcacccgcactgaattataattctcagtgca

SEQ ID NO: 42524 - DNA, 50 bp, Clostridium symbiosum
  source 1..50: mol_type = genomic DNA
caaatgctgtaagaacactcgtaaccgtacgagtggcgatacagcacttt

SEQ ID NO: 42525 - DNA, 40 bp, Clostridium symbiosum
  source 1..40: mol_type = genomic DNA
ctagtcctgtggccctcacccaaagggcatactcagtgca

SEQ ID NO: 42526 - protein, 498 aa, Paenibacillus antibioticophila
MVVRAKEERVEEVEGIGYIRQSDEREDKEDISERTQLSKIQSYCDYNGIKLVKVFKDIDYSGFRIPYTKRPGIMDALDYAESNPRLKKFVIFNLSRLTRRKNDFHKIKSKLNDLEIDLCSAMEQLDFGTATGRLVADVLVNFNEYYSDNLSDVVNDNKKTNAEKGRWNGGPAPYGLVKIPDKNFDRDGDKAVIIETMFVMALDGKGPHLIEKWTEKEGILTETGVPWTARRIRYVLQNATYAAMQKWKGVYYPLTNSATLVSWDDFQYLQKTRFGKENVWRGKERQLLSSVLRCPICGSRMHSKMTTNKKNRKYVCSNKNSTGRCPCANFEATTLNSAVVSLISKMAQKRFSPNDILPEISKEKNNDLSSLRTLQNEMRTLEDAKQKVFDDYYLHAKLSEDQFGVLMLRYEKRQKEIASLLEKIPLPQSRGYGDFDDLLGEISNAFNMLPDDKKRKSVELLVDKIVPGSPTIVKFKWGEEKQIFPTNTNKYNKKLVFF

SEQ ID NO: 42527 - DNA, 50 bp, Paenibacillus antibioticophila
  source 1..50: mol_type = genomic DNA
acgtgcagttattggataggagtggagactcccgtccaaaaactgcacgt

SEQ ID NO: 42528 - DNA, 40 bp, Paenibacillus antibioticophila
  source 1..40: mol_type = genomic DNA
cagatattggataggagtggagagaaaccatactgtacct

SEQ ID NO: 42529 - DNA, 50 bp, Paenibacillus antibioticophila
  source 1..50: mol_type = genomic DNA
acgtgcagttattggataggagtggtgactcccgtccaaaaactgcacgt

SEQ ID NO: 42530 - DNA, 40 bp, Paenibacillus antibioticophila
  source 1..40: mol_type = genomic DNA
atgatattggatatgagtggtgggaaaagatgctgtttca

SEQ ID NO: 42531 - protein, 548 aa, Streptococcus pyogenes
MSKEKIKVYLYTRVSTSIQIDGYSLEAQKSRMKAFALYNDYEIVGEYEDAGKSGKSIEGRVQFTRMMEDIKSGKDGVSFVLVFKLSRFARNAADVLSTLQIMQDFGVNLICVEDGIDSSKDAGKLMISVLSAVAEIERENIRVQTMEGRIQKAREGKWNGGFAPYGYQLIDGKLLINEEEAIAIRTIFDQYVNTSIGANGISKYLENHGIRKIPRQNGKNPLFDAGLIRKILKNPVYNGKIAFGRRTLEKVHGTRNEYKQVEQDEYLISEGIHEAIVSDEVWQAAQVKLKSQAKKYEHVNKGKDTRTHLLSGIVKCPICGVGMFGNKCIKKKKDGTKYKDFYYYGCKHRQMIRGHKCTFSKQIREELLDDAVAEVIIKLVSNPKFASMMQEKINMKVDTSEIEKEIDNYQKELRKSHSTKFKLIEEIDNLDVEDKHYKRRKQDLDDRLYRMYDKIEELESLLIDAKAKKQTIEAEKLTGDNIYKVLIYFDKLYKVMNDVERRQLISALISEIQIYEEKQPNGQWLKSITFKLPIIDENINIGLDNDEH

SEQ ID NO: 42532 - DNA, 50 bp, Streptococcus pyogenes
  source 1..50: mol_type = genomic DNA
tataggtttggacaacgatgaacacgtggagacggtagcacttttgtcca

SEQ ID NO: 42533 - DNA, 40 bp, Streptococcus pyogenes
  source 1..40: mol_type = genomic DNA
tgtttccccagacgcatcacgttgagtgcgtagtgttgct

SEQ ID NO: 42534 - DNA, 50 bp, Streptococcus pyogenes
  source 1..50: mol_type = genomic DNA
tataggtttggacaacgatgaacacttggagacggtagcacttttgtcca

SEQ ID NO: 42535 - DNA, 40 bp, Streptococcus pyogenes
  source 1..40: mol_type = genomic DNA
tgttttttcaaacctatcactttgaattcctagtcttgct

SEQ ID NO: 42536 - protein, 540 aa, Ruminococcus torques
MKQPYNTTIYNTALYLRLSRDDELQGESGSIQTQRMMLRQYAAEHGLTVVDEYIDDGWSGTNFERPSFQRMIDDIEDGKINCVVTKDLSRLGRNYILTGQYTEIYFPSKGVRYIAINDNVDTINGESELAPFLNILNEMHARQTSKKVKAAMHTRFANGAHYGAYAPLGYVKDPDKKGHLLIDPETRWIVEKIFDLAVHGRGAASITRILVEEKVPTPGWLNYERYGTFANIYAGAPAEKAYAWTIAQVKSILKEETYIGHSVHNKQSNISFKNKKKVRKPQEEWYRVENTHEAIISEEVFQKVQELIASRRRRQKNGTTQIFSGLVKCADCGWSLAYGVNSQNKNPYAHYHCSKYGQGLRQCSMHYIRYDVLYAYVLARLQYWSMLAQKDEDKLLKRLLNASDRERNSAKKKQAAELKKAEKRKAEVDGLFAKMYEDWSAGRITEYNFNMLSEKYQNEQRELETKIRQLHETMEAAVQTAADAEKWIALMKQYVNPVELTAELLNTLIEKITVHEAVKGEDGSREQEVEIYYRFIGKID

SEQ ID NO: 42537 - DNA, 50 bp, Ruminococcus torques; identical to SEQ ID NO: 3657
  source 1..50: mol_type = genomic DNA

SEQ ID NO: 42538 - DNA, 40 bp, Ruminococcus torques
  source 1..40: mol_type = genomic DNA
tactagcaagtgggaatggggatggtactattttaacact

SEQ ID NO: 42539 - DNA, 50 bp, Ruminococcus torques; identical to SEQ ID NO: 3657
  source 1..50: mol_type = genomic DNA

SEQ ID NO: 42540 - DNA, 40 bp, Ruminococcus torques
  source 1..40: mol_type = genomic DNA
tgctaggaagtggggatggggtgctagctatttcaacact

SEQ ID NO: 42541 - protein, 540 aa, Ruminococcus torques; identical to SEQ ID NO: 2471

SEQ ID NO: 42542 - DNA, 50 bp, Ruminococcus torques; identical to SEQ ID NO: 2472
  source 1..50: mol_type = genomic DNA

SEQ ID NO: 42543 - DNA, 40 bp, Ruminococcus torques; identical to SEQ ID NO: 42538
  source 1..40: mol_type = genomic DNA

SEQ ID NO: 42544 - DNA, 50 bp, Ruminococcus torques; identical to SEQ ID NO: 2472
  source 1..50: mol_type = genomic DNA

SEQ ID NO: 42545 - DNA, 40 bp, Ruminococcus torques; identical to SEQ ID NO: 42540
  source 1..40: mol_type = genomic DNA

SEQ ID NO: 42546 - protein, 540 aa, Ruminococcus torques
MKQPYNTTIYNTALYLRLSRDDELQGESGSIQTQRMMLRQYAAEHGLTVVDEYIDDGWSGTNFERPSFQRMIDDIEDGKINCVVTKDLSRLGRNYILTGQYTEIYFPSKGVRYIAINDNVDTINGESELAPFLNILNEMHARQTSKKVKAAMHTRFANGAHYGAYAPLGYVKDPDKKGHLLIDPETRWIVEKIFDLAVHGRGAASITRILVEEKVPTPGWLNYERYGTFANIYAGAPAEKAYAWTIAQVKSILKEETYIGHSIHNKQSNISFKNKKKVRKPQEEWYRVENTHEAIISEEVFQKVQELIASRRRKRRNGTTQIFAGLIKCADCGWSLAYGENKQNKNPYGYYHCSKHGQGLRQCSMHYIRYDVLYAYVLARLQYWSMLAQKDEDNLLKRLLNASDRERNSAKKKQAAELKKAEKRKAEVDGLFAKMYEDWSAGRITEYNFNMLSEKYQNEQKELETKIRQLHETMEAAVQTAADAEKWIALMKQYVNPVELTAELLNTLIEKITVHEAVKGEDGSREQEVEIYYRFIGKID

SEQ ID NO: 42547 - DNA, 50 bp, Ruminococcus torques; identical to SEQ ID NO: 2472
  source 1..50: mol_type = genomic DNA

SEQ ID NO: 42548 - DNA, 40 bp, Ruminococcus torques; identical to SEQ ID NO: 42538
  source 1..40: mol_type = genomic DNA

SEQ ID NO: 42549 - DNA, 50 bp, Ruminococcus torques; identical to SEQ ID NO: 2472
  source 1..50: mol_type = genomic DNA

SEQ ID NO: 42550 - DNA, 40 bp, Ruminococcus torques; identical to SEQ ID NO: 42540
  source 1..40: mol_type = genomic DNA

SEQ ID NO: 42551 - protein, 500 aa, Lacrimispora sphenoides
MNDDEIKIGAAYIRVSTGKQEELSPDSQKRLILDHAKSNGIVIPQEYIFMENGISGRKADKRPQFQKMIALAKSGKFEVILLWKFSRFARNQEESIVYKSMLKKVNVDVISVSEPLVDGPFGSLIERIIEWMDEFYSIRLSGDVTRGMTEKAMRGGYQCRPPLGYMVPYHNATPVIVPEEAEIVKMIFDTYINTNMSTYQIAKKLNTMGYKTSRNKNFESRSLQYILDNPCYAGYVRWNRTENATNTIKPEDEWIVRDGKQEAIISKEIFESAQERRKKDYNPGIKRPIETYKHWLSGVLKCSACGQTLVVFRRKSRYGNNIYTHFRCNGYNKGNCPKPNGISALKIEPIVLDALKHATETGTINYNVIQPERQAINENETMLRKQLERLEQKERRIKDAYIEGIDTKEEYRENKLKIDNERKNIIDELEFYMQDDKQDIKSIMLNNVKDVYDILTSDVDADISKKNNSLKSVVDKIVFNKDEMNIDVYYYYSPAKNLVK

SEQ ID NO: 42552 - DNA, 50 bp, Lacrimispora sphenoides
  source 1..50: mol_type = genomic DNA
gtgggtatgttattgcaacttggatgcccaaatggtaataacatacccac

SEQ ID NO: 42553 - DNA, 40 bp, Lacrimispora sphenoides
  source 1..40: mol_type = genomic DNA
gtgagatgtccaaattggatgtcacagtggggtagtaata

SEQ ID NO: 42554 - DNA, 50 bp, Lacrimispora sphenoides
  source 1..50: mol_type = genomic DNA
gtgggtatgttattgcaacttggagtcccaaatggtaataacatacccac

SEQ ID NO: 42555 - DNA, 40 bp, Lacrimispora sphenoides
  source 1..40: mol_type = genomic DNA
atgagattcacattttggagtttacattggtatagtaata

SEQ ID NO: 42556 - protein, 561 aa, Lysobacter enzymogenes
MVGSMATKARVYSYLRFSDPKQAAGSSADRQLEYAKRWAAERGMALDSELSMQDEGLSAYHQRHVTRGALGAFLAAVDAGHIPAGSVLVVEGLDRLSRAEPLLAQAQLGQIVNAGISVVTASDGREYNRERLKAQPMDLVYSLLVMIRAHEESDTKSKRVRAAIHRQCSGWLAGTWKGVIRNGKDPHWVRMGTAGFELAPERAEAVRLAITMFQEGHGAVRIMRALDERGLQLTNGGNPAQQLYRILRNRALIGEKVLEVDGQSYRLPGYYPALLPEDEFSGLQHAIGTRARRKGTGEIPGLITGMRLAYCGYCGSALAAQNLMQRKRRDDGKPQDGHRRLICVGNSHGSGCTVAGSCSVVPIEHAVMAYCSDQMNLSRLLEGSDRGAGLAGQLTAARARAADTAAKVERITDALLADQAEEAPAAFRRRARELEQQLAAQQAEINALEHELANAAAEPSLAVAQAWANLSVDVQALDYDARVKARQLVADTFDRIIVYHRGMSPEVTRSWKGTIDLIMVGRRGTTRLLHIDRRSGEWRSGEDIDLRHDGANGLPLPPGLN

SEQ ID NO: 42557 - DNA, 50 bp, Lysobacter enzymogenes
  source 1..50: mol_type = genomic DNA
taaagtatatttgcgccgtcgttcggacaacctagcgaaacaaaccctat

SEQ ID NO: 42558 - DNA, 40 bp, Lysobacter enzymogenes
  source 1..40: mol_type = genomic DNA
ggaatcgaccagggccttggggcagcccaggctgacgaaa

SEQ ID NO: 42559 - DNA, 50 bp, Lysobacter enzymogenes
  source 1..50: mol_type = genomic DNA
taaagtatatttgcgccgtcgttccaacaacctagcgaaacaaaccctat

SEQ ID NO: 42560 - DNA, 40 bp, Lysobacter enzymogenes
  source 1..40: mol_type = genomic DNA
agaatctagaagggcctgacagcagcccagagtgaccaga

SEQ ID NO: 42561 - protein, 402 aa, Burkholderia cenocepacia
MRVAIYARFSTDKQKETSVTDQISVCVRRAESMGDCEIVAHHSDEGVSGKTPVEARAGGKKLMADAMAGRFDMLIVESLDRLSRDQVEQERIMRRLEFRGLRVIGVSDGYDSDSSSRKVQRTVRGLVNELYIDDLRAKTLRGQTGQVERGFVAGGRSYGYELVRTEKGTDYRVDENEAQWVRFIFEKFAAGWSTFRICDELNRRNIPSPRKSTWMRSALYGSPRKGSGILNNSAYIGQYIWNRSQWLKDPDTGKRIRQDRPESEWKVEQRDHYRIVSDEVWQAVRNRMGKDRLNGGTTGIGHPLRTLFGGYLRCSQCGGAMIAINALYYGCATRKERGVHACRGMNISRPQTDEQLLNVLRSELLSENAQADIDAAARRYFAAEMGGCVGIDSAGAGEDRRD

SEQ ID NO: 42562 - DNA, 50 bp, Burkholderia cenocepacia
  source 1..50: mol_type = genomic DNA
aattctagaggtccagtggttgcgggggcagcctctgtcactagtagaag

SEQ ID NO: 42563 - DNA, 40 bp, Burkholderia cenocepacia
  source 1..40: mol_type = genomic DNA
ttctggacggttggttgcgggggtaggatttgaacctacg

SEQ ID NO: 42564 - DNA, 50 bp, Burkholderia cenocepacia
  source 1..50: mol_type = genomic DNA
aattctagaggtccagtggttgcggaggcagcctctgtcactagtagaag

SEQ ID NO: 42565 - DNA, 40 bp, Burkholderia cenocepacia
  source 1..40: mol_type = genomic DNA
atatggactgagtggtgcagagttaggatttgaacctagg

SEQ ID NO: 42566 - protein, 558 aa, Clostridioides difficile; identical to SEQ ID NO: 3086

SEQ ID NO: 42567 - DNA, 50 bp, Clostridioides difficile; identical to SEQ ID NO: 3087
  source 1..50: mol_type = genomic DNA

SEQ ID NO: 42568 - DNA, 40 bp, Clostridioides difficile
  source 1..40: mol_type = genomic DNA
taaaaatgatggttcgtacaacgtaggtcctgctttgcag

SEQ ID NO: 42569 - DNA, 50 bp, Clostridioides difficile; identical to SEQ ID NO: 38339
  source 1..50: mol_type = genomic DNA

SEQ ID NO: 42570 - DNA, 40 bp, Clostridioides difficile
  source 1..40: mol_type = genomic DNA
taagcatgatgtttcttatcacgtagattctcatttgcac

SEQ ID NO: 42571 - protein, 527 aa, Roseburia hominis
MNIAAYCRVSTDKSDQLNSLETQKEFFLEYTKRTGDNLIKLYADEGISGTKIKNRKEFQRMLADAEKGLFDMVVVKDISRFARNTVDLLQSVRKLKSLGIETQFLTANMTSMGNSEFVLTIFGALAQEESANTSKRIKFGKKMNAEKGRVPNIVFGYDKTIGDYFKLSINENEAKAIRQIFQWYIEEGYGGSKIANMLNERGIKTKRGNNWSQNAVCRILTNEIYTGKIINGKEEIADFLTGQRKEKDESEWLVTIRPELRIIEEEVFDKAQDILKGRHDSFKITHERQSNKYLFSTLIKCKECGWSFRRTVRQYKNTYVRWVCSGHNGKGADSCPNAVTVDEEELIQALQEYFQEILSKKKKVINYVIKEFQRVYKAKDENIEYEKQLNAELNKLHKSREKYMDMYTDDLISREELNEKIGGMRKEIERLENELKMVSYHLTKGEQLEAILNSTFKQLEDITDVHEMTNAQLKRLINKIEVDKDGNVDIYLHLIGDLGLDETVLIEGDKNTEEKGTKKVPNSYNHT

SEQ ID NO: 42572 - DNA, 50 bp, Roseburia hominis
  source 1..50: mol_type = genomic DNA
aggttccaaatagttacaaccatacatacggtggtaacaaaatagaatgc

SEQ ID NO: 42573 - DNA, 40 bp, Roseburia hominis
  source 1..40: mol_type = genomic DNA
gatatcgaaatcaacggtacataaggatgttacagaacgt

SEQ ID NO: 42574 - DNA, 50 bp, Roseburia hominis
  source 1..50: mol_type = genomic DNA
aggttccaaatagttacaaccataagtacggtggtaacaaaatagaatgc

SEQ ID NO: 42575 - DNA, 40 bp, Roseburia hominis
  source 1..40: mol_type = genomic DNA
gatttcaaaaacaatgttgagtaagaaagttacagaaggg

SEQ ID NO: 42576 - protein, 500 aa, Bacillus amyloliquefaciens
MIAIYVRVSTEEQAIKGSSIDSQIEACIKKAGTKDVLKYADEGFSGELLERPALNRLREDASKGLISQVICYDPDRLSRKLMNQLIIDDELRKRNIPLIFVNGEYANSPEGQLFFAMRGAISEFEKAKIKERTSSGRLQKMKKGMIIKDSKLYGYKFVKEKRTLEIFEEEAKIIRMIFNYFTDHKSPFFGRVNGIALHLTQMGVKTKKGAKVWHRQVVRQILMNSSYKGEHKQYKYDTEGSYVSKQAGNKSIIKIRPEEEQITVAIPAIIPPEQWDYAQELLGQSKRKHLSISPHNYLLSGLVRCGKCGNTMTGKKRKSHGKDYYVYTCRKNYSGAKDRGCGKEMSKNKLNRHVWGEIFKFITNPQKYASFKEIEQSNHLSDELELIQKEIEKTKKGRKRLLTLISLSDDDDLDIDEIKAQIIELQKKQNQLTEKCSEIQSKMKVLDDTSSSENALKRAIDYFQSIGADNLTLEDKKTIVNFIVKEVIVVDSDTVYIETY

SEQ ID NO: 42577 - DNA, 50 bp, Bacillus amyloliquefaciens; identical to SEQ ID NO: 12727
  source 1..50: mol_type = genomic DNA

SEQ ID NO: 42578 - DNA, 40 bp, Bacillus amyloliquefaciens
  source 1..40: mol_type = genomic DNA
gcgcagatgcattaaaatctcattttcaatacatcgtgcg

SEQ ID NO: 42579 - DNA, 50 bp, Bacillus amyloliquefaciens; identical to SEQ ID NO: 12729
  source 1..50: mol_type = genomic DNA

SEQ ID NO: 42580 - DNA, 40 bp, Bacillus amyloliquefaciens; identical to SEQ ID NO: 12730
  source 1..40: mol_type = genomic DNA

SEQ ID NO: 42581 - protein, 548 aa, Anaerotruncus colihominis
MLRQSDNKLTALYCRLSRDDELQGDSNSIVNQKAILSKYAKENGFKNLSFFVDDGYSGTNFNRPSWSELIEKIENGGVSTLIVKDMSRLGRDYLKVGFYTEVLFVEKGVRFIAINNGIDSANQQDSDFTPFLNIINEWYAKDTSKKIRAVMKSKGEAGEHLCTNPPYGYMKDADDKKRWIVDEEAAEVVKRIFALCLDGYGPTQIARILKEEQVITPTIHFMRIGRTTRNAPPDNPYNWTGDTIADILERPEYQGHTVNFKTYKQSYKSKKTCYNPEEKWLVFENTHEAIIDADTWERVQELRKNKRRPTKTGKTNMFSGIVRCADCGEKLYYCTSKNFEARQDHFVCSTSRLKGKEVCPTHFIRAVVLEQGVLAHLRLVISCVANHEEQFRKAMGAKQKAESKKELAAKRRQAKQAERRIEELDRLFKRIYEDNANGKLSDSRFQMLSDDYEQEQEELREKLLQLNEEIIQQEEQAKNIDRFIGKVRKYLDLDELTPTILNDMVKAVYVHAPDNSKGYREQQIDISYDLVGILPAAMLNDLQNGETA

SEQ ID NO: 42582 - DNA, 50 bp, Anaerotruncus colihominis
  source 1..50: mol_type = genomic DNA
atgctgttttatgagtgccgccgataaggtagctacgcataaaacagtat

SEQ ID NO: 42583 - DNA, 40 bp, Anaerotruncus colihominis
  source 1..40: mol_type = genomic DNA
atcaaaaaaattcagccagtaagcgtcgttttttgtcagt

SEQ ID NO: 42584 - DNA, 50 bp, Anaerotruncus colihominis
  source 1..50: mol_type = genomic DNA
atgctgttttatgagtgccgccgaccaggtagctacgcataaaacagtat

SEQ ID NO: 42585 - DNA, 40 bp, Anaerotruncus colihominis
  source 1..40: mol_type = genomic DNA
accaaaaaaacccagctagccagagctggtttctgtcatt

SEQ ID NO: 42586 - protein, 506 aa, Escherichia coli
MRSVITYLRYSSAIQGAEGADSTRRQNDLFKQWLKKNSDAQVVASFSDEGLSGYKGKHLTGQFGDMLARIESGEFPEGTILLVESIDRIGRLEHLETEALMNRILGNGLEIHTLQDGLIYTKDALADDLGISIIQRVKAYIAHQESKQKSFRVSQKWEQRAKLALAGEQRLTKMVPGWIDPDTFKLNEHAETVRLIFKLLLDGESLHNIARHLQANNISSFSRRKDANGFSVHSVRTILRSETTIGTLPASQRNDRPAIPNYYEAAIDASTFNKAQEILDKNRKGRTPASDNPLTINIFKGLFRCQCGASVHPTGTKNKYQGVYRCNSHLDGRCDVPPLKRKPFDRWMIDNFLGMIDVGNDGEAEKEIASLQHEVETVTARIKKATALLLEMDDITELKTQVKELNQKRTELQTTINTMKRKTSLSDKGLPQLKDIDLMTKAGRVECQLILSKHLKGLTLGKDSVTVTLQNDTEIIVPTDPLPLNDGTSIFEIAEKELLEIDAYQL

SEQ ID NO: 42587 - DNA, 50 bp, Escherichia coli; identical to SEQ ID NO: 36192
  source 1..50: mol_type = genomic DNA

SEQ ID NO: 42588 - DNA, 40 bp, Escherichia coli
  source 1..40: mol_type = genomic DNA
gcggcgaggtaaatcaatggtcattgaagtcataatcatt

SEQ ID NO: 42589 - DNA, 50 bp, Escherichia coli; identical to SEQ ID NO: 40727
  source 1..50: mol_type = genomic DNA

SEQ ID NO: 42590 - DNA, 40 bp, Escherichia coli
  source 1..40: mol_type = genomic DNA
gaggtgaagaaactcaatcataattagagtcataatgatt

SEQ ID NO: 42591 - protein, 669 aa, Vibrio crassostreae
MKLSAIAQTNEFIRPVVITYTRFSTSIQKDGLSEFRQDELTQRYVLDFCEEHGVPVEDIISLKDRGVSAYRGKNMTKGSLSEIIAKFKSDELPKVYNEKGEINTFLFIESLDRLSRADLHTANKLFLDLVEYCNIVVVAENEKKIYSLNSLKTDMGMLDLFSALLTLSRSHNESRMKEMRHRANWSNKRQSVIDYFELSKEEREGVEYPQNPTRTCPWWLKPKDDNRGFEFIEEHRKAMMFFLNRMLDGYGLTSCIRRLNDKIESGEFKVEFSDRQKNAQGFQTHTFYQLLNNDNNDSIIGDLILHQDYYPTEKDVQQGFYEKKQLGKKVRIPVYTAKGYYPALLTEVEYLRLRQQMKQRKQTQTKPNKKVANITQGLLKCPLCGYSYTYVADNRAGRHHNLVCALSRAKKCKASTFRYKWFENNLLNYCRNLDMNRVMGLKTVDKNKAKIEEYELDIGTLEYEILCLNNELEQLVSNLSKISITSLLEKAQERYVLMENDIKVKSYELEQIQIELRSLKKTSSHQRNVNEKIYELIDSVQLKDDVQLRERLNIELKKVIKSLHIYHKNNENNFLNRNLIAVKFMDDYIRFIPLDRELGREELYDILPTIDSKKVIDFSKHNILPFDYLEGFEAGIYPEYQFIAKYYQENPDVLQKVIKELEDADEVFV

SEQ ID NO: 42592 - DNA, 50 bp, Vibrio crassostreae
  source 1..50: mol_type = genomic DNA
tgcttaactttacttttgactatattaatgatgacataattagtttagcg

SEQ ID NO: 42593 - DNA, 40 bp, Vibrio crassostreae; identical to SEQ ID NO: 29353
  source 1..40: mol_type = genomic DNA

SEQ ID NO: 42594 - DNA, 50 bp, Vibrio crassostreae
  source 1..50: mol_type = genomic DNA
tgcttaactttacttttgactatatgaatgatgacataattagtttagcg

SEQ ID NO: 42595 - DNA, 40 bp, Vibrio crassostreae
  source 1..40: mol_type = genomic DNA
ggcaaaagtcatttccttgtggttcatccaaacctcagct

SEQ ID NO: 42596 - protein, 522 aa, Bacillus thuringiensis
MKLSHILQPNMKAAFYGRHSTDKQDMDMQLNSVMEVIRKYDCIHTHSFLDKAVSARKNKITSRKELENMFEAAKRKEFDFVIVYKSDRLARDPLEHQTIRIVMKTLDIPIIISSTESVYNTDTDLIVQLMEDGFTKYEVDTIIARTRSGLENKAKQGKWLGGKPPFGYTYDKSSEQFIEHTEELCYVKEIFNLYVNGHGFQYIAHTLPNGSRRGKDWGKENVKAIVLNPFYCGLLSWRRQTDGKQNERDIWIEAPNHYVKPIISRTTWEACWRIYSEKRNGNMVPKHYKTSFLLQGLLSCEKCQELMKTKNQQTVSSTNKKYGGKIYFCPNCKLRIEADLLHDKVVNQTLTDVKISGFHNVYHAIEQKIQYEIQELNNNIQKHQRLYENHIIKLHNITEELKQRMKNNDDKRFLKSLAIYRSDVQRKLDGIIQQINNFKQQITLKEKVEKSKEIWLHTLNEVFQDDVKLQEISDMDKRRFLLPLIQSVSIKENKKRNEYDISLQLRTDFSKRDVKKQISLIL

SEQ ID NO: 42597 - DNA, 50 bp, Bacillus thuringiensis
  source 1..50: mol_type = genomic DNA
tggttacatccctgctaattaaaccagtataatcgctcatcatctaccct

SEQ ID NO: 42598 - DNA, 40 bp, Bacillus thuringiensis
  source 1..40: mol_type = genomic DNA
tgggtatggggaagtgaatcagtataaccgccacagtaca

SEQ ID NO: 42599 - DNA, 50 bp, Bacillus thuringiensis
  source 1..50: mol_type = genomic DNA
tggttacatccctgctaattaaactagtataatcgctcatcatctaccct

SEQ ID NO: 42600 - DNA, 40 bp, Bacillus thuringiensis
  source 1..40: mol_type = genomic DNA
tgctgatgggaaagtaaattagcataacctctacagaaaa

SEQ ID NO: 42601 - protein, 506 aa, Nonomuraea pusilla
MQTGIPVVSYARISADNRGDEHGVKDQHNVNRKTAERHGWTVVAEYTDNDKSAAKADVYRDDFEAMLKVLKAGKLPDGQPVQGVVIVAEDRLARRPGDYERFVEAITFKDGRVYADARSPKDLYSEDTESMGLFGAVISKMEVRKMQRRMRRSHQARAEQGKPVGGPRPFGWLPDRVTLDPEEAAVLRKAALEFAAGRSLDSIVKEWQRLGVVTSRGNPWIRMSLRSALENPRLCGWRMIGGELVRDAHGNPVVGQWEPILSPDEWRAVMAVMDRRKGHRVNGDGSVGAPIPTDEREHRYLLSGILRCGKPKDGGGICNHPLRCRPGKNGQGPHIYVCPSRTEGGCGGTARRGDKIDEFVSEALLASLEAKELARRRDERPAAWSGEERLASVSAKLDELSEKWNADEITAELFFKLAPRLEKELAQLRSERDRHAAAVERQRARAIIDMSDLRARWYKAESDGGLPVSTKRAYVRESFHAIIVHPARRGSRIFDPDLLVPVWRED

SEQ ID NO: 42602 - DNA, 50 bp, Nonomuraea pusilla
  source 1..50: mol_type = genomic DNA
atcttgcgctaagacaactactgagggtagaaccttcctaagagtggtat

SEQ ID NO: 42603 - DNA, 40 bp, Nonomuraea pusilla
  source 1..40: mol_type = genomic DNA
ccgacaccgtaaccacaacgggtaccttctgcgctgggac

SEQ ID NO: 42604 - DNA, 50 bp, Nonomuraea pusilla
  source 1..50: mol_type = genomic DNA
atcttgcgctaagacaactactgaaggtagaaccttcctaagagtggtat

SEQ ID NO: 42605 - DNA, 40 bp, Nonomuraea pusilla
  source 1..40: mol_type = genomic DNA
cctacactgcaaccaccacagttaccatcaccactgtgac

SEQ ID NO: 42606 - protein, 618 aa, Eubacteriaceae bacterium; identical to SEQ ID NO: 11111

SEQ ID NO: 42607 - DNA, 50 bp, Eubacteriaceae bacterium; identical to SEQ ID NO: 11112
  source 1..50: mol_type = genomic DNA

SEQ ID NO: 42608 - DNA, 40 bp, Eubacteriaceae bacterium
  source 1..40: mol_type = genomic DNA
aaaatataagagagccagtgaagtcggacgtgcgctgaat

SEQ ID NO: 42609 - DNA, 50 bp, Eubacteriaceae bacterium
  source 1..50: mol_type = genomic DNA
actgtccgcaaaaaatgaccgacttttgtaggacggattttgcggacatt

SEQ ID NO: 42610 - DNA, 40 bp, Eubacteriaceae bacterium
  source 1..40: mol_type = genomic DNA
aaaatgaaagacagcaaggttagtgggaggtgggatgaag

SEQ ID NO: 42611 - protein, 489 aa, Faecalibacterium prausnitzii
MTAVIYARYSSDSQREASIEGQLRDCKDYAEKNGITVVGTYIDRAYSAKTDDRPEFQHMIKDSAKKIFDVVLVWKLDRFARNRYDAVNYKHQLEKNGVHLVSAMEPISQGPEGIMVESMLIGMAEYYSAELALKVARGERENALQCKYNGGVVPLGFTIGKEDRLYHIDPETAPIVQEIFTRYADGEPAEKIAASLNERGLRTRTGKPFVKNSFFQIFRNRRYIGEYRYKDIVTPGGIPAIVDKDLFDRVQQRFEQNKIAHGRPAKEDVSYLLTTKLFCGKCGTLMGGESGTSHMGNTYYYYKCGNAKRHGKAHCDLKAIRKESLERFVVETAIKVIFSDEIIERLIDLIMEAQQQENTRLPVLKDQLRDTEKRLANLLEAIEQGILTPTTKQRLDELEARKEALNTSILEEELKKPVLTREWMRFWFEKFRKGDVGSTEHQRQIIDTFVNSVYVFDDRVVLNFNFTDDSKTVTREEVLGSSAVENAPP

SEQ ID NO: 42612 - DNA, 50 bp, Faecalibacterium prausnitzii
  source 1..50: mol_type = genomic DNA
ggttcgagtgctgtggagaatgctccaccatacagttcgtactcgaaccc

SEQ ID NO: 42613 - DNA, 40 bp, Faecalibacterium prausnitzii
  source 1..40: mol_type = genomic DNA
ggttcgaatccctcatggcccaccaaacaagaaaaatccg

SEQ ID NO: 42614 - DNA, 50 bp, Faecalibacterium prausnitzii
  source 1..50: mol_type = genomic DNA
ggttcgagtgctgtggagaatgctcaaccatacagttcgtactcgaaccc

SEQ ID NO: 42615 - DNA, 40 bp, Faecalibacterium prausnitzii
  source 1..40: mol_type = genomic DNA
ggaacgaattcttcatggccaaaaaaaaaaaaaaaaacgg

SEQ ID NO: 42616 - protein, 463 aa, Corynebacterium simulans
MHTYVDQSISASKKDVDRPDYDAMVASFERGEIDAIICWDLDRLTRQPAQLEEWIDRAEEQGLKLVTANGDADLATDGGRMYARIKAAVARGEIERKSMRQSRAQQQRAEQGRWYSGGVRPIGYTSTGEIIPSEAAAVLGMFRAVERGNSMRDIARALSGVDQPGLPDIPTTPRHMHTVVTERNARRRAAGQEEKSVPDAQPWAYTSLHSILRNPVYAGYSTYKKAKRKGVKNKYRRVTHIVRDPDTGEPVKGQWEPIVTPDLWWRVQNVLDDPDRLTNKERRNTRRHLGSGLYVCDECGNPVHTHADRYRCAACGLVRTHSVDDFVLAVIRARLGRDDLADLLPTADDDEVDAIDDELAELRAKLARVQADYDEELIEARDLKRARNRYEPQIEKLETRRARLAGASALLDTTGYASPVDAFDNAELAVQRRVINTLCQVRLRRGVRGTKTFNPESVQIVWN

SEQ ID NO: 42617 - DNA, 50 bp, Corynebacterium simulans
  source 1..50: mol_type = genomic DNA
gcgactgatgtcgaagtggtcgagtttcgtttcaatgtaacctaaatgcg

SEQ ID NO: 42618 - DNA, 40 bp, Corynebacterium simulans
  source 1..40: mol_type = genomic DNA
ggatgtcgtctgcgtggagttcaagttcaacgtgtaacgc

SEQ ID NO: 42619 - DNA, 50 bp, Corynebacterium simulans
  source 1..50: mol_type = genomic DNA
gcgactgatgtcgaagtggtcgagtctcgtttcaatgtaacctaaatgcg

SEQ ID NO: 42620 - DNA, 40 bp, Corynebacterium simulans
  source 1..40: mol_type = genomic DNA
tgatgtggtctccatggagtccaggcttaacgtgtgacaa

SEQ ID NO: 42621 - protein, 503 aa, Corynebacterium striatum
MTTRAAIYLRISLDAAMDGLAIDRQRQDCEALAEQRGWDVVHTYVDQSISASKKDVDRPDYDAMVASFERGEIDAIICWDLDRLTRQPAQLEEWIDRAEEQGLKLVTANGDVDLATDGGRMYARIKAAVARGEIERKSMRQSRAQQQRAEQGRWYSGGVRPIGYTSTGEIIPSEAAAVLGMFRAVERGNSMRDIARALSGVDQPGLPDIPTTPRHMHTVVTERNARRRAAGQEEKSVPDAQPWAYTSLHSILRNPVYAGYSTYKKAKRKGVKNKYRRVTHIVRDPDTGEPVKGQWEPIVTPDLWWRVQNVLDDPDRLTNKERRNTRRHLGSGLCVCDECGNPVHTHTDRYRCAACGLVRTHSVDDFVLAVIRARLGRDDLADLLPTADDDEVDAIDDELAELRAKLARVQADYDEELIEARDLKRARNRYEPQIEKLETRPARLAGASALLDTTGYASPVDAFDNAELAVQRRVINTLCQVRLRRGVRGTKTFNPESVQIVWN

SEQ ID NO: 42622 - DNA, 50 bp, Corynebacterium striatum; identical to SEQ ID NO: 42617
  source 1..50: mol_type = genomic DNA

SEQ ID NO: 42623 - DNA, 40 bp, Corynebacterium striatum; identical to SEQ ID NO: 42618
  source 1..40: mol_type = genomic DNA

SEQ ID NO: 42624 - DNA, 50 bp, Corynebacterium striatum; identical to SEQ ID NO: 42619
  source 1..50: mol_type = genomic DNA

SEQ ID NO: 42625 - DNA, 40 bp, Corynebacterium striatum; identical to SEQ ID NO: 42620
  source 1..40: mol_type = genomic DNA

SEQ ID NO: 42626 - protein, 490 aa, Faecalibacterium prausnitzii
MTAVIYARYSSDSQREASIEGQLRDCKDYAEKNGITVVGTYIDRAYSAKTDDRPDFQRMIKDSAKKIFDVVLVWKLDRFARNRFDAVNYKYQLEKNSVHLVSAMEPISQGPEGIMVESMLIGMAEYYSAELALKVARGERENALQCKYNGGVVPLGFTIGKEDRLYHIDPETAPIVQEIFTRYADGEPAEKIAASLNERGLRTRTGKPFVKNSFFQIFRNRRYIGEYRYKDIVTPGGIPAIVDQDLFDRVQQRFEQNRIAHGRPAKEDVSYLLTTKLFCGKCGTLMGGESGTSHMGNTYYYYKCGNAKRHGKAHCDLKAIRKEPLERFVVDTAIKVIFSDEIIERLIDLVIEAQQKENTRLPVLKDQLRDTEKRLANLLEAIEQGILTPTTKQRLDELEARKEALNTSILEEELKKPVLTREWIRFWLEKFRKGDVGSMEHQRQIIDTFVNSVYVFDDRVVLNFNFTDDAKTVTREEVLGSSAVDNAPPK

SEQ ID NO: 42627 - DNA, 50 bp, Faecalibacterium prausnitzii
  source 1..50: mol_type = genomic DNA
gagtgccgtggacaatgctccaccaaaatagtgcaaatccgaactcattc

SEQ ID NO: 42628 - DNA, 40 bp, Faecalibacterium prausnitzii
  source 1..40: mol_type = genomic DNA
cgaatccctcacggcccaccaaaaaaagagcgcagctatg

SEQ ID NO: 42629 - DNA, 50 bp, Faecalibacterium prausnitzii
  source 1..50: mol_type = genomic DNA
gagtgccgtggacaatgctccacctgaatagtgcaaatccgaactcattc

SEQ ID NO: 42630 - DNA, 40 bp, Faecalibacterium prausnitzii
  source 1..40: mol_type = genomic DNA
caaaaccctcacttccccctgcaaaaagaaagtagctttg

SEQ ID NO: 42631 - protein, 562 aa, Vibrio harveyi; identical to SEQ ID NO: 23906

SEQ ID NO: 42632 - DNA, 50 bp, Vibrio harveyi
  source 1..50: mol_type = genomic DNA
ttattcctgttaatcttgcgtagtaccgtgattttatgtatgattaacag

SEQ ID NO: 42633 - DNA, 40 bp, Vibrio harveyi
  source 1..40: mol_type = genomic DNA
gtcagcaggagccaaattgactgtaattcgttttgctgga

SEQ ID NO: 42634 - DNA, 50 bp, Vibrio harveyi
  source 1..50: mol_type = genomic DNA
ttattcctgttaatcttgcgtagtttcgtgattttatgtatgattaacag

SEQ ID NO: 42635 - DNA, 40 bp, Vibrio harveyi
  source 1..40: mol_type = genomic DNA
gtaagaaagaacagaattgtttcttattaggtttgctgga

SEQ ID NO: 42636 - protein, 557 aa, Enterocloster asparagiformis; identical to SEQ ID NO: 11441

SEQ ID NO: 42637 - DNA, 50 bp, Enterocloster asparagiformis; identical to SEQ ID NO: 11442
  source 1..50: mol_type = genomic DNA

SEQ ID NO: 42638 - DNA, 40 bp, Enterocloster asparagiformis
  source 1..40: mol_type = genomic DNA
ttggaatcccggttgaccgaatagcaggccccgatagcct

SEQ ID NO: 42639 - DNA, 50 bp, Enterocloster asparagiformis
  source 1..50: mol_type = genomic DNA
aagtatcgctatctaaccccagcacttaatgaggtgtgatagcgatagcg

SEQ ID NO: 42640 - DNA, 40 bp, Enterocloster asparagiformis
  source 1..40: mol_type = genomic DNA
ctggaatcctggttgaccacttacctagccctgtgagctt

SEQ ID NO: 42641 - protein, 573 aa, Rhizobium pusense
MRAYDRHPGSIAPDAPVGSRNEKEFAMTMPLKPEAFDATIAPVLRAVAYLRVSTGRQAENDLSIPDQRKQIAAFCISKGWRLVDEHVEPGATATDDNRPAFQRLMERATDGDRPYDVVLVHSYSRFFRDSFGLEMYIRRLAKADVRLISITQELGDDPAQVMMRQVIALFDEYQSKENAKHVIRAMKENARQGFHNGAPVPLGYRAVEVERRGNKAKKQLAIDPVEAETVRMIFRLYHTGDGKSGPLGTKEIVKRLNAMGERTKRGARFGVGTLHGILTNRTYLGEMVFNRRDSRTLKAKPASEHVIVAVPAIIDRDEFETVQSMLKVRNPRVTPPRVVTGPILLTGLATCATCGGGMTLRTGTSKNGTVHRYYTCSNAARAGKSVCAGRSIRMDTLDELVVEHLSDRLLTSTRLTEILAAISVGRAAKAAEVDGRIIRLQGELTETETRLKRIYTTIEEGIAEMDDILRERIASLKIDRERIQASLDRARTHAVPASDIPPAVVEEFVRMMRKNITTGDTPFRKAYIQAVVDQVQVGEREVKIIGNKAAIHQAMSGSKKFWPGVRSFERKWR

SEQ ID NO: 42642 - DNA, 50 bp, Rhizobium pusense
  source 1..50: mol_type = genomic DNA
ttcgcagttttgaacggaaatggcgcgccatctatgacgaaaatccgaac

SEQ ID NO: 42643 - DNA, 40 bp, Rhizobium pusense
  source 1..40: mol_type = genomic DNA
ttttaagaaaggaaatggcgcacccgaagagattcgaact

SEQ ID NO: 42644 - DNA, 50 bp, Rhizobium pusense
  source 1..50: mol_type = genomic DNA
ttcgcagttttgaacggaaatggcacgccatctatgacgaaaatccgaac

SEQ ID NO: 42645 - DNA, 40 bp, Rhizobium pusense
  source 1..40: mol_type = genomic DNA
aattaagaaaggcaagctcacaactgaagtgattctaact

SEQ ID NO: 42646 - protein, 522 aa, Mediterraneibacter glycyrrhizinilyticus
MKIAAYCRVSTDKADQLNSLEAQKEFFSEYTQRTGDVLVKLYADEGISGTKIKNRKEFLHMMSDAEKGMFDMVVVKDISRFARNTVDLLQNVRKLKSLGIETQFLTANMTSMGNSEFVLTIFGALAQEESANTSKRVKFGKKLNAEKGRVPNIVYGYDKTIGDYFNLEVNKEESKIVKQIYKWYTEEGYGAAKISNMLNEKGYRTKRNCKWSQNAICRILTNEIYTGKIINGKQEISDFLTGQRREKDETEWLVAERPELRIIEDEVFEKAQEILRGRNDAFNLNHERQSNKYLFSTLIKCKECGWSFRRTVRTYKNTYVRWVCSGRNGKGADSCPNKTAVDEEELIQVLQEYFNRVLQQKNKVIDYVVKEFQRVYKAKDENAEYEKELNLQIARLQRMRQKYMDMYTDDLISREELNDKLGGTRQELDRLENELKMVSSNLTKGDQMETILNDTFKQIEDITDVHEMTNVQLKRLIKKIEVDKDGNVDIYLRLLGDLGLNESILVEDECENKTALNSNDQT

SEQ ID NO: 42647 - DNA, 50 bp, Mediterraneibacter glycyrrhizinilyticus
  source 1..50: mol_type = genomic DNA
cagctctaaatagtaacgaccaaacatatagatgtaacaaaagaggtgtt

SEQ ID NO: 42648 - DNA, 40 bp, Mediterraneibacter glycyrrhizinilyticus
  source 1..40: mol_type = genomic DNA
aatcagtaaaagtacggtacataaagatgtcaccgaacgg

SEQ ID NO: 42649 - DNA, 50 bp, Mediterraneibacter glycyrrhizinilyticus
  source 1..50: mol_type = genomic DNA
cagctctaaatagtaacgaccaaatttatagatgtaacaaaagaggtgtt

SEQ ID NO: 42650 - DNA, 40 bp, Mediterraneibacter glycyrrhizinilyticus
  source 1..40: mol_type = genomic DNA
aatcaggaaaagcaggggattgaaggaagtcacccaaaga

SEQ ID NO: 42651 - protein, 513 aa, Bacteroides helcogenes; identical to SEQ ID NO: 41806

SEQ ID NO: 42652 - DNA, 50 bp, Bacteroides helcogenes; identical to SEQ ID NO: 40042
  source 1..50: mol_type = genomic DNA

SEQ ID NO: 42653 - DNA, 40 bp, Bacteroides helcogenes
  source 1..40: mol_type = genomic DNA
cagcttattttatttatgtcggaatgaggcgactcgaacg

SEQ ID NO: 42654 - DNA, 50 bp, Bacteroides helcogenes
  source 1..50: mol_type = genomic DNA
ttttgctcgtttgtcgccttctgtcagctacactatcgaattatcgaaca

SEQ ID NO: 42655 - DNA, 40 bp, Bacteroides helcogenes
  source 1..40: mol_type = genomic DNA
catcttattttagatatgtcataatgaagacacatgaact

SEQ ID NO: 42656 - protein, 520 aa, Moorella glycerini
MYLPEDATINNIICYLRRSRQDIARERRTGEDTLAAQRKLMVDELEKLKVPYDIAEEIGSGDKIETRPVFQQVIKELKEGKYDAIAVKEIPRLGRGTYTDMGQIYDLIVNKRIFILTPFKTYDPQNSADLRQIRFELFLAREEFEMTRERLIGARYTYAKEGKWVAGTVPYGYRLNQNTMRLEPYEEEAKVVRLIFDLFNNGLEGKEVSHKAIATYLTRLGITSPGRAARWNYLSVKRITENEVYIGTVKFRTSRRVKNRHYERPESEWIVVHDAHPPIIDKETWEMARAKTKLKNASRPHVKMDFSPCELAGLVICAKCGKHMIRQLNVQHYRKKTGGTSVYHKEFLFCPNGCGFVKYRDVEASILNYLEQLGEFNAQKLVEMFNETYNAQKEAAATLDVSEAIEQKKAELRRRLNFICEKYEAGIYDDQTFLERQQEIKKEMALLENIPQNNKTPGDAEKEMVTLKENIKTFLAAYNAAKDKTAKNNLLRGLISAVYLTKTGKGKFNLEIYPLFSFEK

SEQ ID NO: 42657 - DNA, 50 bp, Moorella glycerini
  source 1..50: mol_type = genomic DNA
gtggtatgaggtaactgacaactcatcggatgttacctcatagcactaaa

SEQ ID NO: 42658 - DNA, 40 bp, Moorella glycerini
  source 1..40: mol_type = genomic DNA
tgtgggcaattattacctcgtccgccgagatcaaagcaaa

SEQ ID NO: 42659 - DNA, 50 bp, Moorella glycerini
  source 1..50: mol_type = genomic DNA
gtggtatgaggtaactgacaactcaacggatgttacctcatagcactaaa

SEQ ID NO: 42660 - DNA, 40 bp, Moorella glycerini
  source 1..40: mol_type = genomic DNA
tgtggtcaataagtaaatcaatagtcaagatcaaagctaa

SEQ ID NO: 42661 - protein, 567 aa, Clostridium botulinum; identical to SEQ ID NO: 38756

SEQ ID NO: 42662 - DNA, 50 bp, Clostridium botulinum; identical to SEQ ID NO: 38747
  source 1..50: mol_type = genomic DNA

SEQ ID NO: 42663 - DNA, 40 bp, Clostridium botulinum
  source 1..40: mol_type = genomic DNA
catagatttagcaactggacaaggtgccgacaaagttatg

SEQ ID NO: 42664 - DNA, 50 bp, Clostridium botulinum
  source 1..50: mol_type = genomic DNA
tattgtgtttgagtgacagcggaagctgcatgcgacactcaaatgcaata

SEQ ID NO: 42665 - DNA, 40 bp, Clostridium botulinum
  source 1..40: mol_type = genomic DNA
cctaattctagcatatggagcaggtgccaaggaagttttg

SEQ ID NO: 42666 - protein, 479 aa, Streptococcus pneumoniae
MNKVAIYVRVSTKGQAEEGYSIDEQIALLTSYCSIHKWKIHDTYVDAGISGATIERPELSRLSRDAQKKKFNTMIVYDLKRLGRSQRNNISFIEDVLEKNGIGFISLTENFDTSTPLGKAMVGILSAFGQLDRDTIRERMMMGKIGRAKSGKPMMTSTIAFGYTYDKVTSSLNINPAEAIIVKNIYNEYLSGRSLTKLRDYLNENDLLRNGKPWNYQGVSRVLRNPVYMGMVRFRGEVYQGNHDPIIDSETFEAVQKELKKRQLETYEFNKNTRPFRAKYMLSGIIKCGYCGSPMGVTLGTKRKDGTRNIRYQCVNRFPRTTKGITVYNNGQKCNSGFYEKDDIEIYVLGQVRLLQLNKAKLNKMFETPEIINVEEIENQINSLNNKMKRLNDLYLNDMISLDELKTQTYTFLKQKDLLENELNNNPAIHQEENRKQFQKLLGTKDITQLSYEEQSFAIKNLIDKVFVKPGIIDINWRI

SEQ ID NO: 42667 - DNA, 50 bp, Streptococcus pneumoniae
  source 1..50: mol_type = genomic DNA
acaacaaatttagatactcttgtttcaagtagcgtatctaaaactcttat

SEQ ID NO: 42668 - DNA, 40 bp, Streptococcus pneumoniae
  source 1..40: mol_type = genomic DNA
aatggcttgcgctagaccttcgacaactgctgtcttacca

SEQ ID NO: 42669 - DNA, 50 bp, Streptococcus pneumoniae
  source 1..50: mol_type = genomic DNA
acaacaaatttagatactcttgttggaagtagcgtatctaaaactcttat

SEQ ID NO: 42670 - DNA, 40 bp, Streptococcus pneumoniae
  source 1..40: mol_type = genomic DNA
catgctttgccctggaacagggagaactggtgtcttccca

SEQ ID NO: 42671 - protein, 511 aa, Clostridiaceae bacterium
MNIAAYCRVSTDKSDQLNSLEAQKKFFTEYTEKNGHNLVRLYADEGISGTKIKNRKEFLRLMRDAKHGLFDMVVVKDISRFARNTVDLLQSIRTLKALGIETTFLTANMTVLGQSEFVLTIFGALAQEESANTSKRVKFGKKMNAEKGRVPNIVYGYDKTIGDYFNLAINEGEARIVKQIYDWYLNEGYGAAKIANMLNERGLKTKRNCSFSQNAVCRILTNELYTGKIINGKQEVTDFLTGTRAEKDESEWFVTDRPDLRIIEPEQFDRAQEILHGRHDTFRIKHERQSNKYLFSTLIKCKECGWSFRRTVRTYKNTYVRWVCSRHNGKGADSCPNAVTVDEDDLIRALEEYFAGLLKAKKNIISYVVKEFTKIYKAKDDNENYEKGLNDQLAKLKKTRQKYMDMYTDDLISRQELNEKIGGMKSEMERLENELKLVQYNLDKGDQLEDIIKKTFQSIEDITSVRDMTNEQLKQIIQKIEVDKDGNVDIYLRLLGDLGLDENALIIDNHT

SEQ ID NO: 42672 - DNA, 50 bp, Clostridiaceae bacterium
  source 1..50: mol_type = genomic DNA
acgctctaattatagacaaccatacatacagtagtgataaaatagaacgg

SEQ ID NO: 42673 - DNA, 40 bp, Clostridiaceae bacterium
  source 1..40: mol_type = genomic DNA
aattagcaagagtacagtgcataaagatgtaaccgaccgc

SEQ ID NO: 42674 - DNA, 50 bp, Clostridiaceae bacterium
  source 1..50: mol_type = genomic DNA
acgctctaattatagacaaccataattacagtagtgataaaatagaacgg

SEQ ID NO: 42675 - DNA, 40 bp, Clostridiaceae bacterium
  source 1..40: mol_type = genomic DNA
aattagacagaacacattgatttctgatgtaacagacagc

SEQ ID NO: 42676 - protein, 577 aa, Pseudomonas proteolytica
METLKIDRSKPLAVAYVRWSSTVQGGDDKDSYDRQTSPLEFFTSSTGVPVVETIIDPGQSAFTGENSKKGKLKGILDRIESGEIRKGDFLVVESIDRITRMRVLDGVALIQDGILKKGVKLYTTTDNKIYSYEDPDKDFENLLMISLIAKRANEESEIKSKRRRSAWSKAKTKATDGVPFNAHNLPYGLRHNLETNSFEIVEEEAQEIKQIFEGLKYEGVSNTLKKVNLTSKRKWSRKTVHLMLTSRYPIGTLMSQKRDGKKKVFERYIENYYPAILSHKEFQDALQAMKLRGKVKDYGRNTEGYLNIFKHCVKCAACGQSLMFEKSINQKGIKYGYFHCYTRKETLSHCDVPRFRFDFAFGTLLQLVRQLTCEDDDFDVHPWAREMPADYKSTMADDEINMENFENQFLSLFSKSTATEAIKTEFYEAENELAKSKSLYENMTASFSQYKDGRIPSFFIQQMADAELAYENAKSNIDALSTQIDNAESSLEIYSYRDIIELYSTDEGRLKLNHFFKSNGLKFVFNYEAKTRTVFMVVRDKKDAEIYRIGKKFTLHNPLKEFGIDNLNEHMNAVVKI

SEQ ID NO: 42677 - DNA, 50 bp, Pseudomonas proteolytica
  source 1..50: mol_type = genomic DNA
tgtgtgagaaaagcctgtccttttgagagcggatagacgtatcatgcact

SEQ ID NO: 42678 - DNA, 40 bp, Pseudomonas proteolytica
  source 1..40: mol_type = genomic DNA
ggtgctgcgcgagccgctggagtccgggcatatcgtgatt

SEQ ID NO: 42679 - DNA, 50 bp, Pseudomonas proteolytica
  source 1..50: mol_type = genomic DNA
tgtgtgagaaaagcctgtcctttttggagcggatagacgtatcatgcact

SEQ ID NO: 42680 - DNA, 40 bp, Pseudomonas proteolytica
  source 1..40: mol_type = genomic DNA
gatgttgcccgatcctctgtggtcagcgcagttcctgatt

SEQ ID NO: 42681 - protein, 515 aa, Bacillus thuringiensis; identical to SEQ ID NO: 36441

SEQ ID NO: 42682 - DNA, 50 bp, Bacillus thuringiensis; identical to SEQ ID NO: 36442
  source 1..50: mol_type = genomic DNA

SEQ ID NO: 42683 - DNA, 40 bp, Bacillus thuringiensis
  source 1..40: mol_type = genomic DNA
tgttgccattaggcgcatgagatttcccccatttaatcct

SEQ ID NO: 42684 - DNA, 50 bp, Bacillus thuringiensis
  source 1..50: mol_type = genomic DNA
tgttgtcaccttgttggtgtaatttcgttgacgacaacatggtagcgaca

SEQ ID NO: 42685 - DNA, 40 bp, Bacillus thuringiensis
  source 1..40: mol_type = genomic DNA
cttgttcattagttgcatgtcaattcccccatttaatctg

SEQ ID NO: 42686 - protein, 515 aa, Bacillus thuringiensis
MKTAIYLRKSRADLEAEARGEGETLAKHRTTLLKIAKEMNLNVLAVREEIVSGESLVKRPEMLALLEEIEDNKYDVVLCMDMDRLGRGGMKEQGIILETFKRSNTKIMTPRKTYDLNDEWDEEYSEFEAFMARKELKIITRRMQRGRVASVEAGNYLGTHAPFGYDIHRLNKRERTLTINPEEASVVRMIFDWYANEDMGANAIRSKLNDLGYKSKLGNEWNPYSILDILKNNVYIGKVTWQKRKEVKRPDAVKRSCARQDKSDWIIADGKHEPIIPESLFEQVQEKLNSRYHVPYNTNGIKNPLAGIIKCSKCGYSMVQRYPKNRKETMDCKHRGCENKSSYTELIEKRLLEALKEWYINYKADFEKHKQDNKLKETQVIQMNEAALRKLEKELVDVQKQKNNLHDLLERGVYTVDMFLERSNVVSDRITEITSTMENLKKEIKTEIKKEKVKKDTIPQVEHVLDLYFKTDDPKKKNSLLKSVLEKAVYKKEKWQRLDDFELVLYPKLPQDGDI

SEQ ID NO: 42687 - DNA, 50 bp, Bacillus thuringiensis; identical to SEQ ID NO: 36487
  source 1..50: mol_type = genomic DNA

SEQ ID NO: 42688 - DNA, 40 bp, Bacillus thuringiensis
  source 1..40: mol_type = genomic DNA
tgtggccattaggcgcatgagatttaccccatttaatcct

SEQ ID NO: 42689 - DNA, 50 bp, Bacillus thuringiensis
  source 1..50: mol_type = genomic DNA
tgtcgtcaccttgttggtgtaatttcgttgacgccaacagggtgactaca

SEQ ID NO: 42690 - DNA, 40 bp, Bacillus thuringiensis; identical to SEQ ID NO: 42685
  source 1..40: mol_type = genomic DNA

SEQ ID NO: 42691 - protein, 515 aa, Bacillus thuringiensis
MKTAIYLRKSRADLEAEARGEGETLAKHRTTLLKIAKEMNLNVLAVREEIVSGESLVKRPEMLALLEEIEDNKYDVVLCMDMDRLGRGGMKEQGIILETFKRSNTKIMTPRKTYDLNDEWDEEYSEFEAFMARKELKIITRRMQRGRIASVEAGNYLGTHAPYGYDIHRLNKRERTLTINSEEASVVRMIFDWYANEDMGANAIRSKLNDLGYKSKLGNEWNPYSILDILKNNVYIGKVTWQKRKEVKQPDAVKRSCARQDKSDWIIADGKHEPIIPESLFEQVQEKLNSRYHVPYNTNGIKNPLAGIIKCSKCGYSMVQRYPKNRKETMDCKHRGCENKSSYTELIEKRLLEALKEWYINYKADFEKHKQDDKLKETQVIQMNEAALRKLEKELVDVQKQKNNLHDLLERGVYTVDMFLERSNVVSDRITEITSTIENLKKEIKTEIKKEKVKKDTIPQVEHVLDLYFKTDDPKKKNSLLKSVLEKAVYKKEKWQRLDDFELVLYPKLPQDGDI

SEQ ID NO: 42692 - DNA, 50 bp, Bacillus thuringiensis
  source 1..50: mol_type = genomic DNA
tgtcgtcaccttgttggtgtaattaggttgacgccaacagggtgacgaca

SEQ ID NO: 42693 - DNA, 40 bp, Bacillus thuringiensis; identical to SEQ ID NO: 42688
  source 1..40: mol_type = genomic DNA

SEQ ID NO: 42694 - DNA, 50 bp, Bacillus thuringiensis
  source 1..50: mol_type = genomic DNA
tgtcgtcaccttgttggtgtaatttcgttgacgccaacagggtgacgaca

SEQ ID NO: 42695 - DNA, 40 bp, Bacillus thuringiensis; identical to SEQ ID NO: 42685
  source 1..40: mol_type = genomic DNA

SEQ ID NO: 42696 - protein, 515 aa, Bacillus thuringiensis
MKTAIYLRKSRADLEAEARGEGETLAKHRTTLLKIAKEMNLNVLSVREEIVSGESLVKRPEMLALLEEIEDKKYDVVLCMDMDRLGRGGMKEQGIILETFKRSNTKIMTPRKTYDLNDEWDEEYSEFEAFMARKELKIITRRMQRGRIASVEAGNYLGTHAPYGYDIHRLNKRERTLTINSEEASVVRMIFDWYANEDMGANAIRSKLNDLGYKSKLGNEWNPYSILDILKNNVYIGKVTWQKRKEVKQPDAVKRSCTRQDKSDWIIADGKHEPIIPESLFEQVQEKLNSRYHVPYNTNGIKNPLAGIIKCSKCGYSMVQRYPKNRKETMDCKHRGCENKSSYTELIEKRLLEALKEWYINYKADFEKHKQDDKLKETQVIQMNEAALRKLEKELVDVQKQKNNLHDLLERGVYTVDMFLERSNVVSDRITEITSTMENLKKEIKTEIKKEKVKKDTIPQVENVLDLYFKTDDPKKKNSLLKSVLEKAVYKKEKWQRLDDFELVLYPKLPQDGDI

SEQ ID NO: 42697 - DNA, 50 bp, Bacillus thuringiensis
  source 1..50: mol_type = genomic DNA
tgtcgtcaccttgttggtgtaattaggttgacgacaacagggtgacgaca

SEQ ID NO: 42698 - DNA, 40 bp, Bacillus thuringiensis; identical to SEQ ID NO: 42688
  source 1..40: mol_type = genomic DNA

SEQ ID NO: 42699 - DNA, 50 bp, Bacillus thuringiensis
  source 1..50: mol_type = genomic DNA
tgtcgtcaccttgttggtgtaatttcgttgacgacaacagggtgacgaca

SEQ ID NO: 42700 - DNA, 40 bp, Bacillus thuringiensis; identical to SEQ ID NO: 42685
  source 1..40: mol_type = genomic DNA

SEQ ID NO: 42701 - protein, 515 aa, Bacillus thuringiensis
MKTAIYLRKSRADLEAEARGEGETLAKHRSTLLKIAKEMNLNILTVREEIVSGESLVKRPEMLALLEEIEDNKYDVVLCMDMDRLGRGGMKEQGIILETFKRSNTKIMTPRKTYDLNDEWDEEYSEFEAFMARKELKIITRRMQRGRVASVEAGNYLGTHAPFGYDIHRLNKRERTLTINPEEASVVRMIFDWYANEDMGANAIRSKLNDLGYKSKLGNEWNPYSILDILKNNVYIGKVTWQKRKEVKRPDAVKRSCARQDKSDWIIADGKHEPIIPESLFEQVQEKLNSRYHIPYNTNGIKNPLAGIIKCSKCGYSMVQRYPKNRKETMDCKHRGCENKSSYTELIEKRLLEALKEWYINYKADFEKHKQDDKFKETQVIQMNEAALRKLEKELVDVQKQKNNLHDLLERGVYTVDMFLERSNVVSDRITEITSTMENLKKEIKTEIKKEKVKKDTIPQVEHVLDLYFKTDDPKKKNSLLKSVLEKAVYKKEKWQRLDDFELVLYPKLPQDGDI

SEQ ID NO: 42702 - DNA, 50 bp, Bacillus thuringiensis; identical to SEQ ID NO: 1612
  source 1..50: mol_type = genomic DNA

SEQ ID NO: 42703 - DNA, 40 bp, Bacillus thuringiensis; identical to SEQ ID NO: 42688
  source 1..40: mol_type = genomic DNA

SEQ ID NO: 42704 - DNA, 50 bp, Bacillus thuringiensis
  source 1..50: mol_type = genomic DNA
tgtcgtcaccttgttggtgtaatttcgttgacgccaacagggtgataaca

SEQ ID NO: 42705 - DNA, 40 bp, Bacillus thuringiensis; identical to SEQ ID NO: 42685
  source 1..40: mol_type = genomic DNA

SEQ ID NO: 42706 - protein, 515 aa, Bacillus thuringiensis
MKTAIYLRKSRADLEAEARGEGETLAKHRTTLLKIAKEMNLNVLSVREEIVSGESLVKRPEMLALLEEIEDNKYDVVLCMDMDRLGRGGMKEQGIILETFKRSNTKIMTPRKTYDLNDEWDEEYSEFEAFMARKELKIITRRMQRGRVASVEAGNYLGTHAPFGYDIHRLNKRERTLTIIPEEASVVRMIFDWYANEDMGANAIRSKLNDLGYKSKLGNEWNPYSILDILKNNVYIGKVTWQKRKEVKRPDAVKRSCARQDKSEWIIADGKHEPIIPQSLFEQVQEKLNSRYHIPYNTNGIKNPLAGIIKCAKCGYSMVQRYPKNRKETMDCKHRGCENKSSYTELIEKRLLEALKEWYINYKADFEKHKQDDKLKETQVIQMNEAALRKLEKELVDVQKQKNNLHDLLERGVYTVDMFLERSNVVSDRITEITSTMKNLKKEIKTEIKKEKVKKDTIPQVEHVLDLYFKTDDPKKKNSLLKSVLEKAVYKKEKWQRLDDFELVLYPKLPQDGDI

SEQ ID NO: 42707 - DNA, 50 bp, Bacillus thuringiensis; identical to SEQ ID NO: 1612
  source 1..50: mol_type = genomic DNA

SEQ ID NO: 42708 - DNA, 40 bp, Bacillus thuringiensis; identical to SEQ ID NO: 42688
  source 1..40: mol_type = genomic DNA

SEQ ID NO: 42709 - DNA, 50 bp, Bacillus thuringiensis; identical to SEQ ID NO: 42704
  source 1..50: mol_type = genomic DNA

SEQ ID NO: 42710 - DNA, 40 bp, Bacillus thuringiensis; identical to SEQ ID NO: 42685
  source 1..40: mol_type = genomic DNA

SEQ ID NO: 42711 - protein, 515 aa, Bacillus thuringiensis
MKTAIYLRKSRADLEAEARGEGETLAKHRTTLLKIAKEMNLNVLSVREEIVSGESLVKRPEMLALLEEIEDNKYDVVLCMDMDRLGRGGMKEQGIILETFKRSNTKIMTPRKTYDLNDEWDEEYSEFEAFMARKELKIITRRMQRGRVASVEAGNYLGTHAPFGYDIHRLNKRERTLTIIPEEASVVRMIFDWYANEDMGANAIRSKLNDLGYKSKLGNEWNPYSILDILKNNVYIGKVTWQKRKEVKRPDAVKRSCARQDKSEWIIADGKHEPIIPQSLFEQVQEKLNSRYHIPYNTNGIKNPLAGIIKCAKCGYSMVQRYPKNRKETMDCKHRGCENKSSYTELIEKRLLEALKEWYINYKADFEKHKQDDKLKETQVIQMNEAALRKLEKELVDVQKQKNNLHDLLERGVYTVDIFLERSNVVSDRITEITSTMENLKKEIKTEIKKERVKKGTIPQVEHVLDLYFKTDDPKKKNSLLKSVLEKAVYKKEKWQRLDDFELVLYPKLPQDGDI

SEQ ID NO: 42712 - DNA, 50 bp, Bacillus thuringiensis; identical to SEQ ID NO: 42692
  source 1..50: mol_type = genomic DNA

SEQ ID NO: 42713 - DNA, 40 bp, Bacillus thuringiensis; identical to SEQ ID NO: 42688
  source 1..40: mol_type = genomic DNA

SEQ ID NO: 42714 - DNA, 50 bp, Bacillus thuringiensis; identical to SEQ ID NO: 42694
  source 1..50: mol_type = genomic DNA

SEQ ID NO: 42715 - DNA, 40 bp, Bacillus thuringiensis; identical to SEQ ID NO: 42685
  source 1..40: mol_type = genomic DNA

SEQ ID NO: 42716 - protein, 515 aa, Bacillus thuringiensis
MKTAIYLRKSRADLEAEARGEGETLAKHRTTLLKIAKEMNLNVLAVREEIVSGESLVKRPEMLALLEEIEDNKYDVVLCMDMDRLGRGGMKEQGIILETFKRSNTKIMTPRKTYDLNDEWDEEYSEFEAFMARKELKIITRRMQRGRIASVEAGNYLGTHAPFGYDIHRLNKRERTLTINPEEASVVRMIFDWYANEDMGANAIRSKLNDLGYKSKLGNEWNPYSILDILKNNVYIGKVTWQKRKEVKRPDAVKRSCARQDKSDWIIADGKHEPIIPESLFEQVQEKLNSRYHVPYNTNGIKNPLAGIIKCRKCGYSMVQRYPKNRKETMDCKHRGCENKSSYTELIEKRLLEALKEWYINYKADFEKHKQDDKLKETQVIQMNEAALRKLEKELVDVQKQKNNLHDLLERGIYTVDMFLERSNVVSDRITEITSTMENLKKEIKTEIKKEKVKKDTIPQVEHVLDLYFKTDDPKKKNSLLKSVLEKAVYKKEKWQRLDDFELVLYPKLPQDGDI

SEQ ID NO: 42717 - DNA, 50 bp, Bacillus thuringiensis; identical to SEQ ID NO: 1612
  source 1..50: mol_type = genomic DNA

SEQ ID NO: 42718 - DNA, 40 bp, Bacillus thuringiensis; identical to SEQ ID NO: 42688
  source 1..40: mol_type = genomic DNA

SEQ ID NO: 42719 - DNA, 50 bp, Bacillus thuringiensis; identical to SEQ ID NO: 42704
  source 1..50: mol_type = genomic DNA

SEQ ID NO: 42720 - DNA, 40 bp, Bacillus thuringiensis; identical to SEQ ID NO: 42685
  source 1..40: mol_type = genomic DNA

SEQ ID NO: 42721 - protein, 515 aa, Bacillus thuringiensis; identical to SEQ ID NO: 42706

SEQ ID NO: 42722 - DNA, 50 bp, Bacillus thuringiensis; identical to SEQ ID NO: 36477
  source 1..50: mol_type = genomic DNA

SEQ ID NO: 42723 - DNA, 40 bp, Bacillus thuringiensis; identical to SEQ ID NO: 42688
  source 1..40: mol_type = genomic DNA

SEQ ID NO: 42724 - DNA, 50 bp, Bacillus thuringiensis
  source 1..50: mol_type = genomic DNA
tgtcgtcaccttgttggtgtaatttcgttgactccaacagggtgataaca

SEQ ID NO: 42725 - DNA, 40 bp, Bacillus thuringiensis; identical to SEQ ID NO: 42685
  source 1..40: mol_type = genomic DNA

SEQ ID NO: 42726 - protein, 515 aa, Bacillus thuringiensis
MKTAIYLRKSRADLEAEARGEGETLAKHRTTLLKIAKEMNLNVLAVREEIVSGESLVKRPEMLALLEEIEDNKYDVVLCMDMDRLGRGGMKEQGIILETFKRSNTKIMTPRKTYDLNNEWDEEYSEFEAFMARKELKIITRRMQRGRVASVEAGNYLGTHAPFGYDIHRLNKRERTLTINPEEASVVRMIFDWYANEDMGANAIRSKLNDLGYKSKLGNEWNPYSILDILKNNVYIGKVTWQKRKEVKRPDAVKRSCARQDKSDWIIADGKHEPIIPESLFEQVQEKLNSRYHIPYNTNGIKNPLAGIIKCAKCNYSMVQRYPKNRKETMDCKHRGCENKSSYTELIEKRLLEALKEWYINYKADFEKHKQDDKLKETQVIQMNEAALRKLEKELVDVQKQKNNLHDLLERGVYTVDMFLERSNVVSDRITEITSTMENLKKEIKTEIKKEKVKKDTIPQVEHVLDLYFKTDDPKKKNSLLKSVLEKAVYKKEKWQRLDDFELVLYPKLPQDGDI

SEQ ID NO: 42727 - DNA, 50 bp, Bacillus thuringiensis; identical to SEQ ID NO: 1612
  source 1..50: mol_type = genomic DNA

SEQ ID NO: 42728 - DNA, 40 bp, Bacillus thuringiensis; identical to SEQ ID NO: 42688
  source 1..40: mol_type = genomic DNA

SEQ ID NO: 42729 - DNA, 50 bp, Bacillus thuringiensis; identical to SEQ ID NO: 42704
  source 1..50: mol_type = genomic DNA

SEQ ID NO: 42730 - DNA, 40 bp, Bacillus thuringiensis; identical to SEQ ID NO: 42685
  source 1..40: mol_type = genomic DNA

SEQ ID NO: 42731 - protein, 515 aa, Bacillus thuringiensis
MKTAIYLRKSRADLEAEARGEGETLAKHRSTLLKIAKEMNLNVLAVREEIVSGESLVKRPEMLALLEEIEDNKYDVVLCMDMDRLGRGGMKEQGIILETFKRSNTKIMTPRKTYDLNDEWDEEYSEFEAFMARKELKIITRRMQRGRVASVEAGNYLGTHAPYGYDIHRLNKRERTLTINSEEASVVRMIFDWYANEDMGASAIRNKLNDLGYKSKLGNDWNPYSILDILKNNVYIGKVTWQKRKEVKRPDAVKRSCARQDKSDWIIADGKHEPIIPESLFEQVQEKLNSRYHLPYNTNGIKNPLAGIIKCSKCGYSMVQRYPKNRKETMDCKHRGCENKSSYTELIEKRLLEALKEWYINYKADFEKHKQDDKLKETQVIQMNEAALRKLEKELVDVQKQKNNLHDLLERGVYTVDMFLERSNVVSDRITEITSTMGNLKKEIKTEIKKEKVKKDTIPQVEHVLDLYFKTDDPKKKNSLLKSVLEKAVYKKEKWQRLDDFELVLYPKLPQDGDI

SEQ ID NO: 42732 - DNA, 50 bp, Bacillus thuringiensis; identical to SEQ ID NO: 1612
  source 1..50: mol_type = genomic DNA

SEQ ID NO: 42733 - DNA, 40 bp, Bacillus thuringiensis; identical to SEQ ID NO: 42688
  source 1..40: mol_type = genomic DNA

SEQ ID NO: 42734 - DNA, 50 bp, Bacillus thuringiensis; identical to SEQ ID NO: 42704
  source 1..50: mol_type = genomic DNA

SEQ ID NO: 42735 - DNA, 40 bp, Bacillus thuringiensis; identical to SEQ ID NO: 42685
  source 1..40: mol_type = genomic DNA

SEQ ID NO: 42736 - protein, 515 aa, Bacillus thuringiensis; identical to SEQ ID NO: 42706

SEQ ID NO: 42737 - DNA, 50 bp, Bacillus thuringiensis; identical to SEQ ID NO: 42692
  source 1..50: mol_type = genomic DNA

SEQ ID NO: 42738 - DNA, 40 bp, Bacillus thuringiensis; identical to SEQ ID NO: 42688
  source 1..40: mol_type = genomic DNA

SEQ ID NO: 42739 - DNA, 50 bp, Bacillus thuringiensis; identical to SEQ ID NO: 42694
  source 1..50: mol_type = genomic DNA

SEQ ID NO: 42740 - DNA, 40 bp, Bacillus thuringiensis; identical to SEQ ID NO: 42685
  source 1..40: mol_type = genomic DNA

SEQ ID NO: 42741 - protein, 515 aa, Bacillus thuringiensis
MKTAIYLRKSRADLEAEARGEGETLAKHRTTLLKIAKEMNLNVLAVREEIVSGESLVKRPEMLALLEEIEDNKYDVVLCMDMDRLGRGGMKEQGIILETFKRSNTKIMTPRKTYDLNDEWDEEYSEFEAFMARKELKIITRRMQRGRIASVEAGNYLGTHAPYGYDIHRLNKRERTLTINSEEASVIRMIFDWYANEDMGASAIRNKLNELGYKSKLGNEWNPYSILDILKNNVYIGKVTWQKRKEVKRPDAVKRSCARQDKSDWIIADGKHEPIIPESLFEQVQEKLNSRYHIPYNTNGIKNPLAGIIKCAKCGYSMVQRYPKNRKETMDCKHRGCENKSSYTELIEKRLLEALKEWYINYKADFEKHKQDDKLKETQVIQMNEAALRKLEKELVDVQKQKNNLHDLLERGVYTVDMFLERSNVISDRITEITSTMENLKKEIKTEIKKEKVKKDTIPQVEHVLDLYFKTDDPKKKNSLLKSVLEKAVYKKEKWQRLDDFELVLYPKLPQDGDI

SEQ ID NO: 42742 - DNA, 50 bp, Bacillus thuringiensis; identical to SEQ ID NO: 36457
  source 1..50: mol_type = genomic DNA

SEQ ID NO: 42743 - DNA, 40 bp, Bacillus thuringiensis; identical to SEQ ID NO: 42688
  source 1..40: mol_type = genomic DNA

SEQ ID NO: 42744 - DNA, 50 bp, Bacillus thuringiensis
  source 1..50: mol_type = genomic DNA
tgtcgtcaccttgttggtgtaatttcgttgacgccaacagggtgatgaca

SEQ ID NO: 42745 - DNA, 40 bp, Bacillus thuringiensis; identical to SEQ ID NO: 42685
  source 1..40: mol_type = genomic DNA

SEQ ID NO: 42746 - protein, 515 aa, Bacillus cereus; identical to SEQ ID NO: 42706

SEQ ID NO: 42747 - DNA, 50 bp, Bacillus cereus; identical to SEQ ID NO: 36457
  source 1..50: mol_type = genomic DNA

SEQ ID NO: 42748 - DNA, 40 bp, Bacillus cereus; identical to SEQ ID NO: 42688
  source 1..40: mol_type = genomic DNA

SEQ ID NO: 42749 - DNA, 50 bp, Bacillus cereus; identical to SEQ ID NO: 42744
  source 1..50: mol_type = genomic DNA

SEQ ID NO: 42750 - DNA, 40 bp, Bacillus cereus; identical to SEQ ID NO: 42685
  source 1..40: mol_type = genomic DNA

SEQ ID NO: 42751 - protein, 515 aa, Bacillus cereus
MKTAIYLRKSRADLEAEARGEGETLAKHRTTLLKIAKEMNLNVLAVREEIVSGESLVKRPEMLALLEEIEDNKYDVVLCMDMDRLGRGGMKEQGIILETFKRSNTKIMTPRKTYDLNDEWDEEYSEFEAFMARKELKIITRRMQRGRVASVEAGNYLGTHAPFGYDIHRLNKRERTLTINPEEASVVRMIFDWYANEDMGANAIRSKLNDLGYKSKLGNEWNPYSILDILKNNVYIGKVTWQKRKEVKCPDAVKRSCARQEKSDWIIADGKHEPIIPESLFEQVQEKLNSRYHVPYNTNGIKNPLAGIIKCSKCGYSMVQRYPKNRKETMDCKHRGCENKSSYTELIEKRLLEALKEWYINYKADFEKHKQDDKLKETQVIQMNEAALRKLEKELVDVQKQKNNLHDLLERGVYTVDMFLERSNVVSDRITEITSTMENLKKEIKTEIKKEKVKKDTIPQVEHVLDLYFKTDDPKKKNSLLKSVLEKAVYKKEKWQRLDDFELVLYPKLPQDGDI

SEQ ID NO: 42752 - DNA, 50 bp, Bacillus cereus; identical to SEQ ID NO: 1612
  source 1..50: mol_type = genomic DNA

SEQ ID NO: 42753 - DNA, 40 bp, Bacillus cereus; identical to SEQ ID NO: 42688
  source 1..40: mol_type = genomic DNA

SEQ ID NO: 42754 - DNA, 50 bp, Bacillus cereus; identical to SEQ ID NO: 42704
  source 1..50: mol_type = genomic DNA

SEQ ID NO: 42755 - DNA, 40 bp, Bacillus cereus; identical to SEQ ID NO: 42685
  source 1..40: mol_type = genomic DNA

SEQ ID NO: 42756 - protein, 515 aa, Bacillus cereus
MKTAIYLRKSRADLEAEARGEGETLAKHRSTLLKIAKEMNLNVLAVREEIVSGESLVKRPEMLALLEEIEDNKYDVVLCMDMDRLGRGGMKEQGIILETFKRSNTKIMTPRKTYDLNDEWDEEYSEFEAFMARKELKIITRRMQRGRVASVEAGNYLGTHAPFGYDIHRLNKRERTLTINSEEASVVRMIFDWYANEDMGANAIRSKLNDLGYKSKLGNDWNPYSILDILKNNVYIGKVTWQKRKEIKRPDALKRSCARQDKSDWIIADGKHEPIISESLFEQVQEKLNSRYHIPYNTNGIKNPLAGIIKCAKCGYSMVQRYPKNRKETMDCKHRGCENKSSYTELIEKRLLEALKEWYINYKADFEKHKQDDKLKETKVIQMNEAALRKLEKELVDVQKQKNNLHDLLERGVYTVDMFLERSNVVSDRITEITSTMENLKKEIKTEIKKEKVKKDTIPQVEHVLDLYFKTDDPKKKNSLLKSVLEKAVYKKEKWQRLDDFELVLYPKLPQDGDI

SEQ ID NO: 42757 - DNA, 50 bp, Bacillus cereus
  source 1..50: mol_type = genomic DNA
tgtcgtcaccttgttggtgtaattaggttgacaccaacagggtaatgaca

SEQ ID NO: 42758 - DNA, 40 bp, Bacillus cereus; identical to SEQ ID NO: 42688
  source 1..40: mol_type = genomic DNA

SEQ ID NO: 42759 - DNA, 50 bp, Bacillus cereus
  source 1..50: mol_type = genomic DNA
tgtcgtcaccttgttggtgtaatttcgttgacaccaacagggtaatgaca

SEQ ID NO: 42760 - DNA, 40 bp, Bacillus cereus; identical to SEQ ID NO: 42685
  source 1..40: mol_type = genomic DNA

SEQ ID NO: 42761 - protein, 515 aa, Bacillus cereus
MKTAIYLRKSRADLEAEARGEGETLAKHRTTLLKIAKEMNLNVLAVREEIVSGESLVKRPEMLSLLEEIEDNKYDVVLCMDMDRLGRGGMKEQGIILETFKRSNTKIMTPRKTYDLNDEWDEEYSEFEAFMARKELKIITRRMQRGRIASVEAGNYLGTHAPFGYDIHRLNKRERTLTINAEEASVVRMIFDWYANEDMGASAIRSKLNDLGYKSKLGNEWNPYSILDILKNNVYIGKVTWQKRKEVKRPDAVKRSCARQDKADWIVADGKHESIIPESLFEQVQEKLNSRYHVPYNTNGIKNPLAGIIKCSKCGYSMVQRYPKNRKETMDCKHRGCENKSSYTELIEKRLLEALKEWYINYKADFEKHKQGDKLKETQVIQMNEAALRKLEKELVDVQKQKNNLHDLLERGVYTVDMFLERSKVISDRINEITSTMENLKKEIKTEIKKEKVKKDTIPQVEHVLDLYFKTDDPKKKNSLLKSVLEKAVYKKEKWQRLDDFELVLYPKLPQDGDI

SEQ ID NO: 42762 - DNA, 50 bp, Bacillus cereus; identical to SEQ ID NO: 1612
  source 1..50: mol_type = genomic DNA

SEQ ID NO: 42763 - DNA, 40 bp, Bacillus cereus
  source 1..40: mol_type = genomic DNA
tgtggccattaggcgcatgagatttaccccatttaatccc

SEQ ID NO: 42764 - DNA, 50 bp, Bacillus cereus; identical to SEQ ID NO: 42704
  source 1..50: mol_type = genomic DNA

SEQ ID NO: 42765 - DNA, 40 bp, Bacillus cereus; identical to SEQ ID NO: 42685
  source 1..40: mol_type = genomic DNA

SEQ ID NO: 42766 - protein, 515 aa, Bacillus cereus
MKTAIYLRKSRADLEAEARGEGETLAKHRTTLLKIAKEMNLNVLSVREEIVSGESLVKRPEMLALLEEIEDNKYDVVLCMDMDRLGRGGMKEQGIILETFKRSNTKIMTPRKTYDLNDEWDEEYSEFEAFMARKELKIITRRMQRGRVASVEAGNYLGTHAPFGYDIHRLNKRERTLTINPEEASVVRMIFDWYANEDMGANAIRSKLNDLGYKSKLGNEWNPYSILDILKNNVYIGKVTWQKRKEVKRPDAVKRSCARQDKSDWIIADGKHEPIIPESLFEQVQEKLNSRYHVPYNTNGIKNPLAGIIKCSKCGYSMVQRYPKNRKETMDCKHRGCENKSSYTELIEKRLLEALKEWYINYKADFEKHKQDDKLKETQVIQMNEAALRKLEKELVDVQKQKNNLHDLLERGVYTVDMFLERSNVISDRITEITSTMENLKKEIKTEIKKEKVKKDTIPQVEHVLDLYFKTDDPKKKNSLLKSVLEKAVYKKEKWQRLDDFELVLYPKLPQDGDI

SEQ ID NO: 42767 - DNA, 50 bp, Bacillus cereus; identical to SEQ ID NO: 1612
  source 1..50: mol_type = genomic DNA

SEQ ID NO: 42768 - DNA, 40 bp, Bacillus cereus; identical to SEQ ID NO: 42688
  source 1..40: mol_type = genomic DNA

SEQ ID NO: 42769 - DNA, 50 bp, Bacillus cereus; identical to SEQ ID NO: 42704
  source 1..50: mol_type = genomic DNA

SEQ ID NO: 42770 - DNA, 40 bp, Bacillus cereus; identical to SEQ ID NO: 42685
  source 1..40: mol_type = genomic DNA

SEQ ID NO: 42771 - protein, 515 aa, Bacillus cereus
MKTAIYLRKSRADLEAEARGEGETLAKHRTTLLKIAKEMNLNVLAVREEIVSGESLVKRPEMLSLLEEIEDNKYDVVLCMDMDRLGRGGMKEQGIILETFKRSNTKIMTPRKTYDLNDEWDEEYSEFEAFMARKELKIITRRMQRGRVASVEAGNYLGTHAPFGYDIHRLNKRERTLTINSEEASVVRMIFDWYANEDMGANAIRSKLNDLGYKSKLGNEWNPYSILDILKNNVYIGKVTWQKRKEVKRPDAVKRSCARQDKSDWIIADGKHEPIIPESLFEQVQEKLNSRYHVPYNTNGIKNPLAGIIKCSKCGYSMVQRYPKNRKETMDCKHRGCENKSSYTELIEKRLLEALKEWYINYKADFEKHKQDDKLKETQVIQMNEAALRKLEKELVDVQKQKNNLHDLLERGVYTVDMFLERSNVVSDRITEITSTMGNLKKEIKTEIKKEKVKKDTIPQVEHVLDLYFKTDDPKKKNSLLKSVLEKAVYKKEKWQRLDDFELVLYPKLPQDGDI

SEQ ID NO: 42772 - DNA, 50 bp, Bacillus cereus; identical to SEQ ID NO: 36457
  source 1..50: mol_type = genomic DNA

SEQ ID NO: 42773 - DNA, 40 bp, Bacillus cereus; identical to SEQ ID NO: 42688
  source 1..40: mol_type = genomic DNA

SEQ ID NO: 42774 - DNA, 50 bp, Bacillus cereus; identical to SEQ ID NO: 42744
  source 1..50: mol_type = genomic DNA

SEQ ID NO: 42775 - DNA, 40 bp, Bacillus cereus; identical to SEQ ID NO: 42685
  source 1..40: mol_type = genomic DNA

SEQ ID NO: 42776 - protein, 515 aa, Bacillus cereus
MKTAIYLRKSRADLEAEARGEGETLAKHRTTLLKIAKEMNLNVLSVREEIVSGESLVKRPEMLALLEEIEDNKYDVVLCMDMDRLGRGGMKEQGIILETFKRSNTKIMTPRKTYDLNDEWDEEYSEFEAFMARKELKIITRRMQRGRVASVEAGNYLGTHAPFGYDIHRLNKRERTLTINPEEASVVRMIFDWYANEDMGANAIRSKLNDLGYKSKLGNEWNPYSILDILKNNVYIGKVTWQKRKEVKRPDAVKRSCARQDKSDWIIADGKHEPIIPESLFEQVQEKLNSRYHVPYNTNGIKNPLAGIIKCSKCGYSMVQRYPKNRKETMDCKHRGCENKSSYTELIEKRLLEALKEWYINYKADFEKHKQDDKFKETQVIQMNDAALRKLEKELVDVQKQKNNLHDLLERGVYTVDMFLERSNVVSDRITEITSTMENLKKEIKTEIKKEKVKKDTIPQVEHVLDLYFKTDDPKKKNSLLKSVLEKAVYKKEKWQRLDDFELVLYPKLPQDGDI

SEQ ID NO: 42777 - DNA, 50 bp, Bacillus cereus; identical to SEQ ID NO: 1612
  source 1..50: mol_type = genomic DNA

SEQ ID NO: 42778 - DNA, 40 bp, Bacillus cereus; identical to SEQ ID NO: 42688
  source 1..40: mol_type = genomic DNA

SEQ ID NO: 42779 - DNA, 50 bp, Bacillus cereus; identical to SEQ ID NO: 42704
  source 1..50: mol_type = genomic DNA

SEQ ID NO: 42780 - DNA, 40 bp, Bacillus cereus; identical to SEQ ID NO: 42685
  source 1..40: mol_type = genomic DNA

SEQ ID NO: 42781 - protein, 487 aa, Bacillus thuringiensis; identical to SEQ ID NO: 18936

SEQ ID NO: 42782 - DNA, 50 bp, Bacillus thuringiensis; identical to SEQ ID NO: 18937
  source 1..50: mol_type = genomic DNA

SEQ ID NO: 42783 - DNA, 40 bp, Bacillus thuringiensis
  source 1..40: mol_type = genomic DNA
cttctctcgaatttcagcatctgcgtgtctcataacgtat

SEQ ID NO: 42784 - DNA, 50 bp, Bacillus thuringiensis
  source 1..50: mol_type = genomic DNA
ttttgtctatattggctgtcggcaggtgcggtatgcttatagggacaaaa

SEQ ID NO: 42785 - DNA, 40 bp, Bacillus thuringiensis
  source 1..40: mol_type = genomic DNA
catcttttgagtttcagcaggtatttgtcacataaggtac

SEQ ID NO: 42786 - protein, 487 aa, Bacillus thuringiensis; identical to SEQ ID NO: 18926

SEQ ID NO: 42787 - DNA, 50 bp, Bacillus thuringiensis; identical to SEQ ID NO: 18927
  source 1..50: mol_type = genomic DNA

SEQ ID NO: 42788 - DNA, 40 bp, Bacillus thuringiensis; identical to SEQ ID NO: 42783
  source 1..40: mol_type = genomic DNA

SEQ ID NO: 42789 - DNA, 50 bp, Bacillus thuringiensis
  source 1..50: mol_type = genomic DNA
ttttgtctatataggctgtcggcaggtgcggtatgcttatagggacaaaa

SEQ ID NO: 42790 - DNA, 40 bp, Bacillus thuringiensis; identical to SEQ ID NO: 42785
  source 1..40: mol_type = genomic DNA

SEQ ID NO: 42791 - protein, 487 aa, Bacillus thuringiensis; identical to SEQ ID NO: 18941

SEQ ID NO: 42792 - DNA, 50 bp, Bacillus thuringiensis; identical to SEQ ID NO: 18937
  source 1..50: mol_type = genomic DNA

SEQ ID NO: 42793 - DNA, 40 bp, Bacillus thuringiensis; identical to SEQ ID NO: 42783
  source 1..40: mol_type = genomic DNA

SEQ ID NO: 42794 - DNA, 50 bp, Bacillus thuringiensis; identical to SEQ ID NO: 42784
  source 1..50: mol_type = genomic DNA

SEQ ID NO: 42795 - DNA, 40 bp, Bacillus thuringiensis; identical to SEQ ID NO: 42785
  source 1..40: mol_type = genomic DNA

SEQ ID NO: 42796 - protein, 487 aa, Bacillus cereus
MKYAVYVRVSTDKDEQVSSIQNQIEICRYWIEKNGFEWDENSIYKDEAVSGTAWLERRAMQLILGKARKKELDTVVFKSIHRLGRDLRDALEIKEILLGHGVRLVTIEEGYDSYYEGKNDLKFEMYAMFASQLPKTLSVSISAALAAKVRRGEYTGGTVPYGYKIVDKKYVINQEEAEIVREMYELYDNGLGYLRISNALNDVGKYKRSGKLWTYSAVKLIITNPMYKGDYVMGRSTEVKVDGRKKRVQEPREKWVVFENHHPAIIERSLWDKINNPKINKKIKRRVAVTNELRGIARCIHCGSPFVLHTYKYKNKEGEELNYGYLTCGTYKLTGGRGCVKHSGLRYERLRSLVLRKLKEKERDLEKVFKLNDKDKHQEKQKKLRKEKKELEIKRERLLDLYLDGGSIDKATFTKRDANFAKNIKEKELEILKLDDVKALIVEQQKVKDAFKLLEDSENLYPVFKKLIARIDISQNGAVDIRYRFEE

SEQ ID NO: 42797 - DNA, 50 bp, Bacillus cereus; identical to SEQ ID NO: 18927
  source 1..50: mol_type = genomic DNA

SEQ ID NO: 42798 - DNA, 40 bp, Bacillus cereus; identical to SEQ ID NO: 42783
  source 1..40: mol_type = genomic DNA

SEQ ID NO: 42799 - DNA, 50 bp, Bacillus cereus; identical to SEQ ID NO: 42789
  source 1..50: mol_type = genomic DNA

SEQ ID NO: 42800 - DNA, 40 bp, Bacillus cereus; identical to SEQ ID NO: 42785
  source 1..40: mol_type = genomic DNA

SEQ ID NO: 42801 - protein, 648 aa, Prochlorococcus marinus
MVSPSVKKEGFVIPRFGEVETKFAVSYLRVSTAKQTKESKTGLNRQERSWNQWIEDHPDYEGWNFKFQDLGISGRGKHQTKGALANYLDQAERGVIPAGTVLVADSPSRLTREKPKDALKLLLRIFDLGHKISFCSGQWRGEIIESDTHGVWSRLVAAAEQSAELWEERSNNSNEYHREKIERLNNGDLSVHFHARKNKKSKVFYPHWLDFDDEAKLFSFNENAVWMRQVFEWATQAGCTEIAKRLKGMGIRQKKNRKKPISRDLVRSWLIHRGAIGEFQPQKDGGEKAGEPIAGIFPPLIEPELFNKVQSRMKKRNRNNSEPQLTDQFRNLFTKSIFCRECGHPARFHQNKKPMKYDLDNVYHSYSCSAGYVDADEICICKKRFTSKKRGVDFELDVLKRLQTFRWAEFFTNEKLEKKLDSAHGKKMRLLAKLQEEERVVKNLKKAFDQYLFDGEKVPERHAELTKQAQKNYEETYQNYWSSKIEEDRLRHERRGKDAEKDIQNLLRKFLETGRNNLRQRQEFSRWFFETGLVVDIDLYTGAFDVGIGRRENGVLVEVDYQLEHRAMFIRDGFTFEDNDGNPLDMNHFIKQKRIEDSKSKEQKIKESWEMINNPKNVLLQKAIMQHLDQLPKNSSEARNIRANLKVA

SEQ ID NO: 42802 - DNA, 50 bp, Prochlorococcus marinus
  source 1..50: mol_type = genomic DNA
tctaacgtgcgtattagctcataagctaatacgcacggtagacaacagac

SEQ ID NO: 42803 - DNA, 40 bp, Prochlorococcus marinus
  source 1..40: mol_type = genomic DNA
gatggggggatggttatgagttaagaaaacatcaattttg

SEQ ID NO: 42804 - DNA, 50 bp, Prochlorococcus marinus
  source 1..50: mol_type = genomic DNA
tctaacgtgcgtattagctcataacttaatacgcacggtagacaacagac

SEQ ID NO: 42805 - DNA, 40 bp, Prochlorococcus marinus
  source 1..40: mol_type = genomic DNA
ggtggagagatggttttgacttcagaaaggctcaatttct

SEQ ID NO: 42806 - protein, 448 aa, Bacillus mycoides
MGEEIVNYNNDKVAIYIRVSTDEQAKEGFSLQAQEDHLRQYAKAKGYEVYDVYSDEGYSGKDYNRPEIQRLFKDLSQEKFKGILVKSVDRVSRRVSDVTKLIDDVLVPRNSYIVISDANLDSSTNGGIAIIHFLATFAQLERSMIVQRVKAGMSKRAELGYWNGGHVLGYDIKNKELKVNAEEAEIVRKVFNLRAEGKGYKKIAVILNQQGFKTKRGQLFSICTIKTIVENPLYIGYCRWGRKKNRIEETSKEKIDEYNLVKGKHEPIISEGLWKKVQGVNYAHKESISKNRNFNGEFLLSGILRCPSCGAGMVMHKTKKRDGSGYHLYYMCQTFHSKGKLACKSNLIRKEEIEDKVIQCVNKIISMPSIVDKTLERIQEKREWGMERIKSDLLYINEELKRRRNRIVKLNKDYFDEKIRVETYTELSDPLRKEIDELEAEKHKLEKK

SEQ ID NO: 42807 - DNA, 50 bp, Bacillus mycoides; identical to SEQ ID NO: 14487
  source 1..50: mol_type = genomic DNA

SEQ ID NO: 42808 - DNA, 40 bp, Bacillus mycoides
  source 1..40: mol_type = genomic DNA
gtttcggattaatcgtggtgaaccttatcataaataaatt

SEQ ID NO: 42809 - DNA, 50 bp, Bacillus mycoides
  source 1..50: mol_type = genomic DNA
ctttactagttagtaaagaggggaaaaccgtatcacaagtgatagtaaag

SEQ ID NO: 42810 - DNA, 40 bp, Bacillus mycoides
  source 1..40: mol_type = genomic DNA
ttttctgcattatcattgtaaaccttctcatacagaaatt

SEQ ID NO: 42811 - protein, 552 aa, Coprococcus comes
MKNKKIKCDIYTRVSTTMQVDGYSLDAQKEKLKRYAEFQNMEIVNEYSDEGKSGKSVEGRPEFQRMLDNIENGTDEVQFVLVFKLSRFGRNAADVLNSLQRMQDFGVNLICVEDGIDSSKDSGKLMISVLSAVAEIERENILVQTMEGRKQKAREGKWNGGFAPYGYELVNGELQIAEDEAEIIRLIYDKFIHTNMGISAIAAWLNQHGYKKKKRQNNTLDAFAASFIKGVLDNPVYCGKLAYGRRKNEKVSGTRNEYRIVKQENYMLHDGIHEGIISETDWELAHQKREKTGVKYEKTHSLEHEHILSGILRCPLCGSGMYGNVNRKKKKDGTLYKDYFYYACKHRRLVDGHKCGYRKQWSEEKINNAVEEVIRKLVKNPKFEEAILNKIGSRIDTEEIEKEIEGLEKQHRQLTGAKARLGQQMDSLDIMDKFYEKKYQDMETRLYRLYDEIEGVENSIEEVKNRLLNIRQQKISEENVYQFLLYFDKLYDKFTDLEKKEFLNSFVEQVDIYEQEQPDGRFLKHIKFRFPVYFGDRETQELCWDNESTVET

SEQ ID NO: 42812 - DNA, 50 bp, Coprococcus comes
  source 1..50: mol_type = genomic DNA
tgttgggacaacgaaagtaccgttgaaacggttgttcttttgtcccaaca

SEQ ID NO: 42813 - DNA, 40 bp, Coprococcus comes
  source 1..40: mol_type = genomic DNA
tccgagcacttatcacgtcgagacggtctgtttgctgtca

SEQ ID NO: 42814 - DNA, 50 bp, Coprococcus comes
  source 1..50: mol_type = genomic DNA
tgttgggacaacgaaagtaccgttagaacggttgttcttttgtcccaaca

SEQ ID NO: 42815 - DNA, 40 bp, Coprococcus comes
  source 1..40: mol_type = genomic DNA
tcagataatttaccatgtcaggaatgtctgcttgctgtcc

SEQ ID NO: 42816 - protein, 487 aa, Corynebacterium ammoniagenes
MTLRAAIYARISLDLKEEAGVKRQVYLATKQAEADEASLVATYVDNNISAFSGEFRPEYDKLIKSIEADDLDVVYVYALDRLTRRTKDTLALFELCERYNVRVRANRGYDIDPSDPASRLTIVILGLIAEQESIDRAARIRAAYEDRARTGRPKTGGRRMLGYGVDGMTVIDDEAQAIRDAAQMVLAGKTLRETVREIFHARDIQSTSGREMSPQTLRDILLNPRVRGISTFNPTDPATGYRLIKDRQILGPGTWPAIIDEATGENLDVVLRDPARRSNHSGNAPTRYLASVLTCTCGDPMYSRSRGRRDGSTQRFYTCKRSNPGGKHVSIGAEIDEFIERVILARMAEPDALRVIQQALAPAEDDAATDELQHLLADRNALLARRESIEESVIAANIDVDTFGRLENKIARQVATIETRLAELTALHDADPLAAELADASNFPEWWEGASVQDKRRFTRLLMEIHILPGRTGAKQFDPNRVQVIWK

SEQ ID NO: 42817 - DNA, 50 bp, Corynebacterium ammoniagenes
  source 1..50: mol_type = genomic DNA
tgtactcacaacccatgttcgtttaattcagaacaaggatagtgagtacg

SEQ ID NO: 42818 - DNA, 40 bp, Corynebacterium ammoniagenes
  source 1..40: mol_type = genomic DNA
tggggcgaccggcagtggtaaatccgaagccttgcgcacg

SEQ ID NO: 42819 - DNA, 50 bp, Corynebacterium ammoniagenes
  source 1..50: mol_type = genomic DNA
tgtactcacaacccatgttcgtttgtttcagaacaaggatagtgagtacg

SEQ ID NO: 42820 - DNA, 40 bp, Corynebacterium ammoniagenes
  source 1..40: mol_type = genomic DNA
tggggccgcctccagtggtgtgtccaaggccttgtgaaca

SEQ ID NO: 42821 - protein, 494 aa, Priestia megaterium
MRCAIYARVSTEFDSQKTSIDNQIDLFRNYANEKDWEIVKIYTDKKSGTKVDRPGLKSLIADGKAKLFDVILAKELSRLARNGRFSYELRDICQLNNIHIVCLDNSINTLTGDVQNFGLFAWLYENESLNTSRRNKASKLTKAVRGEFTGSNPTYGYYNDGGKLKIRHDQSPDIVRRIFDCYLEGTGMDSIAKTLIAEGVPTPSQVAKKANASTLWHASTIKNILNNRHYCGDLVQHKTESISVTTTKRRTLEEENLIVHRDMHESIISRETFEAVQRMLQSRTRIGKAPKKHLFTNVLYCKECGRGMWYKVNQKGYRCGGNLKYGDFYCLNKKAVKELELKKIVLAYLKELFQAFQDNSMMKSLMKKLEQKQQEFQKKMSNVDNQIQDLRLKKLEYLNLYTEQVITKQELIEYRELTDQKLKELDIIKAQIHKSLEECTNENYAIKLGDKLNSFFPLKDLNSKLLHSLVEKITVSIDGNIDIHYTFINPFQDK

SEQ ID NO: 42822 - DNA, 50 bp, Priestia megaterium
  source 1..50: mol_type = genomic DNA
gtcagttgcgagacacattccacgtgtgcggtctgtaactggcaacacaa

SEQ ID NO: 42823 - DNA, 40 bp, Priestia megaterium
  source 1..40: mol_type = genomic DNA
acttaccacattctccacatgcgccgtatgagggaacata

SEQ ID NO: 42824 - DNA, 50 bp, Priestia megaterium
  source 1..50: mol_type = genomic DNA
gtcagttgcgagacacattccacgaatgcggtctgtaactggcaacacaa

SEQ ID NO: 42825 - DNA, 40 bp, Priestia megaterium
  source 1..40: mol_type = genomic DNA
acatacaacatttaccaaaaaggccatatgatagaccata

SEQ ID NO: 42826 - protein, 571 aa, Aeromonas veronii
MSRPPKAYSYIRFSTTKQAQGDSYRRQIQQAIDYCTEHNLQLDEKAIEDFGVSAFRGSNRIDGALGRFIEAVKGGAIEKGSYLLVESMDRLSRQTILKALSQFIEILNAGIVIVTLSDGEIFRVTDDGKDFDFAKLIISIVYMARANDESEMKSLRSRAAWSNGRKAARESKKVMKNARLPSWLTREGERIVPIPERTAIVSEMFEMAQSGCGYEQIAKVFLEKGYKTFGKEADWRPAGIQAVIKSRAVIGEFQPHVIENGERVPDGEPILGYYPTIVSPAVFEEVQHLIGKRSKHSGSYRKGTYSNLFSGVLRCQCGESLRYGNKGRAGSPRYYLMCPKHNTHGCSMPHLLYNKVEPQLLQAVSLLAVVMEQRKTTTEKMMALKDELAILRRELELEVKRRKKAAQSMLDNDNDADFRELFIQCKANCQSLEEQISQLENELMSRELSEKTLSQNLNSEDLDSTDQRQRFNGQLKAVLREIQFSYDGYDLAAVFKDIDGEFMLEQAFEPKLVGSTVRDRDGMTLIKTIAEAPYIDANWVKDEIDEYESFQKESDSEFDDDFEDLSSEESK

SEQ ID NO: 42827 - DNA, 50 bp, Aeromonas veronii
  source 1..50: mol_type = genomic DNA
catggctcttctgataaaaacagctcgcagtttttgggggaaatgccgta

SEQ ID NO: 42828 - DNA, 40 bp, Aeromonas veronii; identical to SEQ ID NO: 20238
  source 1..40: mol_type = genomic DNA

SEQ ID NO: 42829 - DNA, 50 bp, Aeromonas veronii
  source 1..50: mol_type = genomic DNA
catggctcttctgataaaaacagcttgcagtttttgggggaaatgccgta

SEQ ID NO: 42830 - DNA, 40 bp, Aeromonas veronii; identical to SEQ ID NO: 12880
  source 1..40: mol_type = genomic DNA

SEQ ID NO: 42831 - protein, 567 aa, Aeromonas veronii
MSRSPKAYSYIRFSTPKQAQGDSYRRQLELATEYCQKHQLQLSDKALEDFGVSAYRGSNRTNGALGRFIDAVKDGKIKEGSYLLVESVDRLSRQAIEDALRQFLEMIGLGIVIVTLIDGRVYKSGAVDITSLLVSIVSMARANDESKTKSKRSSEAWENGRKHARENNQVMKNSRLPSWLKLEEGKIIAIPERVKVVNEMFELAKSGCGYEQIAKIFLEKGYKTFGKKADWRPAGIQAVIKSESVIGVFHPHQIKDGKRIPEGDPIWGYYPAIVEPMLFNEVKHLINQRNNHSGSYRKGTYNNLFSGILRCQCGESLRYQNKGRAGSPRNYLVCPKQNITGCNLPNMLYDKVEPQLLQAVSILSEVMQRRVGENEKFLSLQEQLATLRTQLDVESRKKDKAAQSILDFDDDATFRNAFVKSKASCKVLEEKIRELENELMSLELSEKTILNLLKPEELISTEQRQLFNSQLKAVLKEIKFSYDGYDLAAVFKGLDDQFMLEQAFKPKLAGSSVRDLSGEELLRTTSEAPYIDAAWVKGEIEEYALHRKDVSSGLDDEFEDLSLQESK

SEQ ID NO: 42832 - DNA, 50 bp, Aeromonas veronii
  source 1..50: mol_type = genomic DNA
ctcggcttttctactaagaacagctcacagtttttgggggaaatgccgta

SEQ ID NO: 42833 - DNA, 40 bp, Aeromonas veronii; identical to SEQ ID NO: 20238
  source 1..40: mol_type = genomic DNA

SEQ ID NO: 42834 - DNA, 50 bp, Aeromonas veronii
  source 1..50: mol_type = genomic DNA
ctcggcttttctactaagaacagcttacagtttttgggggaaatgccgta

SEQ ID NO: 42835 - DNA, 40 bp, Aeromonas veronii; identical to SEQ ID NO: 12880
  source 1..40: mol_type = genomic DNA

SEQ ID NO: 42836 - protein, 568 aa, Aeromonas veronii
MSRPVKAYSYIRFSTPKQAQGDSYRRQLQQAMDYCAEHNLQLDDKTIDDFGTSAFRGANMSEGALGRFVDAVKHGEIEQGSYLLVESVDRLSRQAVEEALEQFLAIVRAGIVIVTLSDKQVFRRGQVDFTKLIVSIVYMARANDESEMKSRRSRAAWSNGREQARKNNKVIANSRLPSWLTRDGEQIVPIPERVAIVNEMFEMAKSGCGYEQIAKVFLEKGYKTFGKEADWRPAGIQAVIKSQAVIGVFQPHVIENGHRVPADEPILGYYPTIVSPALFEEVQHLISKRNKHSGSYRKGTFNNLFSGVLRCQCGESLRYQNKGRAGSPRNYLVCPKQNTAGCKLPNMLYDKVEPQLLQAVFLLNKVMKQRVEGEDKTIALSTMLAELRVQLEVETQKRKKAAQLVLDNDNDADYRVLFEQCKKKTQALEEQIQRAESDLMSRELSVKTLKYIVDPKDLRSTEQRQRFNSQLKTALKEIRFRFDGGYLWAEYMDIDGSRVLTQIFEDRLAGSSIYDGSSYLVRKTQTEAPYGVDPSVMQQEMDDYIRNLQKNDDGTDPDFEDLSSEYSK

SEQ ID NO: 42837 - DNA, 50 bp, Aeromonas veronii
  source 1..50: mol_type = genomic DNA
tgtggctcttctgctaaaaacagctcgcagtttttaggggaaatgccgta

SEQ ID NO: 42838 - DNA, 40 bp, Aeromonas veronii; identical to SEQ ID NO: 29928
  source 1..40: mol_type = genomic DNA

SEQ ID NO: 42839 - DNA, 50 bp, Aeromonas veronii
  source 1..50: mol_type = genomic DNA
tgtggctcttctgctaaaaacagcttgcagtttttaggggaaatgccgta

SEQ ID NO: 42840 - DNA, 40 bp, Aeromonas veronii; identical to SEQ ID NO: 12880
  source 1..40: mol_type = genomic DNA

SEQ ID NO: 42841 - protein, 568 aa, Aeromonas hydrophila
MSHPVKAYSYIRFSTPKQAQGDSYRRQLQQAMDYCAEHNLQLDDKTIDDFGTSAFRGANMTEGALGRFVDAVKHGEIEQGSYLLVESVDRLSRQAVEEALEQFLAIVRAGIVIVTLSDKQVFRRGQVDFTKLIVSIVYMARANDESEMKSRRSRAAWSNGREQARKNNKVIANSRLPSWLTRDGEQIVPIPERVAIVNEMFEMAKSGCGYEQIAKVFLEKGYKTFGKEADWRPAGIQAVIKSQAVIGVFQPHVIENGHRVPADEPILGYYPTIVSPALFEEVQHLISKRNKHSGSYRKGTFNNLFSGVLRCQCGESLRYQNKGRAGSPRNYLVCPKQNTAGCKLPNMLYDKVEPQLLQAVFLLNRVMKQRVEGEDKTIALRAMLAELRVQLEVETQKRKKAAQLVLDNDNDADYRVLFEQCKKKTQALEKQIQRAESDLMSRELSVKTLKYIVDPEDLSSTEQRQRFNGQLKTALKEIRFRFDGGYLWAEYMDIDGSRVLTQIFEDRLAGSSIYDGSSYLVRKTQTEAPYGVDPSVMQQEMSDYIRNLQKNDDGTDPDFEDLSSEYSK

SEQ ID NO: 42842 - DNA, 50 bp, Aeromonas hydrophila
  source 1..50: mol_type = genomic DNA
ttcggttcttttgcaaagaactgctcgcagtttttgggggaaatgccgta

SEQ ID NO: 42843 - DNA, 40 bp, Aeromonas hydrophila; identical to SEQ ID NO: 29928
  source 1..40: mol_type = genomic DNA

SEQ ID NO: 42844 - DNA, 50 bp, Aeromonas hydrophila
  source 1..50: mol_type = genomic DNA
ttcggttcttttgcaaagaactgcttgcagtttttgggggaaatgccgta

SEQ ID NO: 42845 - DNA, 40 bp, Aeromonas hydrophila; identical to SEQ ID NO: 12880
  source 1..40: mol_type = genomic DNA

SEQ ID NO: 42846 - protein, 571 aa, Aeromonas hydrophila
MSRLPKAYSYIRFSTPKQAQGDSYRRQIQQAIDYCAKHNLELDGKAIEDFGVSGFRGCNWTDGALGRFIEAVKSGAIAKGSYLLVESMDRLSRQTVLKAFTQFIEILNAGIAVVTLSDGEIFRATDDGKNCDFAKLIISIVYMARANDESEMKSRRSRAAWSNGRKEARESNKVMTNSRLPTWLTREGERIVPIPERVAIVNEMFEMAKSGCGYEQIAKAFLEKGYKTFGKEADWRPAGIQAVIKSQAVIGVFQPHVIENGERVPDGEPILGYYPTIVSPALFEEVQHLIGTRSKHSGSYRKGTYSNLFSGVLRCQCGELLRYHNKGKAGNPRNYLVCPKQNITGCNLPNMLYDKVEPQLLQAVSLLSAVMGQRGAASEKTLALKDELAILQRKLELEAKKRNKAAQSMLELDDDAVFRELFTQCKANCQALEVQIHQLEDDITGRELSEKTLGKMIVPDDLNNTEQRQRFNSQLKAAVKEISIISTGDSVAAVFKDLDGQFMLEQAFKPKLAGSSIRDISGEELLRTTAEAPYIDADWVKAESNEFESIHHKSDSEFDDDFEDLSSEASK

SEQ ID NO: 42847 - DNA, 50 bp, Aeromonas hydrophila
  source 1..50: mol_type = genomic DNA
tgtggctcattcaataaaaacagctcgcagtttttgggagaaatgccgta

SEQ ID NO: 42848 - DNA, 40 bp, Aeromonas hydrophila; identical to SEQ ID NO: 20238
  source 1..40: mol_type = genomic DNA

SEQ ID NO: 42849 - DNA, 50 bp, Aeromonas hydrophila
  source 1..50: mol_type = genomic DNA
tgtggctcattcaataaaaacagcttgcagtttttgggagaaatgccgta

SEQ ID NO: 42850 - DNA, 40 bp, Aeromonas hydrophila; identical to SEQ ID NO: 12880
  source 1..40: mol_type = genomic DNA

SEQ ID NO: 42851 - protein, 567 aa, Aeromonas dhakensis
MSHPPKAYSYIRFSTPKQAQGDSYRRQLAKAKEYCTEHNLTLVEDTIDDRGVSAFRGANMMEGALGRFLEAVKSGVIEQGSYLLVESVDRLSRQAVEEALGQFLGLINAGVVVVTLDDKAVYRKGQVETQNLLLSIMFMVRANNESETKSDRSREAWEKGRKQARENNKVMKNSRLPSWLEWEEGKIVPIAERVAIVNEMFEMAKSGCGYEQIAKAFRSKGYKTFGKMTDWRPAGIQAVIKSRAVIGEFQPHIIEKGERIPDGEPIVGYYPAIVSRSLFKDVHHIISQRNNHSGSYRKGRFNNLFSGVLRCQCGEPLRFNNKGKAGSPRNYLICPMRQVAGCKLPNLLHEKIELQLLQAASLLSEVMKQRRPEDAKTVALKEELAELQMQLEIGIKKRKKAAESMVDNDDDADFREIFLSHKANCQALEEHIAQLESEIMDRELSQKTLGRLIQPKDLKSTEQRQQFNAQLKAVLQEIRLHYDGFDLAAVFKDIDGSIVLEQAFKPKLAGSSVRDLSGEELLRTTSEAPYIDAAWVKGETDEYESHRKDASSGLDDEFEDLSLQESK

SEQ ID NO: 42852 - DNA, 50 bp, Aeromonas dhakensis
  source 1..50: mol_type = genomic DNA
ctcggcttttctactaagaacagctcgcagttcttgggggaaatgccgta

SEQ ID NO: 42853 - DNA, 40 bp, Aeromonas dhakensis; identical to SEQ ID NO: 20238
  source 1..40: mol_type = genomic DNA

SEQ ID NO: 42854 - DNA, 50 bp, Aeromonas dhakensis
  source 1..50: mol_type = genomic DNA
ctcggcttttctactaagaacagcttgcagttcttgggggaaatgccgta

SEQ ID NO: 42855 - DNA, 40 bp, Aeromonas dhakensis; identical to SEQ ID NO: 12880
  source 1..40: mol_type = genomic DNA

SEQ ID NO: 42856 - protein, 567 aa, Aeromonas jandaei
MSRSPKAYSYIRFSTPKQAQGDSYRRQLELATEYCQKHQLQLSDKALEDFGVSAYRGSNRTNGALGRFIDAVKDGKIKEGSYLLVESVDRLSRQAIEDALRQFLEMIGLGIVIVTLIDGRVYKSGAVDITSLLVSIVSMARANDESKTKSKRSSEAWENGRKHARENNQVMKNSRLPSWLKLEEGKIIAIPERVKVVNEMFELAKSGCGYEQIAKIFLEKGYKTFGKKADWRPAGIQAVIKSESVIGVFHPHQIKDGKRIPEGDPIWGYYPAIVEPMLFNEVKHLINQRNNHSGSYRKGTYNNLFSGILRCQCGESLRYQNKGRAGTPRNYLVCPKQNITGCNLPNMLYDKVEPQLLQAVSILSEVMQRRVGENEKFLSLQEQLAALRAQLDVESRKKDKAAQSILDFDDDATFRNAFVKSKASCKVLEEKIRELENELMSLELSEKTILNLLKPEELISTEQRQLFNSQLKAVLKEIKFSYDGYDLAAVFKGLDDQFMLEQAFKPKLAGSSVRDLSGEELLRTTSEAPYIDAAWVKGEIEEYALHRKDVSSGLDDEFEDLSLQESK

SEQ ID NO: 42857 - DNA, 50 bp, Aeromonas jandaei
  source 1..50: mol_type = genomic DNA
tgtggttcttataacaagaattgctcacagtttttgggggaaatgccgta

SEQ ID NO: 42858 - DNA, 40 bp, Aeromonas jandaei; identical to SEQ ID NO: 20238
  source 1..40: mol_type = genomic DNA

SEQ ID NO: 42859 - DNA, 50 bp, Aeromonas jandaei
  source 1..50: mol_type = genomic DNA
tgtggttcttataacaagaattgcttacagtttttgggggaaatgccgta

SEQ ID NO: 42860 - DNA, 40 bp, Aeromonas jandaei; identical to SEQ ID NO: 12880
  source 1..40: mol_type = genomic DNA

SEQ ID NO: 42861 - protein, 568 aa, Aeromonas jandaei
MSRPIKAYSYIRFSTPKQAQGDSYRRQLQQAMDYCAEHNLQLDDKTIDDFGTSAFRGANMSEGALGRFVDAVKHGEIEQGSYLLVESVDRLSRQAVEEALEQFLAIVRAGIVIVTLSDKQVFRRGQVDFTKLIVSIVYMARANDESEMKSRRSRAAWSNGREQARKNNKVIANSRLPSWLTRDGEQIVPIPERVAIVNEMFEMAKSGCGYEQIAKVFLDKGYKTFGKEADWRPAGIQAVIKSQAVIGVFQPHVIENGERVPADEPILGYYPTIVSPALFEEVQHLISKRNKHSGSYRKGTFNNLFSGVLRCQCGESLRYQNKGRAGSPRNYLVCPKQNTAGCKLPNMLYDKIEPQLLQAVFLLNRVMKQRVEGEDKTIALRTMLAELRVQLEVETQKRKKAAQLVLDNDNDADYRVLFEQCKKKTQALEEQIQRAESDLMSRELSVKTLKYIVDPEDLRSTEQRQRFNGQLKTALKEIRFRFDGGYLWAEYMDIDGSRVLTQIFEDKLAGSSIYDGSSYLVRKTQTEAPYGVDPSVMQQEMNDYIRNLQKNDDGTDPDFEDLSSEYSK

SEQ ID NO: 42862 - DNA, 50 bp, Aeromonas jandaei
  source 1..50: mol_type = genomic DNA
ttcggttcttttgcaaagaactgctcgcagttattgggggaaatgccgta

SEQ ID NO: 42863 - DNA, 40 bp, Aeromonas jandaei; identical to SEQ ID NO: 20238
  source 1..40: mol_type = genomic DNA

SEQ ID NO: 42864 - DNA, 50 bp, Aeromonas jandaei
  source 1..50: mol_type = genomic DNA
ttcggttcttttgcaaagaactgcttgcagttattgggggaaatgccgta

SEQ ID NO: 42865 - DNA, 40 bp, Aeromonas jandaei; identical to SEQ ID NO: 12880
  source 1..40: mol_type = genomic DNA

SEQ ID NO: 42866 - protein, 559 aa, Aeromonas jandaei
MPKAYSYIRFSTPKQAQGDSYRRQLAKAKEYCAEHNLTLVEETIDDHGISAYRGANMTEGALGRFLEAVKSGAIEQGSYLLVESVDRLSRQAVEEALGQFLGLINAGVVVVTLDDKAVYRKGQVETQNLLLSIMFMVRANNESEVKSDRSRKAWENGRKQARENNKVMKNSRLPSWLQWEEGQIVPIAERAAIVNEMFEMAKSGCGYEQIAKAFRSKGYKTFGKVTDWRPAGIQAVIKSRAVIGEFQPHIIEQGERIPNGEPIVGYYPAIVSRSLFKDVHHIISQRNNHSGSYRKGLFNNLFSGVLRCQCGEPLRFNNKGKAGSPRNYLICPMRQVAGCKLPNLLHEKLEPQLLQAASLLSKVMKQRRPEDAKTVALKEELAEFQMQLEIGIKKRKKAAESMVDNDDDADFREIFLSHKANCQALEEHITQLESEIMDRELSQKTLGRLIQPEDLNSTEQRQQFNAQLKAVLQEIRLHYDGFDLAAVFKDIDGSIVLEQAFKPKLTGSSVRDIRGEELLRTTSEAPYIDAAWVKGEIEEYDLHRKDVSSGLDDEFEDLS

SEQ ID NO: 42867 - DNA, 50 bp, Aeromonas jandaei
  source 1..50: mol_type = genomic DNA
cgcggcgctttcaataaaaactgctcgcagttcttgggggaaatgccgta

SEQ ID NO: 42868 - DNA, 40 bp, Aeromonas jandaei; identical to SEQ ID NO: 20238
  source 1..40: mol_type = genomic DNA

SEQ ID NO: 42869 - DNA, 50 bp, Aeromonas jandaei
  source 1..50: mol_type = genomic DNA
cgcggcgctttcaataaaaactgcttgcagttcttgggggaaatgccgta

SEQ ID NO: 42870 - DNA, 40 bp, Aeromonas jandaei; identical to SEQ ID NO: 12880
  source 1..40: mol_type = genomic DNA

SEQ ID NO: 42871 - protein, 559 aa, Aeromonas veronii; identical to SEQ ID NO: 42866

SEQ ID NO: 42872 - DNA, 50 bp, Aeromonas veronii
  source 1..50: mol_type = genomic DNA
cgcggtgctttcaataaaaactgctcgcagttcttgggggaaatgccgta

SEQ ID NO: 42873 - DNA, 40 bp, Aeromonas veronii; identical to SEQ ID NO: 20238
  source 1..40: mol_type = genomic DNA

SEQ ID NO: 42874 - DNA, 50 bp, Aeromonas veronii
  source 1..50: mol_type = genomic DNA
cgcggtgctttcaataaaaactgcttgcagttcttgggggaaatgccgta

SEQ ID NO: 42875 - DNA, 40 bp, Aeromonas veronii; identical to SEQ ID NO: 12880
  source 1..40: mol_type = genomic DNA

SEQ ID NO: 42876 - protein, 567 aa, Aeromonas veronii
MSRSPKAYSYIRFSTPKQAQGDSYRRQLELATEYCQKHQLQLSDKALEDFGVSAYRGSNRTNGALGRFIDAVKDGKIKEGSYLLVESVDRLSRQAIEDALRQFLEMIGLGIVIVTLIDGRVYKSGAVDITSLLVSIVSMARANDESKTKSKRSSEAWENGRKHARENNQVMKNSRLPSWLKLEEGKIIAIPERVKVVNEMFELAKSGCGYEQIAKIFLEKGYKTFGKKADWRPAGIQAVIKSESVVGVFHPHQIKDGKRIPEGDPIWGYYPAIVEPMLFNEVKHLINQRNNHSGSYRKGTYNNLFSGILRCQCGESLRYQNKGRAGSPRNYLVCPKQNITGCNLPNMLYDKVEPQLLQAVSILSEVMQRRVGENEKFLSLQEQLATLRTQLDVESRKKDKAAQSILDFDDDATFRNAFVKSKASCKVIEEKIRELENELMSLELSEKTILNLLKPEELISTEQRQLFNSQLKAVLKEIKFSYDGYDLAAVFKGLDDKFMLEQAFKPKLAGSSVRDLSGEELLRTTSEAPYIDAAWVKGEIEEYALHRKDVSSGLDDEFEDLSLQESK

SEQ ID NO: 42877 - DNA, 50 bp, Aeromonas veronii
  source 1..50: mol_type = genomic DNA
ctcggcactttcaacaataatgtctcgcagtttttgggggaaatgccgta

SEQ ID NO: 42878 - DNA, 40 bp, Aeromonas veronii; identical to SEQ ID NO: 20238
  source 1..40: mol_type = genomic DNA

SEQ ID NO: 42879 - DNA, 50 bp, Aeromonas veronii
  source 1..50: mol_type = genomic DNA
ctcggcactttcaacaataatgtcttgcagtttttgggggaaatgccgta

SEQ ID NO: 42880 - DNA, 40 bp, Aeromonas veronii; identical to SEQ ID NO: 12880
  source 1..40: mol_type = genomic DNA

SEQ ID NO: 42881 - protein, 571 aa, Aeromonas veronii; identical to SEQ ID NO: 12881

SEQ ID NO: 42882 - DNA, 50 bp, Aeromonas veronii; identical to SEQ ID NO: 12882
  source 1..50: mol_type = genomic DNA

SEQ ID NO: 42883 - DNA, 40 bp, Aeromonas veronii; identical to SEQ ID NO: 20238
  source 1..40: mol_type = genomic DNA

SEQ ID NO: 42884 - DNA, 50 bp, Aeromonas veronii; identical to SEQ ID NO: 12884
  source 1..50: mol_type = genomic DNA

SEQ ID NO: 42885 - DNA, 40 bp, Aeromonas veronii; identical to SEQ ID NO: 12880
  source 1..40: mol_type = genomic DNA

SEQ ID NO: 42886 - protein, 568 aa, Aeromonas veronii; identical to SEQ ID NO: 12906

SEQ ID NO: 42887 - DNA, 50 bp, Aeromonas veronii
  source 1..50: mol_type = genomic DNA
ttaggctcttccactaaaaatggctcgcagtttttgggggaaatgccgta

SEQ ID NO: 42888 - DNA, 40 bp, Aeromonas veronii; identical to SEQ ID NO: 20238
  source 1..40: mol_type = genomic DNA

SEQ ID NO: 42889 - DNA, 50 bp, Aeromonas veronii
  source 1..50: mol_type = genomic DNA
ttaggctcttccactaaaaatggcttgcagtttttgggggaaatgccgta

SEQ ID NO: 42890 - DNA, 40 bp, Aeromonas veronii; identical to SEQ ID NO: 12880
  source 1..40: mol_type = genomic DNA

SEQ ID NO: 42891 - protein, 567 aa, Aeromonas veronii
MSRPPKAYSYIRFSTPKQAQGDSYHRQLQKATDYCAKHNLQLVEKTIDDLGTSAFRGANMTEGALGRFFDAVKSGKIEQGSYLLVESVDRLSRQAVEAALSQFLAIISAGIVIVTLDDNAVYRSGQVETQNLLLSIMFMVRANNESETKSDRSRKAWDKGRKQARDNNQVMKNSRLPSWLKWEEGKIMPIPERTAVVNEMFELAKSGCGYEQIAKIFLDKGYKTFGKETDWRPAGIQAVIKSESVIGVFQPHQIKDGKRIPEGSPIWGYYPAIVEPILFNEVQHLISQRSNHSGSYRKGTYNNLFSGILRCQCGEALRYQNKGRVGSPRNYLVCPKQNITGCNLPNMLYNKVEPQLLQAVCILSEVMQRRVGENEKVLSLKEQLATLTAQLDVESRKKSKAAQSILDFDDDATFRKEFVKSKANCEALEEKIHEIESELMSLELSEKTILNLLKPEELISTEQRQLFNSQLKAVLKEIKFSYDGYDLAAVFKGLDDKFMLEQAFKPKLAGSSVRDLSGEELLRTTSEAPYIDAAWVKGETDEYESHRKDASSGLDDEFEDLSLQESK

SEQ ID NO: 42892 - DNA, 50 bp, Aeromonas veronii
  source 1..50: mol_type = genomic DNA
tgtggtttttccataactaacctctcgcagtttttgggggaaatgccgta

SEQ ID NO: 42893 - DNA, 40 bp, Aeromonas veronii; identical to SEQ ID NO: 20238
  source 1..40: mol_type = genomic DNA

SEQ ID NO: 42894 - DNA, 50 bp, Aeromonas veronii
  source 1..50: mol_type = genomic DNA
tgtggtttttccataactaacctcttgcagtttttgggggaaatgccgta

SEQ ID NO: 42895 - DNA, 40 bp, Aeromonas veronii; identical to SEQ ID NO: 12880
  source 1..40: mol_type = genomic DNA

SEQ ID NO: 42896 - protein, 567 aa, Aeromonas veronii
MSRSPKAYSYIRFSTPKQAQGDSYRRQLELATEYCQKHQLQLSDKALEDFGVSAYRGSNRTNGALGRFIDAVKDGKIKEGSYLLVESVDRLSRQAIEDALRQFLEMIGLGIVIVTLIDGRVYKSGDVDITSLLVSIVSMARANDESKTKSKRSREAWENGRKHARENNQVMKNSRLPSWLKLEEGKIIAIPERVKVVNEMFELAKSGCGYEQIAKIFLEKGYKTFGKKSDWRPAGIQAVIKSESVIGVFHPHQIKDGKRIPEGDPIWGYYPAIVEPMLFNEVKHIINQRNNHSGSYRKGTYNNLFSGILRCQCGESLRYQNKGRAGSPRNYLVCPKQNITGCNLPNMLYDKVEPQLLQAVSILSEVMQRRVGENEKFLSLQEQLATLIAQLDVESRKKDKAAQSILDFDDDATFRNAFVKSKASCKVLEEKIRELENELMSLELSEKTILNLLKPEELISTEQRQLFNSQLKAVLKEIKFSYDGYDLAAVFKGLDDKFMLEQAFKPKLAGSSVRDLSGEELLRTTSEAPYIDAAWVKGEIEEYALHRKDVSSGLDDEFEDLSLQESK

SEQ ID NO: 42897 - DNA, 50 bp, Aeromonas veronii
  source 1..50: mol_type = genomic DNA
tacggcatatttataaaaaacagctcgcagtttttgggggaaatgccgta

SEQ ID NO: 42898 - DNA, 40 bp, Aeromonas veronii; identical to SEQ ID NO: 20238
  source 1..40: mol_type = genomic DNA

SEQ ID NO: 42899 - DNA, 50 bp, Aeromonas veronii
  source 1..50: mol_type = genomic DNA
tacggcatatttataaaaaacagcttgcagtttttgggggaaatgccgta

SEQ ID NO: 42900 - DNA, 40 bp, Aeromonas veronii; identical to SEQ ID NO: 12880
  source 1..40: mol_type = genomic DNA

SEQ ID NO: 42901 - protein, 567 aa, Aeromonas veronii
MSRPPKAYSYIRFSTPKQAQGDSYRRQLQKATDYCAEHNLQLVDKTIDDFGTSAFRGANMTEGALGRFFDAVKSGQIEQGSYLLVESVDRLSRQAVVAALSQFLALISAGIVIVTLDDKAVYCSEKVETQNLLLSIMFMVRANNESETKSDRSREAWDKGRKQARDNNQVMKNSRLPSWLKWEEGKIMPIPERAAVVNEMFELAKSGSGYEQIAKIFLEKGYKTFGKEADWRPAGIQAVIKSESVIGVFQPHEIKDGKRIPEGGPIWGYYPAIVEPILFNEVQHLISQRSNHSGSYRKGTYNNLFSGILRCQCGEALRYQNKGRVGSPRNYLVCPKQNITGCNLPNMLYNKVEPQLLQAVCILSEVMQRRVGENEKVLSLKDQLATLTAQLDVESRKKNKAAQSILDFDDDATFRKEFVKSKANCEVLEEKIHEIESELMSLELSEKTILNLLKPEELISTEQRQLFNSQLKAVLKEIKFSYDGYDLAAVFKGLDDKFMLEQAFKPKLAGSSVRDLSGEELLRTTSEAPYIDAAWVKGETDEYESHRKDASSGLDNEFEDLSLQESK

SEQ ID NO: 42902 - DNA, 50 bp, Aeromonas veronii
  source 1..50: mol_type = genomic DNA
tgtggcccttccataattaacctctcgcagtttttaggggaaatgccgta

SEQ ID NO: 42903 - DNA, 40 bp, Aeromonas veronii; identical to SEQ ID NO: 20238
  source 1..40: mol_type = genomic DNA

SEQ ID NO: 42904 - DNA, 50 bp, Aeromonas veronii
  source 1..50: mol_type = genomic DNA
tgtggcccttccataattaacctcttgcagtttttaggggaaatgccgta

SEQ ID NO: 42905 - DNA, 40 bp, Aeromonas veronii; identical to SEQ ID NO: 12880
  source 1..40: mol_type = genomic DNA

SEQ ID NO: 42906 - protein, 568 aa, Aeromonas salmonicida
MSRPVKAYSYIRFSTPKQAQGDSYRRQLQQAMDYCAEHNLQLDDKTIDDFGTSAFRGANMTEGALGRFVDAVKHGEIEQGSYLLVESVDRLSRQAVEEALEQFLAIIRAGIVIVTLSDKQVFCKGQVDFTKLIVSIVYMARANDESEMKSRRSRAAWSNGREQARKNNKVIANSRLPSWLTRNGDQIVTIPERVAIVNEMFEMAKSGCGYEQIAKVFLEKGYKTFGKEADWRPAGIQAVIKSQAVIGVFQPHVIENGHRVPSDEPILGYYPTIVSPALFEEVQHLISKRNKHSGSYRKGTFNNLFSGVLRCQCGESLRYQNKGRAGSPRNYLVCPKQNTAGCKLPNMLYDKVEPQLLQAVFLLNRVMKQRVEGEDKTIALKTTLAELRVQLEVETQKRKKAAQLVLDNDNDADYRVLFEQCKKKTQALEEKIKRAESDLMSRELSVKTLEYIVDPEDLRSTEQRQRFNGQLKTALKEIRFRFDGGYLWAEHKDIDGWIMLTQIFEDKLAGSSIYDRSRYLVRKTQSEAPYGVDPSVVQQEMEDYIRNLQKNDDGTDPDFEDLSSEYSK

SEQ ID NO: 42907 - DNA, 50 bp, Aeromonas salmonicida
  source 1..50: mol_type = genomic DNA
ttcggcttttctactaagaatagctcgcagtttttgggggaaatgccgta

SEQ ID NO: 42908 - DNA, 40 bp, Aeromonas salmonicida; identical to SEQ ID NO: 29928
  source 1..40: mol_type = genomic DNA

SEQ ID NO: 42909 - DNA, 50 bp, Aeromonas salmonicida
  source 1..50: mol_type = genomic DNA
ttcggcttttctactaagaatagcttgcagtttttgggggaaatgccgta

SEQ ID NO: 42910 - DNA, 40 bp, Aeromonas salmonicida; identical to SEQ ID NO: 12880
  source 1..40: mol_type = genomic DNA

SEQ ID NO: 42911 - protein, 567 aa, Aeromonas salmonicida
MSRSPKAYSYIRFSTPKQAQGDSYRRQLELATEYCQKHQLQLSDKALEDFGVSAYRGSNRTNGALGRFIDAVKDGKIKEGSYLLVESVDRLSRQAIEDALRQFLEMIGLGIVIVTLIDGRVYKSGAVDITSLLVSIVSMARANDESKTKSKRSSEAWENGRKHARENNQVMKNSRLPSWLKLEEGKIIAIPERVKVVNEMFELAKSGCGYEQIAKIFLEKGYKTFGKKADWRPAGIQAVIKSESVIGVFHPHQIKDGKRIPEGDPIWGYYPVIVEPMLFNEVKHLINQRNNHSGSYRKGTYNNLFSGILRCQCGESLRYQNKGRAGSPRNYLVCPKQNITGCNLPNMLYDKVEPQLLQAVSILSEVMQRRVGENEKFLSLQEQLATLRAQLDVESRKKDKAAQSILDFDDDATFRNAFVKSKASCKVLEEKIRELENELMSLELSEKTILNLLKPEELISTEQRQLFNSQLKAVLKEIKFSYDGYDLASVFKGLDDQFMLEQAFKPKLTGSSVRDLSGEELLRTTSEAPYIDAAWVKGEMEEYALHRKDVSSGLDDEFEDLSLQESK

SEQ ID NO: 42912 - DNA, 50 bp, Aeromonas salmonicida
  source 1..50: mol_type = genomic DNA
tgcggctcttttataaataactgctcacagtttttgggggaaatgccgta

SEQ ID NO: 42913 - DNA, 40 bp, Aeromonas salmonicida; identical to SEQ ID NO: 29928
  source 1..40: mol_type = genomic DNA

SEQ ID NO: 42914 - DNA, 50 bp, Aeromonas salmonicida
  source 1..50: mol_type = genomic DNA
tgcggctcttttataaataactgcttacagtttttgggggaaatgccgta

SEQ ID NO: 42915 - DNA, 40 bp, Aeromonas salmonicida; identical to SEQ ID NO: 12880
  source 1..40: mol_type = genomic DNA

SEQ ID NO: 42916 - protein, 503 aa, Anaerotruncus colihominis; identical to SEQ ID NO: 341

SEQ ID NO: 42917 - DNA, 50 bp, Anaerotruncus colihominis; identical to SEQ ID NO: 12
  source 1..50: mol_type = genomic DNA

SEQ ID NO: 42918 - DNA, 40 bp, Anaerotruncus colihominis
  source 1..40: mol_type = genomic DNA
gagaatgctttcctgatccttacctctgtataagcaatag

SEQ ID NO: 42919 - DNA, 50 bp, Anaerotruncus colihominis; identical to SEQ ID NO: 15049
  source 1..50: mol_type = genomic DNA

SEQ ID NO: 42920 - DNA, 40 bp, Anaerotruncus colihominis
  source 1..40: mol_type = genomic DNA
gaaaatgcatttcagatccatacctctgttgtaatactag

SEQ ID NO: 42921 - protein, 535 aa, Sphingobium yanoikuyae
MSTWSPEGRRAAIYARFSTDMQNALSAEDQIRLCRTYAERQGWEVVAAYPDAAITGQDKHRPNLNAMLAAADRREFDIIIAESLDRIARDIEDTAHIYKRLEFARVALFTCADHRINELHIGFIGTMSALQLKDMRNKIRRGATGSVARGRVPGGRCYGYDVTPLVYPDGRVEYGHRQINEGEAKVVRRIFAEYVAGESPRAIAHRLNAEKIPSPRGGEWRASTINGSAARDYGILRNPIYAGVIRYGRVRMVRDPHSRKRLSRVDQKPDLVESEAPELRIIDDATWSQAQARKEDLATIPFQRQPRARHIFSGLVKCGCGNSYTVISKDRWGCTGHREKGTCDNPRRISTDRLEERVLHGLQERLLAPDVVSAVVKRYHDRRADMRRQLQSSRFMVEQRIEQLQAEIRNLVNAIAAGMDLGEVREGLDARKADLKAAQAALAEHEALPAIILHPQIVETYRRRIRMLGQAIAGGEKARKFLPVIRSLVEAIIVTDDPNQPDNAKVEVLGSLSSVLALVSGQPAEPRTMQVVAEE

SEQ ID NO: 42922 - DNA, 50 bp, Sphingobium yanoikuyae
  source 1..50: mol_type = genomic DNA
tcggactatgcaagtggtagcggaggagcgctaccgcttggacagtccgg

SEQ ID NO: 42923 - DNA, 40 bp, Sphingobium yanoikuyae
  source 1..40: mol_type = genomic DNA
tctaggaaatggtagcggaggagggacttgaacccccgac

SEQ ID NO: 42924 - DNA, 50 bp, Sphingobium yanoikuyae; identical to SEQ ID NO: 42922
  source 1..50: mol_type = genomic DNA

SEQ ID NO: 42925 - DNA, 40 bp, Sphingobium yanoikuyae; identical to SEQ ID NO: 12955
  source 1..40: mol_type = genomic DNA

SEQ ID NO: 42926 - protein, 537 aa, Sphingobium sp
MSKRAAIYARYSTDLQDDKSIADQFALCRAYAKRESYTVVGEHHDAAKSGASIMGRYGLQDMLVAAYAGKYDAIIVEHQDRLSRDQEDTHHVYKRLKHHGVKLVEVHGGEANALTVGMKAIVAEMHREDNAKKVRRGMAGLISNGKSAGGRAYGYQPHPRETGGLGIIPAEAAIITEIYTRYANGETPRQIAADLNARGVAAPRGNRWAANTMNGNGKRGSGILANSLYRGVRTWNRVRMVKDPDTGRRVSRSNDAADWQTSDLDETIRVISDDLWDRVQAVKSDRAVGEHKPGHAVRAPKRLLSGLLKCGACGGGMGSKGRDRTGRTRIHCTRHAESGDCPNPRSYYLDDIEADVIARIAGEFRSPRVIQAYIDEYQRETKALTATIRSERDGIERRIATLDGEARRSFDLLAAGVVSGERAEQKLRHIEAEIVALKDKLACIEQPAPVIALHPTALASNLAAIDTLRNALASDGQSEAAKLLRAVIDSVTLTPTGEAKHRWTPPPQIEILGKLESLIGAPAIPSASIRGINGSGG

SEQ ID NO: 42927 - DNA, 50 bp, Sphingobium sp
  source 1..50: mol_type = genomic DNA
atcagggggatcaatggtagcggaggaccattcgggtcgatccccctgat

SEQ ID NO: 42928 - DNA, 40 bp, Sphingobium sp
  source 1..40: mol_type = genomic DNA
gcttggaaatggtagcggaggagggacttgaacccccgac

SEQ ID NO: 42929 - DNA, 50 bp, Sphingobium sp; identical to SEQ ID NO: 42927
  source 1..50: mol_type = genomic DNA

SEQ ID NO: 42930 - DNA, 40 bp, Sphingobium sp; identical to SEQ ID NO: 12955
  source 1..40: mol_type = genomic DNA

SEQ ID NO: 42931 - protein, 581 aa, Blautia obeum
MEVELIKANDPFDGSARRKIERLRVAAYCRVSTDDEDQIKSYNSMVTHYTELIQNNKDWIFSGIYADKAITGTKVDKRDEFQRLIQDCMDGKIDMVIAKSLPRFARNTLDTLKYVRMLKERNIAVYFEVEKINTLKDGEFLMTILSSVAQQEVENTSAYVKKGLKMKMKRGELVGFQGCLGYDYDIETKSISINEEGAEVVRYIFDRYVAGAGSTMIARELNEQGNMTIRGNPWTSSSIMGIINNEKYKGDILLGKTFTVDPISKRRLENLGEEDRYYIHNHHESIITEEQFERAQEIRNRRNGNRKHNVIPGKREKFSRQFAFSCMVECGFCGSNLSRRRWHSSSKYKKTIWQCVKSTKEGKRFCPDSKGIPEQVIEEAFVKSYRMLCNDNKDVLEEFLKRTEKALGESSVEDQIHKLEKSIEKVSSKRKKLLDNYLGGVVEQDIYEETDVGLKTELTNAKAKLQYLRQQSDEKSSLQRRLSDFKKALSHNEVLEEFDRGIFESIVEKVIVGGYDEDGNKDPYKITFIYKTGFKSEIGNAKERFGKSRGIGDKVKKMCSDISDEVKGVCSDVSVNTCGDG

SEQ ID NO: 42932 - DNA, 50 bp, Blautia obeum
  source 1..50: mol_type = genomic DNA
tgtgttccgatgttagtgtcaacacatgtcgagactgtggtgggactaca

SEQ ID NO: 42933 - DNA, 40 bp, Blautia obeum
  source 1..40: mol_type = genomic DNA
tcaattccctcagacggtgcatgtggagacggttgttctt

SEQ ID NO: 42934 - DNA, 50 bp, Blautia obeum
  source 1..50: mol_type = genomic DNA
tgtgttccgatgttagtgtcaacatgtgtcgagactgtggtgggactaca

SEQ ID NO: 42935 - DNA, 40 bp, Blautia obeum
  source 1..40: mol_type = genomic DNA
tctactccctcagagggtgtgtgttagttcagttattctt

SEQ ID NO: 42936 - protein, 580 aa, Blautia obeum
MEVELIKANDPFDGSARRKIERLRVAAYCRVSTDDEDQIKSYNSMVTHYTELIQNNKDWIFSGIYADKAITGTKVDKRDEFQRLIQDCMDGKIDMVIAKSLPRFARNTLDTLKYVRMLKERNIAVYFEVEKINTLKDGEFLMTILSSVAQQEVENTSAYVKKGLKMKMKRGELVGFQGCLGYDYDIETKSISINEEGAEVVRYIFDRYVAGAGSTMIARELNEQGNMTIRGNPWTSSSIMGIINNEKYKGDILLGKTFTVDPISKRRLENLGEEDRYYIHNHHESIITEEQFERAQEIRNRRNGNRKHNVIPGKREKFSRQFAFSCMVECGFCGSNLSRRRWHSSSKYKKTIWQCVKSTKEGKRFCPDSKGIPEQVIEEAFVKSYRMLCNDNKDVLEEFLKRTEKALGESSVEDQIHKLEKSIEKVSSKRKKLLDNYLGGVVEQDIYEETDVGLKTELTNAKAKLQYLRQQSDEKSSLQRRLSDFKKALSHNEVLEEFDRGIFESIVEKVIVGGYDEDGNKDPYKITFIYKTGFKSEIGNAKERFGKSRGIGDKVKKMCSDISDEVKGVCSDVSVNTCGD

SEQ ID NO: 42937 - DNA, 50 bp, Blautia obeum; identical to SEQ ID NO: 42932
  source 1..50: mol_type = genomic DNA

SEQ ID NO: 42938 - DNA, 40 bp, Blautia obeum; identical to SEQ ID NO: 42933
  source 1..40: mol_type = genomic DNA

SEQ ID NO: 42939 - DNA, 50 bp, Blautia obeum; identical to SEQ ID NO: 42934
  source 1..50: mol_type = genomic DNA

SEQ ID NO: 42940 - DNA, 40 bp, Blautia obeum; identical to SEQ ID NO: 42935
  source 1..40: mol_type = genomic DNA

SEQ ID NO: 42941 - protein, 518 aa, Enterocloster clostridioformis
MKKCIAVYLRLSLEDVDKRTNQAKDESNSIAAQRQLIQRHIALNPYLSGLPQMEFCDDGFSGTNFQRPDFQRMIDLIRDGNIQIVIVKDLSRFGRDYLEVGDYLEHIFPFLGVRMISINDHYDSEQNLGNTAGMDVAFRNLIYDYYSKDLSKKVKTAMRVKQRDGGYVSCCLYGYRVLPQEKHKMVIDPETAPIVRRVFEEIIAGKSTSQVARELNAEGVPTPLEYKGVRRKNQSDKKPLWTHQRILEMLRNIKYTGCMVNHTRESRKIRDKAQYRVPEEEWIIHENAHEAIVSMEEFEAAKDALRKVRPYKKKTERDVYPFYCAHCGRKLQKTFGNDVHFYCATPYWNEEEHSCKEVRWDKTRIEEVVLEALKAQIAMMTVQSRGKSKAAQSKGTMLRQKLKILTGELKSGDSQKVQSYLDYREGRITREDFIALRAQREQRAGELQEEIARTEAEYQEYLDAEEQAKKERAIARKTGSLDEESLREIMYEAVERVNFVDGQNIEIVWKFDDLFRTA

SEQ ID NO: 42942 - DNA, 50 bp, Enterocloster clostridioformis
  source 1..50: mol_type = genomic DNA
ttttgcacttacttgacacaatcagactaaccagttataataagggcaac

SEQ ID NO: 42943 - DNA, 40 bp, Enterocloster clostridioformis
  source 1..40: mol_type = genomic DNA
aggaatagtcagaagaattgatgatctgggccgtgtggtc

SEQ ID NO: 42944 - DNA, 50 bp, Enterocloster clostridioformis
  source 1..50: mol_type = genomic DNA
ttttgcacttacttgacacaatcagcctaaccagttataataagggcaac

SEQ ID NO: 42945 - DNA, 40 bp, Enterocloster clostridioformis
  source 1..40: mol_type = genomic DNA
agcaatagtaagtagaattgcttttctgagctctgtgaac

SEQ ID NO: 42946 - protein, 540 aa, Hungatella hathewayi; identical to SEQ ID NO: 12131

SEQ ID NO: 42947 - DNA, 50 bp, Hungatella hathewayi; identical to SEQ ID NO: 2472
  source 1..50: mol_type = genomic DNA

SEQ ID NO: 42948 - DNA, 40 bp, Hungatella hathewayi
  source 1..40: mol_type = genomic DNA
taagcgtggatgtgaaccgggaacatacgatcctgaaata

SEQ ID NO: 42949 - DNA, 50 bp, Hungatella hathewayi; identical to SEQ ID NO: 38974
  source 1..50: mol_type = genomic DNA

SEQ ID NO: 42950 - DNA, 40 bp, Hungatella hathewayi
  source 1..40: mol_type = genomic DNA
taagcctggatctgaagaaagaacatacaattgttaatta

SEQ ID NO: 42951 - protein, 518 aa, Serratia ureilytica
MPKAISYIRFSTKIQSVGDSTKRQSKYINDWLKRNPDYYLDESLRFQDLGISGFSGANAKSGAFGEFLAAVESGYIEAGSVLLVESLDRVSRQDIDTAGEQLRKILRSGVEVVTLVDNEWYTKESLKDSLSMIKAMLVMERAHEESAMKSTRLRSVWAAKRERAAKGEIMSKRCAAWLKVSEDRSHFEFIPENVKAVQRVFQLRLEGLSHVKIAKQMNDEGFSTLNQFKSVTGGWSQSSVTELLSNRSVIGFKVPSKSMAVKGVSEIPNYYPSIITDEQFYAVQQLKQGSGRKPSSDLPLLTNLFKGVLRCSECGFIVVVAGVSAKRSGIYKCSMKSEGRCNSVGFSRLQTDRALVQGLLYNTNRLSLNRDNGSAIGAIQSELQHLQKQRERLIKLAMLADDTESMAKDLKDLNSQIKDAEKAVSEVHQREQSSQLETISHLDLTVKKDRIEAQIIIKRIVKEIRLNTAQKKCDVFLHNGLKLLNFPLDRVVDGEIFLEVLPVLEADEFDFDTYRMIE

SEQ ID NO: 42952 - DNA, 50 bp, Serratia ureilytica
  source 1..50: mol_type = genomic DNA
gtgtatcaatagaaaggtctcttcaggataacacctttcttatgatacac

SEQ ID NO: 42953 - DNA, 40 bp, Serratia ureilytica; identical to SEQ ID NO: 33098
  source 1..40: mol_type = genomic DNA

SEQ ID NO: 42954 - DNA, 50 bp, Serratia ureilytica
  source 1..50: mol_type = genomic DNA
gtgtatcaatagaaaggtctcttcaagataacacctttcttatgatacac

SEQ ID NO: 42955 - DNA, 40 bp, Serratia ureilytica
  source 1..40: mol_type = genomic DNA
atgcaaagggaggctgtcgaaaatcacctgactggagagg

SEQ ID NO: 42956 - protein, 529 aa, Salmonella enterica; identical to SEQ ID NO: 35296

SEQ ID NO: 42957 - DNA, 50 bp, Salmonella enterica
  source 1..50: mol_type = genomic DNA
gtgtacttactataccaattggagcagttgatgtataatgtacgccacag

SEQ ID NO: 42958 - DNA, 40 bp, Salmonella enterica
  source 1..40: mol_type = genomic DNA
ccccatcagcagcatggaacagtcggtggtgccgccgcca

SEQ ID NO: 42959 - DNA, 50 bp, Salmonella enterica
  source 1..50: mol_type = genomic DNA
gtgtacttactataccaattggaggggttgatgtataatgtacgccacag

SEQ ID NO: 42960 - DNA, 40 bp, Salmonella enterica
  source 1..40: mol_type = genomic DNA
ccccatcagctgcctggaagggcaggtcatgcaacccaca

SEQ ID NO: 42961 - protein, 562 aa, Vibrio parahaemolyticus
MQKILYPYVRFSSEQQSGGSSYQRQLGDILKYAKENGYTVNDSLELRDLGLSAYKADHIKKGSLGDFFDAIDSGVIETDGSAYLCVEQIDRLSRQSLDDASDVLRTILRANINVITLMDKMIYTKESLNDLMSVLYSSMLMVQANKESAVKSERILKSFDRRIDKLNNGEPIQYVGIFPGWIDNKGTKQKKDFVVNDKAKIVQRVFKMYIAGTSMGDIARIFNDKGIEQVAKRRHKNFTNSWSSAKINHLLKNRCVLGDLHIKKTGEVFKNYYPQIISIDDWDVVQSMTTTKKTIKYSGRKSINIFTGKIFCSGCGQKYHFETDDKITKKGRTLYYMLKCQGRRILGCKSKSIKYDDFLSSTPNMFGMINKTKKDNSEEIKKIKQQISDISSETREIEKNINTLENMNDNGSLDYETYLKESSKQRKKIRINDTRVADFKANIARLSSDNKLNHFDKTDPISIIKGKRFVNENFAGFVISSDSKSCTALYLNGQVVHFLLQNSKIEKKENIKPVDGFGEFFELKEEIINAYKSGKMDGRFIEILRAANFWGVDTSEKDYSIE

SEQ ID NO: 42962 - DNA, 50 bp, Vibrio parahaemolyticus
  source 1..50: mol_type = genomic DNA
ttcctgttaatcttgcgtagtactgtggtttagtgtatgattaacaggaa

SEQ ID NO: 42963 - DNA, 40 bp, Vibrio parahaemolyticus; identical to SEQ ID NO: 8018
  source 1..40: mol_type = genomic DNA

SEQ ID NO: 42964 - DNA, 50 bp, Vibrio parahaemolyticus
  source 1..50: mol_type = genomic DNA
ttcctgttaatcttgcgtagtactccggtttagtgtatgattaacaggaa

SEQ ID NO: 42965 - DNA, 40 bp, Vibrio parahaemolyticus
  source 1..40: mol_type = genomic DNA
agcagggggcaaagtgaccccaatgcccatggatggatgg

SEQ ID NO: 42966 - protein, 562 aa, Vibrio parahaemolyticus
MQKILYPYVRFSSEQQSGGSSYQRQLGDILKYAKENGYTVNDSLELRDLGLSAYKADHIKKGSLGDFFDAIDSGVIETDGSAYLCVEQIDRLSRQSLDDASDVLRTILRANINVITLMDKMIYTKESLNDLMSVLYSSMLMVQANKESAVKSERILKSFDRRIDKLNNGEPIQYVGIFPGWIDNKGTKQKKDFVVNDKAKIVQRVFKMYIAGTSMGDIARIFNDKGIEQVAKRRHKNFTNSWSSAKINHLLKNRCVLGDLHIKKTGEVFKNYYPQIISIDDWDVVQSMTTTKKTIKYSGRKSINIFTGKIFCSGCGQKYHFETDDKITKKGRTLYYMLKCQGRRILGCKSKSIKYDDFLSSTPNMFGMITKTKKDNSEEIKKIKQQISDISSETREIEKNINTLENMNDNGSLDYETYLKESSKQRKKIRINDTRVADFKANIARLSSDNKLNHFDKTDPISIIKGKRFVNENFAGFVISSDSKSCTALYLNGQVVHFLLQNSKIEKKENIKPVDGFGEFFELKEEIINAYKSGKMDGRFIEILRAANFWGVDTSEKDYSIE

SEQ ID NO: 42967 - DNA, 50 bp, Vibrio parahaemolyticus; identical to SEQ ID NO: 42962
  source 1..50: mol_type = genomic DNA

SEQ ID NO: 42968 - DNA, 40 bp, Vibrio parahaemolyticus; identical to SEQ ID NO: 8018
  source 1..40: mol_type = genomic DNA

SEQ ID NO: 42969 - DNA, 50 bp, Vibrio parahaemolyticus; identical to SEQ ID NO: 42964
  source 1..50: mol_type = genomic DNA

SEQ ID NO: 42970 - DNA, 40 bp, Vibrio parahaemolyticus; identical to SEQ ID NO: 42965
  source 1..40: mol_type = genomic DNA

SEQ ID NO: 42971 - protein, 562 aa, Vibrio parahaemolyticus
MNKIIYPYVRFSSEQQSGGSSYKRQMDDILKYAKENGYTVNNSLELKDLGLSAYTAKHIEKGSLGDFLDALDAGVIEADGSAYLCIEQIDRLSRQSIDEAYQVFRKILKANVNVITLMDKKTYTKDSLNDLMSIMYSSMLMGQANEESAKKSERILKSFDKKIDQLNNNEPIQYVGIFPGWIDNRGTKQKRDFIINKKAKIVQNVFKMYIEGTSMGDIARIFNEKGIEQVAKRRHKNFTNSWSSAKINHLLKNRCVLGELYIKKTGEVYKNYYPQIISIDDWDVVQSMTSTKKTTKTSGRKSINIFTGKIFCSGCGQKYYFETDDKITKKGRTLYYMLKCQGRRVLGCKSKSIKYDDFLSSTPNMFGMITKTKKDNSEEIKKIKQKISEISSETKEVEKNINTLESMNDNGSLDYETYLKESSKQRKKIRVNDTRIADFKANIARLSSDNKLAYFDKTDPVSIIKGKRFVNENFAGFVISSDSKACTALYLNGQVIHFVLKNSKIEKQENVKAVDGFGEFFELKQEILDAYGSGKMDGKFIEILRATNFWGVDTPEKDYSFE

SEQ ID NO: 42972 - DNA, 50 bp, Vibrio parahaemolyticus
  source 1..50: mol_type = genomic DNA
ttcctgttaatcttgcgtagcactgtgattttatgtatgattaacaggaa

SEQ ID NO: 42973 - DNA, 40 bp, Vibrio parahaemolyticus; identical to SEQ ID NO: 8018
  source 1..40: mol_type = genomic DNA

SEQ ID NO: 42974 - DNA, 50 bp, Vibrio parahaemolyticus
  source 1..50: mol_type = genomic DNA
ttcctgttaatcttgcgtagcactccgattttatgtatgattaacaggaa

SEQ ID NO: 42975 - DNA, 40 bp, Vibrio parahaemolyticus; identical to SEQ ID NO: 42965
  source 1..40: mol_type = genomic DNA

SEQ ID NO: 42976 - protein, 416 aa, Erysipelotrichaceae bacterium I46; identical to SEQ ID NO: 38536

SEQ ID NO: 42977 - DNA, 50 bp, Erysipelotrichaceae bacterium I46
  source 1..50: mol_type = genomic DNA
agttcgactgcttccccttaggctccaccagaagaggaagcgtcgaactc

SEQ ID NO: 42978 - DNA, 40 bp, Erysipelotrichaceae bacterium I46
  source 1..40: mol_type = genomic DNA
agttcgactctcctcacctccaccaaataaaagtgccaag

SEQ ID NO: 42979 - DNA, 50 bp, Erysipelotrichaceae bacterium I46
  source 1..50: mol_type = genomic DNA
agttcgactgcttccccttaggcttcaccagaagaggaagcgtcgaactc

SEQ ID NO: 42980 - DNA, 40 bp, Erysipelotrichaceae bacterium I46
  source 1..40: mol_type = genomic DNA
agtttgtctcttctcaccttcaggacattaaactccaaag

SEQ ID NO: 42981 - protein, 522 aa, Clostridium innocuum
MARKKSKLNDNNLAIAYYRYSSHSQNEASIEQQRELAHEWADAHGLKIVREYEDAAISGTKEDRPGFQLMLSEVAKIRPNTLIAWKTDRLGRDKYVLAMAKKTIRDAGCEIHLLAENIPTDTAEGILIEGLMEALAEYYSRNLSVHIQRGMDFNAEHANFNGHKVFGFKTEKVYKKRKYVIDPDTAPFVQLMFAKYAEGEPMQSICDEFNEAGLRTSRGNPFGVKTMHRMLKNRAYIGEYRHGEFVVPGGMPALVDGETFDRAQKRLAENKRKGSQRARGMDEDGAPRYWLTGKLYCGECGETMQGVSGTSKTGRTYYYYYCSAQRKKLCTKKKVKKDWIEDLVTDVLRYIIDDSENLMSLAVDAAVYYKEHYKETGYLESLEARRKEVEKGIANLMKAIEGGALSDTLIERLNQLEAQKASLNDAIQAENVKVSLCEDEHSIKAYFEKFLHADFDNPETRDKILEYFVDKIYLYDEKLVVTSWYSEDKTEITWDMLKGADGDPFVKGEAAEFDCFPLGSTK

SEQ ID NO: 42982 - DNA, 50 bp, Clostridium innocuum; identical to SEQ ID NO: 37162
  source 1..50: mol_type = genomic DNA

SEQ ID NO: 42983 - DNA, 40 bp, Clostridium innocuum; identical to SEQ ID NO: 42978
  source 1..40: mol_type = genomic DNA

SEQ ID NO: 42984 - DNA, 50 bp, Clostridium innocuum
  source 1..50: mol_type = genomic DNA
agttcgactgcttccccttaggcttcaccaaaagaggaagcgtcgaactc

SEQ ID NO: 42985 - DNA, 40 bp, Clostridium innocuum; identical to SEQ ID NO: 42980
  source 1..40: mol_type = genomic DNA

SEQ ID NO: 42986 - protein, 567 aa, Clostridium botulinum
MKYHNSLKIYGGFNMKKSAIYVRVSTNHQIDKDSLPLQKNDMINYSKYVLGIDDYEIFEDAGYSGKNTDRPDFQKMFKRIKNGEFTHLLVWKIDRISRNLLDFCSMYDALKKYGCTFISKNEQFDTSTAMGEAMLKIILVFAELERKLTAERVKATMLDRASRGLWNGAPIPLGYKWDDKIKFPVIDEDEKETVMLIYTSYSELQSTSAVRNLLNNLGVQTKRNGTWSTKTISDIIRNPFYKGTYRYNYRETARGKKKKENEWIVLDNNHEAIIYEEFWVQCNEIMDKNSNKNNAKFRGNSNVHIFSGLIECGECHSTMYAKQDKPNLDGYRPSLYACKSRYNGLGCTQKTISDKIVGTFVLSFISNMIRLSDLDRKNLDKEKVEKMLLVGKSFNNVYGIKEIDTILNSLIYAPKNLFTPIKKSTEKNKESYDIKKLDTELKKYEKGLSRLEDLYLFDECDMSQKDYILKKNKINDKISEIKEKIDQTITLNMSSCNYDFLLNATALEFSKEISNGNVDLKALIQRVNRDIIKEFVNTLINKIIVKNKKVQSIEFKNRLVVTFIYNL

SEQ ID NO: 42987 - DNA, 50 bp, Clostridium botulinum
  source 1..50: mol_type = genomic DNA; mol_type = genomic DNA
ttcttatttacttctaccaacggacatccgaaggtagaaataaagaagaa

SEQ ID NO: 42988 - DNA, 40 bp, Clostridium botulinum
  source 1..40: mol_type = genomic DNA; mol_type = genomic DNA
atcttcttcattcatttgacaaccccatgtttcaataaag

SEQ ID NO: 42989 - DNA, 50 bp, Clostridium botulinum
  source 1..50: mol_type = genomic DNA
ttcttatttacttctaccaacggaaatccgaaggtagaaataaagaagaa

SEQ ID NO: 42990 - DNA, 40 bp, Clostridium botulinum
  source 1..40: mol_type = genomic DNA
atatgctttattcattttaaaacaccatttattaaaaaaa

SEQ ID NO: 42991 - protein, 487 aa, Parolsenella catena
MASRRGSRKAPEKDHKRCVIYARYSSARQREESIEDQVRVCTMFAKSNGMEVERVYADKALSGKSDDRPQFQRMVADSRDAGWGVVVVYRLDRFARDRFDSASYRMRLRDNGVSLLSAMERIPDAPEGSILESVLEGVNEWYSRELSQNVRRGMAGNARKCKANGVRVFGYRVGDDGRYAVDEDEAACVRRAFAMAANGSTKTEVRDWLNTACRNVRGGAWTVNSVTTLLGNRKYLGIYKFGDVVVEGGMPALVTQERFDAANGKRKHGRVGAFPLTGKLFDAESGRAYRGDGGTGCTGKRYFYYSCPTDGGGMVRYRQEAVEDAVTDVVSSVMARPGQAEALADAVLAAIERRDEAKRLERAREELREVQRGRERLVDAIIGGVDPELVQERLEGMGDEARRLECEIANLERATTPDRDWAIRWLRAKFPKNITKQVLRRTIGRVEISGDGTVTVEVPWAVTGSMGKEKPSELPGSWQFGGITFGG

SEQ ID NO: 42992 - DNA, 50 bp, Parolsenella catena
  source 1..50: mol_type = genomic DNA
agttcggagggattacgtttggtgggcaaaaagggtgcccgcttgaacta

SEQ ID NO: 42993 - DNA, 40 bp, Parolsenella catena
  source 1..40: mol_type = genomic DNA
gcctctcgacaatttggtgggcgttacaagatttgaactt

SEQ ID NO: 42994 - DNA, 50 bp, Parolsenella catena
  source 1..50: mol_type = genomic DNA
agttcggagggattacgtttggtgagcaaaaagggtgcccgcttgaacta

SEQ ID NO: 42995 - DNA, 40 bp, Parolsenella catena
  source 1..40: mol_type = genomic DNA
gctttttgaaaatttggtgagcacaacaatatttcaactg

SEQ ID NO: 42996 - protein, 548 aa, Vibrio furnissii
MQRIIYPYVRFSSEKQSAGHSHERQIEKIKEYASVNGYEVNDTLNLRDLGVSAFKGKNAEKGALATFLKMIEDGTIPTDGTSYLCIEQFDRLSRQTVDEAYSLFRKILISNVNIITLMDEKVYKKKSLNEMVSIISSLLLMEQANVESEKKSKRVSAVFKKKLEKLRNGEKVQFAYMLPGWIDNIGTKQDPNFIINDQVKTVRMIIDMYLGGETMGHIARILNEKQIPQFARKKTKNPISSWNSGKISHLLVNRCLIGELKIKKTNEIIKDYYPSVISKDEWDIIQSTKRTNATTKIAGRRSINIFQGRLFCADCGNKYYFETDDKTGKHGKKYIYHMLKCSGRRFHSCDSKSIKYDDLTSGNLFFFEKIQDQESKEYYDKIKLEISNYEKKIEELKKEQDELNLLLDNKTINFTAHAIANSKILDQIEVLEKDIALDKQHIAFTMNTNMIDTFDKNDPISVSKAKKFIKDNYAGILISSKYGTIISLMKSGQFIINPIPNRFDDSIPKAYLQLFEIKEQIQNQDKKGLLDGKLKELLDAFNFLDRFE

SEQ ID NO: 42997 - DNA, 50 bp, Vibrio furnissii
  source 1..50: mol_type = genomic DNA; mol_type = genomic DNA
ttcccttcaatactaaagttaatagtgataaacttgagctttaacgggaa

SEQ ID NO: 42998 - DNA, 40 bp, Vibrio furnissii
  source 1..40: mol_type = genomic DNA; mol_type = genomic DNA
ggcgggggctaaattcaccgtgatgcgtttggcgggaaat

SEQ ID NO: 42999 - DNA, 50 bp, Vibrio furnissii
  source 1..50: mol_type = genomic DNA
ttcccttcaatactaaagttaatagggataaacttgagctttaacgggaa

SEQ ID NO: 43000 - DNA, 40 bp, Vibrio furnissii
  source 1..40: mol_type = genomic DNA
ggcggccgccaaagtcaccggggtggatgtggagggaact

SEQ ID NO: 43001 - protein, 497 aa, Caproicibacter fermentans
MIAIYARQSIERPDSVSIDAQIEQCRRLAQEDAQTYSDVGYSGKNTKRPEFERMIQDIKEGKITAVVSYRLDRISRNIIDFANLLSLFEKYGVKYMSATEQFDTSTPMGRAMIYIVMVFAQLERETISTRISDNYRYRSAFGLFMGGNTPFGYDRKRIPLDGKKVSVLTPNEQAPVLQRIFRMFTSHSSMVSICHELNREGIKTAKGNLWTNHALRRVLENISPCRADERLYDYLSACGYNLANGLEDFDGEHGMCLFFKNKNRNQETDPEEQTAVVGIHPPILSSEEYIAAQQILASHHASPGKRSQRTFLTGLVQCQECGHSFGIKFTQRGDRHYAYFHCRGRESRGVCENNKFIPAEELESGILDLCIRHLSKVDIKQTPSEPEDHYRVSSAQAQQIRLQINNLVDNIGKGNSVVDGLLTKKITALQTQLDDLNQKTRVQKPRPVISQATLDWLKNQLSEFDKLELPQKRDAIQRMIKTVWIDKNGTIKIEYLF

SEQ ID NO: 43002 - DNA, 50 bp, Caproicibacter fermentans
  source 1..50: mol_type = genomic DNA
ttctagcttatatcttccggcgtgaagtcgccgggaaataaaagctaaat

SEQ ID NO: 43003 - DNA, 40 bp, Caproicibacter fermentans
  source 1..40: mol_type = genomic DNA
cgttgtgcaaaccggcgtgaagtcgccgggatgagaaaag

SEQ ID NO: 43004 - DNA, 50 bp, Caproicibacter fermentans
  source 1..50: mol_type = genomic DNA
ttctagcttatatcttccggcgtgacgtcgccgggaaataaaagctaaat

SEQ ID NO: 43005 - DNA, 40 bp, Caproicibacter fermentans
  source 1..40: mol_type = genomic DNA
cattctgccaactcgtgtgacttggcctggatgaggaaag

SEQ ID NO: 43006 - protein, 558 aa, Clostridioides difficile; identical to SEQ ID NO: 3086

SEQ ID NO: 43007 - DNA, 50 bp, Clostridioides difficile; identical to SEQ ID NO: 3087
  source 1..50: mol_type = genomic DNA

SEQ ID NO: 43008 - DNA, 40 bp, Clostridioides difficile
  source 1..40: mol_type = genomic DNA
tggtggaactggttctagtaaaaatgaccctgaaaagtat

SEQ ID NO: 43009 - DNA, 50 bp, Clostridioides difficile; identical to SEQ ID NO: 3087
  source 1..50: mol_type = genomic DNA

SEQ ID NO: 43010 - DNA, 40 bp, Clostridioides difficile
  source 1..40: mol_type = genomic DNA
tggtggaacttattaaaaaaaaaattaccctcaaaggcat

SEQ ID NO: 43011 - protein, 550 aa, Ruminococcus bromii
MNREGKKCVLYTRVSTEMQVDGYSLEGQKNSLKRFADREEMEIVGIYEDAGKSGKSIEGRPAFKKMLSDIKNGLEIDYILVYKLSRFGRNAADILNSLEFVQSYGINLICIEEGIDSSQTSGKLLISVLSAVAEIERENIIEQTMNGRREKARQGGWNGGFAPYGYYLKDNQLLIEETEAEAIRIIFDKFANSDVGLGGVAKYLNLQGIKKIPRQNGTLETWSSHFIRLILDNPVYCGKIAYGRRTREKVKGTKNEYKQVHTDDYILEDGQHEGIVSEELWQKAHTKRMATGIKQPSKIGKDRSHLLTGILKCPLCGSSMYTNKHAWTNKDGTYKEVYYYICGRNKQERGHHCDYKASLRKTDIEPLVIEAVKELVSDKYFAKEIEKRIGVQTDTTAIDKELANYESKLKEVDLNKARLEREIDNLPIDARFRERKIHDMTLRLDGLYDTIVELEERIEDAKLRKSSIEMEAITLDNIYKLMLNFGKLYDIISDEEKKSLITYLIKEIQIYPNGESEQPLKSIEFNFPIYRDGQEVRRLLWEKSNTVETV

SEQ ID NO: 43012 - DNA, 50 bp, Ruminococcus bromii
  source 1..50: mol_type = genomic DNA
aaagtaataccgttgaaaccgtagtactgctttcccacaaaaagccagac

SEQ ID NO: 43013 - DNA, 40 bp, Ruminococcus bromii
  source 1..40: mol_type = genomic DNA
gcacacatcgagacggtagtcttgatgtcaagaaaataat

SEQ ID NO: 43014 - DNA, 50 bp, Ruminococcus bromii
  source 1..50: mol_type = genomic DNA; mol_type = genomic DNA
aaagtaataccgttgaaaccgtaggtctgctttcccacaaaaagccagac

SEQ ID NO: 43015 - DNA, 40 bp, Ruminococcus bromii
  source 1..40: mol_type = genomic DNA; mol_type = genomic DNA
gctcacattgcaagggtaagtaagatgtcatgaaaatact

SEQ ID NO: 43016 - protein, 472 aa, Cytobacillus praedii
MQREEGFSLEAQKLRLNAFAESQGWKVVDDYCDDGYSAKNMDRPALRRLISDMKSQKFDVVLVYRLDRFVRSVTDLHELLKLMDQYDVKFKSSTEAFDTTSATGRMFITIIATLAQWERETIAERVYESMLKRSESGKRNGAPAPYGYDLENGNLIVNEEEAKWVKFIFSQYRTHGSQNIAKKLNARGVKTKKGELWSDFAVRYTLKNPIYAGFLRWNYESTSTGHRKKTGEEVIVPLEQENFEALIDKEDYDEIQQILKTRSQMAFRSETHYPFSGIAVCSNCGKNFTGSKKKRKSGGEFRFYKCQGRFKFGTCNVQTIAESSIEKAFLELLDLQNDAKPSLKSKYVEAETDIDTIKEQLKRLSDRKERTKDLYIDGDISKEEYSKRIDKLSNEEKEISALLDKHDEEASEQELDTFLNQIKHEWYNLTDESKKAAIQTLFKSMTVELVEASKPGKYPVHPVVKITDHQFR

SEQ ID NO: 43017 - DNA, 50 bp, Cytobacillus praedii
  source 1..50: mol_type = genomic DNA; mol_type = genomic DNA
tgggtgacttatcgtatgcacgcatctccatgtatacgataagtcaccct

SEQ ID NO: 43018 - DNA, 40 bp, Cytobacillus praedii
  source 1..40: mol_type = genomic DNA; mol_type = genomic DNA
aggaattaaatgaagcggatcttcatgcattgggcagcct

SEQ ID NO: 43019 - DNA, 50 bp, Cytobacillus praedii
  source 1..50: mol_type = genomic DNA; mol_type = genomic DNA
tgggtgacttatcgtatgcacgcagttccatgtatacgataagtcaccct

SEQ ID NO: 43020 - DNA, 40 bp, Cytobacillus praedii
  source 1..40: mol_type = genomic DNA; mol_type = genomic DNA
aggaatgaaaggaaaggcagtttcttgcataagtcagctt

SEQ ID NO: 43021 - protein, 496 aa, Shewanella algae
MLVFYYERVSSKKQDAEDRTGLERQRQNLERFIEQTNARLFDTYNDVKSGKTTKRKGLERLKRDIRDIEDDRKVVFVDSIDRLSRADIWTALGLIGWIKDSDCEIFDNETQTYYGKGLSNFSELLVLLARLDGAANYIRNLSYRSTETNKIKRKQIAEGEIVKLNSVGKWLEWDDTNKQYKLKSWAKHLKHVCLMYANGEGYIKCVDYLVSNGVESPFKGTWHPNTLKRIFKNKSLYGVYEDVKRGIRRENYFPALLSESEFNRLHTVQQSKMVKRGRTTKNIHPLSGLTRCMCCGGRFQRRLKTRTRPNGSIYRREYFHCVNSTNKQCSNTTTFEFSNAVNWVLEVVDWDSVSDKIAHSMTSTSSEKQFIEEQIANLRNTITEYAMNGDIERMNDTVEQVKGFQEKLSNLKTVEIRFNRFQSDSPDNEKNAYLHSVLDRVEFGCSHIRLVMVNGDVHWLIDNREHVENTLMHDLQDDLYARDEGEGVLCGVYGQL

SEQ ID NO: 43022 - DNA, 50 bp, Shewanella algae
  source 1..50: mol_type = genomic DNA; mol_type = genomic DNA
atgtcgcaataaaagaatttgtccgagcatattttcgcttaatgcgactg

SEQ ID NO: 43023 - DNA, 40 bp, Shewanella algae
  source 1..40: mol_type = genomic DNA; mol_type = genomic DNA
tgcccccttgtatttgtccgagcataaattcaatgcccat

SEQ ID NO: 43024 - DNA, 50 bp, Shewanella algae
  source 1..50: mol_type = genomic DNA; mol_type = genomic DNA
atgtcgcaataaaagaatttgtccatgcatattttcgcttaatgcgactg

SEQ ID NO: 43025 - DNA, 40 bp, Shewanella algae
  source 1..40: mol_type = genomic DNA; mol_type = genomic DNA
tttccagtggtattcttccatgaataaatacaatgcccac

SEQ ID NO: 43026 - protein, 540 aa, Roseburia hominis; identical to SEQ ID NO: 2471

SEQ ID NO: 43027 - DNA, 50 bp, Roseburia hominis; identical to SEQ ID NO: 2472
  source 1..50: mol_type = genomic DNA; mol_type = genomic DNA

SEQ ID NO: 43028 - DNA, 40 bp, Roseburia hominis
  source 1..40: mol_type = genomic DNA; mol_type = genomic DNA
actttccaaatacgagacgggagagtccctcccggatgtg

SEQ ID NO: 43029 - DNA, 50 bp, Roseburia hominis; identical to SEQ ID NO: 12134
  source 1..50: mol_type = genomic DNA; mol_type = genomic DNA

SEQ ID NO: 43030 - DNA, 40 bp, Roseburia hominis
  source 1..40: mol_type = genomic DNA; mol_type = genomic DNA
tctttccaaatatgacaagttagagtccagccagtttgtc

SEQ ID NO: 43031 - protein, 542 aa, Ruminococcus torques
MIYQKGSNLFNVAIYIRLSREDGDKEESDSVGNQRKLLTEYVNKHDDFILYDVYIDDGFTGTNFNRPDFHRMIADIEDSKVNCVVVKDLSRFGRDYIDTGRYLERIFPELNVRFISVTDNIDSMKQAYDMLLPIKNIFNEQYARDISNKVQATVKSKQKAGEFIGAFTSYGYKKSPANKNKLVIDEYASEVVKRVFTMYAQGIGKQSIAKILNAEGILCPSEYKKLNGENYKNCNRLEKTSYWTYSTIKVMLQNEIYIGNMVQGKKHQRMRSKQRLVEKENWIRVENTHEPIIDRQLWDKVQKLLTKKHRDIDLETNKNIFAGFIKCGDCGRAMMKNFWRRADGSKSYSFYCGTYKRSGKDYCTPHTLPFQVLNDIVLGDLKQIIRNVENLQELVKSQSFTATKIRKSTDIELIKLKAELERVKKLKKSIYEDYKDELISKEEFLSYREDYQQKETLYSKQIETLEEKKKESVTEDVFETPWLRRLLELKDIEELDRDIIVEMIDQITVYENRKLKISYNFGNELEHLFSSVYCEDLEKKAI

SEQ ID NO: 43032 - DNA, 50 bp, Ruminococcus torques
  source 1..50: mol_type = genomic DNA; mol_type = genomic DNA
aatttgcgtaaactacaaccagcacatgggggttgtagataacgcaagtg

SEQ ID NO: 43033 - DNA, 40 bp, Ruminococcus torques
  source 1..40: mol_type = genomic DNA
agttgttttagatgcaggacatggtggtactgattcgggg

SEQ ID NO: 43034 - DNA, 50 bp, Ruminococcus torques
  source 1..50: mol_type = genomic DNA
aatttgcgtaaactacaaccagcagatgggggttgtagataacgcaagtg

SEQ ID NO: 43035 - DNA, 40 bp, Ruminococcus torques
  source 1..40: mol_type = genomic DNA; mol_type = genomic DNA
atttgtttttgcttcaggagatggtggtaatgggtgatgg

SEQ ID NO: 43036 - protein, 542 aa, Mediterraneibacter faecis
MIYQKGSNLFNVAIYIRLSREDGDKEESDSVGNQRKLLTEYVNKHDDFILYDVYIDDGFTGTNFNRPDFHRMIADIEDNKVSCVVVKDLSRFGRDYIDTGRYLERIFPELNVRFISVTDNIDSMKQAYDMLLPIKNIFNEQYARDISNKIQATVKSKQKAGEFIGAFTSYGYKKSPANKNKLVIDEYASEVVKRVFTMYAQGIGKQSIAKILNAEGILCPSEYKKLNGENYKNCNRLEKTSYWTYSTIKVMLQNELYIGNMVQGKKHQRMRSKQRPVEKENWIRVENTHEPIIDRQLWGKVQKLLTKKHRDIDLETNKNIFAGFIKCGDCGRAMMKNFWRRADGSKSYSFYCGTYKRSGKDYCTPHTLPFQVLNDIVLGDLKQIIRNVENLQELVKSQSFTATKIRKSTDIELTKLKAELERVKKLKKSIYEDYKDELISKDEFLSYREDYQQKETLYSKQIETLEEKKKESVTEDVFETPWLRRLLELKDIEELDRDIIVEMIDQITVYENRKLKISYNFGNELEHLFSSVYCEDLEKKAI

SEQ ID NO: 43037 - DNA, 50 bp, Mediterraneibacter faecis
  source 1..50: mol_type = genomic DNA; mol_type = genomic DNA
aatttgcgtaaactacaatcagcacatgggggttgtagataacgcaagta

SEQ ID NO: 43038 - DNA, 40 bp, Mediterraneibacter faecis; identical to SEQ ID NO: 43033
  source 1..40: mol_type = genomic DNA; mol_type = genomic DNA

SEQ ID NO: 43039 - DNA, 50 bp, Mediterraneibacter faecis
  source 1..50: mol_type = genomic DNA
aatttgcgtaaactacaatcagcagatgggggttgtagataacgcaagta

SEQ ID NO: 43040 - DNA, 40 bp, Mediterraneibacter faecis; identical to SEQ ID NO: 43035
  source 1..40: mol_type = genomic DNA

SEQ ID NO: 43041 - protein, 542 aa, Mediterraneibacter faecis
MIYQKGSNLFNVAIYIRLSREDGDKEESDSVGNQRKLLTEYVNKHDDFILYDVYIDDGFTGTNFNRPDFHRMIADIEDNKVNCVVVKDLSRFGRDYIDTGRYLERIFPELNVRFISVTDNIDSMKQAYDMLLPIKNIFNEQYARDISNKVQATVKSKQKAGEFIGAFTSYGYKKSPANKNKLVIDEYASEVVKRVFTMYTQGIGKQSIAKILNAEGILCPSEYKKLNGENYKNCNRLEKTSYWTYSTIKVMLQNEIYIGNMVQGKKHQRMRSKQRLIEKENWIRVENTHEPIIDRQLWDKVQKLLTKKHRDIDLETNKNIFAGFIKCGDCGRAMMKNFWRRADGSKSYSFYCGTYKRSGKDYCTPHTLPFQVLNDIVLGDLKQIIRNVENLQELVKSQSFTATKIRKSTDIELIKLKAELERVKKLKKSIYEDYKDELISKEEFLSYREDYQQKETLYSKQIETLEEKKKESVTEDVFETPWLRRLLELKDIEELDRDIIVEMIDQITVYENRKLKISYNFGNELEHLFSSVYCEDLEKKAI

SEQ ID NO: 43042 - DNA, 50 bp, Mediterraneibacter faecis; identical to SEQ ID NO: 35852
  source 1..50: mol_type = genomic DNA

SEQ ID NO: 43043 - DNA, 40 bp, Mediterraneibacter faecis
  source 1..40: mol_type = genomic DNA
agttgttttagatgcaggacatggtggcactgattcaggg

SEQ ID NO: 43044 - DNA, 50 bp, Mediterraneibacter faecis
  source 1..50: mol_type = genomic DNA
aatttgcgtaaactacaatcagcagatgggggttgtagataacgcaagtg

SEQ ID NO: 43045 - DNA, 40 bp, Mediterraneibacter faecis; identical to SEQ ID NO: 43035
  source 1..40: mol_type = genomic DNA

SEQ ID NO: 43046 - protein, 692 aa, Prevotella ruminicola
MAKKQRAALICRVSTPQQIKLGLESQVAVLKKRAIKDGYEVTDELIFQEQISGLDAKKPIRKSLQDLMDAVEEHKVDVCYTFELTRISRDPYNLVERVKWFTDRKIPMYIYDAEMWTLDRETKEELEETTSYVFGAATYGKVEIRKMKERTMRGRNEVAKEGMYVGHLSDGYCVVKTERGKEIRVDEDREEVIHKIFDLYTQGNTIDRIAEYLNTNNIPSANSYRLNSPKFKGYQETYRRKGSVVPIKRVGIKWQGSTISNYLHNKWYMGERTYNKQTYYIEPIISTEQWRVVSAMLERNAISFRSKKESTKHPYLLSGLLFCGNCGRRMYGHFTGLNNHYYCSSVEEGVKCGLRGVSKENIEAAVALVVKQKGGLDVVEGKEGVVSNFFKVSPKEEKRLKEEIKTNNKLIAEYEKKSDELDKNYAEAVKQTVKHADDKNRVAVYESMIAEIEDEKINLNNKKYRLTQQNILNTKKLNVGSNADKILTKLMDERNLSTLRELFVTVIEKVHVFNLTPSINVIIINFVDGTKECFLYSYRLMKQKIKIFTRSLFYYDMRDNVLRYKDSSVIVDAKELIKTDPLLIPFERLEELTDKAKEQDAKYKEWRKKYNTGLPTTVPYVVKDETYKEISLKKKHLYNRKYKIKKHKKLTSEEKKQMLAEIDKELAFLSAKVKYLNREEAVKEYRKQKGNR

SEQ ID NO: 43047 - DNA, 50 bp, Prevotella ruminicola
  source 1..50: mol_type = genomic DNA
aactctggttgtcttatttcgttttgcaatgggatgatttaacaataatt

SEQ ID NO: 43048 - DNA, 40 bp, Prevotella ruminicola
  source 1..40: mol_type = genomic DNA
ccataatggggtgctcttttgtgatgagctaccagaattc

SEQ ID NO: 43049 - DNA, 50 bp, Prevotella ruminicola
  source 1..50: mol_type = genomic DNA
aactctggttgtcttatttcgttttacaatgggatgatttaacaataatt

SEQ ID NO: 43050 - DNA, 40 bp, Prevotella ruminicola
  source 1..40: mol_type = genomic DNA
ccaaaatagagtgcttttatatgtaaagctacctgaatcc

SEQ ID NO: 43051 - protein, 550 aa, Clostridioides difficile
MSKEKIKVYLYTRVSTSIQIDGYSLEAQKSRMKAFALYNDYEIVGEYEDAGKSGKSIEGRVQFTRMMEDIKSGKDGVSFVLVFKLSRFARNAADVLSTLQIMQDFGVNLICVEDGIDSSKDAGKLMISVLSAVAEIERENIRVQTMEGRIQKAKEGKWNGGFAPYGYQLIDGKLIINEEEAIAIRTIFDQYVNTSIGANGLSKYLENHGIRKIPRQNGKNPLFDAGLIRKILKNPVYNGKIAFGRRTLEKVHGTRNEYRQVEQDDYLVAEGIHEAIIPDELWQAAQVKLKAQAKKYEHVNKGKNMRTHLLSGIVKCPICGAGMFGNKSIKYKKDGTKYKDFYYYGCKHRLMNRGHKCTYNKQIREELLDDAVAEVIIKLVSNPKFASMMQEKINMKVDTSAIENEIDNYQKELRKSHSTKFKLIEEIDNLDVEDKHYKRRKNDLDDRLYRMYDKIEELESQLIEAKAKKETIEVEKLTGDNIYKVLIYFDKLYKVMNDVERRQLIEALISEIQIYEEKQPNGQWLKSITFKLPIIDKDLNISLDNDKQVE

SEQ ID NO: 43052 - DNA, 50 bp, Clostridioides difficile
  source 1..50: mol_type = genomic DNA
agtttggacaatgataagcaagttgagacggtagcactattgtccaaact

SEQ ID NO: 43053 - DNA, 40 bp, Clostridioides difficile
  source 1..40: mol_type = genomic DNA
cccaaatacgccacattgtgagactgtagttaaacttatt

SEQ ID NO: 43054 - DNA, 50 bp, Clostridioides difficile
  source 1..50: mol_type = genomic DNA
agtttggacaatgataagcaagttttgacggtagcactattgtccaaact

SEQ ID NO: 43055 - DNA, 40 bp, Clostridioides difficile
  source 1..40: mol_type = genomic DNA
accatttgcttcatattgtttgtctgtaattaaaattatt

SEQ ID NO: 43056 - protein, 635 aa, Vibrio diabolicus
MQFISHAKPQIYSYRRFSNLRQEKGRSLARQKKLTEEIAEKFNLSLNDDFLMTDKGLSAFHGHHKSKGALGVFLAAVENKMVKPGSVLIVESLDRLSREQPHVAQATLAALVSSDITVVTATDEKICSKETMAKDPLGTMIMSVLEMIRAHNESLVKTERSVDFIHSEILKHENGEVADVAGAIPFWISRKPSPNKKVKAGFELNEHESTIRLLIDMYHVQGKGLRTISRELHSLGIEAPKGGGVWAVSTLSSIFSNSALCGRHEFKLEYLKDGKKQKETYTLDSYYPEVMTIDEFESMEALKKRRSGAQKGDKSDKGGLVYLLTDYGKKSFCAKCGSSIGSQPQRQKYRIRRRLHCSKHKETENCCKSIVQDHIEDAFLVSVARHIDYNLINTQVKPEDIIRNSERLSDIDNEMGNVLDMIRIVKDSKSKLKLMQDYGALENEKEELTKQNSEFKQFKISPEDIKDFIGKVNEARDYQNHEARKFVKSILMQCIRKISVHMEKKKLECYGYPNICNNSLVNVVDVEFYTDKTLEIFISAETNELLFSKICDDFADDSLGSFTEEQLQLWNNEGWEQLQRQLEKDSSQDDDPTSAENLWLTSVVAEEISKAFLECADDEVIESVLENVDGNQSSI

SEQ ID NO: 43057 - DNA, 50 bp, Vibrio diabolicus
  source 1..50: mol_type = genomic DNA
ggagttatcactgttcgcttgccatccgtacaatgaacactcatcattta

SEQ ID NO: 43058 - DNA, 40 bp, Vibrio diabolicus
  source 1..40: mol_type = genomic DNA
gaaatatccaaaacttccatccgtccaatgaatgtcctgc

SEQ ID NO: 43059 - DNA, 50 bp, Vibrio diabolicus
  source 1..50: mol_type = genomic DNA
ggagttatcactgttcgcttgccatacgtacaatgaacactcatcattta

SEQ ID NO: 43060 - DNA, 40 bp, Vibrio diabolicus
  source 1..40: mol_type = genomic DNA
gaaataaacaaacctactgtacttccaataaatgtacagc

SEQ ID NO: 43061 - protein, 646 aa, Vibrio lentus
MMALIPYARVSSGKQLDGLSMSLQGDSKLLKDLEKKYDTTVSDLVYNDEGVSSYKGKNVSHGELGRLLTDIERGVIEKGDIIVVRHLDRLSRLRLTGAMTIYNKIMEAGVLIHTTMDDRLYEPDDQIAHILATLAFNTANEESAKKSHLTNTYAAHRIQQFLSNEKPDNGTAYDIGIGRHPFWIEINNRVIQKGKHFTLARIMFEKAMQGYGVARLQKFALEQGLELSYSAVGKMFRSHTVFGDLHITHQGKKHTLKSYYPALATENEYYKVRAIKDRLTKESNAQRKHVSILAGMQKLYCGCCNSSVGISRNTKQDINYYSCINKLEKCYQPLRQDIIDNIVLNAIDIHIFNVDSTDTTVVDGLELEFSEKKKQHESAVERYMLLGDSAGDSAVNVIHQLKSELDDIQGKIETEKSQAASYAIDYDAITSFHDAMADYKAQQDKITEYVHGGSELKQEIKDVLKLILKRITIDHRHMITIEMLDGSISYLYLLRRKDGKRVHDRYYVPIKVHDKETVNIIRTSTPELVNWVTQSELDKLDIYYEDVTNPFLTIERNRHVRDLEQEFFDLLQGNVYEWKRAGIIKAGATTTQWQDFKDADVSKYGFTKAECTITTRHYTKQHKTIIYRDFNKSELANHFDCKRIEF

SEQ ID NO: 43062 - DNA, 50 bp, Vibrio lentus
  source 1..50: mol_type = genomic DNA
atcttagagcaacttgccttagcatcaccaataaagaattactatcatag

SEQ ID NO: 43063 - DNA, 40 bp, Vibrio lentus
  source 1..40: mol_type = genomic DNA
taagcagcttttcttcgcatcaccgaacaacatctgagta

SEQ ID NO: 43064 - DNA, 50 bp, Vibrio lentus
  source 1..50: mol_type = genomic DNA
atcttagagcaacttgccttagcacaaccaataaagaattactatcatag

SEQ ID NO: 43065 - DNA, 40 bp, Vibrio lentus
  source 1..40: mol_type = genomic DNA
taactagctcttcttagcacaacagaataaaatcttaaaa

SEQ ID NO: 43066 - protein, 563 aa, Caproicibacter fermentans
MDNSYVIVLYIRISVEDADIGQDGKDESNSVTNQRTLLHDFLRQKKEFEGCTVTELCDDGYSGTNFERPSVKKMLELVKERKVNCIVVKDFSRFGRDFITVGDFIDQIFPYLGIRFISVNDGYDSNEYLGTTSGLDTSFRNIVYAYYSQDISDKVRSGKRTKAKKGDFLSPFAPIGYRKDEKNKNKLVIEEEGAAIVRRIFELAASGMSVLKITRLLNAEKVPTPSQIQNENGFYHKWWIGVTKEKMWDDGKVLSILRDGRYLGNNIYGKRMRPEVGQTKTKPVKKSRWIVVTGTHEPIITAELFLAAENNLRRFEHKDAAPLETHLFSGRIRCGNCGYALARCKSPVPKLFCDTKARKEGCGCFTEYIEEREIAEAVFHILRQYVRVLLDDGILVRQTKVNDRIVILRKQIAAYQGVCDRFQEQKADLYDEKAEGNITKAQYKKKYDALEAEHEDMKLQLKKLTDELSDLERRLSYEASKEQDLKNCLTSDILTREMVLEFVDCIYVFDKNTIHIKWRFDEKGVQNEQTSFDLLQSSPSRQAGIGKSETTPDRLCQGTGTYD

SEQ ID NO: 43067 - DNA, 50 bp, Caproicibacter fermentans
  source 1..50: mol_type = genomic DNA
ttacgtccctacttgacaccatcagatgatgacgatataatagggcttaa

SEQ ID NO: 43068 - DNA, 40 bp, Caproicibacter fermentans
  source 1..40: mol_type = genomic DNA
cgtgtttgatacctatatcgatgacggatggagcggaaca

SEQ ID NO: 43069 - DNA, 50 bp, Caproicibacter fermentans
  source 1..50: mol_type = genomic DNA
ttacgtccctacttgacaccatcatgtgatgacgatataatagggcttaa

SEQ ID NO: 43070 - DNA, 40 bp, Caproicibacter fermentans
  source 1..40: mol_type = genomic DNA
agagtctgatacctttatctgtagaggtttgagaggaaca

SEQ ID NO: 43071 - protein, 481 aa, Adlercreutzia equolifaciens
MVKRRAAIYARFSSHNQRSESIEIQVDAGTRYIAENGLELVKIYADYAKTGRNTDRREYKQMMNDARLGLFDYVVIYKVPRIMRNRDEMALTRIMLRKAGVEILYAGEEIASGSAGVLQLGMLEVLAEWESAIDSERIIDGIQKNAQRCMANGRTLYGWDIVEGRYVINDREAAVLHKMKNMVFAGSIIAEVVRAVANVRTRQGKPINHDRAKKLLLRPQNGGTYSYAGHVVEGGMPALWPKAEQDMLISILGNPRPRRRVDHAAEWPLTGKLYCAECGNTLAGTSGTGKSGTVYAYYKCKKCKRTFRRDILEDAIVDMTICALERPDVRKRIADGMATYEATMEDAPLESERLRKEIKRIDAAFERIWQAIEDGIAPPGGKERIEDLKARKDALETEYQIAKANENIEPGFSELMDWLDNVAEEMNPQEILTMFVRAVQIDKAEVRLYFAFDYYGDNFTPPKKDEHQLKRCSSNSPMVEP

SEQ ID NO: 43072 - DNA, 50 bp, Adlercreutzia equolifaciens
  source 1..50: mol_type = genomic DNA
gtgttcgtctaattctcctatggtggagcctagtataactaaggcgaaca

SEQ ID NO: 43073 - DNA, 40 bp, Adlercreutzia equolifaciens
  source 1..40: mol_type = genomic DNA
cggtcgtagaacatgtggtggagcctagggggatcgaacc

SEQ ID NO: 43074 - DNA, 50 bp, Adlercreutzia equolifaciens
  source 1..50: mol_type = genomic DNA
gtgttcgtctaattctcctatggtatagcctagtataactaaggcgaaca

SEQ ID NO: 43075 - DNA, 40 bp, Adlercreutzia equolifaciens
  source 1..40: mol_type = genomic DNA
tggtcttaggatatgtggtataacctatggtgattgaagg

SEQ ID NO: 43076 - protein, 550 aa, Gardnerella vaginalis; identical to SEQ ID NO: 1606

SEQ ID NO: 43077 - DNA, 50 bp, Gardnerella vaginalis; identical to SEQ ID NO: 1607
  source 1..50: mol_type = genomic DNA

SEQ ID NO: 43078 - DNA, 40 bp, Gardnerella vaginalis
  source 1..40: mol_type = genomic DNA
ttgcacaaagtgcaaacgtaattttccgcactttgtacca

SEQ ID NO: 43079 - DNA, 50 bp, Gardnerella vaginalis
  source 1..50: mol_type = genomic DNA
ttaaatccctaagtgaatgcccctcaaggagtgttcagtaagggattaaa

SEQ ID NO: 43080 - DNA, 40 bp, Gardnerella vaginalis
  source 1..40: mol_type = genomic DNA
ttgcataaagtgcaaaattcactgtcagccctttcatcca

SEQ ID NO: 43081 - protein, 537 aa, Anaerostipes hadrus; identical to SEQ ID NO: 22536

SEQ ID NO: 43082 - DNA, 50 bp, Anaerostipes hadrus
  source 1..50: mol_type = genomic DNA
gtgagtcccaatgtggtattgcatgatggtaatgtaccatcgagatacca

SEQ ID NO: 43083 - DNA, 40 bp, Anaerostipes hadrus
  source 1..40: mol_type = genomic DNA
tatagcacatccttttcgtgaaggtaatgggagaagcacc

SEQ ID NO: 43084 - DNA, 50 bp, Anaerostipes hadrus
  source 1..50: mol_type = genomic DNA
gtgagtcccaatgtggtattgcataatggtaatgtaccatcgagatacca

SEQ ID NO: 43085 - DNA, 40 bp, Anaerostipes hadrus
  source 1..40: mol_type = genomic DNA
tgtaggacagccattgagtaaaggtaatgggggaagacac

SEQ ID NO: 43086 - protein, 503 aa, Clostridium innocuum
MNNRIDAIYARQSVDKKDSISIESQIEFCKYELKGGNCKEYKDKGYSGKNTERPQFQQLMRDIESGLVRKVVVYKLDRISRSILDFANMMELFQQYNVEFVSSTEKFDTSTPMGRAMLNICIVFAQLERETIQKRVQDAWYSRCQRGFKMGGKTPYGFRTEPYVMDGVRTKKLVIEPTEAAFVRQMYEMYADPQVSLHDITKKLTVDGMRTYHGRPLSRATLSVILRNPIYVMADLDIYEFYKSQGTDIYNDAADFAGTNGCYYYQGKGNTEDKHKHLQGQTLVLAPHEGFIPSELWLKCRKKLLASHTYQPARKARNTWMAGKIKCGKCGYALMSAHSNGILYLRCTVHADSKACPGCGCVKLHELEAVVYGAMVKKLKDFKTLTGRNKAAKISPKLTAKRLELAQVESEIEKLLDTLTGASPVLLSYANSKIEELDARRQSIANEIAKLSADAVPMEKMESISGYLDDWENVSFEDKRQVVDALITVIRATNEKVEIEWKI

SEQ ID NO: 43087 - DNA, 50 bp, Clostridium innocuum
  source 1..50: mol_type = genomic DNA
ttttgtgctcttgtctataatagtgaaacattatggataagggcacaaaa

SEQ ID NO: 43088 - DNA, 40 bp, Clostridium innocuum
  source 1..40: mol_type = genomic DNA
gattgcagggcacttcagagagttcagtttcccaacgtat

SEQ ID NO: 43089 - DNA, 50 bp, Clostridium innocuum
  source 1..50: mol_type = genomic DNA
ttttgtgctcttgtctataatagtagaacattatggataagggcacaaaa

SEQ ID NO: 43090 - DNA, 40 bp, Clostridium innocuum
  source 1..40: mol_type = genomic DNA
gcttgcagagcacctcggaaggaacattttcccaatgttg

SEQ ID NO: 43091 - protein, 592 aa, Streptococcus mitis
MSNNVEIIKANPLVTRRNDNSGSLSRRVAAYCRVSSDSDDQKNSYDSQVRHYREYISQHQDWILVDIYADEGISGTQVGKRQDFQRLISDCLDGKIDYIITKAIARFARNTLDTLKYVRLLKDKQIGVFFEEENIDTLTMDGELLLTILSSVAQQEVENTSAHVKKGLKMKMQRGELIGFQGCLGYDYNQDTKSISINEKEAKIVRYIFERYIDGIGGRAIARELDELGYKTPRGLDHWQDTTVLGIIKNEKYKGDILMGKTFTVDPISKRRLINFGEEDKYYIKNNHDAIISPEIFTQAQEIRLRRSGNKKTIANIKGKRERYSRMYPFSSRLECGFCGTVLSRRSWHSSSEYKKIIWHCTTSIKRGKKYCTHSKGIEEKAIENAFLQSYQQLFYENNNLTEDFLEIIKEELTDDTLKVELTKIVSKLNSLYKKEEKLVSMNLDGKISDSVYEDKFNQIQIEKEKLLEEKVNLEVTLKSEVDIKSRLENFKEILTSQKTLTEFDKDIFESIVEKIIVGGINSDGEIDPAMLTIIFKTGDSSTKDAKSYKSKRKNAKIDNDKLCFNSVTDEEKKCTNKENNARRMCKLVGET

SEQ ID NO: 43092 - DNA, 50 bp, Streptococcus mitis
  source 1..50: mol_type = genomic DNA
gtgaaccttttgagtctagcagacgcatcacgtggagtgtgtagtgttgc

SEQ ID NO: 43093 - DNA, 40 bp, Streptococcus mitis
  source 1..40: mol_type = genomic DNA
ttgatctttttcctcagacacatcatgttgaggcggtatc

SEQ ID NO: 43094 - DNA, 50 bp, Streptococcus mitis
  source 1..50: mol_type = genomic DNA
gtgaaccttttgagtctagcagactcatcacgtggagtgtgtagtgttgc

SEQ ID NO: 43095 - DNA, 40 bp, Streptococcus mitis; identical to SEQ ID NO: 13025
  source 1..40: mol_type = genomic DNA

SEQ ID NO: 43096 - protein, 577 aa, Eubacterium rectale; identical to SEQ ID NO: 11251

SEQ ID NO: 43097 - DNA, 50 bp, Eubacterium rectale; identical to SEQ ID NO: 11252
  source 1..50: mol_type = genomic DNA

SEQ ID NO: 43098 - DNA, 40 bp, Eubacterium rectale
  source 1..40: mol_type = genomic DNA
gttcgttataaacatcgcatcaccaaagctgaaaaacctg

SEQ ID NO: 43099 - DNA, 50 bp, Eubacterium rectale
  source 1..50: mol_type = genomic DNA
tcactctacaaaatcatcattgcatgccccatgtagagggtgtgccttca

SEQ ID NO: 43100 - DNA, 40 bp, Eubacterium rectale
  source 1..40: mol_type = genomic DNA
ttcttttataaaattctcttgaccaaagatgaataacctg

SEQ ID NO: 43101 - protein, 470 aa, Propionibacterium freudenreichii
MRMIQYVKANKVAYCIVHKVDRLARNRADDVSIHLALQQCGVMLVSASENIDETPSGMLLHGIMSTIAEFYSRNLATEVAKGMTQKAIGGGTNGRAPIGYLNVRKRDELGREVRTIELDPERAPMIEWAFKAYASGNWSVSQLHDELTSRGLRSLPTPKRPAKPLAVSTIHRLLTNPYYKGDVIYRGTRYKGNHPALVPAEVWYQVQSVLTAHQCAVEATQVHGHYLKGTVHCGQCGSRLIVSNAKNRHGNVYCYFVCSGRHSKRTDCTRQAMLIEDVEKLVEDYYTRVQITPAQQDALAGMLHHEFDRLMAAETEALERLTTNRDRLEGEQDRLMQAHYADAIPLSVLKREQDRIVAELDQVTRRIDAHHGDYADARAHLDDALGLLANCADIYTRCDDTNRRLCNQAFFTKVYIDEDNELRVEHNRPFEMLLDPQVNANALTWAADVNKARTSANVSIGKGSSLVRAV

SEQ ID NO: 43102 - DNA, 50 bp, Propionibacterium freudenreichii
  source 1..50: mol_type = genomic DNA
gggttcgagccttgtgcgtgcggtggacctccgtagagagtttgagaacc

SEQ ID NO: 43103 - DNA, 40 bp, Propionibacterium freudenreichii
  source 1..40: mol_type = genomic DNA
tcatctgcttctcactggtggagctagggggattcgaacc

SEQ ID NO: 43104 - DNA, 50 bp, Propionibacterium freudenreichii
  source 1..50: mol_type = genomic DNA
gggttcgagccttgtgcgtgcggtaaacctccgtagagagtttgagaacc

SEQ ID NO: 43105 - DNA, 40 bp, Propionibacterium freudenreichii
  source 1..40: mol_type = genomic DNA
tcagctgcttctaagaggtaaacctgagggaattcaaaac

SEQ ID NO: 43106 - protein, 512 aa, Clostridium botulinum
MKVAIYSRKSIETDKGESIKNQIEICKEYFLRRKSNVQFEIFEDEGFSGGNTNRPDFKIMMNRAKNNEFDIIACYKIDRIARNVVDFVNIYDKLNKLNIKLVSVTEGFDPGTPLGKLIMMILASFAEMERENIRQRVKDNMKEMAKAGKWTGGNVPFGYSTQRIDIGNKKATYLKLDNAKKEIVKEIFNLYISTNSMHKVQKWLYDTKDIKWCLSTIKNILTSPIYVRCDKEIIKYLSNFGEVFGEPNGVNGVITYNRRPYTNGKHRWNDKSMFYAVSKHEGIINSDLWLLVQSIQEKTKTKPRPKNSQVSYSTGTLRCSKCGSSMTVNYNHKNKDGSISYVYVCSGRRSFGKNYCDCKQVSQKILDKQIEEALNSYVKLDIEEFKRTIEVKEPKSQKGKIQTIEKTIQTNKTKINNLIDKISILSNTASAPLIGKIETLTQENEDFKKELLFLKQEELNNNIISPEEKYKKLKQLVNILNSNDIETKRNLLNFSVQEILWDSDTKYADIII

SEQ ID NO: 43107 - DNA, 50 bp, Clostridium botulinum
  source 1..50: mol_type = genomic DNA
tacggtatttatatttggattgtaactgcaacacaaatataaataccgta

SEQ ID NO: 43108 - DNA, 40 bp, Clostridium botulinum
  source 1..40: mol_type = genomic DNA
cactgtaggttggattggaacagcatgcactaaaccccct

SEQ ID NO: 43109 - DNA, 50 bp, Clostridium botulinum
  source 1..50: mol_type = genomic DNA
tacggtatttatatttggattgtacatgcaacacaaatataaataccgta

SEQ ID NO: 43110 - DNA, 40 bp, Clostridium botulinum
  source 1..40: mol_type = genomic DNA
cactgggccatgggttggacaagcatgctctaaaatctct

SEQ ID NO: 43111 - protein, 512 aa, Clostridium botulinum
MKVAIYSRKSIETDKGESIKNQIEICKEYFLRRKSNVQFEIFEDEGFSGGNTNRPDFKIMMNRAKNNEFDIIACYKIDRIARNVVDFVNIYDKLNKLNIKLVSVTEGFDPGTPLGKLIMMILASFAEMERENIRQRVKDNMKEMAKAGKWTGGNVPFGYSTQRIDIGNKKATYLKLDNAKKEIVKEIFNLYISTNSMHKVQKWLYDTKDIKWCLSTIKNILTSPIYVRCDKEIIKYLSNFGEVFGEPNGVNGVITYNRRPYTNGKHRWNDKSMFYAVSKHEGIINSDLWLLVQSIQEKTKTKPRPKNSQVSYLTGTLRCSKCGSSMTVNYNHKNKDGSISYVYVCSGRRSFGKNYCDCKQVSQKILDKQIEEALNSYVKLDIEEFKRTIEVKEPKSQKGKIQTIEKAIQTNKTKINNLIDKISILSNTASAPLIGKIETLTQENEDFKKELLFLKQEELNNNIISPEEKYKKLKQLVNILNSNDIETKRSLLNFSVQEILWDSDTKYADIII

SEQ ID NO: 43112 - DNA, 50 bp, Clostridium botulinum
  source 1..50: mol_type = genomic DNA
tacggtatttatatttggattggaactgcaacacaaatataaataccgta

SEQ ID NO: 43113 - DNA, 40 bp, Clostridium botulinum; identical to SEQ ID NO: 43108
  source 1..40: mol_type = genomic DNA

SEQ ID NO: 43114 - DNA, 50 bp, Clostridium botulinum
  source 1..50: mol_type = genomic DNA
tacggtatttatatttggattggacatgcaacacaaatataaataccgta

SEQ ID NO: 43115 - DNA, 40 bp, Clostridium botulinum; identical to SEQ ID NO: 43110
  source 1..40: mol_type = genomic DNA

SEQ ID NO: 43116 - protein, 520 aa, Microbacterium sp BH-3-3-3
MGRISSADPRGSVVTSPGHAAIYTRISDDKEGQGLGVARQLEDCQALAERLGLTVAAVFSDNNISASTNSTKGRPQYDAMLARARGGEFTHVLAYSDSRFSRRLREMLDLIDLARDGVIDIKTVVSGYFDLSSAQGRGIAINVATQSQVEAEIIAERVTRAARQRVESGRWHGGVPPFGFSKEAKTLIIDDREAALIGEAASRVLDQDETLYSIVKDWNNRGDLTRKGASWKHSVLRNVLTNTALVGTNSAGVENCWQPILDRQTFDRLCERLAPDSARRTNPLGVKSSKHALGGGLIVCGRCQKPLYPVARQGAPTKLVCRAFANGDHENHPKREDGTSEGRVSIDAAALEGYLFDRCLAHLEDDQFWDDIKRQRETADSDTAKLRAERDARQGERDRAGRAFVAGIMSERDAQIEVARLDSEIARLTQLVDHSHGGPTARDVWNERSEVLDRFQDWTPGERRLFFRALAARVSVGDWPSGLPTTTLPRQGESAVAFEERRAALARSAMASRVQIDWQG

SEQ ID NO: 43117 - DNA, 50 bp, Microbacterium sp BH-3-3-3
  source 1..50: mol_type = genomic DNA
agggcgcaaatgtgtttgaattacttgtaattgcggcgcatttgcgcctt

SEQ ID NO: 43118 - DNA, 40 bp, Microbacterium sp BH-3-3-3
  source 1..40: mol_type = genomic DNA
ggggcagtactcgagggagttgtcggcgaagaacacgctg

SEQ ID NO: 43119 - DNA, 50 bp, Microbacterium sp BH-3-3-3
  source 1..50: mol_type = genomic DNA
agggcgcaaatgtgtttgaattacacgtaattgcggcgcatttgcgcctt

SEQ ID NO: 43120 - DNA, 40 bp, Microbacterium sp BH-3-3-3
  source 1..40: mol_type = genomic DNA
gagtccggactcgtgggagacgatcgcgatgaacacggtg

SEQ ID NO: 43121 - protein, 487 aa, Bacillus mobilis; identical to SEQ ID NO: 39756

SEQ ID NO: 43122 - DNA, 50 bp, Bacillus mobilis
  source 1..50: mol_type = genomic DNA
tgtctatataggctgtcggcatccgcggtatgcttatatggacaaaaatt

SEQ ID NO: 43123 - DNA, 40 bp, Bacillus mobilis
  source 1..40: mol_type = genomic DNA
ttctcgaatttcagcgtctgcatggcgcattacaaattta

SEQ ID NO: 43124 - DNA, 50 bp, Bacillus mobilis
  source 1..50: mol_type = genomic DNA
tgtctatataggctgtcggcatccaaggtatgcttatatggacaaaaatt

SEQ ID NO: 43125 - DNA, 40 bp, Bacillus mobilis
  source 1..40: mol_type = genomic DNA
ttctatattttcagcggataaatatagcattggaaattta

SEQ ID NO: 43126 - protein, 508 aa, Micromonospora haikouensis
MPENMHPLYDRSMTVRNAAIYCRISHDREGRALGVAKQEEDCRALAERLGWEVGHVFVDNDLSASVHGKKPRPGFEDMIRRVEAGEFNAVLAWSTSRLTRRPMEHERLIPLFWERKIPISTVKAGDIDYTTARGRSRARDDARRDAEEAEETSERVERDVQRRAEAGEFHGGHLPFGIDADREIIRGKVKYVRFRHHTTDAPRVRDAARRLLAGETVYGIAKDFGMQPRTLKRAITNPAIAGLREYNGQFYPTPWEPIVDREDWERVCEILSDPSRRTSETNQRKYMLSGLVYCHCGNRMTSTSAKRTEGPTYECSPTKTGGGCGRARIVMRPLEEYIAEQVFTRLDSPDLREAMARESGGVDDKERELRKAVMDDEQRLVELANERDDNLIGEAEYRRRRARLTDRLEANRMTLERTTRKRARTNPPPGAELRAVWADKGSVWKRTILASIIERIDIGPHPVNPDTGRLFTSAPPRRKGEDHEAWRKRFDLHRARVFASRVYVTWLV

SEQ ID NO: 43127 - DNA, 50 bp, Micromonospora haikouensis
  source 1..50: mol_type = genomic DNA
gtgccccctgttgtaccacacgcgaccacgcgatgccagaaaacatgcac

SEQ ID NO: 43128 - DNA, 40 bp, Micromonospora haikouensis
  source 1..40: mol_type = genomic DNA
caggcccagcgcgcgggcgacttcgacggccttgagccgg

SEQ ID NO: 43129 - DNA, 50 bp, Micromonospora haikouensis
  source 1..50: mol_type = genomic DNA
gtgccccctgttgtaccacacgcgtccacgcgatgccagaaaacatgcac

SEQ ID NO: 43130 - DNA, 40 bp, Micromonospora haikouensis
  source 1..40: mol_type = genomic DNA
caggcccagctcgctggggtcttctctggcaatgagcaag

SEQ ID NO: 43131 - protein, 553 aa, Blautia obeum
MREVEILKKKQLKCYLYTRVSTSMQVDGYSLDAQRDKLRKYAAYEDMIVAGEYSDEGFSGKNIQGRQEFQRMLNDIQDGKDDVSYVLVFKLSRFGRNAADVLNSLQLMQDFGVNLICVEDGIDSSKDAGKLMISVLSAVAEIERENIRTQTMAGREQKAREGKWNGGFAPYGYKLENGNLVIAEDEVEVIRVIYDRYIHTNEGVAGVAKYLNRNGYTKKLRQNNTIPGFSRDFVKNVLYNPVYMGKIAYGRRRTEKKQGTRNEMHVVEQSEFPVYEGQHEAIISEEDWYLAQEKRKINSFKREKVNNPDHAHILSGILKCPCCGKSMYGNIAKAHSKDKKTRYYYYCKNTVTPTGHECSFRLNIEQTEINKFVAKVISAMVNNPRFVEAIQAKIGTAVDTEDMERQIAVLQGRLKQAFGTKSRLERQMDTLDINDAHYDRKILDLQRRYDEQYDTIEEIEVQIGELQSQIRSIQQEKISGDNIYRLLLAFDEVYHSATEAEQKEFMKAFIERIEMFPEKRKDGSWIKKIVFNFPVPVDGEEVKELPLETETTV

SEQ ID NO: 43132 - DNA, 50 bp, Blautia obeum
  source 1..50: mol_type = genomic DNA
tcccttggaaactgaaacaactgtcgaagtcgtgtgttgtctacatcggg

SEQ ID NO: 43133 - DNA, 40 bp, Blautia obeum
  source 1..40: mol_type = genomic DNA
tccctcagacagtgcatgtggagacggttgttcttttgtc

SEQ ID NO: 43134 - DNA, 50 bp, Blautia obeum
  source 1..50: mol_type = genomic DNA
tcccttggaaactgaaacaactgttgaagtcgtgtgttgtctacatcggg

SEQ ID NO: 43135 - DNA, 40 bp, Blautia obeum
  source 1..40: mol_type = genomic DNA
tccctgagttattgcatgttgaaactgttttactttaatc

SEQ ID NO: 43136 - protein, 497 aa, Faecalibacterium prausnitzii
MTAVIYARYSSDNQREESIEGQIRECTAYAEKNGITVVKHYIDRALSAKTDNRPDFQQMIKDSEKRLFDIVLVWKLDRFARNRYDSAHYEYQLERNHVKLVSATEPISDSPAGIMVKSMLTGMAEYYSAELSEKVVRGMTENVLKGKYNGGTIPIGFKVDEEKFFQVDPLKAPFVVEAFQRYNDGATMKELMNWLNDSGVTTNRNQKFTYNSVQTLLTNKRYIGENHFKDIVMPDSIPAIVDKDLFEEVQQKIKKNSRAPARHKAEDDYLLTTKLFCGMCGAMMFGECGTGRNKVVHHYYKCATAKRFKTCKKKTVRKEWLEDLVVAETMKLIQDDAVIDAIVAEVMELQDQENTTLPLLEKQMREVENGIENMLNAIQAGVLTNSTKSRLEKLEAQQKELEVRIAEEKIARPRLSENQVRFWLTRFRKLDPNMKSHRETLINTFVNAVYLYDEKVLITFNYKDGTKTITFDEIAAKDAPEGNGSDLGCFAPPKRPA

SEQ ID NO: 43137 - DNA, 50 bp, Faecalibacterium prausnitzii
  source 1..50: mol_type = genomic DNA
tgtttttagcagcgcggcttgcgtaatccacccgcgcccaccaaacaaga

SEQ ID NO: 43138 - DNA, 40 bp, Faecalibacterium prausnitzii
  source 1..40: mol_type = genomic DNA
tttcagcttcggtggttcgaatccacccgcgcccataaaa

SEQ ID NO: 43139 - DNA, 50 bp, Faecalibacterium prausnitzii
  source 1..50: mol_type = genomic DNA
tgtttttagcagcgcggcttgcgttctccacccgcgcccaccaaacaaga

SEQ ID NO: 43140 - DNA, 40 bp, Faecalibacterium prausnitzii
  source 1..40: mol_type = genomic DNA
cttctgcttctgtggtgcgtctacacccagcctcctaaaa

SEQ ID NO: 43141 - protein, 551 aa, Delftia tsuruhatensis
MGKTSKGLVYSYLRFSDPKQSTGSSTDRQLAYAEKWASEHGLQLDSSLTLRDEGLSAYHQQHIKSGALGVFLRAVEDGRVPHGSVLIVEGLDRLSRAEPIQAQAQLAQIVNAGITVVTASDGKAYSRTRLKENPMDLVYSLLVMIRAHEESDTKSKRVKASIRRLCEGWQNGTYRGHVRQGHDPEWVKEVKGGWEIDADRAAAVRRAVQLYVQGHGGKGIVQRLDAEGLQLYTTSAENRTHQIYRLLKMPQLAGIKPISIDGEEYQLRDYYPALLSADEWTELQRVAAQSGRRRVKGDLPHVITGLGITICGYCGRPMSGQHLATKNRLPDGRLRDGNRRLLCASAAAYGGGCPVSGSTSAAPVERAIMSYCSDIVNLQALYGADRSQAPRAQVVAARQEVDQISAQLDKLTDAMLASADEGTPAVFARRARQLEIELDAAQTRLQAAELDLAGAARTDIAGADAAWRALAAGVEAQQIEPRLQARQLVADTFERIVVYARGVNPDPEAERDYKIDLVLIARGGVARLLTMDRRGNWIAGEQSATQDQAHQ

SEQ ID NO: 43142 - DNA, 50 bp, Delftia tsuruhatensis
  source 1..50: mol_type = genomic DNA
gatatagatacagtatcctacgggcacccgagggataccatacctatacg

SEQ ID NO: 43143 - DNA, 40 bp, Delftia tsuruhatensis
  source 1..40: mol_type = genomic DNA
gtccgtgagtgccttggggcacccgagggagacgaagccc

SEQ ID NO: 43144 - DNA, 50 bp, Delftia tsuruhatensis
  source 1..50: mol_type = genomic DNA
gatatagatacagtatcctacgggctcccgagggataccatacctatacg

SEQ ID NO: 43145 - DNA, 40 bp, Delftia tsuruhatensis
  source 1..40: mol_type = genomic DNA
gtctgtgagtgccctgggcctgcaaaggtaaaagaagcct

SEQ ID NO: 43146 - protein, 560 aa, Delftia tsuruhatensis
MGKTSKGLVYSYLRFSDPKQSTGSSTDRQLAYAEKWASEHGLQLDSSLTLRDEGLSAYHQQHIKSGALGVFLRAVEDGRVPHGSVLIVEGLDRLSRAEPIQAQAQLAQIVNAGITVVTASDGKAYSRARLKENPMDLVYSLLVMIRAHEESDTKSKRVKASIRRLCEGWQNGTYRGRVRQGHDPEWIKETETGWEIDPERAAAVRRAVELYTQGHGGKGIVQRLDAEGLRLYSTTPVNVTTQVYRIIKMPQLAGIKPVSLDGEEYQLKGYYPAVLGADEWAELQRVAAQSGRRRVKGDLPHIITGLGITVCGYCGRPMSGQHLATKKRLPDGRIRDGYRRLLCASAAAYGGGCAVFGSTSVAPVERAIMSYCSDIVNLQALYGADRSQVPRAQVAAARQEVDQISAQLDKLTDAMLASADEGTPAVFARRARQLEADLAAAQARLQAAELDLAGAARTDISGADAAWRALAAGVEAQEIEPRLQARQLVADTFERIVVYARGVNPDPDALERDYKIDLVLIARGGVARLLTVDRQGNWIAGEQSSTAHEPEQPNEPATLT

SEQ ID NO: 43147 - DNA, 50 bp, Delftia tsuruhatensis
  source 1..50: mol_type = genomic DNA
cgtatagatgcagtatcctatgggcacccgagggataccatacctatacg

SEQ ID NO: 43148 - DNA, 40 bp, Delftia tsuruhatensis; identical to SEQ ID NO: 43143
  source 1..40: mol_type = genomic DNA

SEQ ID NO: 43149 - DNA, 50 bp, Delftia tsuruhatensis
  source 1..50: mol_type = genomic DNA
cgtatagatgcagtatcctatgggctcccgagggataccatacctatacg

SEQ ID NO: 43150 - DNA, 40 bp, Delftia tsuruhatensis; identical to SEQ ID NO: 43145
  source 1..40: mol_type = genomic DNA

SEQ ID NO: 43151 - protein, 552 aa, Delftia tsuruhatensis
MGKTSKGLVYSYLRFSDPKQSTGSSTDRQLAYAEKWASEHGLQLDSSLTLRDEGLSAYHQQHIKSGALGVFLRAVEDGRVPHGSVLIVEGLDRLSRAEPIQAQAQLAQIVNAGITVVTASDGKAYSRTRLKENPMDLVYSLLVMIRAHEESDTKSKRVKASIRRLCEGWQNGTYRGHVRQGHDPEWVKEVESGWEIDADRAAAVRRAVQLYVQGHGGKGIVQRLDAEGLKLYSTSAENRTPQIYRLLKMPQLAGIKPVAIDGEEYQLRGYYPALLSADEWTELQRVAAQSGRRRVKGDLPHVITGLGITICGYCGRPMSGQHLATKNRLPDGRLRDGNRRLLCASTAAYGGGCPVSGSTSVAPVERAIMSYCSDIVNLQALYGADRSQAPRAQVAAARQEVDKISAQLDKLTDAMLASADEGTPAVFARRARQLEVELTAAQARLQAAELDLASAARTDITGADAAWRALAAGVEAQEIEPRLRARQLVADTFERIVVYARGVNPDPNASERDYKIDLVLIARGGSARLLTLDRQGNWLAGEQSSIPQVAGC

SEQ ID NO: 43152 - DNA, 50 bp, Delftia tsuruhatensis
  source 1..50: mol_type = genomic DNA
ggtatagatgcagtatcctacgggcacccgagggataccatacctatacg

SEQ ID NO: 43153 - DNA, 40 bp, Delftia tsuruhatensis; identical to SEQ ID NO: 43143
  source 1..40: mol_type = genomic DNA

SEQ ID NO: 43154 - DNA, 50 bp, Delftia tsuruhatensis
  source 1..50: mol_type = genomic DNA
ggtatagatgcagtatcctacgggctcccgagggataccatacctatacg

SEQ ID NO: 43155 - DNA, 40 bp, Delftia tsuruhatensis; identical to SEQ ID NO: 43145
  source 1..40: mol_type = genomic DNA

SEQ ID NO: 43156 - protein, 599 aa, Leclercia adecarboxylata
MKKKLYSYIRWSSAQQTSGTSLERQTAAAAEYAKTHDLEFVEILDAGVSAFRGKNATDGALAEFIAAVENGAIPSDSWLYVENLDRLSRATVRNALKLLLHITDLGVTVVTGMDGKIYSAETMDKDFTDLMISLLLFSRANEESKTKSDRVKEASMKALARVQAGLPATIKGGGADPFWIQRGGRETSPTQHPAHWLAIKKIVELSLQGIGCNRIRQVLNDDPTLYPPPRQKDTPRRRALLDAGLAPTGWNIHRIEDARRQPSLYGLKTITLSGHTYNLEGYYPAVCSEEEFHLIQNISASNRLKSGDIRNTITLLSGLNLCKCGSCGGWVTTFRKNGKLTYRCDAGHRKIHHCPTTWSLNALIIESATVRALIAGVAHNIIEDSQDLESVAGEIDNRRAEVVEIDRKRERLAVRIAEEDDDLLMQQLRQYNARKRDLLAEIGTLTQREALRSEEHNAAERLAEAQRLLTGEMVADIYTAERLAVRELIRKSVRQVSIWKRQDKSLKLECEFISGWRYSFEGVMDGSLKSFIEYQTSPDGINMLEIYGKLNAITAKVFSRVLGADDCVLSPNLSHVQAYQDMAVRLGHSPLTGSQFFWK

SEQ ID NO: 43157 - DNA, 50 bp, Leclercia adecarboxylata
  source 1..50: mol_type = genomic DNA
ttgggttcctattttttttacagtcaggtgtagttaatataggtgcacca

SEQ ID NO: 43158 - DNA, 40 bp, Leclercia adecarboxylata
  source 1..40: mol_type = genomic DNA
gtccctgccctgttccagccaggtgtaccaggtgacgccc

SEQ ID NO: 43159 - DNA, 50 bp, Leclercia adecarboxylata
  source 1..50: mol_type = genomic DNA
ttgggttcctattttttttacagtctggtgtagttaatataggtgcacca

SEQ ID NO: 43160 - DNA, 40 bp, Leclercia adecarboxylata
  source 1..40: mol_type = genomic DNA
gtcactgcactcttccagcctgggtaacagagtgacaccc

SEQ ID NO: 43161 - protein, 681 aa, Parabacteroides merdae
MNNSNNNVAIYCRVSTQMQSTDRQEEELLKYAEQKGFKITPNHIYKDVISGFSIAETRPEYDRLFACIKSGEIKKVLFWELTRLGRNSVELLKEIEKLKELDVELYFKSQNLTINSKQDLGSRILLAVLAVTATYEIELFAERSVSGKINKILMGGGVGGDNNAYGYCNDRNKKMIIKDSEAKIIKRIFTEYASGKSTIKICDGLNADKIPTSYATRTKEFRTRRNEKGLKEKEYKNFNPDTLIWKPNMISKILCKELYTGKRHVVFHKPKLMRQNSDVTEKKEHEIIFEYNKQCEDLRIISDELFTLVQQRLSEAKYNKNNAIKHENLLKDKIICGECGANFSVGNSMSNATSYVNGERTYKCYGRINRSDKPATCTNGSSIRQWRLDGLILTLSLKMFAEINLEENNNKRIDTLEIENVQARKIILQKEDILKKVKEDYKLAMKNYSKVNNEIVESLIVEATNKYEKESADLQLSIEKQRKLITTNNITIQQLKNFNQGLNINIKMDQIRNDKGLVKSMIAEYIKKIYVYRINKLWNLIVVRYTNDVEFWGTIKAARYKQEEMFYDETLCKYGIEFHTWIINNSEKCFEYDKENHLFVYNGNSSIYTDLNKGIYTYEEFNEMLYKAGWIGSYSLFDYEFGSTNIKVEKEKLTDNENMYVDWNSHNEKVLRKLKSRTRNE

SEQ ID NO: 43162 - DNA, 50 bp, Parabacteroides merdae
  source 1..50: mol_type = genomic DNA
atgggtgtgtctatatctcctgtgtgcatcggtgcgattgacacatcctg

SEQ ID NO: 43163 - DNA, 40 bp, Parabacteroides merdae
  source 1..40: mol_type = genomic DNA
caatatatgttcagccgtatgcataggaggatattcctgt

SEQ ID NO: 43164 - DNA, 50 bp, Parabacteroides merdae
  source 1..50: mol_type = genomic DNA
atgggtgtgtctatatctcctgtgctcatcggtgcgattgacacatcctg

SEQ ID NO: 43165 - DNA, 40 bp, Parabacteroides merdae
  source 1..40: mol_type = genomic DNA
ttttatttgctaagacgtgctcttaagaggatattcctgt

SEQ ID NO: 43166 - protein, 545 aa, Agrobacterium tumefaciens
MNANATPALASTGRAALYLRVSTGRQAENDLSIPDQRRQLQSYCQAKGLAVAAEFVEPGASATDDRRPEFQKMMDAATQKPALFDTIIVHSFSRFFRDQFQLEFHFRRLAKNGVRLVSITQDLGDDPMSVMMRQIMALFDEYQSKENAKHTLRAMRENARQGFWNGSRPPFGYRIVSAEQRGIRVKKRIEPDPMQLETVRLMFRLARLGGEDGPMGSRQIADYLNIRGIRTQTGGRWGVGAVHQILTRETYIGRHRFNVSGKRRGERKSEDEIVDVEVDPIIDADEFAEVQAIMRSRSPQLKAPRFVAAGTLLGGVCYCADCGGAMTLRTSGKGNQYRYYTCCTTARQGKTGCKGRTIPMDVLDDKVVGCLEELLLEKGHLEKLLAGVLERREAHADNLKDRIVALRKQAADAEAKLTRLYEAIENGLAELDDSNLKGRIAELKRMRDSARADADRAEDRGEGKTNQITPELLEAFASEARRQIRAKDGSFRRHHVQTLVQRVEVGADEIRIKGSKPTLLQTLVASGGNRRVETAGIGFRSFNPK

SEQ ID NO: 43167 - DNA, 50 bp, Agrobacterium tumefaciens
  source 1..50: mol_type = genomic DNA
tcggctttcgcagtttcaatccgaaaatggctcgccggggtcgacgaaaa

SEQ ID NO: 43168 - DNA, 40 bp, Agrobacterium tumefaciens
  source 1..40: mol_type = genomic DNA
tcatgccatattttggaaaaatggctccccgggccggatt

SEQ ID NO: 43169 - DNA, 50 bp, Agrobacterium tumefaciens
  source 1..50: mol_type = genomic DNA
tcggctttcgcagtttcaatccgaggatggctcgccggggtcgacgaaaa

SEQ ID NO: 43170 - DNA, 40 bp, Agrobacterium tumefaciens
  source 1..40: mol_type = genomic DNA
tcatcccatcctttggaaaggtggctgcccactgtgtatt

SEQ ID NO: 43171 - protein, 544 aa, Ruminococcus albus
MTDKITALYCRLSQEDMLHGESNSITNQKAILSKFAADNGFRNTKFYVDDGISGTTFERDGFKAMMADIEDGKVGIVITKDLSRLGRDYLKTGELIEMVFPDYDVRYIAINDGVDTLKSENELMAFKNIFNDWYARDTSKKIRAVQKAKAQAGKPLATHPPYGYKKSETDKNQWVIDEEAAAVVRRIFQLCIEGNGPTVIANILTADGIPTPTAYYRSKGMNVCNQNAKTKRWGMATVIHILERMDYLGHTVNFKTYRKSYKNKKLYENPKENWLIIENTHEPIISQHDFDLVQEIRSHKKRRQKSGTVSPFAGIVYCADCGNTLYVGRAQTLSPNQEHMMCSTYAHDSDECTAHYIRTCVLTEIILGELNKLSQFVRDNEDEFVRRAMENSAATQDSEMQTARKALRIAEKRINELDDLFERLYEDNVSGKISDERFATMSARYETEQSKLKDDAAKLSETISRKEQKKNDVMNFVGIVKKYEEFTELTPEIMHELIDRIIVHAPKGGRANRTQQVDIHFRFNVVTATATADFKQYYVRRKAV

SEQ ID NO: 43172 - DNA, 50 bp, Ruminococcus albus
  source 1..50: mol_type = genomic DNA
atagttctttatgtgtactcgcctttcggcgatgctccataaagaagtat

SEQ ID NO: 43173 - DNA, 40 bp, Ruminococcus albus
  source 1..40: mol_type = genomic DNA
tggtgtgcatgccgctcagttatctgctgacatatatgac

SEQ ID NO: 43174 - DNA, 50 bp, Ruminococcus albus
  source 1..50: mol_type = genomic DNA
atagttctttatgtgtactcgcctgccggcgatgctccataaagaagtat

SEQ ID NO: 43175 - DNA, 40 bp, Ruminococcus albus
  source 1..40: mol_type = genomic DNA
tggtgtgcactcctctaaagcatatgctgcagtacatgac

SEQ ID NO: 43176 - protein, 586 aa, Listeria innocua
MKEVEVIKANSSTSKSKRGKQIERIRVSAYCRVSTDSEDQLSSYISQKTYYTDLIQKNSDWIFAGIYADEAITGTQVTKREDFQRMINDCMNGEIDMVITKSISRFARNTLDTLKYVRMLKEKDIAVYFEDEKINTLTMDGELLLVVLSSVAQQEVENISANVKKGLKMKMKRGELVGFQGCLGYDYHPEDKSITINEEEAEIVRYIFKRYVEGAGGSVIGQELENLGYKTKYGNSTWVPTTVLGIIKNEKYKGDLLLGKTFTVDPISKRRLENMGEEDQFYIRNHHEPIISEEIFEKAHEILNRRNKNRGKIGDGNTKREKFSRKYAFSCLLECGFCKGTLTRRKWHSGSQYDKVIWQCVTSTKKGKKHCPESKGIPEQAIEDAFVESYRILCDSNKDVLDEFLRTMNETLSSSSVNKQLSKVEKEIEALEKKKSKLVDMRLEDVIDSETYEYKFSSLTSKQDELLNEREKLQTTAMNEKDIKRRLQEFKRTLEQNEVLHEFDRYVFESIVEKVIVGGYDEDGNIDPAQLVFVYKTGFKNSLDGNRFKPMRKNARGNRKTNELCSQTNNEVQSLSSHSSSDTCRV

SEQ ID NO: 43177 - DNA, 50 bp, Listeria innocua; identical to SEQ ID NO: 37522
  source 1..50: mol_type = genomic DNA

SEQ ID NO: 43178 - DNA, 40 bp, Listeria innocua
  source 1..40: mol_type = genomic DNA
tatgttcccgcaaacagctcatgtcgagtcagtaacatta

SEQ ID NO: 43179 - DNA, 50 bp, Listeria innocua
  source 1..50: mol_type = genomic DNA
tgtcttcccatagtagttccgacaagtgtggagactattgtgttgctaca

SEQ ID NO: 43180 - DNA, 40 bp, Listeria innocua
  source 1..40: mol_type = genomic DNA
aatgttccagcaaacataaagagttgagtcattaatttta

SEQ ID NO: 43181 - protein, 497 aa, Bacillus wiedmannii
MDMQLNSIMEVIRKYNCIHTHSFLDKAVSARKKKITNRKELENMFEAAKRKEFDFVIVYKSDRLARDPLEHQTIRIVMKTLDIPIIISSTESVYNTDTDLIVQLMEDGFTKYEVDTIIARTRSGLENKAKQGKWLGGKPPFGYTYDKDSEQFIEHNEELCYVKEIFNLYVNGHGFQYIANTLPNGSRRGKDWGRENVKAIVLNPFYCGLLSWRRQTDGKQNARDIWIEAPNHYVKPIISRTTWESCWRIYSEKRNGNMVPKHYKTSFLLQGLLSCEKCQELMKTKNQQTVSSTNKQYGGKIYFCTNCKLRIDADLLHDKVVNQTLTDVKISGFHNVYHAIEQKIQYEIQELNNNIQKHQRLFENYTIKLHNITEELKQRMKNNDDKRFLKSLAIYRLDVQRKLDGVTQQINNFKQQITLKEKVEKSKETWLHTLNEVFQDDVKLQEISDMDKRRFLLPLIQSVSIKENKKRNEYDISLQLRTDFSKRDVKNQISLIL

SEQ ID NO: 43182 - DNA, 50 bp, Bacillus wiedmannii
  source 1..50: mol_type = genomic DNA
tggttacatccctgctaactaaaccagtacaaccgttcatcatctaccct

SEQ ID NO: 43183 - DNA, 40 bp, Bacillus wiedmannii
  source 1..40: mol_type = genomic DNA
tggatatggggaagtgaaccagtacaaccgccatagtacc

SEQ ID NO: 43184 - DNA, 50 bp, Bacillus wiedmannii
  source 1..50: mol_type = genomic DNA
tggttacatccctgctaactaaactagtacaaccgttcatcatctaccct

SEQ ID NO: 43185 - DNA, 40 bp, Bacillus wiedmannii
  source 1..40: mol_type = genomic DNA
tggagatgggaatgtaaactagtacaaccactatggaaaa

SEQ ID NO: 43186 - protein, 682 aa, Pseudoalteromonas arctica
MKPTAFIYGRVSSDKQTIGTSIEIQTDLKKAKQIASEHGCELSELITVDEGVSGFSGSNLKTGKLKDLLEIVKRNDLIILRALDRFSRGSLYKVNSIFTDLLHKGVRFYTTMDNKLYGGESSNKVVDAIVSVIGFNSAFEESSKKAALNNDYILKRITQFNDGIRGLNNAPLHHGKSIPFHCQLVGEDKSKVVVKHPKNFDVAKEIIALALNGSGLHKIIRVVNEKHNISRTKQWLKDYLKSHTLYGNCILKVQDRTQKVIYDGFGETYPKKEYILNEYYPAVCTKNEWLGLQETRKRSIKLRSEGQKYYSLLSGRQRLYCSCGKPLTVIYGKNATQPIYYGCIDQISCRNMEQIYVLNRVVTDAVTGDVYKKDTDKNSKNREIESNKLNGEITELQESINNMLKLVEDHPLAYGDKFAPKIIESKKAIEKKQKLLDEVNGQKFISSRTIEERNMIPNEIRKIKDQLLNGTSEQNLENGNKIYKIIKRITLDKNGLISIEFESGEFKACYFPIQNKSKGRRMGSFLHIFNNIEDNLYAPMKEDPDFSLVTFTREELENKKHVIHIDKINPSLLTLFSHERTIMACDKAVSHINNYLKSYGYFILKSSFAINSGLSEKQWQKHKAYCIAFFEKRGMIHKIEFITKNNGRNSILIISDKKLRLKKINTILFLNIKNYKQLATPS

SEQ ID NO: 43187 - DNA, 50 bp, Pseudoalteromonas arctica
  source 1..50: mol_type = genomic DNA
aattacatgtaaatcaatttagcaggggctaaattgatttacctgcaatg

SEQ ID NO: 43188 - DNA, 40 bp, Pseudoalteromonas arctica
  source 1..40: mol_type = genomic DNA
atcttttggcaaatcggcaggggctaaatttacagttatt

SEQ ID NO: 43189 - DNA, 50 bp, Pseudoalteromonas arctica
  source 1..50: mol_type = genomic DNA
aattacatgtaaatcaatttagcagaggctaaattgatttacctgcaatg

SEQ ID NO: 43190 - DNA, 40 bp, Pseudoalteromonas arctica
  source 1..40: mol_type = genomic DNA
atcttttgccaaaaccccagagttaaaaataatagttatt

SEQ ID NO: 43191 - protein, 417 aa, Ruminococcus torques
MIMYTLDRFARNRYDSAIYKAKLKRNGVKIFYAKQPMPDTPEGIILESVLEGYAEYYSENLARSIKRGMKENALHGIAMGSPVLGYKIGNDRQYEIDPVGAKAVRTIFTMYAEGKSKTQIVNWLNEHGFKTSRGNAFNKNSLSRILRNDKYIGVYRYDDVVLENAVPPIIDKTLFDKVQATFRHNYTARAKAKAIEDYLLTTKVFCGHCGEPMVGESGTSKTGKVHHYYKCVNRKRKHNCEKKVEKKEWLERTVVEFTVQQVLTDENIEKISTRAMELIEKELQDTSILIGLQERLKETNKRIKNLMSAIEQGIITPTTKERLEELEEERRDLEGQIAREEMKKPLLTKERIMYWLESFKRGDIEDVEYQRRIIDTLVNSVYVYDDGDKGRKLVLTFNISGNNTLTISSSDIERTAP

SEQ ID NO: 43192 - DNA, 50 bp, Ruminococcus torques; identical to SEQ ID NO: 42452
  source 1..50: mol_type = genomic DNA

SEQ ID NO: 43193 - DNA, 40 bp, Ruminococcus torques
  source 1..40: mol_type = genomic DNA
ttcgattcccgccaggtccataaggggtattagcgcagtt

SEQ ID NO: 43194 - DNA, 50 bp, Ruminococcus torques
  source 1..50: mol_type = genomic DNA
ttcggatattgagcgcacagctcctgcaaatagtgcaaatccgaactcat

SEQ ID NO: 43195 - DNA, 40 bp, Ruminococcus torques
  source 1..40: mol_type = genomic DNA
ttcaattcctaccagttcctgaaaggttattagctgaaat

SEQ ID NO: 43196 - protein, 566 aa, Paenibacillus lautus
MTLWYNNFIQQRSRIFIIQEVVEFMKQAVVAYCRVSTSSKDQENSFENQKNFFEREVGRSETLELVGIYADKGITGTSLNRRDDFTRMLLDAGLIERKVTRTRSIFEIDHSKKPKFNLILVKNTSRFARNVMVIDILRELVKNKVYVKFLDIDLLFDSLDKEFMLNLFLNFDQQYSIDKSKKVRFGLQESAKQGRIFGASKLYGYRYKEETNELFIIDNEAKIIKHIYNLFIEGYGIRRIINDLDKKGFKTRSNKSFSISMVRRILSNEKYCGTLVRNKYDAGQVFNKRSYPIIKPEEEWIITENRVPAIITKELFERVKELRLSKKHHINQKGIYKGITEYAGLIYCGNCGLVYTSNVDKGRKFYNCKTKKSKGVEICSNPNINHKVIDMILEGLQNGGYYEMFIKDRDKRVNALIKQKEDLMSSIDQQDIEATKELSNELDELQKKKKRLLLLYLDGAFEKDVLDQESSKIDSSIASVESAIKATSSTNEEIMEQITEIEESIVKIESQEIKQVYDREEVMGMIDRFIIRKDEKGKPLVDIRFDGDSDYKTEGEKIEINTRHYK

SEQ ID NO: 43197 - DNA, 50 bp, Paenibacillus lautus
  source 1..50: mol_type = genomic DNA
caagtggttttgtttcacagtagcagaatattgtgcaacattatcagggt

SEQ ID NO: 43198 - DNA, 40 bp, Paenibacillus lautus
  source 1..40: mol_type = genomic DNA
acccgggggcccaatgagcagaatattgtgcatgcctgcg

SEQ ID NO: 43199 - DNA, 50 bp, Paenibacillus lautus
  source 1..50: mol_type = genomic DNA
caagtggttttgtttcacagtagctgaatattgtgcaacattatcagggt

SEQ ID NO: 43200 - DNA, 40 bp, Paenibacillus lautus
  source 1..40: mol_type = genomic DNA
ctccaggggcccgatgagctgaatattggatgtgtcagcg

SEQ ID NO: 43201 - protein, 544 aa, Streptococcus suis
MKQLNIQSSSKITALYCRLSRDDELQGTSNSILNQKMMLEKYARDNNFTNLEFFIDDGYSGTNFNRPDWSRLQSLIDEGKIGCIIVKDMSRLGRDYLRVGYYTDIVFPEADIRFIAINNGIDSNESTENDLTPFINIINEFYAKDTSKKIRAVFKAKGESGKPLATIPPYGYLKDKEDKYKWVIDEEASKVVKKIFQLCVQGYGPSQIASELIKEGIPTPTEHFDKLGINVSSPLSEIKGNWQPKTISLILEKMEYLGHTVNFKTYKKSYKSKKKLENPKEKWQIFENTHEAIIDQETFDIVQRIRQGRRVRNNLGEMPTLSGMLYCADCGAKLYQVRGKGWEHEKEYFVCASYRKHKGLCTSHQIKNVQVEELLLHELKKITEYARQYEDDFVKLVQSKTQNELNKSLKESKKDLVHVKERINKLDTIIQRLYEDMVEGKLSEDRFQKLSSNYETEQCELEKKATMLEKIIHDTEQTTLNTTAFLKQVREHTTINKLTPEIIRMFVDKIIVEKPEKIEGTRTKKQTIWIYWNYIGILDIEKTA

SEQ ID NO: 43202 - DNA, 50 bp, Streptococcus suis; identical to SEQ ID NO: 2302
  source 1..50: mol_type = genomic DNA

SEQ ID NO: 43203 - DNA, 40 bp, Streptococcus suis
  source 1..40: mol_type = genomic DNA
tatgaaaaaaacgcggacgttagtctgcgtttttttagcg

SEQ ID NO: 43204 - DNA, 50 bp, Streptococcus suis; identical to SEQ ID NO: 2304
  source 1..50: mol_type = genomic DNA

SEQ ID NO: 43205 - DNA, 40 bp, Streptococcus suis
  source 1..40: mol_type = genomic DNA
tatgaaaaatagcctgtggagtgcctgcgttttgttaacg

SEQ ID NO: 43206 - protein, 565 aa, Streptococcus suis
MNRTLTISDYRQVDTSRLSDITVVYCRLSQDDGLDGDSNSIINQKNILFEVVTREKLPNPVLFVDDGFSGTNFDRPAISEALRLVENGQVSNFIVKDLSRLGRSYIKVGQLTEITFPSFDVRFIALNDGIDSNKPNETNSIFLPIKSLMDEMYAADTSKKIRAVFQAKAKSGVPVTTNPPYGYLKDPSNPKNWIIDPVASEVVKRIFQEAKSGKSTNEISRMLEADQVEKPDAYRVKNGRKPLSGMKDSGYSPYYWSRETINRLLGREEYLGHTVNLRTRTKSYKDKKSIDLPREDWLIFKNTHEAIIDQETFDIVQKMRSHKRSNQRYKNRLGHENLFAGLVFCGTCGRKHYFCPFESKTGLNHDHYKCSGYRRPIDGCENPHYIQKSALIEIVSDKLRQTISEAQLDRENFLKKLEQQSQAQFSKDNKRQRQQLQKDEHRSKEIDRIIQQLYEDNLLGKISDERFVKLSQTYEEEQKQLQISISDLTEKLAKQQEDSLNISKFMTRISKYTQVSELTVEMINELIDKIVIHKPTGTKRNRILQIDIYYNFIGKLNIEKASQAD

SEQ ID NO: 43207 - DNA, 50 bp, Streptococcus suis; identical to SEQ ID NO: 15617
  source 1..50: mol_type = genomic DNA

SEQ ID NO: 43208 - DNA, 40 bp, Streptococcus suis; identical to SEQ ID NO: 29038
  source 1..40: mol_type = genomic DNA

SEQ ID NO: 43209 - DNA, 50 bp, Streptococcus suis
  source 1..50: mol_type = genomic DNA
aaactgctaggtgtcagctcggctcttaagggcatgacactcagcagtct

SEQ ID NO: 43210 - DNA, 40 bp, Streptococcus suis
  source 1..40: mol_type = genomic DNA
cgttaacaaaacgcaggcactccacaggctatttttcata

SEQ ID NO: 43211 - protein, 565 aa, Streptococcus suis
MNRTLTISDYRQVDTSRLSDITVVYCRLSQDDGLDGDSNSIINQKNILFEVVAREKLPNPVLFVDDGFSGTNFDRPAISEALRLVENGQVSNFIVKDLSRLGRSYIKVGQLTEITFPSFDVRFIALNDGIDSNKPNETNSIFLPIKSLMDEMYAADTSKKIRAVFQAKAKSGVPVTTNPPYGYLKDPSNPKSWIIDPVASEVVKRIFQEAKSGKSLSEIAKGLESDKVFKPDRHRIEIGLKSISSSPNVEALPYFWTRETLSAILGREEYLGHTVNLRTRTKSYKDKRSIDLPREDWLIFKNTHEAIIDQETFDIVQKMRSHKRSNQRYKNRLGHENLFAGLVFCGTCGRKHYFCPFESKTGLNHDHYKCSGYRRPIDGCENPHYIQKSALIEIVSDKLRQTISEAQLDRENFLKKLEQQSQAQFSKDNKRQRQQLQKDEYRSKEIDRIIQQLYEDNLLGKISDERFVKLSQTYEVEQKQLQTSISDLTEKLAKQQEDSLNISKFMTRISKYTQVSELTVEMVNELIDKIVIHKPTGTKRNRIIQIDIYYNFIGKLNIKKASQAD

SEQ ID NO: 43212 - DNA, 50 bp, Streptococcus suis
  source 1..50: mol_type = genomic DNA
aaactgctaggtgtcagctcggctaatggaagtatgacattcagcagttt

SEQ ID NO: 43213 - DNA, 40 bp, Streptococcus suis; identical to SEQ ID NO: 29038
  source 1..40: mol_type = genomic DNA

SEQ ID NO: 43214 - DNA, 50 bp, Streptococcus suis
  source 1..50: mol_type = genomic DNA
aaactgctaggtgtcagctcggctcttggaagtatgacattcagcagttt

SEQ ID NO: 43215 - DNA, 40 bp, Streptococcus suis; identical to SEQ ID NO: 43210
  source 1..40: mol_type = genomic DNA

SEQ ID NO: 43216 - protein, 564 aa, Streptococcus suis
MNRTLTISDYRQVDTSRLSDITVVYCRLSQDDGLDGDSNSIINQKNILFEVVAREKLPNPVLFVDDGFSGTNFDRPAISEALRLVENGQVSNFIVKDLSRLGRSYIKVGQLTEITFPSFDVRFIALNDGIDSNKPNETNSIFLPIKSLMDEMYAADTSKKIRAVFQAKAKSGVHVTTNPPYGYLKDPNNPKNWIIDPVAGEVVKRIFQEAKSGKSANEIGRMLEVDRVEKPDAYRVKNGRKPLSGMKDSGYSPYYWSRETINRLLRREEYLGHTVNLRTRTKSYKDKRSIDLPREDWLIFKNTHEAIIDQETFDIVQKMRSHKRSNQRYKNRSGHENLFAGLVFCGTCGRKHYFCPQEKNGLNHDHYKCSGYRRPIDGCENPHYIQKSALIEIVSDKLRQTISEAQLDRENFLKKLEQQSQAQFSKDNKRQRQQLQKDEHRSKEIDRIIQQLYEDNLLGKISDERFVKLSQTYEEEQKQLQASISDLTEKLAKQQEDSLNISKFMTRISKYTQVSELTVEIINELIDKIVIHKPTGTKRNRIIQIDIYYNFIGKLNNEKASRAD

SEQ ID NO: 43217 - DNA, 50 bp, Streptococcus suis
  source 1..50: mol_type = genomic DNA
aaactgctaggtgtcagctcggctaatgagagtatgacactcagcagtct

SEQ ID NO: 43218 - DNA, 40 bp, Streptococcus suis; identical to SEQ ID NO: 29038
  source 1..40: mol_type = genomic DNA

SEQ ID NO: 43219 - DNA, 50 bp, Streptococcus suis
  source 1..50: mol_type = genomic DNA
aaactgctaggtgtcagctcggctcttgagagtatgacactcagcagtct

SEQ ID NO: 43220 - DNA, 40 bp, Streptococcus suis; identical to SEQ ID NO: 43210
  source 1..40: mol_type = genomic DNA

SEQ ID NO: 43221 - protein, 568 aa, Streptococcus suis
MNRTLTISDYRQVDTSRLSDITVVYCRLSQDDGLDGDSNSIINQKNILLDVVEREKLSNPILFVDDGFSGTNFDRPAISEALRLVENGQVSNFIVKDLSRLGRSYIKVGQLTEITFPSFDVRFIALNDGIDSNKPNETNSIFLPIKSLMDEMYAADTSKKIRAVFQAKAKSGVPVTTNPPYGYLKDPSNPKNWIIDPVASEVVKRIFQEAKSGKSANEISRMLEADQVEKPDAYRVKNGRKPLSGMKDSGYSPYYWSRETINRLLRREEYLGHTVNLRTRTKSYKDKRSIDLPREDWLIFKNAHEAIIDQETFDIVQKMRSHKRSNQRYKNRLGHENLFAGLVFCGTCGRKHYFCPFESKTGLNHDHYKCSGYRRPIDGCENPHYIQKSALIEIVSDKLRQTISEAQLDRENFLKKLEQQSQAQFSKDNKRQRQQLQNDEHRSKEIDRIIQQLYEDNLLGKISDERFVKLSQTYEEEQKQLQTSISDLTEKLAKQQEDSLNISKFMARISKYTQVSELTVEMVNELIDKIVIHKPTGTKRNRIIQIDIYYNFIGKLNNEKSEPNDLAR

SEQ ID NO: 43222 - DNA, 50 bp, Streptococcus suis
  source 1..50: mol_type = genomic DNA
aaactgctgggtgtaagctccattaaagagggtatgacactcagcagtct

SEQ ID NO: 43223 - DNA, 40 bp, Streptococcus suis; identical to SEQ ID NO: 29038
  source 1..40: mol_type = genomic DNA

SEQ ID NO: 43224 - DNA, 50 bp, Streptococcus suis
  source 1..50: mol_type = genomic DNA
aaactgctgggtgtaagctccattctagagggtatgacactcagcagtct

SEQ ID NO: 43225 - DNA, 40 bp, Streptococcus suis; identical to SEQ ID NO: 43210
  source 1..40: mol_type = genomic DNA

SEQ ID NO: 43226 - protein, 577 aa, Blautia producta
MLTKYILPTFLMKKSLKTNKFKSKNRPGATNTRTAYISEEIPYYFATNIVSSPEQPRKRNNCSLAVIFVPIFSYLVGRGDTMSETRMGAMYIRVSTHMQDELSPDAQKRLLLDYAKQNNILISEEYIFMEKGISGKKADKRPEFMRMISLAKQKPAPFDIILVWKYSRFARNQEESIVYKSLLRKQCKIEVYSVSEPVVEGPFGSLIERIIEWMDEYYSVRLSGEVTRGMTEKAMRGGYQARPPLGYRIEKNGEPPVIVPEEAKIVRLIFDKYVNESCGIFAIAKYLNARGYKTSRGKDFERRSIEYILQNPSYYGMIRWYRTCNETNEIRDKSEWIISQGHHEPIISQEVYEAAQKRFETEYKAKGSRPSSTYHHWLSGLVKCPHCGRTMIAKAVKDKRYGRHYCYFTCYGYTKGKCLKSASVSSKVLEPEVLSAIEDAMSSCDLQFEIKSKEEITHVDDILILNQQLERVSQKEARIKEAYRNGIDTLEEYKENKELLIKEKSDILKEIETLTSKADSSNEDIPNRMHERLQNAYSIVSSEEFTDQQKNEAIRSVVEKIIWHKEEKLAEVFYYYL

SEQ ID NO: 43227 - DNA, 50 bp, Blautia producta
  source 1..50: mol_type = genomic DNA
acttgtatgttgttactatcaggttgaccaaattgcaacaacatacaaat

SEQ ID NO: 43228 - DNA, 40 bp, Blautia producta
  source 1..40: mol_type = genomic DNA
gtgacttgtccgaactggatgacacaatggggctccaaat

SEQ ID NO: 43229 - DNA, 50 bp, Blautia producta
  source 1..50: mol_type = genomic DNA
acttgtatgttgttactatcaggtgtaccaaattgcaacaacatacaaat

SEQ ID NO: 43230 - DNA, 40 bp, Blautia producta
  source 1..40: mol_type = genomic DNA
gtgccttgagcgaaaggcagtacaccacgtggctctaaat

SEQ ID NO: 43231 - protein, 503 aa, Coprococcus comes
MNNRIDAIYARQSVDKKDSISIESQIEFCKYELKGGNCKEYTDKGYSDKNTDRPKFQELVRDIKRGLIAKVVVYKLNRISRSILDFANMMELFQQYNVEFVSSTEKFDTSTPMGRAMLNICIVFAQLERETIQKQVTDAYYSRSQRGFKMGGKAPYGFHTEPIKMDCINTKKLVVNPDEAANIRLMFEMYAQPTTSYGDITRYFAEQGILFHGKELIRPTLAQMLRNPVYVQADLDVYEFFKSQGTVIVNDAADFTGMNGCYLYQGRDVKPSKKNDLKDQMLVLAPHEGIVPSDIWLTCRKKLMNNMKIQSARKATHTWLAGKIKCGNCGYALMSIFNSSGKQYLRCTKRLDNKSCAGCGKIITSELEAVVYQQMVKKLASYKTLTGRKKAAKANPKIAALQVELAHVDSEIEKLVDSLTGANNVLLSYVNVKIAELDGRKQELLARIAELTVEAISPEQVSQISGYLDTWENVSFDDKRRVVDLMITTTAATSDSLNITWKI

SEQ ID NO: 43232 - DNA, 50 bp, Coprococcus comes
  source 1..50: mol_type = genomic DNA
gtgtagtcccttgtaaactgtactttaggtcagtttacaagggactacac

SEQ ID NO: 43233 - DNA, 40 bp, Coprococcus comes
  source 1..40: mol_type = genomic DNA
ccgtgataaatcctggggcttccttcatttaaaataccac

SEQ ID NO: 43234 - DNA, 50 bp, Coprococcus comes
  source 1..50: mol_type = genomic DNA
gtgtagtcccttgtaaactgtactgtaggtcagtttacaagggactacac

SEQ ID NO: 43235 - DNA, 40 bp, Coprococcus comes
  source 1..40: mol_type = genomic DNA
ctgtggtaagtgttgcgatgtccttcatttaataaaccac

SEQ ID NO: 43236 - protein, 503 aa, Coprococcus comes
MNNRIDAIYARQSVDKKDSISIESQIEFCKYELKGGNCKEYTDKGYSDKNTDRPKFQELVRDIKRGLIAKVVVYKLNRISRSILDFANMMELFQQYNVEFVSSTEKFDTSTPMGRAMLNICIVFAQLERETIQKQVTDAYYSRSQRGFKMGGKAPYGFHTEPIKMDCINTKKLVVNPDEAANIRLMFEMYAQPTTSYGDITRYFAEQGIVFHGKELIRPTLAQMLRNPVYVQADLDVYEFFKSQGTVIVNDAADFTGMNGCYLYQGRDVKPSKKNDLKDQMLVLAPHEGIVPSDIWLTCRKKLMNNMKIQSARKATHTWLAGKIKCGNCGYALMSIFNSSGKQYLRCTKRLDNKSCAGCGKIITSELEAVVYQQMVKKLASYKTLTGRKKAAKANPKIAALQVELAHVDSEIEKLVDSLTGANNVLLSYVNVKIAELDGRKQELLARIAELTVEAISPEQVSQISGYLDTWENVSFDDKRRVVDLMITTTAATSDSLNITWKI

SEQ ID NO: 43237 - DNA, 50 bp, Coprococcus comes; identical to SEQ ID NO: 12
  source 1..50: mol_type = genomic DNA

SEQ ID NO: 43238 - DNA, 40 bp, Coprococcus comes; identical to SEQ ID NO: 43233
  source 1..40: mol_type = genomic DNA

SEQ ID NO: 43239 - DNA, 50 bp, Coprococcus comes; identical to SEQ ID NO: 1784
  source 1..50: mol_type = genomic DNA

SEQ ID NO: 43240 - DNA, 40 bp, Coprococcus comes; identical to SEQ ID NO: 43235
  source 1..40: mol_type = genomic DNA

SEQ ID NO: 43241 - protein, 503 aa, Coprococcus comes
MNNRIDAIYARQSVDKKDSISIESQIEFCKYELKGGNCKEYTDKGYSDKNTDRPKFQELVRDIKRGLIAKVVVYKLNRISRSILDFANMMELFQQYNVEFVSSTEKFDTSTPMGRAMLNICIVFAQLERETTQKRVTDAYYSRSQRGFKMGGKAPYGFHTEPIKMDCINTKKLVVNPDEAANIRLMFEMYAQPTTSYGDITRYFAEQGILFHGKELIRPTLAQMLRNPVYVQADLDVYEFFKSQGTVIVNDAADFTGMNGCYLYQGRDVKPSKKNDLKDQMLVLAPHEGIVPSDIWLTCRKKLMNNMKIQSARKATHTWLAGKIKCGNCGYALMSIFNSSGKQYLRCTKRLDNKSCAGCGKIITSELEAVIYQQMVKKLASYKTLTGRKKAAKANPKIAALQVELAHVDSEIEKLVDSLTGANNVLLSYVNVKIAELDGRKQELLARIAELTVEAISPEQVSQISGYLDTWENVSFDDKRRVVDLMITTTAATSDSLNITWKI

SEQ ID NO: 43242 - DNA, 50 bp, Coprococcus comes; identical to SEQ ID NO: 12
  source 1..50: mol_type = genomic DNA

SEQ ID NO: 43243 - DNA, 40 bp, Coprococcus comes; identical to SEQ ID NO: 43233
  source 1..40: mol_type = genomic DNA

SEQ ID NO: 43244 - DNA, 50 bp, Coprococcus comes; identical to SEQ ID NO: 1784
  source 1..50: mol_type = genomic DNA

SEQ ID NO: 43245 - DNA, 40 bp, Coprococcus comes; identical to SEQ ID NO: 43235
  source 1..40: mol_type = genomic DNA

SEQ ID NO: 43246 - protein, 503 aa, Coprococcus comes
MNNRIDAIYARQSVDKKDSISIESQIEFCKYELKGGNCKEYTDKGYSDKNTDRPKFQELVRDIKRGLIAKVVVYKLNRISRSILDFANMMELFQQYNVEFVSSTEKFDTSTPMGRAMLNICIVFAQLERETIQKQVTDAYYSRSQRGFKMGGKAPYGFHTEPIKMDCINTKKLVVNPDEAANIRLMFEMYAQSTTSYGDITRYFAEQGILFHGKELIRPTLAQMLRNPVYVQADLDVYEFFKSQGTVIVNDAADFTGMNGCYLYQGRDVKPSKKNDLKDQMLVLAPHEGIVPSDIWLTCRKKLMNNMKIQSARKATHTWLAGKIKCGNCGYALMSIFNSSGKQYLRCTKRLDNKSCAGCGKIITSELEAVVYQQMVKKLASYKTLTGRKKAAKANPKIAALQVELAHVDSEIEKLVDSLTGANNVLLSYVNVKIAELDGRKQELLARIAELTVEAISPEQVSQISGYLDTWENVSFDDKRRVVNLMITTTAATSDSLNITWKI

SEQ ID NO: 43247 - DNA, 50 bp, Coprococcus comes; identical to SEQ ID NO: 12
  source 1..50: mol_type = genomic DNA

SEQ ID NO: 43248 - DNA, 40 bp, Coprococcus comes; identical to SEQ ID NO: 43233
  source 1..40: mol_type = genomic DNA

SEQ ID NO: 43249 - DNA, 50 bp, Coprococcus comes; identical to SEQ ID NO: 1784
  source 1..50: mol_type = genomic DNA

SEQ ID NO: 43250 - DNA, 40 bp, Coprococcus comes; identical to SEQ ID NO: 43235
  source 1..40: mol_type = genomic DNA

SEQ ID NO: 43251 - protein, 583 aa, Streptococcus suis; identical to SEQ ID NO: 15131

SEQ ID NO: 43252 - DNA, 50 bp, Streptococcus suis; identical to SEQ ID NO: 15117
  source 1..50: mol_type = genomic DNA

SEQ ID NO: 43253 - DNA, 40 bp, Streptococcus suis
  source 1..40: mol_type = genomic DNA
gttttccaacaaccaatccagttcggcattggtatatggt

SEQ ID NO: 43254 - DNA, 50 bp, Streptococcus suis
  source 1..50: mol_type = genomic DNA
gtattctcaaggaacagactacacgagtggagtgcgtagtgttgctacaa

SEQ ID NO: 43255 - DNA, 40 bp, Streptococcus suis
  source 1..40: mol_type = genomic DNA
gttttcccataaagaatccgaatcgccactgctctctggt

SEQ ID NO: 43256 - protein, 523 aa, Pseudomonas coronafaciens
MSSPSMRKRPEDCSDGLIAAAEYVRMSTDHQRYSTENQSASIHAYALSHGMDIVKTYRDEGKSGLDIGGRDALRRLLDDVQAGNTQFQVILVYDVSRWGRFQNTDESAHYEYLCTSSGIQVVYCAEPFENDGSPMATIYKGIKRSMAGEYSRELSQKVFAGQCRLVEKGFHQGGPAGYGLRRALIDEKNEFKAELSRGQQKSIQTDRVILIPGPEAEIEIVQHIYHRFIHNGMNEREIANALNADGVLTDFDRPWSRSSVHEVLTNEKYIGNNVYNKTSSKLRKRSSRNPPDKWIRCDGAFQGIVSLEVFTCAREIILQRSHRLDDTQMLELLRALLQQAGSLSGMLIDEQDNMPSSTVYISRFGGLLRAYTLIGYAPDRDYRYLDINRSLRQLHPQVFEDVIKHLENAGASVEISAQNDVLTVNGEWTASVIIARCHSTPAGTLRWKLRFDISLAPDITIAVRMERANLQVRDYYLVPLIDMGAWPQKMAEENSPLIDSYCFATLDVLDGLAARCSLKEACR

SEQ ID NO: 43257 - DNA, 50 bp, Pseudomonas coronafaciens
  source 1..50: mol_type = genomic DNA
atgacaattaacttgcccgtcgacacgctatgtcgacgggcaacataaat

SEQ ID NO: 43258 - DNA, 40 bp, Pseudomonas coronafaciens
  source 1..40: mol_type = genomic DNA
catttctgagagtcaacaatcgctatcagaagtccaggtt

SEQ ID NO: 43259 - DNA, 50 bp, Pseudomonas coronafaciens
  source 1..50: mol_type = genomic DNA
atgacaattaacttgcccgtcgaccagctatgtcgacgggcaacataaat

SEQ ID NO: 43260 - DNA, 40 bp, Pseudomonas coronafaciens
  source 1..40: mol_type = genomic DNA
catttcttacagaaaataacagatttcagaagttccagtt

SEQ ID NO: 43261 - protein, 503 aa, Acutalibacter muris
MNNRIDAIYARQSVDKKDSISIESQIEFCKYELKGGSCREYTDKGYSGKNTDRPKFQELVRDIKKGLIAKVIVYKLDRISRSILDFATMMELFQQYNVEFVSSTEKFDTSTPMGRAMLNICIVFAQLERETIQKRVTDAYYSRSQRGFKMGGKAPYGFHTEPIKMDGINTKRLVVKPEEAANIRLMFEMYAEPTTSYGDITRHFAEQGILFNGRELIRPTLAQMLRNPVYVQADLDVYEFFKSQGTVLVNDAADFTGMNGCYLYQGRDVKPGKAQSLKDQMLVLAPHEGIVPSDIWLTCRKKLMNNMKIQSARKATHTWLAGKIKCGNCGYALMSIFNPSGRQYLRCTKRLDNKSCPGCGKIITAELEAVVYRQMVKKLDSYKTLTGRKKAAKANPKITALQVELAHVDSEIEKLLDSLTGANNVLLSYVNVKIAELDGRKQELLAKMAELTVEAISPEQVSQISGYLDTWKNVSFDDKRRVVDLMITTIAATSDSLNITWKI

SEQ ID NO: 43262 - DNA, 50 bp, Acutalibacter muris
  source 1..50: mol_type = genomic DNA
gtgtagtcccttgtaaactgtactttaggtcagtttacaaggaactacgt

SEQ ID NO: 43263 - DNA, 40 bp, Acutalibacter muris
  source 1..40: mol_type = genomic DNA
ttgtagtttacaatttggattccgtcgatgttgaagccgt

SEQ ID NO: 43264 - DNA, 50 bp, Acutalibacter muris
  source 1..50: mol_type = genomic DNA
gtgtagtcccttgtaaactgtactgtaggtcagtttacaaggaactacgt

SEQ ID NO: 43265 - DNA, 40 bp, Acutalibacter muris
  source 1..40: mol_type = genomic DNA
ttgtattttaaaattttgagtctgtagattgtgtaaacgt

SEQ ID NO: 43266 - protein, 510 aa, Sellimonas intestinalis
MKKYMIALYIRLSLEDAKTDSMSISSQRSILREYASELPEYANAELMEFVDNGYSGANFERPAVQELLDLVRANRIDCIVVKDFSRFGRNSLETGYFIERVFPLFHTRFISVNDDFDTQKLRGDTGGMEVAFKYLISEYYSRDMSVKTKTAKYLKFQRGEYQSKICPYGYRKGENGRMVPDPETSEVVQKIFEYAVNGMNATDIARELSRQQIPTPGEHKARKGIKTHDVSRTHGMWCNSTVLRILADERYMGTYVIGKREVTEIGGHKMRSKAESDWIKIPDHHIPLVNEEIFSKANASIQRFKIPNRKKHDYLLRGKVICGCCKHALHLANGTSYRCRFSSTIPSLDCYNIHIREKELNQLVYELLRKQFQVAFGIDSLADLRKVDTVAIRQADFDRQIFELQEEKRKLYEALVSGRIPLPEYKDQKEQISEKLLEVQNTKAVVMARLEAEQEERQHQRQQMDISRMLTESDGLTSELVDLLIDKIYVYPDKRVDIAFKIRDSFTTHD

SEQ ID NO: 43267 - DNA, 50 bp, Sellimonas intestinalis
  source 1..50: mol_type = genomic DNA
tttgtcgtggacttgacataagggtgcccttacggtataataaagacaaa

SEQ ID NO: 43268 - DNA, 40 bp, Sellimonas intestinalis
  source 1..40: mol_type = genomic DNA
tagcaaagacgcatgagagtgcctcaaatcatgtaggcga

SEQ ID NO: 43269 - DNA, 50 bp, Sellimonas intestinalis
  source 1..50: mol_type = genomic DNA
tttgtcgtggacttgacataagggagcccttacggtataataaagacaaa

SEQ ID NO: 43270 - DNA, 40 bp, Sellimonas intestinalis
  source 1..40: mol_type = genomic DNA
aagcagagaagcaagaaagagcctgaaatcttggaggtgg

SEQ ID NO: 43271 - protein, 542 aa, Anaerobutyricum hallii
MKLQKVLNLFNVAIYIRLSREDGDKEESDSVGNQRKLLTEYVAKKEDFILYDIYVDDGYSGTNFNRPSFQRMIADIEDGKVNCVVVKDLSRFGRDYIDTGRYLERYFPELGVRFISVTDSIDSMKQAYDMLLPIKNIFNEQYARDISKKIQATVKSKQKAGEFIGAFTSYGYKKSPVNKNKLVIDDYAADVVRRIFSLYIQGYGKQRIAKLLNAEGILCPAEYKKVNGENYKNCNRLESTTYWSYSTINSILHREMYVGNMVQGTKHQRMRSKQKKMPKEDWIIVENTHEPIIDKETWEKAQSLLKKRTRELDLETNKNIFAGFVKCGDCGRAMTKNMWRRADGSKTYSLYCGTYKRNGKQYCTPHTLPMAVLEDIVLGDLKAIVDSVDNLKELVQSQSFTASKVKRIADTELGKIKAELERVKRLKKSIYEDYREELISKEEFLSYREDYLKKEELYSKQIEALEEKKKDNVTEDVFETPWLKRLLELKDIESLDRDIVVEMISEIRVYENRKIKITYNFGNELEHLFSSVYSVESEEKVI

SEQ ID NO: 43272 - DNA, 50 bp, Anaerobutyricum hallii; identical to SEQ ID NO: 35947
  source 1..50: mol_type = genomic DNA

SEQ ID NO: 43273 - DNA, 40 bp, Anaerobutyricum hallii
  source 1..40: mol_type = genomic DNA
gattattctggatgccggtcatggcggggaagatccggga

SEQ ID NO: 43274 - DNA, 50 bp, Anaerobutyricum hallii
  source 1..50: mol_type = genomic DNA
catttgcgcaattaacaccctgcagctgggggaacacagttgcgcaagta

SEQ ID NO: 43275 - DNA, 40 bp, Anaerobutyricum hallii
  source 1..40: mol_type = genomic DNA
catcatgctggatgccgaagctggcagggaagaaccaagc

SEQ ID NO: 43276 - protein, 553 aa, Anaerotruncus rubiinfantis
MREVEILKKKQLKCYIYTRVSTSMQVDGYSLDAQRDKLRKYAAYEDMVIAGEYSDEGFSGKNIQGRQDFQRMLNDIQDCKDGVSYVLVFKLSRFGRNAADVLNSLQLMQDFGVNLICVEDGIDSSKDAGKLMISVLSAVAEIERENIRTQTMAGREQKAREGKWNGGFAPYGYKLENGDLVIAEDEVEVIRVIYDRYIHTNEGVAGVAKYLNRNGFIKKLRQNNTIPGFSRNFVQDVLDNPVYMGKIAYGRRRTEKKQGTRNEMHVVEQSEFPIYEGQHEAIISEEDWYLAQEKRKINSFKREKVNNPDHAHILSGILKCPCCGKSMYGNIARAHSKDKKTRYYYYCKNTVTPTGHECSFRLNIEQTEINKFVAKIISAMVNNPRFVEAIQAKIGSAVDTEDMEKQIAVLQGQLKQAFGTKSRLERQMDTLDINDAHYDRKILDLQRRYDEQYDTIEDIEVQIGELQGQIRSIQQEKISGNNIYRLLLAFDEVYHSATEAEQKEFMKAFIERIEMFPEKRKDGSWIRKIVFNFPVPVDGEEVKELPLETETTV

SEQ ID NO: 43277 - DNA, 50 bp, Anaerotruncus rubiinfantis
  source 1..50: mol_type = genomic DNA
cccttggaaactgaaacaactgtcgagacggttgttttgctttccaaggg

SEQ ID NO: 43278 - DNA, 40 bp, Anaerotruncus rubiinfantis
  source 1..40: mol_type = genomic DNA
cccgcacaccgcgcatgtggaaagcgtgtcgcttctctgc

SEQ ID NO: 43279 - DNA, 50 bp, Anaerotruncus rubiinfantis
  source 1..50: mol_type = genomic DNA
cccttggaaactgaaacaactgtcacgacggttgttttgctttccaaggg

SEQ ID NO: 43280 - DNA, 40 bp, Anaerotruncus rubiinfantis
  source 1..40: mol_type = genomic DNA
ccccctcacagggtatgtgacaagggtgtggcttgtcagt

SEQ ID NO: 43281 - protein, 595 aa, Cronobacter sakazakii
MYAKKRYWKIVMKSYLYSRISTLQQTKGFGIDRQVQTVTDFLKYATIDSRLGYQLDVEDFEVLESDLGKSAYKGNNWKPNSSLGRFYKDVVSGRITSGVLICENVDRLVRMSNYEASNKLSTLITNGIDIIEVESGMCFSNKIPESATILNMSISRAYSESKRKSDMATKSWANRTNKLKDSGRAVSKVCPRWLTVKDGQYVLDEKQAETLLYIHQMYLEGHGNSALVRRLNAAKRLDNGKPWTTITLHRVLRDERLTGRMVMGKTRKPIPVLDDQGNKIIENGKVKTYVPVEIIDDAYPVVVPRELFNQVQAMISEKEGSKVKKTTKYMRNIFNGVSRCSSCGEALVADKNGHGKLFYVCLGKRHKKACNSVGIPYEAFERTMLENLSQMDWQRIYTGNTDMEAMNQCRVRLVAVEREIAELEGELESSDEDMVLALVRAIKKKKAVRDEVQGELNSYVKAGTDNVTFNPDLKRVLNQEEVELRQDVNVELRKIIKYMKVGRMDRTITVQLQYYTDVVSHLIFIDSKTGELLSRSHLTNDLIYESDSVTIDLTGGTWDIKGDKFTEWDQFALEVWKEIIEQAVDQAQEILKNRI

SEQ ID NO: 43282 - DNA, 50 bp, Cronobacter sakazakii; identical to SEQ ID NO: 13127
  source 1..50: mol_type = genomic DNA

SEQ ID NO: 43283 - DNA, 40 bp, Cronobacter sakazakii
  source 1..40: mol_type = genomic DNA
cgggcccatcaacagcagcgaacagtcggtggtgccgccg

SEQ ID NO: 43284 - DNA, 50 bp, Cronobacter sakazakii; identical to SEQ ID NO: 13129
  source 1..50: mol_type = genomic DNA

SEQ ID NO: 43285 - DNA, 40 bp, Cronobacter sakazakii; identical to SEQ ID NO: 13130
  source 1..40: mol_type = genomic DNA

SEQ ID NO: 43286 - protein, 543 aa, Klebsiella pneumoniae
MYATVREGEKIMKVPVWSYARVSTLSQIDGFGIQRQINTINQFIQYMVLDHRLPFTLDVDNITQMVVEGKSAFRGKNWNPKTKLGQYRKMVMNGVLPDSVLITESIDRLTRLDPYKAVEILSGLINRGTTIIEIETGMTYSRYIPESITVLTMTINRSNGESKRKSIMMKKSHENRFGNVSKVRPRWFDVVEIDGVKQYRINDTAKAIQKMYSDYASGIGAAQIVRTYGKSDNGKAWTLVTVLRALSDKRVADDPRYPAIVDLELYQKVQAMKLATGKKGNTHQRNMLNIFSGMSRCPVCKQSIIVKRNSHGGLYTVCLGKRTDKTCIAPSMAYNALERPLLNAIKGLDFSEVYNREESNVLTLRDQWIQNERDIAAFRERLNKASRHEKFAILDELETISKEQEDLSIRLKSIDAPKDAQLDFNDDKLDLNVDYRIELNNRMKKLIQSIEIVRVDNGKGKYTIYCSIKYWTELLSHLVLIDVNITRTGKGGTNELTTTLRSVSSFDIEKVEFGGNPDMEALEYWKSVLEKGVEIALKRLDLV

SEQ ID NO: 43287 - DNA, 50 bp, Klebsiella pneumoniae
  source 1..50: mol_type = genomic DNA
cggtgtacatactttaccaactaggagcagtcgtgttagtatgtacgcca

SEQ ID NO: 43288 - DNA, 40 bp, Klebsiella pneumoniae
  source 1..40: mol_type = genomic DNA
cgggcccattagcagcagggagcagtcggtggttccgccg

SEQ ID NO: 43289 - DNA, 50 bp, Klebsiella pneumoniae
  source 1..50: mol_type = genomic DNA
cggtgtacatactttaccaactaggtgcagtcgtgttagtatgtacgcca

SEQ ID NO: 43290 - DNA, 40 bp, Klebsiella pneumoniae; identical to SEQ ID NO: 13130
  source 1..40: mol_type = genomic DNA

SEQ ID NO: 43291 - protein, 478 aa, Cronobacter sakazakii
  REGION 462..475: note = misc_feature - Xaa can be any naturally occurring amino acid
MYAKKRNWKIVMKSYLYSRISTLQQTKGFGIDRQVQTVTDFLKYATIDSRLGYQLDVEDFEVLESDLGKSAYKGNNWKPNSSLGRFYKDVVSGRITSGVLICENVDRLVRMSNYEASNKLSTLITNGIDIIEVESGMCFSNKIPESATILNMSISRAYSESKRKSDMATMSWANRTNKLKDSGRAVSKVCPRWLTVKDGQYVLDEKQAETLLYIHQMYLEGHGNSALVRRLNAAKRLDNGKPWTTITLHRVLRDERLTGRMVMGKTRKPIPVLDDQGNKIIENGKVKTYVPVEIIDDAYPVVVPRELFNQVQAMISEKEGSKVKKTTKYMRNIFNGVSRCSSCGEALVADKNGHGKLFYVCLGKRHKKACNSVGIPYEAFERTMLENLSQMDWQRIYTGNTDMEAMNQCRVRLVAVEREIAELEGELESSDEDMVLALVRAIKKKKAVRDEVQGELNSYVKXXXXXXXXXXXXXXIQI

SEQ ID NO: 43292 - DNA, 50 bp, Cronobacter sakazakii; identical to SEQ ID NO: 13127
  source 1..50: mol_type = genomic DNA

SEQ ID NO: 43293 - DNA, 40 bp, Cronobacter sakazakii
  source 1..40: mol_type = genomic DNA
cgggcccatcagcagcagcgaacagtcggtagtgccgccg

SEQ ID NO: 43294 - DNA, 50 bp, Cronobacter sakazakii; identical to SEQ ID NO: 13129
  source 1..50: mol_type = genomic DNA

SEQ ID NO: 43295 - DNA, 40 bp, Cronobacter sakazakii; identical to SEQ ID NO: 13130
  source 1..40: mol_type = genomic DNA

SEQ ID NO: 43296 - protein, 595 aa, Cronobacter sakazakii; identical to SEQ ID NO: 43281

SEQ ID NO: 43297 - DNA, 50 bp, Cronobacter sakazakii; identical to SEQ ID NO: 13127
  source 1..50: mol_type = genomic DNA

SEQ ID NO: 43298 - DNA, 40 bp, Cronobacter sakazakii; identical to SEQ ID NO: 43293
  source 1..40: mol_type = genomic DNA

SEQ ID NO: 43299 - DNA, 50 bp, Cronobacter sakazakii; identical to SEQ ID NO: 13129
  source 1..50: mol_type = genomic DNA

SEQ ID NO: 43300 - DNA, 40 bp, Cronobacter sakazakii; identical to SEQ ID NO: 13130
  source 1..40: mol_type = genomic DNA

SEQ ID NO: 43301 - protein, 566 aa, Pseudomonas umsongensis
MKPKAYSYIRFSSPEQAKGDSQRRQREAAENYCKENGLELAKAKEYTFFDAGRSAYKGEHVGDSGELARFLEHVKNGDISSGSYLLVESLDRLSRDTVMVALNQFTDLLRKGIKIVTLTDKRVYSEDSPSIAMELIISITVMMRAHEESDTKGKRVSAAWQNKRNLAREQKVPLGKACPAWLALKEGAYEPNDDRVKVIRKIFDMTIQGYGLTAVSKRLNDDGIPVFGTVGEKRRNMSGAWGTSSVLKILNNRSLLGEYQPMHIIGGVRCNDGEVVKGFYPPIIDEEIFLQAKAARSQRQTSGATKQTKNFNCWQGLAKCRVCGDAMHLVNKGKPPKGYVYLQCFGTKKGICKNGIIRIEHAELVFKEVLAKVDSMSLVHGKSADIRKNLEVAEGRLAGVIRKLEHATEAQTEFPSKAGGKLLLDLEQEHEHLSMKRDELRQQLASTRVISKEDFFQKLDLVTYEGRAAANSLLKRLRVVILFKRYTPKNFRCWVLDKSDEEITDEIDQMLFGVLYKDGILTVQALDNDVYDRQIEQDEITAEDVNRDYEGGIDGQWFGSVFRKTK

SEQ ID NO: 43302 - DNA, 50 bp, Pseudomonas umsongensis
  source 1..50: mol_type = genomic DNA
attggtgcaatagggcacaacctgttattgttgtagcattatgcaccaac

SEQ ID NO: 43303 - DNA, 40 bp, Pseudomonas umsongensis
  source 1..40: mol_type = genomic DNA
cgcaggcgctcataacctgttgttcagcgggccgcctgga

SEQ ID NO: 43304 - DNA, 50 bp, Pseudomonas umsongensis
  source 1..50: mol_type = genomic DNA
attggtgcaatagggcacaacctggtattgttgtagcattatgcaccaac

SEQ ID NO: 43305 - DNA, 40 bp, Pseudomonas umsongensis
  source 1..40: mol_type = genomic DNA
cggaggagcgcattacctggttttcggatggccgctcgga

SEQ ID NO: 43306 - protein, 568 aa, Mycobacterium avium
MTLDPAAAATESSPPQAVLYLRVSSKKQMDTAVDIDRDGNSIATQREAGLRKAASLGATVIKEFIEPGVSASTIEGRRAFQDMLAFLREHRDVKLVIVYARSRAFRNYIDAAITKRLLDKLDVKLVSVREEFGDGIYADMMEAVTDIFNDVQNKLSGEDIRIKMQHKAVNGGTLGRARIGYLNTRVDIDGRQVNTVTLDPKRAPLVLKAWELYATGDYSIDRLAATMADLGLTSRPSARWPHEKPMSESQLHRMLRDPYYAGYVVYKGELYPGRHEAIVTQELFDRVQDVLDGRSARGQRDRVLQHYLKGTLFCGRCQSQGRTARLIYTEAKSHTGKRYGYFLCRGRQEGLCDLPHLSAARVEQAIVEHYATLQLPDDFANEVRIQLEEALGDEQGNVRELHASLNRQLKKLDEKESRLIDLAADGAMPTAKIRAKLNELRRDRTRIEAGLTNTGEELSVGASVLRDTLDLLANPQQLYRDGNNTIRRHLNQTFFLKFYIDDLEVVGDELTPLFAEVQHANNVFQVAAYREPHDPPRTVGRVGTKTDLPTLGGVFSSQGSSKTVMVEL

SEQ ID NO: 43307 - DNA, 50 bp, Mycobacterium avium
  source 1..50: mol_type = genomic DNA
ccagggttcgagtaagaccgtcatggtggagctgctgaaacgctactcga

SEQ ID NO: 43308 - DNA, 40 bp, Mycobacterium avium
  source 1..40: mol_type = genomic DNA
ctctgaccagcacttatgtggtggagctgccgggaatcga

SEQ ID NO: 43309 - DNA, 50 bp, Mycobacterium avium; identical to SEQ ID NO: 43307
  source 1..50: mol_type = genomic DNA

SEQ ID NO: 43310 - DNA, 40 bp, Mycobacterium avium
  source 1..40: mol_type = genomic DNA
ccctaaccagaacttatgtggtggggatacctggcattaa

SEQ ID NO: 43311 - protein, 610 aa, Streptococcus agalactiae
MFCKCGIIELHRKIQKGGGAVKKDVKVIKGDTTLKRTASGCVQRSIKRVAAYCRVSTDTEDQINSYNSQVEHYTEFIQKNKEWTLAGIYADEAITGTQVDRRIDFQRLINDCMNGDIDMIITKSISRFARNTLDTLKYVRKLKEFNVAVFFEEENINTLTMDGELLLTILSSVAQQEVENISANVKKGLRMKMERGEMVGFQGCLGYDYDPETKSISINEKEAEIVRYIFRRYIEGVGGMVISRELEEQGYLSPRGNKRWTETTVLGIIKNEKYKGDLMMGKTYTVDPISKRRLDNFGEQDKFYIENHHEPIISEEDFEKAQGIRLRRSKNRNTVANNGGKREKYSRKYAFSSMLECGFCGHNLSRRNWHSSSEYTKVIWQCVNATKNGKKYCPHSKGIEEEAIEKAFMESYRQVCHNNVEITNEFLKTVEEELKDNSLAKDLKKITNQLDKILKKEKDLVELRLNESISMDIYQDKYNEIAISKEKLLAEKRTLEVTLTDEKALKKRLEGFKKLLESNKYLEEFDRSVFESIVDKIIIGGTNDEGEIDPAMITIIYKTGKKDSQDGRLFKSRRKNAKEVNEETDNKLYPHSSDEVNNLYSYPIDNTCGV

SEQ ID NO: 43312 - DNA, 50 bp, Streptococcus agalactiae; identical to SEQ ID NO: 1792
  source 1..50: mol_type = genomic DNA

SEQ ID NO: 43313 - DNA, 40 bp, Streptococcus agalactiae
  source 1..40: mol_type = genomic DNA
ttattcccaatgacacatcatgtggagtgtgtagctctgc

SEQ ID NO: 43314 - DNA, 50 bp, Streptococcus agalactiae
  source 1..50: mol_type = genomic DNA
gtattcctatcctattgacaacactagtggagtgcatagcgttgatacaa

SEQ ID NO: 43315 - DNA, 40 bp, Streptococcus agalactiae
  source 1..40: mol_type = genomic DNA
tcttccccaatcacaaatgtagtgtattgtgtacctcttc

SEQ ID NO: 43316 - protein, 580 aa, Pseudomonas fluorescens
MPTGYAYIRYSTRRQGADDKDSVTRQKSSIRAIAARHGVEVPEENFFYENGVSAYTGENSKTGKLKDLIDQIENLSIAPGDFVFVESIDRLSRQRLLQAKDLVYGILKKGVILVTTMDGYIYKLHEDQADIMKQDIMLTVISSRAHEESLTKSNRRKSAWKKAKTEAEETGIVFNKNRLPYGVIFEEKTNTLVIDKKAQEEIEFILENLKREGVTSTIKKANAFAAINWTQARVKDIFDTKYVLGYFMSQTKIDGKMVLDKHIENYYPKIVSASLFLEAKEAMTNRKVKKHQGRVTQNNANIFRHSCFCERCGKSLVFMNNYNSKGSRYFYMTCQQNIENGNCKNRFRYDLAVKLFLDTMQEFDRLNKKSVSLEPIDVTQYANLDEATLKEIEEVNKSLSMISDGSSGAFKLAKKFVELSKSNKVEDTKTRQKLKKLRDRQSDLEISVENLNKSVGTIKSGIIPSSILNRLSKEEVELNEIKEEIEKLAISKNKSKVQELEFTNLDKTIDFLKTEEGRLNIINFLTSNNIRFSFEYISNTLNSTAYVNNERIGQLSTQNDNKSAPLGIYGFDNLGNVFTQ

SEQ ID NO: 43317 - DNA, 50 bp, Pseudomonas fluorescens
  source 1..50: mol_type = genomic DNA
tgtgttagtattggtttgttggtcttgacctagtggctgttactcacaca

SEQ ID NO: 43318 - DNA, 40 bp, Pseudomonas fluorescens
  source 1..40: mol_type = genomic DNA
tacgggcatgtgattggtcttgaagtaaattccgaccatg

SEQ ID NO: 43319 - DNA, 50 bp, Pseudomonas fluorescens
  source 1..50: mol_type = genomic DNA
tgtgttagtattggtttgttggtctagacctagtggctgttactcacaca

SEQ ID NO: 43320 - DNA, 40 bp, Pseudomonas fluorescens
  source 1..40: mol_type = genomic DNA
tattgacatgtgatgggtctagaattaaaattctaatatg

SEQ ID NO: 43321 - protein, 635 aa, Roseburia inulinivorans
MEQVNKFLGYRTKLLLFPSGTRVAIYNRVSTEKLAQLEAIEHQVIESRQIVEESGLELAFQYIETESGTSIKNREYYQQMLTDMANDKFDILMIKSQDRMMRDQAEWHLLKRAINKYHKILYFYMDDEIFNQKENGMKHDVQAMLDEYESEKKSSKAIHSHNRRQTTYEGQDCLNITRPIYGWDRNVELDSRGHKKIWFTVNEKEAENIREVCRLVEEGKGFYTIANIMYGNGVLSKPTYGTKPQLPHKISGTAWKKVIRSPLLHGDAVFNKEKTDFYTKDRQKVPQDQWIYRENVITPILSKEYHQRIIDILDSRSIYYDKDISMKGKHFWSGKIICSKCGKAYYRYPCKSCKTRVLENWKCSTGIMSGAEGCHNIIIEENELRKQLRDTVSEKYQDLYGTITDGLIEKIIKKIEQGLSGSSLERDREEVEKELNQQYQFKNNLFDKLLKNVISDADFQIYNKKLTETINSLEDKKAELEKQVDIYKNKEERLIEIRESMKKKAYGKDAISDLIIGCIEKILVYPSGKLEVMVNKKAMAGKFPIVQYLYSDEQYQFRLVYYRKNIVKQRREKNTLRILEEISKNGHRTIPEFAEIIGQKYTYTWSIIKDLRQSGKIEYVKKGFSHEDCYWQIKS

SEQ ID NO: 43322 - DNA, 50 bp, Roseburia inulinivorans
  source 1..50: mol_type = genomic DNA
agactacttaaaacgaacacttgcaaacatgtatttgaaaataggggtca

SEQ ID NO: 43323 - DNA, 40 bp, Roseburia inulinivorans
  source 1..40: mol_type = genomic DNA
agggatcatgaactcctgcaacccggtttttatggaactt

SEQ ID NO: 43324 - DNA, 50 bp, Roseburia inulinivorans
  source 1..50: mol_type = genomic DNA
agactacttaaaacgaacacttgccaacatgtatttgaaaataggggtca

SEQ ID NO: 43325 - DNA, 40 bp, Roseburia inulinivorans
  source 1..40: mol_type = genomic DNA
agccaccatgccctgctgacatctgggttttatggaactt

SEQ ID NO: 43326 - protein, 545 aa, Streptomyces platensis
MGKAMDPAKLCDLFLRRSTLQDDKTTLKAHESDLRQRAEREGLTVRKVWKEELSAFKAGVIREEFDAAISAVLAGEVRHLLVWKLDRLSRKGMGQVGQVLDQFEVKGARLLAHMDGLDSSIPQHRGLFAWLAEQARSESYNTSMRTRRTKAAKKITGEWPGGQPPFGLRVRKGKKATEEHPKEYGTARRIADALLGNQAAGVIAGTLNADGVRTRRGSKWRSSTITQLAHSPAWAGLMPVHERYTDAAGRERWRATDEPMIGANGEPVCVGKGVITVGERVRILAALRSRTSESLAAGRRGKPAAQSLLSGLLKCGRCGGNMTKGGPQYRCYRRVNMGKAACQGMSVLVKDADAVLSAAFISRVSHLPDDHEAFRSLAPRWLEYDKPEESARRAELALTVEEAQARLDSLDDAYYVQGRFKGVKGKNRYEQLRAAIEDQLEPMSAELAEIAASLDPEVLRDPDVLHKAWIAADLVRARMLLRVVLHSVTLLPPPGQGRRSSIWALYARCCFHWVGSKPEPLKVDNGRLHNTVWFDPQPAAWQSAA

SEQ ID NO: 43327 - DNA, 50 bp, Streptomyces platensis
  source 1..50: mol_type = genomic DNA
cttggaccagtggagctgtaccctcccaggagtaagccgactggtgttag

SEQ ID NO: 43328 - DNA, 40 bp, Streptomyces platensis
  source 1..40: mol_type = genomic DNA
tctgatccacccggaacttccgggcaacaagtggcgcaag

SEQ ID NO: 43329 - DNA, 50 bp, Streptomyces platensis
  source 1..50: mol_type = genomic DNA
cttggaccagtggagctgtaccctgtcaggagtaagccgactggtgttag

SEQ ID NO: 43330 - DNA, 40 bp, Streptomyces platensis
  source 1..40: mol_type = genomic DNA
tttgttcaagccgcagcctgtgggccacaagtggcccagg

SEQ ID NO: 43331 - protein, 527 aa, Alicyclobacillus suci
MSHIPQSISRAICYIRKSREDEEAERRGEDTLLKQRELMTRDVLSRYEFDYEIKEEVASGDSIRERPVFQAILPELGTKYQAIVCKDLSRLGRGSYTDMGVVYDIIRDKRIYIITKDAIYDPRNFSDLRMIRFSLFFNREEYEMTLWRLTEGKYDGAQRGKWVAGSVPYGFHYHARLQILVPYEPEARIVQWIFRWYGEEGLGYSAIATRLRQFGIRSPRGKEIWRPEVIHRMLANPAYCGTLVFRRTQRNKHDGKVVMRPRDEHIVVEHAFEAIIDTALWSLVQTRLQSTAHAPKVKADFTPSELAGLVTCGGCGRKMIRQSSVQRYRKRDGTISKYTKEFMYCPFCGYSVKYRDCEKQVLTALSHVAKIDPTRFAECLASSTQNRKAPVGLTTEDIQKQCEARTAALNARLERARDLLLDGTLTKQDYQEIKEKCQTELAEIAKWTTRITDDTLPCTPPTPPISKAQIRSLVDGYQQLCDTAAKNRFLRGLLLDVRLELVHKGRHRSDPTRFDLQVTLHPNVTRT

SEQ ID NO: 43332 - DNA, 50 bp, Alicyclobacillus suci
  source 1..50: mol_type = genomic DNA
tagactggtcatctcaccatcatttcaacgtcggtgagatgatgagtgcg

SEQ ID NO: 43333 - DNA, 40 bp, Alicyclobacillus suci
  source 1..40: mol_type = genomic DNA
ggtatgtgccacaatcatttcatcggcagagatcagtgcg

SEQ ID NO: 43334 - DNA, 50 bp, Alicyclobacillus suci
  source 1..50: mol_type = genomic DNA
tagactggtcatctcaccatcattataacgtcggtgagatgatgagtgcg

SEQ ID NO: 43335 - DNA, 40 bp, Alicyclobacillus suci
  source 1..40: mol_type = genomic DNA
gacatgttccagcatcatcattttgacagagatcagtggg

SEQ ID NO: 43336 - protein, 509 aa, Dehalogenimonas alkenigignens
MKVVLYARVSSEKQDTDLSLTAQLKALRAFAKAKGYEIYREFVDEAETGRTTSRPAFKEMISIARRQSKPFQMVLVWKYSRFARSREDSIIFKTLLRKNGVQVVSINEPSEDTPVGRLMEAIIESLDEFYSDNLGEEVTRGMRESASRGFYLSYRAPYGYSKVRVTDGGKVRTRLELNAAQVPIVKFIFESVVSSKGVVDVVRELNAKGVPSAKGKNWTKGTIYSMLTNEIYTGTVVWGRHSKRGVEPVRVPGACPAIIDMETFDVTQRMLASRAPKVVHPRVVSSRFLLSGLARCGYCGRALTGQEAKSGKFAYYVCGSLTKKGAGSCDCKYLSVPKFEKAVIDEIRKSILTQDNLMELAKAASEEWNESLAGFRQEIDSIDDGIKDTQLRLSNIYDAIESGKIELSDLALRIKELRMRQDKLIARKVEIEAQYSEHRYEALDPVEMATYVEDLRSLLEDGEICERKAFIKGFVKEIRVKGDEVTVEYTPPLPDGKRETVLAIEGHGG

SEQ ID NO: 43337 - DNA, 50 bp, Dehalogenimonas alkenigignens
  source 1..50: mol_type = genomic DNA
gttctggctattgaaggtcatggtgggcgctgccaatcaaaagacagaac

SEQ ID NO: 43338 - DNA, 40 bp, Dehalogenimonas alkenigignens
  source 1..40: mol_type = genomic DNA
gtctaccgaacattatggtgggccatcttggtctcgaacc

SEQ ID NO: 43339 - DNA, 50 bp, Dehalogenimonas alkenigignens
  source 1..50: mol_type = genomic DNA
gttctggctattgaaggtcatggttggcgctgccaatcaaaagacagaac

SEQ ID NO: 43340 - DNA, 40 bp, Dehalogenimonas alkenigignens
  source 1..40: mol_type = genomic DNA
ctctactgaaggttgaggttggccaaactggtctcgaact

SEQ ID NO: 43341 - protein, 551 aa, Streptococcus suis
MKPQYPKVYLYSRVSTMMQVDGYSLEAQVNRMRAYANFNNYVIINEYQDAGKSGKSIQGREAFNRMLEDIKSCKDSISYVLVFKLSRFARNAADVLSTLQIMQDYGVNLICVEDGIDSSKDAGKLMISVLSAVAEIERENIRVQTREGKLQKAKEGKWTGGFPPYGYYIENDILKIDKIEAEAIKVIFEKYVKTEMGSYGVAKYLEAHGIKKRPRKNGTAEYFSANLIRKILRNPVYCGKIAFGRRKLEKVKGTRNDFHVKEQKDYLLVNGLHEEIVSEEVWNQAQMKLQVNSKKFEYIRIPSKDRVHLLSGIIKCPICGAGMLGNKSRKKKANGENYKDYFYYGCKHRTVIRGHKCNFNKQIKESLIDNAVIELINKSLLNPTIIDLLTKKINSQIDIEKVQSEILGIKNNIRSLTSSKDNLLKELEKLQVSDKHYDKKYYDISKRIDKIYDTIEDAETKLASYLKKEEILKENRISSKNIVTILSNFDKIFEKMDQREKRNLVECLISEIHIYEQRKANGQWLKSIKFKLPVIKESFEQVLDKQEHVEV

SEQ ID NO: 43342 - DNA, 50 bp, Streptococcus suis
  source 1..50: mol_type = genomic DNA
gttttggacaaacaagaacatgtcgaagttgttggtttgttgtccaaact

SEQ ID NO: 43343 - DNA, 40 bp, Streptococcus suis
  source 1..40: mol_type = genomic DNA
tccaaatacgcatcacatagaagttgtgggattattagaa

SEQ ID NO: 43344 - DNA, 50 bp, Streptococcus suis
  source 1..50: mol_type = genomic DNA
gttttggacaaacaagaacatgtctaagttgttggtttgttgtccaaact

SEQ ID NO: 43345 - DNA, 40 bp, Streptococcus suis
  source 1..40: mol_type = genomic DNA
tccaaatagtcttcagttataagttgtcgtgttatttgag

SEQ ID NO: 43346 - protein, 477 aa, Oribacterium sp oral taxon 078
MLGVIYARYSEGPKQTDQSIEGQVADCMTYAERSGIEVVKVYADRHVSGKSTAGRDEFLQMIHDAQEHRFEAVIVWKIDRFGRSRQDIAINKMRLKKAGVRLYYAQEAVPEGPEGIILESVLEGLAEYYSADLRQKVNRGIRESAKKGRVNGGTLPIGYKLNGDRHPVPDPEVAPLVQQAFQMHIAGAKTAEIRELFIKAGVKGRRGSAVSNAAIYRMLRQERYTGTWEIQGIPLDVEPIIDLATFEEAARHFKTSRCNAAGRANVDYMLSCRCHCGYCGKLVQGESGTGKGGKVYNYYKCGGKKRGSKCKLKAIPKDQLEMAVLEATITDVLTDEMIGKLTDRIMKIQEDEHADDPTAAFISRLDGCRKRQRNIVEAIEAGGGAALVTRLSELEAEEKELQRRIRAAEIEQPMLSREVIAKWLDSFRDGDVDDPAFCARLLDTFVADMVLTNEEITIFYNITKRTGSRCSSTVRLV

SEQ ID NO: 43347 - DNA, 50 bp, Oribacterium sp oral taxon 078
  source 1..50: mol_type = genomic DNA
gtgttcgagtacggtgcgcctagtggagcaagcgaggcggtactcgaaca

SEQ ID NO: 43348 - DNA, 40 bp, Oribacterium sp oral taxon 078
  source 1..40: mol_type = genomic DNA
tccttgcttttttatgaatggacctgacgggagtcgaacc

SEQ ID NO: 43349 - DNA, 50 bp, Oribacterium sp oral taxon 078
  source 1..50: mol_type = genomic DNA
gtgttcgagtacggtgcgcctagtatagcaagcgaggcggtactcgaaca

SEQ ID NO: 43350 - DNA, 40 bp, Oribacterium sp oral taxon 078
  source 1..40: mol_type = genomic DNA
tccttccttttttatggatattcctcactgcattttcacc

SEQ ID NO: 43351 - protein, 452 aa, Listeria innocua; identical to SEQ ID NO: 24381

SEQ ID NO: 43352 - DNA, 50 bp, Listeria innocua
  source 1..50: mol_type = genomic DNA
tttagtatctcattatctctcgttggaagaagaagaaacgagataccaaa

SEQ ID NO: 43353 - DNA, 40 bp, Listeria innocua; identical to SEQ ID NO: 7873
  source 1..40: mol_type = genomic DNA

SEQ ID NO: 43354 - DNA, 50 bp, Listeria innocua
  source 1..50: mol_type = genomic DNA
tttagtatctcattatctctcgttttaagaagaagaaacgagataccaaa

SEQ ID NO: 43355 - DNA, 40 bp, Listeria innocua
  source 1..40: mol_type = genomic DNA
attggaatctagttaagatttaccaaaagaaagaaaaaag

SEQ ID NO: 43356 - protein, 452 aa, Listeria innocua; identical to SEQ ID NO: 24381

SEQ ID NO: 43357 - DNA, 50 bp, Listeria innocua
  source 1..50: mol_type = genomic DNA
tttagtatctcattatctctcgttggaagaagaagaaacgagaaactaaa

SEQ ID NO: 43358 - DNA, 40 bp, Listeria innocua; identical to SEQ ID NO: 23248
  source 1..40: mol_type = genomic DNA

SEQ ID NO: 43359 - DNA, 50 bp, Listeria innocua
  source 1..50: mol_type = genomic DNA
tttagtatctcattatctctcgttttaagaagaagaaacgagaaactaaa

SEQ ID NO: 43360 - DNA, 40 bp, Listeria innocua; identical to SEQ ID NO: 43355
  source 1..40: mol_type = genomic DNA

SEQ ID NO: 43361 - protein, 452 aa, Listeria innocua
MKAAIYIRVSTQEQIENYSIQAQTEKLTALCRSKDWDVYDIFIDGGYSGSNMNRPALNEMLSKLHEIDAVVVYRLDRLSRSQRDTITLIEEYFLKNNVEFVSLSETLDTSSPFGRAMIGILSVFAQLERETIRDRMVMGKIKRIEAGLPLTTAKGRTFGYDVIDTKLYINEEEAKQLRLIYDIFEEEQSITFLQKRLKKLGFKVRTYNRYNNWLTNDLYCGYVSYKDKVHVKGIHEPIISEEQFYRVQEIFSRMGKNPNMNKESASLLNNLVVCSKCGLGFVHRRKDTVSRGKKYHYRYYSCKTYKHTHELEKCGNKIWRADKLEELIIDRVNNYSFASRNIDKEDELDSLNEKLKIEHAKKKRLFDLYINGSYEVSELDSMMNDIDAQINYYEARIEANEELKKNKKIQENLADLATVDFNSLEFREKQLYLKSLINKIYIDGEQVTIEWL

SEQ ID NO: 43362 - DNA, 50 bp, Listeria innocua; identical to SEQ ID NO: 43357
  source 1..50: mol_type = genomic DNA

SEQ ID NO: 43363 - DNA, 40 bp, Listeria innocua; identical to SEQ ID NO: 7873
  source 1..40: mol_type = genomic DNA

SEQ ID NO: 43364 - DNA, 50 bp, Listeria innocua; identical to SEQ ID NO: 43359
  source 1..50: mol_type = genomic DNA

SEQ ID NO: 43365 - DNA, 40 bp, Listeria innocua; identical to SEQ ID NO: 43355
  source 1..40: mol_type = genomic DNA

SEQ ID NO: 43366 - protein, 452 aa, Listeria innocua; identical to SEQ ID NO: 39251

SEQ ID NO: 43367 - DNA, 50 bp, Listeria innocua; identical to SEQ ID NO: 39117
  source 1..50: mol_type = genomic DNA

SEQ ID NO: 43368 - DNA, 40 bp, Listeria innocua; identical to SEQ ID NO: 7873
  source 1..40: mol_type = genomic DNA

SEQ ID NO: 43369 - DNA, 50 bp, Listeria innocua
  source 1..50: mol_type = genomic DNA
tttagtacctcgttatctctcgctttaagaagaagaaacgagaaactaaa

SEQ ID NO: 43370 - DNA, 40 bp, Listeria innocua; identical to SEQ ID NO: 43355
  source 1..40: mol_type = genomic DNA

SEQ ID NO: 43371 - protein, 452 aa, Listeria innocua
MKAAIYIRVSTQEQIENYSIQAQTEKLTALCRSKDWDVYDIFIDGGYSGSNMNRPALNEMLSKLHEIDAVVVYRLDRLSRSQRDTITLIEEYFLKNNVEFVSLSETLDTSSPFGRAMIGILSVFAQLERETIRDRMVMGKIKRIEAGLPLTTAKGRTFGYDVIDTKLYINEEEAKQLRLIYDIFEEEQSITFLQKRLKKLGFKVRTYNRYNNWLTNDLYCGYVSYKDKVHVKGIHEPIISEEQFYRVQEIFSHMGKNPNMNKESASLLNNLVVCSKCGLGFVHRRKDTVSRGKKYHYRYYSCKTYKHTHELEKCGNKIWRADKLEELIIDRVNNYSFASRNIDKEDELDSLNEKLKIEHTKKKRLFDLYISGSYEVSELDAMMNDIDAQINYYEAQIEANEELKKNKKIQENLADLATVDFNSLEFREKQLYLKSLINKIYIDDEQVTIEWL

SEQ ID NO: 43372 - DNA, 50 bp, Listeria innocua; identical to SEQ ID NO: 39117
  source 1..50: mol_type = genomic DNA

SEQ ID NO: 43373 - DNA, 40 bp, Listeria innocua; identical to SEQ ID NO: 23248
  source 1..40: mol_type = genomic DNA

SEQ ID NO: 43374 - DNA, 50 bp, Listeria innocua; identical to SEQ ID NO: 43369
  source 1..50: mol_type = genomic DNA

SEQ ID NO: 43375 - DNA, 40 bp, Listeria innocua; identical to SEQ ID NO: 43355
  source 1..40: mol_type = genomic DNA

SEQ ID NO: 43376 - protein, 452 aa, Listeria innocua; identical to SEQ ID NO: 39291

SEQ ID NO: 43377 - DNA, 50 bp, Listeria innocua; identical to SEQ ID NO: 39117
  source 1..50: mol_type = genomic DNA

SEQ ID NO: 43378 - DNA, 40 bp, Listeria innocua; identical to SEQ ID NO: 7873
  source 1..40: mol_type = genomic DNA

SEQ ID NO: 43379 - DNA, 50 bp, Listeria innocua; identical to SEQ ID NO: 43369
  source 1..50: mol_type = genomic DNA

SEQ ID NO: 43380 - DNA, 40 bp, Listeria innocua; identical to SEQ ID NO: 43355
  source 1..40: mol_type = genomic DNA

SEQ ID NO: 43381 - protein, 452 aa, Listeria innocua; identical to SEQ ID NO: 22436

SEQ ID NO: 43382 - DNA, 50 bp, Listeria innocua; identical to SEQ ID NO: 39117
  source 1..50: mol_type = genomic DNA

SEQ ID NO: 43383 - DNA, 40 bp, Listeria innocua; identical to SEQ ID NO: 7873
  source 1..40: mol_type = genomic DNA

SEQ ID NO: 43384 - DNA, 50 bp, Listeria innocua; identical to SEQ ID NO: 43369
  source 1..50: mol_type = genomic DNA

SEQ ID NO: 43385 - DNA, 40 bp, Listeria innocua; identical to SEQ ID NO: 43355
  source 1..40: mol_type = genomic DNA

SEQ ID NO: 43386 - protein, 452 aa, Listeria innocua; identical to SEQ ID NO: 20166

SEQ ID NO: 43387 - DNA, 50 bp, Listeria innocua; identical to SEQ ID NO: 39127
  source 1..50: mol_type = genomic DNA

SEQ ID NO: 43388 - DNA, 40 bp, Listeria innocua; identical to SEQ ID NO: 7873
  source 1..40: mol_type = genomic DNA

SEQ ID NO: 43389 - DNA, 50 bp, Listeria innocua
  source 1..50: mol_type = genomic DNA
tttagtatctcgttatctctcgttttagggagaagaaacgggataccaaa

SEQ ID NO: 43390 - DNA, 40 bp, Listeria innocua; identical to SEQ ID NO: 43355
  source 1..40: mol_type = genomic DNA

SEQ ID NO: 43391 - protein, 537 aa, Enterococcus faecium
MKQQIYNTALYLRLSRDDELQGESSSITTQRSMLRLYAKEHHLNVIDEYIDDGWSGTNFERPSFQRMIEDIEVGKINCVVTKDLSRLGRNYIMTGQYTELYFPSHNVRYIAIDDGVDSEKGESEIAPFKNIINEWVARDTSRKVKSAFKTKFAEGAYYGAYAPLGYKKHPDIKGKLLVDEETKWIVEKIFSLAYQGYGSAKITKILREEKVPTSSWLNFTRYGTFAHIFEGKPESKRYEWTIAQIKGILKSEVYIGNSVHNRQSTVSFKSKKKVRKPESEWFRVENTHEPIIEKEVFYRVQEQIKSRRRQTKEKATPIFAGLVKCADCGWSMRFATNKANKTPYSYYACSFYGQFGKGYCSMHYIRYDVLYQAVLERLQYWAKAVQQDEEKVLHKIQKVGNAERIREKKKKASALKKAENRQNEIDCLFAKMYEDRACEKITERNFIMLSGKYQKEQIELEQQITDLREELSKMEQDMIGAEKWIELIKEYSVPKELTAPLLNAMIEKILIHEATTNEENERIQEIEIYYRFIGKVD

SEQ ID NO: 43392 - DNA, 50 bp, Enterococcus faecium
  source 1..50: mol_type = genomic DNA
tcatatctttaactaagggagacggaagtttcccaaacaaaaggatatta

SEQ ID NO: 43393 - DNA, 40 bp, Enterococcus faecium
  source 1..40: mol_type = genomic DNA
ttctcctggttgggaaaacgaagttggttaccctgtagaa

SEQ ID NO: 43394 - DNA, 50 bp, Enterococcus faecium
  source 1..50: mol_type = genomic DNA
tcatatctttaactaagggagacgggagtttcccaaacaaaaggatatta

SEQ ID NO: 43395 - DNA, 40 bp, Enterococcus faecium
  source 1..40: mol_type = genomic DNA
ttctctggattggcataagggagtctgtgtccctgtagaa

SEQ ID NO: 43396 - protein, 537 aa, Enterococcus faecium
MKQQIYNTALYLRLSRDDELQGESSSITTQRSMLRLYAKEHHLNVIDEYIDDGWSGTNFERPSFQRMIVDIEVGKINCVVTKDLSRLGRNYIMTGQYTELYFPSHNVRYIAIDDGVDSEKGESEIAPFKNIINEWVARDTSRKVKSAFKTKFAEGAYYGAYAPLGYKKHPYIKGKLLVDEETKWIVEKIFSLAYQGYGSAKITKILREEKVPTSSWLNFTRYGTFAHIFEGKPESKRYEWTIAQIKGILKSEVYIGNSVHNRQSTVSFKSKKKVRKPESEWFRVENTHEPIIEKEVFYRVQEQIKSRRRQTKEKATPIFAGLVKCADCGWSMRFGTNKANKTPYSYYACSFYGQFGKGYCSMHYIRYDVLYQAVLERLQYWAKAVQQDEEKVLHKIQKVGNAERIREKKKKASALKKAENRQNEIDCLFAKMYEDRACEKITERNFIMLSGKYQKEQIELEQQITDLREELSKMEQDMIGAEKWIELIKEYSVPKELTAPLLNAMIEKILIHEATTNEENERIQEIEIYYRFIGKVD

SEQ ID NO: 43397 - DNA, 50 bp, Enterococcus faecium; identical to SEQ ID NO: 43392
  source 1..50: mol_type = genomic DNA

SEQ ID NO: 43398 - DNA, 40 bp, Enterococcus faecium; identical to SEQ ID NO: 43393
  source 1..40: mol_type = genomic DNA

SEQ ID NO: 43399 - DNA, 50 bp, Enterococcus faecium; identical to SEQ ID NO: 43394
  source 1..50: mol_type = genomic DNA

SEQ ID NO: 43400 - DNA, 40 bp, Enterococcus faecium; identical to SEQ ID NO: 43395
  source 1..40: mol_type = genomic DNA

SEQ ID NO: 43401 - protein, 525 aa, Brevibacterium aurantiacum
MSMNTTTTNTNTTTTNRLLELPLLTPELRAAVERLREMAEDDWTASILYGRASQDRHKLMRSIDDQLTDMVGWCLPIEWYPEAIVRDADRSASQWRRREREGFDEAMALIESGRYGGFASWEPSRAGRDMEVYVQLRKACQRAGVLYLTHGRVYDFSRSDDTFMMGFEFLRAEADANTMRERQLRTVKLNADKGRPHGRLPYGYRRVYDQHTGVLLRQEPDPHTGQIVRDAARDVLAGKSMYSIAMRLQDAGEPTPKKPWAESPRGWDTYTVRQVLQNPTIAGKRVYRGEVIGQAQWEALIEWEDFQKIQRLFADPGRLVKGGGGMAAKTLMVHIARCHYCGRPLKRATMRKKERTPAVKYQCQFRGCYKTMISQPGLDAYVEQVVLEWFQNPTNLAWLTGDDDGDWLKVAEAAEQKRAALQARLDEVIAQYAAGSLNLDTLTKLEAALRPQIAEAEQALIPPVTDERVRALVTAEDVPAAWAGLPLLERRKIIKATFNVRIQQTQNRGQNAFEPERVLIEPRAL

SEQ ID NO: 43402 - DNA, 50 bp, Brevibacterium aurantiacum
  source 1..50: mol_type = genomic DNA
gtatcacccttgagcatgttcggctcgtcgatcaagttcaaggggcagag

SEQ ID NO: 43403 - DNA, 40 bp, Brevibacterium aurantiacum
  source 1..40: mol_type = genomic DNA
gtcgaggccggtggtcggctcgtcgaagaggaggagctgc

SEQ ID NO: 43404 - DNA, 50 bp, Brevibacterium aurantiacum
  source 1..50: mol_type = genomic DNA
gtatcacccttgagcatgttcggcgcgtcgatcaagttcaaggggcagag

SEQ ID NO: 43405 - DNA, 40 bp, Brevibacterium aurantiacum
  source 1..40: mol_type = genomic DNA
gcccagcgcggcagtcggcgctgcgaagtggaggcgctgc

SEQ ID NO: 43406 - protein, 502 aa, Nonomuraea pusilla
MEDMLTTEYDGCGRCLVGVRRLSRKTDATSSPQRQGDQILRAAEDIGGHIVAWADDWEVSGATDPLTRRGFGPWLRGEMGPYDGIAAASVDRVGRNVRDTLNTQALLTDQGRVIVTADHVGVWDFSDPNQENEWLVKAWGSQMELRMIQKRNRDEALRARAAGEPRQRPSYGYMYVRLAPTAKIDHIAIDPEAAQIIREVARRILSDETGKITCATEAARLTREGIPCPSDRRAQLYGRPTLGRPWRAKAVKYILCSEAALGYLMHDLRPVIGSDGRPVRIADPLWDRATHDALVKKTAPKRSGSRAPKSTQLLAGIAFCGNCGARLYVTGRYGCTARVRGIPASAQCKPAPFMPITALDALVSKWFLSRYGAGEVMRKVYDPGTGHAAQIAELTATRTRLREDRQAGLYDDPEEAEWYRTEYRRIGEEIAALKALPERKPGMRMVPTGRTIAQEWNAGDSVKRREMLAEFEIRVVLHPAGHDPRVAITGMELSPDGLELTG

SEQ ID NO: 43407 - DNA, 50 bp, Nonomuraea pusilla
  source 1..50: mol_type = genomic DNA
gagtgtgtataagggaagtagctgcgcggctgcttccgctatccacacag

SEQ ID NO: 43408 - DNA, 40 bp, Nonomuraea pusilla
  source 1..40: mol_type = genomic DNA
cgggtggtactccaccgcccgctggttggcgaaccacagc

SEQ ID NO: 43409 - DNA, 50 bp, Nonomuraea pusilla
  source 1..50: mol_type = genomic DNA
gagtgtgtataagggaagtagctgtgcggctgcttccgctatccacacag

SEQ ID NO: 43410 - DNA, 40 bp, Nonomuraea pusilla
  source 1..40: mol_type = genomic DNA
atggtgctgctacacctgctgcagcttggcgagccacagc

SEQ ID NO: 43411 - protein, 643 aa, Lentzea guizhouensis
MNTPNNPEIDPPAPSLAARFPAALSVVPSGPSGLSDYAVSPLGMPTALLRNEVRVAFLARTSTDDQQDPRQSMLRQLGNCKAAIPESWVIVAHFYDVEAGRMELDQRGRGENYERYDIPIARDGGVADLLDEAPHPGRRFDVVICESVARVARRTFEGLSIERALERVEVPLFASNEPITLTGSRAQRILQRRINQSVAEYEVLNTLEQSWGGLCTHVREGWNIGKPPYGYKAKVYRHPNPTKAAKGQTKTRLEPDGLQGETVTQIAAWRYHEGLGYDTIADRLNADPAKYPPPVPPGKVRARGAWGKTSVYEIMRNPKYTGYQVFNRRASRSRRGKINDPVKWVWSTEPAHEPLIPKWMFDELNARRQTKRGSRDGNEKNTHPATARTYVLRGMVFDSCGRRMFGSQRGERAYYLCWPRNNNRGRPDNYPDHAKTVYIRESKLLDAIAAFYADRVFGPHRRAILAAELATVDDRQTQERQAQRERLQRGIADIARRQDTILRQAQSGDPDDPFSRGLRQSYNDLEAEKQACLAAVTELDAIDEAEPAKPSEEDVNLIDALPQLRIELSKAPEKLLRKLFDTTQRTVRLHPNSNYVTLTIKLPADQLPAIGAAAERIDEMSPDAQEPVTSAVTGSCVDVVRAP

SEQ ID NO: 43412 - DNA, 50 bp, Lentzea guizhouensis
  source 1..50: mol_type = genomic DNA
tgtgtggacgttgtacgtgcccccggtacgtctcgtacaatatctacaca

SEQ ID NO: 43413 - DNA, 40 bp, Lentzea guizhouensis
  source 1..40: mol_type = genomic DNA
tgagttgtgcagtgccgcgggcaggattcgaacctgcact

SEQ ID NO: 43414 - DNA, 50 bp, Lentzea guizhouensis
  source 1..50: mol_type = genomic DNA
tgtgtggacgttgtacgtgccccccttacgtctcgtacaatatctacaca

SEQ ID NO: 43415 - DNA, 40 bp, Lentzea guizhouensis
  source 1..40: mol_type = genomic DNA
tcaatagttaagtggtgcactcaggattccaacctgtact

SEQ ID NO: 43416 - protein, 521 aa, Streptomyces thermoviolaceus
MGKREDVISKLRGAPEGLPSVEEVRAMLAADPNLKCVVCYARISFDGRVKDAHGVEDQHRDMTETARRFGWLIVYRYTDNDKSASKENVVRDDFEQLLVDLAAGVTPEGYPIHGVMAVNDDRLYRRPSDWERYLKAFTSHEGRVYHDSNGIQDLYAEGFEIKGLVGVAMSLSETRKKQRRSRNSHRSRAIRGKSVSAWRPFGWEDDKVTLRQNEADAIRKAVHDVIAGASISEITRQWKEAGYVTSRGNPFQYQTVKQILMNARLCGYREIKGELVRDGDDQPIVGEWEPIITPKQWFAVTAKIRERGGGTGMPRGGLVHKYLLTGILRCGSVLEDGTVCNNKMIGIKANDWLKYEHAYMCKKTVDGGCNKTYKRGDKTDSVIEELVIAKLERDAATKAQEVPDWDKADALERALKSRRELERRWHDDEDTDIDDETFFRNLPILERRIKELRADQRAHEALKAEAEEATGDIRKSWGSKTLTQKREAIKKVLSAVIAVPGGKGNKTFDPDLLKPVWRTSE

SEQ ID NO: 43417 - DNA, 50 bp, Streptomyces thermoviolaceus
  source 1..50: mol_type = genomic DNA
gtgatgctttggctaattttcatcgagcagagcatcatcaaaagcaccat

SEQ ID NO: 43418 - DNA, 40 bp, Streptomyces thermoviolaceus
  source 1..40: mol_type = genomic DNA
gtcctgcgagatcttcatcgagcagaacttcgggccgcac

SEQ ID NO: 43419 - DNA, 50 bp, Streptomyces thermoviolaceus
  source 1..50: mol_type = genomic DNA
gtgatgctttggctaattttcatcctgcagagcatcatcaaaagcaccat

SEQ ID NO: 43420 - DNA, 40 bp, Streptomyces thermoviolaceus; identical to SEQ ID NO: 13155
  source 1..40: mol_type = genomic DNA

SEQ ID NO: 43421 - protein, 580 aa, Ruminococcus sp
MEFSKLTRVAIYIRVSTTMQAENGESLNVQRTQLTTYAQMMLNALPENIVIFEDAGYSGKNMDRPKFQDMMSQIRAGKFSHLLVWKIDRISRNLLDFSMMYKELKELGVTFVSKNEQFDTSTAMGEAMLKIILVFAELERNMTSERVTHTMIAMAQSGRWNGGRVPFGYTYRTEGEKKEKQIFEIDKGEAALVQEIFDLYEQERSIVREAKILNDRNAISRYGHEWSPVTVHLVLRNIFYVGDYRYNALREGDRSKPKPESEWIIVKDHHPAIISREQFARVQAILKANKRYRKDMAPASSRERVHIFGGLLFCGNCGKPLNNSVSNKKADGWQYSNYPCPTRRRSSNKCTGKSTSDPVVGEFVFNYILNMLNAQKGFKDIQTPAQLQDRLLFGDAFHNVISIDSDGLNSFFNLLSSGNISGAIYGKDVAVSKSKTAKVDPELVRLRKEKKRLERALDRLLNTYIMSDRPISENEYIRKRTDLETLLSDVNDKLGIAQSEEVQMALTDSEFLTKASQFIIGQKLSNRLYINYKKLAQSVDPSVLKTFVVSVIDNIVIYNGKVKSIVFRNGLAATFEYSSI

SEQ ID NO: 43422 - DNA, 50 bp, Ruminococcus sp
  source 1..50: mol_type = genomic DNA
ttggtctacaaaatgatcatcgcatccggcatgattctttttacaatcaa

SEQ ID NO: 43423 - DNA, 40 bp, Ruminococcus sp
  source 1..40: mol_type = genomic DNA
ttataatatcagcatcgcatccccaaatgaaaagaaccga

SEQ ID NO: 43424 - DNA, 50 bp, Ruminococcus sp
  source 1..50: mol_type = genomic DNA
ttggtctacaaaatgatcatcgcactcggcatgattctttttacaatcaa

SEQ ID NO: 43425 - DNA, 40 bp, Ruminococcus sp
  source 1..40: mol_type = genomic DNA
ttataattgctgcatctctcttccaaataactagaaccca

SEQ ID NO: 43426 - protein, 645 aa, Vibrio sp F13; identical to SEQ ID NO: 23566

SEQ ID NO: 43427 - DNA, 50 bp, Vibrio sp F13
  source 1..50: mol_type = genomic DNA
atcttagagcaactcgacttagcatcactaaaaacaacttactatcatag

SEQ ID NO: 43428 - DNA, 40 bp, Vibrio sp F13
  source 1..40: mol_type = genomic DNA
tagacaactctttttagcatcaccaaacagcatctgcgtg

SEQ ID NO: 43429 - DNA, 50 bp, Vibrio sp F13
  source 1..50: mol_type = genomic DNA
atcttagagcaactcgacttagcaagactaaaaacaacttactatcatag

SEQ ID NO: 43430 - DNA, 40 bp, Vibrio sp F13
  source 1..40: mol_type = genomic DNA
tagattacacatataagcaagatcatacagcatctggctg

SEQ ID NO: 43431 - protein, 673 aa, Vibrio furnissii; identical to SEQ ID NO: 11806

SEQ ID NO: 43432 - DNA, 50 bp, Vibrio furnissii; identical to SEQ ID NO: 1977
  source 1..50: mol_type = genomic DNA

SEQ ID NO: 43433 - DNA, 40 bp, Vibrio furnissii
  source 1..40: mol_type = genomic DNA
cgagccaatcttaatatctttcatggtaaacatacccaag

SEQ ID NO: 43434 - DNA, 50 bp, Vibrio furnissii
  source 1..50: mol_type = genomic DNA
gtgttggtaaacataggtttatcttaagataaagacattattaccaacac

SEQ ID NO: 43435 - DNA, 40 bp, Vibrio furnissii
  source 1..40: mol_type = genomic DNA
ctaatcaattttaatagcatacatggtagacatcaccagg

SEQ ID NO: 43436 - protein, 484 aa, Mycobacteroides chelonae
MAIAPTPQVTQAIIYARVSSDKAAGRSVEEQERECRDECERHGWPVAHVLIDNDVSASRFATKDRPEYKRLRDLLAPGDVLVTWEASRAQRDLARYVELRDLCAERGVRWSYSGRLFDLSDGDDRFATGLDALLAEKEAEQTRVRILRAHRANLADGKPHGRVPYGYRIVRDPETGKAIGRVTDPVRAPLVAEAAHRVLAGHSLASVVRWIATKDPDPKWNDAKLRRILVNPTTAGYRTHSTTVQGKRGPQVIHGEGTWEPIITPEQHTDLLALFATRKSGPRGTEPRHLLSGIVICGVCGDYLWLGKAGRKKDGSHYAVYSCRDRHASRSKEALDEVITAVVEGMLSSPEALAALAAPPPEPNPAALAELDELRRQLQGVEDQMAENKMPADVGARVATRLSERITAVESATEPAYTEPIVRELATAPDPVETWRSLTLTQKREFIRAVMTVKIERVGRGRWHAKEAGIIITPRPGTSSLKSP

SEQ ID NO: 43437 - DNA, 50 bp, Mycobacteroides chelonae
  source 1..50: mol_type = genomic DNA
ttagccgagtaactacccgaatactggttattcgtcgtaaactccacatt

SEQ ID NO: 43438 - DNA, 40 bp, Mycobacteroides chelonae; identical to SEQ ID NO: 20798
  source 1..40: mol_type = genomic DNA

SEQ ID NO: 43439 - DNA, 50 bp, Mycobacteroides chelonae
  source 1..50: mol_type = genomic DNA
ttagccgagtaactacccgaatacaggttattcgtcgtaaactccacatt

SEQ ID NO: 43440 - DNA, 40 bp, Mycobacteroides chelonae
  source 1..40: mol_type = genomic DNA
gaagaagctgtagatgaaaagtttgagggcagcagaggtt

SEQ ID NO: 43441 - protein, 539 aa, Pseudomonas amygdali
MAKIGARVYSYLRFSDPRQGSGGSADRQLLYAQRWAADKGLELDESLSMRDEGLSAYHQRHITQGALGVFLRAIEDGRIASGSVLVVEGLDRLSRAEPIQAQAQLAQIINAGITVVTASDGKEYNRAGLKAQPMDLVYSLLVMIRAHEESDTKSKRVKASILRLCQAWQSGTYRGLIRNGKDPQWLRWTGSAWEMIPERVLAVRRALALYQEGMGAARATKILHAEGLDYSASGISKQQIYRLIKLQALRGAKCLSVDGEDFILEDYYPRLLAESEWADLQHLAGQRLRRRGHGEIPGIITGIGLTYCGYCGTALVGQNMMTRQRADGTIADGHRRLHCVSYGVNGGCTAGGSCSVVPVERALLTFCSDQLNLQRLLKVGDDGQGIREQLAVARSTVEKLSVQLGRITAALLADDSGAAPTAFIRRARELEAEQADAHKKVQQLEYELATVSGSGKPAQAERWVELADLVRSGDYSAREKVRQLVMDTFERIVVFMRGMSAEDRSGKFIDVQLLSRTGQQRLLQINRRTGAWVASEDWD

SEQ ID NO: 43442 - DNA, 50 bp, Pseudomonas amygdali
  source 1..50: mol_type = genomic DNA
tgtatagttagatagtctttaggacaccctaacgatatcattcctacacg

SEQ ID NO: 43443 - DNA, 40 bp, Pseudomonas amygdali
  source 1..40: mol_type = genomic DNA
atcaacgagtgccttcgggcaacccagtgaaacgaatccg

SEQ ID NO: 43444 - DNA, 50 bp, Pseudomonas amygdali
  source 1..50: mol_type = genomic DNA
tgtatagttagatagtctttaggaaaccctaacgatatcattcctacacg

SEQ ID NO: 43445 - DNA, 40 bp, Pseudomonas amygdali
  source 1..40: mol_type = genomic DNA
aggaaacatttccttcaggaaatccattgaaaagaatccg

SEQ ID NO: 43446 - protein, 485 aa, Candidatus Gallimonas merdigallinarum
MRAVIYARYSSDNQTEASIEGQIRECMEYATYNDIQVIGNYIDRAFSAKTDHRPEFQRMIKDSYKHAFDCIIVWKLDRFSRNRYDSAHYKALLRKNGVKVISAKETIAEGSEGILLESVLEGMAEYYSAELAEKVTRGMKENALKGLWNGGNVPFGYVINNERKLDIDPQAAPVIQEIFKLCNDGKTVKEIYRIMNERKVTRSNGKALRYNAIRYMLSNRVYIGEYHHMGVVIENSVPQLISEELFDAVQLELAKNSKAPARHTADEDYLLTTKLFCGRCGAMMVAQAGTSGTKGVVYRYYACVRQKKHQCEKKPVSKTKLEDFIVYKTMEFLKDDDIIERLSAKLYELQYTESTILPKLQEQLKQKEKEIENIVNAVQKGYATETLLKRLDGLEKQKREISDVIAKEQLKSPIFSQDHFKMALSNFRKIDITTQEGKRKIIDTFINAIYLYDDHLKIIYNANGKEETISLAELESSTLFSRGAP

SEQ ID NO: 43447 - DNA, 50 bp, Candidatus Gallimonas merdigallinarum
  source 1..50: mol_type = genomic DNA
agttcaactttgttttcacgcggggcaccaagtcataatagcttgaactt

SEQ ID NO: 43448 - DNA, 40 bp, Candidatus Gallimonas merdigallinarum
  source 1..40: mol_type = genomic DNA
ggttcaattcctgtcgaccgcaccaaaaataagaccctgc

SEQ ID NO: 43449 - DNA, 50 bp, Candidatus Gallimonas merdigallinarum
  source 1..50: mol_type = genomic DNA
agttcaactttgttttcacgcgggtgaccaagtcataatagcttgaactt

SEQ ID NO: 43450 - DNA, 40 bp, Candidatus Gallimonas merdigallinarum
  source 1..40: mol_type = genomic DNA
ggttcaatacctgtagagttgacaaagaaaaagaactggc

SEQ ID NO: 43451 - protein, 520 aa, Dorea formicigenerans
MPTSKNTARKYAAGGGSDNSCGVEPLRAVIYARYSSSGQREESIEGQLRDCYEFAKKHGIIVIGEYIDKAMTGRVDRRPDFQRMMKDSEKGRFNCVLLWKMDRFARNRYDSAMYKYKLKKNGIRIFYAKETIPDGPEGIILESVMEGYAEYYSENLAQNVKRGNYDSALELKTLGKTCLGLKTGPDGRYMIDQAEATIVRRIFEEYAEGERAKDIYERLNSEGYRTSRGGKFNKNSLRRILSNKKYIGVYEYEDIYVENGIPAIITDRDLFERVQKMLKINHDAPARGKAQNFLLTTKLFCGLCGSPMIGDGGTSHTGKAYAYYSCTKRKRGRSCKKESVPKDWIEDLVVGELVKIVHNDELIEQIADRVMEYQKREKDQSGLHALEIRQKENEKAISNMLAAIEAGIITPSTKTRLMELEADRADIEKGIAHELLAEPEFERDQIIYFLERFRSGDINDEAYRIMLVDTFLNSVYLYDDDHLVLVMNYSGENCKVDLKLVEGAVSGDGCKGSAFAPSSA

SEQ ID NO: 43452 - DNA, 50 bp, Dorea formicigenerans; identical to SEQ ID NO: 10097
  source 1..50: mol_type = genomic DNA

SEQ ID NO: 43453 - DNA, 40 bp, Dorea formicigenerans
  source 1..40: mol_type = genomic DNA
ggttcaagtcccgtcatccgcagttgatttatgaaagagc

SEQ ID NO: 43454 - DNA, 50 bp, Dorea formicigenerans
  source 1..50: mol_type = genomic DNA
ggttcagcttttgcgccgtcaagccaactcaatggcgcgaagccgaaccc

SEQ ID NO: 43455 - DNA, 40 bp, Dorea formicigenerans
  source 1..40: mol_type = genomic DNA
gattcaagtccagtcacatcaagttgccttattaaagggt

SEQ ID NO: 43456 - protein, 546 aa, Blautia producta
MGECMKHQKVSNLFNVAIYIRLSREDGDKEESDSVGNQRKLLTEYVAKKEDFILYDIYVDDGYSGTNFNRPSFQKMIADIEDGKVNCVVVKDLSRFGRDYIDTGRYLERYFPELGVRFISVTDSIDSMKQAYDMLLPIKNIFNEQYARDISKKIQATVKSKQKAGEFIGAFTSYGYKKSPVDKNKLVIDDYAADVVRRIFSLYIQGYGKQRIAKLLNSEGILCPAEYKKVNGENYKNCNRLESTTYWSYSTINSILHREMYVGNMVQGTKHQRMRSKQKKMPKEEWIIVENTHEPIIDKETWEKAQSLLQKRTRELDLETNKNIFAGFVKCGDCGRAMTKNMWRRADGSKTYSLYCGTYKRNGKQYCTPHTLPMAVLKDIVLGDLKAIVDSVDNLKELVQSQSFTASKVKRIADTELSKIKAELERVKRLKKSIYEDYREELISKEEFLSYREDYLKKEELYSKQIEALEEKKKDNVTEDVFETPWLKRLLELKDIETLDRDIVVEMISEIKVYENRKIKITYNFGNELEHLFSSVYSVESEEKAI

SEQ ID NO: 43457 - DNA, 50 bp, Blautia producta
  source 1..50: mol_type = genomic DNA
catttgcgcaattaacaccctgcacatggaggaacacggttgcgcaagta

SEQ ID NO: 43458 - DNA, 40 bp, Blautia producta
  source 1..40: mol_type = genomic DNA
aattgtaatagacgctgggcacggcggaacggatcccggc

SEQ ID NO: 43459 - DNA, 50 bp, Blautia producta
  source 1..50: mol_type = genomic DNA
catttgcgcaattaacaccctgcatgtggaggaacacggttgcgcaagta

SEQ ID NO: 43460 - DNA, 40 bp, Blautia producta
  source 1..40: mol_type = genomic DNA
aaatgtaatagaggctgggtgtggtggctgtaatcccagc

SEQ ID NO: 43461 - protein, 547 aa, Chromobacterium violaceum
MKNAKVYSYLRFSDPKQSTGSSIDRQMQYAARWATEHNLTLDDTLTLRDEGLSAYHQRHVKHGALGFFLQAVDDGRISPGSVLIVEGLDRLSRAEPIQAQAQLAQIINAGITVVTASDSKEYNREKLKANPMDLVYSLLVMIRAHEESETKSKRVKAAFRHQAEGWIAGTFRGRIASGTDPQWLKWSDGAWVEIAERCEALRFALKLYKQGHSGNAILMKMSELGMTVNDKGLPRSTNFYRMLLNPALYGTRNLEIDGQQYQLENYYPPIISRAEWLELQAMVSDRTKRGRKSEIQPVISGMGILRCGYCGGSLAGQFVGGKRKRKEDGTPHDGHRRLLCGHRDARICPVHGSCSSVPIENAIMDFCSDQLNLTSLTSNRDLTEPIRQQLLIEKNNAKNYQTKLNTLTEVLLTTTTDAPRTFIQKANQLESELNETINRIAGLEAKLAEAMAIATSPALSSEWAALVEGVKLLDNEARLKAKQLVYQTFEKIVVYSNGLQPKSGRKKGNAAPPIDLILIPKGGKPRTLRIDRKTGAWVAGEDIITQS

SEQ ID NO: 43462 - DNA, 50 bp, Chromobacterium violaceum
  source 1..50: mol_type = genomic DNA
agtatataaaaggtatctctagggcacccaagcgataccattcctatacg

SEQ ID NO: 43463 - DNA, 40 bp, Chromobacterium violaceum
  source 1..40: mol_type = genomic DNA
atcgctggcggccttgggacagccaagcgaaacgaatccg

SEQ ID NO: 43464 - DNA, 50 bp, Chromobacterium violaceum
  source 1..50: mol_type = genomic DNA
agtatataaaaggtatctctagggagcccaagcgataccattcctatacg

SEQ ID NO: 43465 - DNA, 40 bp, Chromobacterium violaceum
  source 1..40: mol_type = genomic DNA
atcacaggcttccttgggaaggctaaccgaaatcaatctt

SEQ ID NO: 43466 - protein, 523 aa, Vibrio parahaemolyticus
MERQEAISYQRFSSDRQRNNSSLDRQSEAIKTWLRMNPNVVLVDEYIDEAMSGWSGKHLEKGSLGRLLQAIEDGIVKSGSIILVEHFSRLSRQNIDKTEELLRKIWQHDITIATIRDNGLYPPSTINNMALRIRLIVEIEQAFKESEWRSAKVKGSYEKREKDAKLGITPRMRRPFWLDSEGRLNEYSVAVKDMFEMYLAGKGQQRIIVALREKYKDANPIKKLNPSTVMRWLQSDVVRGYWRGNKVYEAAIDDETFYNVQAVHKGRLYKNVKPDRNWPLSGLMQCGVCGGGMSIQKTKNTLPILRCSTKQRDRSCDRVKTMPYFIAHTYMFSYVKKYALRKYTKNTSSQEFKNRIIQIEHELSKLIPQLEDEKKHYNEAKRQGKNTRLLREIMLETDDKIFELEQELKQLKHSFDNQNDYMISKNAVELVLTPRNFNLEMHKLNFRIVIDEDELSVVGLEEKPPKIKYLGYSRKAKTYDYEVMGMKHSWPTSNITEEILMLEGLENFVEQSPYLKKLMAKNH

SEQ ID NO: 43467 - DNA, 50 bp, Vibrio parahaemolyticus
  source 1..50: mol_type = genomic DNA
aatatgcacacctaagccttccgtgagcagttggcataggtgtgcacatt

SEQ ID NO: 43468 - DNA, 40 bp, Vibrio parahaemolyticus
  source 1..40: mol_type = genomic DNA
attggatcacttactgtgcgagctaaaagcaggtcagtca

SEQ ID NO: 43469 - DNA, 50 bp, Vibrio parahaemolyticus
  source 1..50: mol_type = genomic DNA
aatatgcacacctaagccttccgtgtgcagttggcataggtgtgcacatt

SEQ ID NO: 43470 - DNA, 40 bp, Vibrio parahaemolyticus
  source 1..40: mol_type = genomic DNA
attggttcacctgcagagggtgctaaaagcaggcaaatga

SEQ ID NO: 43471 - protein, 583 aa, Listeria monocytogenes; identical to SEQ ID NO: 34106

SEQ ID NO: 43472 - DNA, 50 bp, Listeria monocytogenes
  source 1..50: mol_type = genomic DNA
gtgttccgatactaaagccgacacatgtggagactattgtgttgctacaa

SEQ ID NO: 43473 - DNA, 40 bp, Listeria monocytogenes; identical to SEQ ID NO: 34108
  source 1..40: mol_type = genomic DNA

SEQ ID NO: 43474 - DNA, 50 bp, Listeria monocytogenes
  source 1..50: mol_type = genomic DNA
gtgttccgatactaaagccgacacaagtggagactattgtgttgctacaa

SEQ ID NO: 43475 - DNA, 40 bp, Listeria monocytogenes
  source 1..40: mol_type = genomic DNA
atggttataatagcaacacaattacaaactgggacttttc

SEQ ID NO: 43476 - protein, 603 aa, Streptococcus oralis
MSNNVEIIKANPLVTRRNDNSGSLSRRVAAYCRVSSDSDDQKNSYDSQVRHYREYISQHQDWILVDIYADEGISGTQVGKRQDFQRLISDCLDGKIDYIITKAIARFARNTLDTLKYVRLLKDKQIGVFFEEENIDTLTMDGELLLTILSSVAQQEVENTSAHVKKGLKMKMQRGELIGFQGCLGYDYNQDTKSISINEKEAKIVRYIFERYIDGIGGRAIARELDELGYKTPRGLDHWQDTTVLGIIKNEKYKGDILMGKTFTVDPISKRRLINFGEEDKYYIKNNHDAIISPEIFTQAQEIRLRRSGNKKTIANTKGKRERYSRMYPFSSRLECGFCGTVMSRRSWHSSSEYKKIIWHCTTSIKRGKKYCTHSKGIEEKAIENAFLQSYQQLFYENNNLTEDFLEIIKEELTDDTLKVELTKIVSKLNSLYKKEEKLVSMNLDGKISDSVYEDKFNQIQIEKEKLLEEKVNLEVTLKSEVDIKSRLENFKEILTSQKTLTEFDKDIFESIVEKIIVGGINSDGEIDPAMLTIIFKTGDSSTKDAKSYKSKRKNAKIDNDKLCFNAVTDDEKKCTNKENNARRVCELVSETQLNLKRFTQTV

SEQ ID NO: 43477 - DNA, 50 bp, Streptococcus oralis
  source 1..50: mol_type = genomic DNA
ttcacccaaaccgtttgagtcccacagacgcatcacgtggagtgtgtagt

SEQ ID NO: 43478 - DNA, 40 bp, Streptococcus oralis
  source 1..40: mol_type = genomic DNA
gccggtggatttatttccgcagacgcatcatgttgaggcg

SEQ ID NO: 43479 - DNA, 50 bp, Streptococcus oralis
  source 1..50: mol_type = genomic DNA
ttcacccaaaccgtttgagtcccagcgacgcatcacgtggagtgtgtagt

SEQ ID NO: 43480 - DNA, 40 bp, Streptococcus oralis
  source 1..40: mol_type = genomic DNA
gcgggtggctgtaatcccagctacgcataaggttgaggca

SEQ ID NO: 43481 - protein, 542 aa, Crateriforma conspicua
MASRIRAVGYTRMSTGKREQETSPEQQRHEIERFAQESGYRIVQWYADDAVSGDDTRKRHGFKRMVADAENGGGFDAILVWNRERFGRFDAIESGFWSHKLRSAGVQLVTVNKGVIDWDSFAGRVTDSVDAEAKHQFLDTLSGDVSRALKIKANKGGWAFGLTPFGYILGDDSKLVPDPETSPLVPQLFDKYAAGWSLRELGDWLESKGIRTRRGKKWSPTTVSDLLANEHYLGRLTYGRTSSSKYRHKVPKGRRIDLPADQWIVVKDSHPPLVTQQQFDAVQERRKKNRRNTGPKKMNGEFALKGLVSCGCCGGPMDGWFNPQRGVRQYICRAYTKSADSCQRFIVDESDILRHVIEAIQSEVFDRLDDATMKAIRQRMTELTAQRQDVIEVDRQHMRKIENQLAQAKRRLVEVDTDMVRHVTERIRELEDEQARLSDHIAANSVDAANQVELAEQRIDAAMGLLGRLSDVVASGDYDPRPVREMVGQMVQSVTVNVVREPIGKRKHRCRLTGGVIHFRIAGMPADLARFIFGDSSTCEVR

SEQ ID NO: 43482 - DNA, 50 bp, Crateriforma conspicua
  source 1..50: mol_type = genomic DNA
attcggggattcgtcaacttgtgaagtccgaaccgaacaaatcagcgaat

SEQ ID NO: 43483 - DNA, 40 bp, Crateriforma conspicua
  source 1..40: mol_type = genomic DNA
catgaatttcaggtcgtgaagtccgaagttgaaatggatc

SEQ ID NO: 43484 - DNA, 50 bp, Crateriforma conspicua
  source 1..50: mol_type = genomic DNA
attcggggattcgtcaacttgtgatttccgaaccgaacaaatcagcgaat

SEQ ID NO: 43485 - DNA, 40 bp, Crateriforma conspicua
  source 1..40: mol_type = genomic DNA
cagcaatttaaggtggtcattccatcagttgaaatggctc

SEQ ID NO: 43486 - protein, 560 aa, Faecalibacterium prausnitzii; identical to SEQ ID NO: 10471

SEQ ID NO: 43487 - DNA, 50 bp, Faecalibacterium prausnitzii; identical to SEQ ID NO: 4052
  source 1..50: mol_type = genomic DNA

SEQ ID NO: 43488 - DNA, 40 bp, Faecalibacterium prausnitzii
  source 1..40: mol_type = genomic DNA
gcttgaaacaaccggaacatatagtgatacaattacactc

SEQ ID NO: 43489 - DNA, 50 bp, Faecalibacterium prausnitzii
  source 1..50: mol_type = genomic DNA
tgttttcctaataggcgctaatcagatgattgtttcctattaggaacgct

SEQ ID NO: 43490 - DNA, 40 bp, Faecalibacterium prausnitzii
  source 1..40: mol_type = genomic DNA
gcttaaaacaaccttatgagatagaaatacaaatatattc

SEQ ID NO: 43491 - protein, 511 aa, Anaerotruncus colihominis
MNIAAYCRVSTDKEDQLNSLEAQIEFFSEYTKRTGDNLVRLYADEGISGTKIKNRKEFLRMMADAEHGLFDMVVVKDISRFARNTVDLLQNVRKLKALGIETQFLTANMTSMGNSEFVLTIFGALAQEESANTSKRVKFGKKMNAEKGRVPNIVYGYDKTIGDYFNLAINEEEAAVVRQIYQWYIKDGYGAAKISIFLNERGLRTKRNCQWSQNGVCRILTNELYTGKIINGKQEVTDFLTGQRADKDASEWMVVDRPDLRIIDPETFEQAQQIMKSRGKAFKVDKERQSNKYLFSTLIKCKECGWSFRRTVRTYKNTYVRWVCSGHNGRGADNCPNTVTVDEDELIEVLQEYFAGLLKAKKNVIRYVVGEFQRVYKAKDENLNYEKELTAQLVKLQKTRQKYMDMYADDLISREELNDKIGGMRKEIERLENELKMVSYHLTKGEQLESVLQQTFKEIEDITDVRQMTNAQLKRIIQKIEVDKDGNVDIYLRLFGDLGLDETVLIRHDET

SEQ ID NO: 43492 - DNA, 50 bp, Anaerotruncus colihominis
  source 1..50: mol_type = genomic DNA
ccgttctaattcgtcacgacgaaacatatagaagtaataaattagaacgg

SEQ ID NO: 43493 - DNA, 40 bp, Anaerotruncus colihominis
  source 1..40: mol_type = genomic DNA
tatatcaaagtcgaccgtacataaagacgtcacagagcgt

SEQ ID NO: 43494 - DNA, 50 bp, Anaerotruncus colihominis
  source 1..50: mol_type = genomic DNA
ccgttctaattcgtcacgacgaaaattatagaagtaataaattagaacgg

SEQ ID NO: 43495 - DNA, 40 bp, Anaerotruncus colihominis
  source 1..40: mol_type = genomic DNA
atattcaaattcaacagtaattacagatgtcacagagcat

SEQ ID NO: 43496 - protein, 598 aa, Streptococcus ruminantium
MNGLKEFFGNIPMFQKQVEREIEEKGIEPSEGIKKMEFSRQVIRNLVIGVLVVGILESGLINCVITKDLSRLGRNYLDCGLYLEVFFPEHNVRYIAVNDGVDTLNKSAMDITPFRNILNEMYAADISVKIKSAYRARFQQGKFMGTTAPYGYIKDPADHNHLLIDDKVAHVVKEIFDLALKGNGVAKICRHLNKQHILRPAAYAAERGETGFERHFEGNEDKRYIWSGNSVRSILRSPIYVGNLVGYKRIAANMKSKKRPSKLPEEWEVIPNTHEGIVTQEEFDIVQQLITSRRLPQNKGGFVNIFAGVIKCVDCGCALRAMNVHRRKRPEIIDCVQYSCNNYARNGRSECSAHNIEARDLFNAVLADINCFADMAVNDEKAVRAIEKRLTETDQSRAKALEKERKKLNKRLAELDRLFSSLYEDKVMERITERNFEMMSGKYQKEQLEIEARLKEVTETLNESYEKSRGIRDFLALIRNYQGLKELDATVINALIDKILVSEREKMADGTVKQEIKIYYKFIGFVDELHIIPTKRWAAMPAKNCTVCGVEYVPGSGASRYCPACAKKIRREKSNESKRRSREQKRIACMNCPQKMTD

SEQ ID NO: 43497 - DNA, 50 bp, Streptococcus ruminantium; identical to SEQ ID NO: 11112
  source 1..50: mol_type = genomic DNA

SEQ ID NO: 43498 - DNA, 40 bp, Streptococcus ruminantium
  source 1..40: mol_type = genomic DNA
agcataccaacgatccaaggaactacgacaagcgagaaca

SEQ ID NO: 43499 - DNA, 50 bp, Streptococcus ruminantium; identical to SEQ ID NO: 13229
  source 1..50: mol_type = genomic DNA

SEQ ID NO: 43500 - DNA, 40 bp, Streptococcus ruminantium; identical to SEQ ID NO: 13230
  source 1..40: mol_type = genomic DNA

SEQ ID NO: 43501 - protein, 490 aa, Shewanella morhuae
MKTAVSYIRFSDSKQIGNSSVARQTDMLMAWLKQNPDFSLYKQKYSDLALSGFHGRHLENGLGQLLHAVETEQIPNDAYLICEAWDRIGRLESFVMLSLIDNLIKKGMTIVTLQDNMTYNSDTLRAGSGQLYGLIAKIEQAHLYSKSLSERIKKSWVKKKGDAQAGKGIKMFTPTWLTSTGALKSELHLRAVNTMFNLYLQGKGQVIIARTIREQFSEIYPKILPKTVKKTLSNKMVIGYWEDIPHCIEPVISEPLFYQVQKLMHQRSFQPKVTPRGHKFAGILKCACCGNNLSFSWSRPQQYSRCNLRNRTGQCQNAGQIPYSVFEWVYNDLFECIKVLINQYEQKTTKTDEFLQTQYKLREAKKKYLTLKDLLASSPSIAIADIVATEEANISELEFQLEILTPNTMDSDFYFEEDLIDFEDSEKVIGMLKLIDFKILQNGNKLTTMIDDMTYEYTYHTNRNRKNYTKQFNLLTDEFVKVSYLIDKVK

SEQ ID NO: 43502 - DNA, 50 bp, Shewanella morhuae
  source 1..50: mol_type = genomic DNA
tataccacaaagtatccttgtagttaactagtatggtactatgtggtaca

SEQ ID NO: 43503 - DNA, 40 bp, Shewanella morhuae
  source 1..40: mol_type = genomic DNA
agtgattgcgccttgtagttatcatcaaggtttaggcact

SEQ ID NO: 43504 - DNA, 50 bp, Shewanella morhuae
  source 1..50: mol_type = genomic DNA
tataccacaaagtatccttgtagtacactagtatggtactatgtggtaca

SEQ ID NO: 43505 - DNA, 40 bp, Shewanella morhuae
  source 1..40: mol_type = genomic DNA
agtgcttgctaattgttttactcttccaggtttagtctct

SEQ ID NO: 43506 - protein, 575 aa, Vibrio parahaemolyticus
MTKIAYSYTRLSTEKQIKGHGFTRQREAIEKVCCQHGWQLSDQTFNDLGVSAWKGANATTGALSQFIDLAKKGAIRPNSVLIVESVDRLSRQQVDKSLRLMLELLEVGVSIFTLSDSKLYTTNSDSVMLDLMMWLMTAQRAHEESEIKSLRVRAAKKKNKELIRKGIIVTRKCPEWLTVSDDKSCFLVNNERAEIVRKIFTWYSQGFSTKPIALKLNELGIPYWGKSSTWSYRHIRSLLKHRGVIGEIQLLKRIDGRDVADGDPVEDYYPAIIDRGLWATCQQIKSSKTTAKGRVVERGMANLFRGLLKCECGSGLAINSSTVKGRTYRFLRCSQLKTTGCQAKNWHYEKTERILLIALRHSLSSFSEEDHAVSLRECQHYLARISEELKEKERQAENAINYLLDKPSKLLEARLQTLEDDIARLKAIQEQAEHRLEAVHYEKSTALDKVEELQRVLEDIANDDDSRHKANGLLRRLIDTITLGSISNPRSKEFMEVSGNDYHGLIIIKRRDGLELRIEVLKDYGLSISWEGDDFTVIECSPTQQLNSQHVSQRLINLGGQTVDLWDDEGWVASS

SEQ ID NO: 43507 - DNA, 50 bp, Vibrio parahaemolyticus
  source 1..50: mol_type = genomic DNA
attttgggaatggacaatagtattaaggtgctttatcgtattccctaaac

SEQ ID NO: 43508 - DNA, 40 bp, Vibrio parahaemolyticus
  source 1..40: mol_type = genomic DNA
atttggctggcatgtggtcaaggttctctacagaacctag

SEQ ID NO: 43509 - DNA, 50 bp, Vibrio parahaemolyticus
  source 1..50: mol_type = genomic DNA
attttgggaatggacaatagtatttgggtgctttatcgtattccctaaac

SEQ ID NO: 43510 - DNA, 40 bp, Vibrio parahaemolyticus
  source 1..40: mol_type = genomic DNA
atttgcctggcatctggcctggatcttatgctgaacctaa

SEQ ID NO: 43511 - protein, 503 aa, Pedobacter antarcticus
MNAIGYIRISKKDQSTHSLDYQEKSIRDYCDRNDLVLGSLFIDDGESSFTFDRPDYKALEDFIKKNKKSVKYLVIFDHDRFSRNLPEALQKIEFLEKKHDLKVIAVSEPLDIDTSDPSVFLLRAFKYLIANQELMTIRKRAKVSARHAQESGRYLNKAPYGYINGKHTDGKMILQIDESKVFIIEKIYRDYLNGIPHFIIHKEVKKLGFPHNSASAIFRALNNPLYCGLVRVCAYGKLAEKLVKGQHEAIIPESLYYRVQDKLKGNKREMKSKPKEEFPLKGIIKSPCCGRNLTAGWSTGKLKKYMYYRCLDHSNINISGIELHQKFEELLRHLSFTSEFVDEVVLLVSGKVKEILKSNENRLKELRQQLQGIEVMIATVDQKLFTDVINDDTYKRNMQKFKGEKGKLNDEIENLNNLADNIQQDLLVLPYMLNLHQVYIDAPLGQKHAMIREVFKEGLTYKNGMFRTPSVNPDLKCNSLLLKQIGLLDFEQPYEFEKSFSLC

SEQ ID NO: 43512 - DNA, 50 bp, Pedobacter antarcticus
  source 1..50: mol_type = genomic DNA
gagtttgagaaatcattctccttatgcggggaatcggattacccactaca

SEQ ID NO: 43513 - DNA, 40 bp, Pedobacter antarcticus
  source 1..40: mol_type = genomic DNA
aagggtagcatttttgtttggcggagagtgggggattcga

SEQ ID NO: 43514 - DNA, 50 bp, Pedobacter antarcticus
  source 1..50: mol_type = genomic DNA
gagtttgagaaatcattctccttaagcggggaatcggattacccactaca

SEQ ID NO: 43515 - DNA, 40 bp, Pedobacter antarcticus
  source 1..40: mol_type = genomic DNA
aaggatctcattttggtttagtggatagtgtgggttggga

SEQ ID NO: 43516 - protein, 533 aa, Oscillibacter sp
MLQVAAYCRVSTDKDDQANSFAAQQRYFHERIEREPDWELQGIYADEGISGTSTKNRAEFNRMLRAAEMGKIDLIVTKEVSRFARNTVDALKITRELRKRDIGVLFLNDNIDTRDHDSEFRLSIMSSVAQEESRKTSDRSKWGQTRSMEQGVVFGGSLLGYDVQGGKMTVDPKGAAIVRLIFRKYLDECKGCGTIARELREAGILSSRGQCRWSSATVVKILKNEKYCGDLVQKKTYTPDFLTHEKRYNHGQEPIVEIKDHHEPIIDRETWQAVQQELRRRNRARGSGGHGNRYPLSGKIRCGACGKSFVRRTKTRKDGSSYRRWCCFTATSEGLRRTDGAGNPLGCSVGRQLREDVAMDILRRSVDAVTPDKMAIISDLFRIVEQVLSNGEDDEQQEKCRLEQELEKLQGRSDAILDRFLDQTLSRADFQRAKARCEAEIVRTQEKLEAVRRQQKPDTDTGTRKPDIRAAITGIVTGQTAGDSFYGRLLHHMTVYQDGRVEVALNLLPTKWTYVLDGSEKYRAKTGVQNASS

SEQ ID NO: 43517 - DNA, 50 bp, Oscillibacter sp
  source 1..50: mol_type = genomic DNA
caggggtacaaaacgcttcctcagtgccgacaaaggaagcaaaatagcca

SEQ ID NO: 43518 - DNA, 40 bp, Oscillibacter sp
  source 1..40: mol_type = genomic DNA
aaatgacccagttcctcagtaccgatgtcagtcagcagtc

SEQ ID NO: 43519 - DNA, 50 bp, Oscillibacter sp
  source 1..50: mol_type = genomic DNA
caggggtacaaaacgcttcctcagttccgacaaaggaagcaaaatagcca

SEQ ID NO: 43520 - DNA, 40 bp, Oscillibacter sp
  source 1..40: mol_type = genomic DNA
aactgcccctcttccccacttccgatgccagtcacaagcc

SEQ ID NO: 43521 - protein, 496 aa, Cutibacterium granulosum
MTLMFCRVPNMTVAAAYLRVSKADETDDESLTLETQRRRIKALCKARGWLYGPEYIDEGVSATKRRDEKTRWAELLADVGRGKFDVIVARDLDRLLRTLQDLVKLIDLKARVATVDGEIDLTTADGELRATMLAAVARFEIRRKSERSIGANETRRRKGLPIIRVKILGYDDDGITQIDDEAAAVEKAFLDYLSGVGLAQVCRDLNAGGFTSSRGLPWSNNNIRSLLMNARYKGVITKWEPDAQKRKASGALTDEVYPGIWDPIVTADVFDAVQAKLRDPARRRNWGTEPRYLMSGLLRCGKCGGKMYTSFYCAPDRTLKSGKVVKTAPKRIYKCLTHNHLSRVAEPIDELVERIVLARLQEPDAADLFSPQQDDGMKRDELRAERLALQTRYDSLAGLVTDGLLPADQVRQEAPRLVGRIKEIDGLLAPGPESVGQQLAEAPDIEEAWAELDMAHRRIVVGEILTLTLLPGGRPKKLEKLPRTVADPDLKIEMLG

SEQ ID NO: 43522 - DNA, 50 bp, Cutibacterium granulosum
  source 1..50: mol_type = genomic DNA
gaacgtaacaatctgttgaaacacctcgacttcacgactttatgacgttg

SEQ ID NO: 43523 - DNA, 40 bp, Cutibacterium granulosum
  source 1..40: mol_type = genomic DNA
aaatgtcaacttgaagtacctcggcactgcagcgacggca

SEQ ID NO: 43524 - DNA, 50 bp, Cutibacterium granulosum
  source 1..50: mol_type = genomic DNA
gaacgtaacaatctgttgaaacacaacgacttcacgactttatgacgttg

SEQ ID NO: 43525 - DNA, 40 bp, Cutibacterium granulosum
  source 1..40: mol_type = genomic DNA
aaatgtcaccgtgaatagcaactgcactccagcctgggca

SEQ ID NO: 43526 - protein, 550 aa, Comamonas testosteroni
MGDSAKNGLVYSYLRFSDPKQSAGGSTDRQLAYAAKWAAEHDLKLDTHLSLRDEGLSAYHQQHIKSGALGVFLRAVEEGRVPFGSVLIVEGLDRLSRAEPIQAQAQLAQIVNAGITVVTASDGKTYSRQRLKDNPMDLVYSLLVMIRAHEESDTKSKRVKASVRRLCEKWIDGSYRGRVEQGHDPAWLTRNDTDGWDFKPDTVKAILRTIEMYKQGLGGKRIIEKLNAEGLRIYPTSKENQTLQVYRVTKMPQLAGHKPISVDGDEYLLKGYYPPLLSELDWEDLQRVVKSSGRRRVKGDLPHVITGIGITFCGYCGHPMAGQHLASKKRLPDGRIRDGYRRLLCSAAATFSAVCPVRGSTSVAPIERAIMSYCSDMMNLQGLFETDTSSESRKELLKAQKNVEAIKAQLDKLTDAMLASADEGIPLTFARRARQLEEDLAVAEKSLTAQERDIAMLARRDISGADEKWRALAAGVEAQDIETRLQARQLVADTFSRISVYHHGLRPNHTPKSRDYYIDLMLVAKGGSSRWLRIDRDGNWVHDESYEAAD

SEQ ID NO: 43527 - DNA, 50 bp, Comamonas testosteroni
  source 1..50: mol_type = genomic DNA
gctatacattgagtatcactcgggcacccgagtgataccatacctatacg

SEQ ID NO: 43528 - DNA, 40 bp, Comamonas testosteroni
  source 1..40: mol_type = genomic DNA
atcagtcaaggccttggggcagcccaacgaaacaaagccc

SEQ ID NO: 43529 - DNA, 50 bp, Comamonas testosteroni
  source 1..50: mol_type = genomic DNA
gctatacattgagtatcactcggggtcccgagtgataccatacctatacg

SEQ ID NO: 43530 - DNA, 40 bp, Comamonas testosteroni
  source 1..40: mol_type = genomic DNA
accagtcaaggctctgggggtggcaaattaatagaagccc

SEQ ID NO: 43531 - protein, 550 aa, Comamonas testosteroni
MGDSAKNGLVYSYLRFSDPKQSAGGSTDRQLAYAAKWAAEHDLKLDTHLSLRDEGLSAYHQQHIKSGALGVFLRAVEEGRVPFGSVLIVEGLDRLSRAEPIQAQAQLAQIVNAGITVVTASDGKTYSRQRLKDNPMDLVYSLLVMIRAHEESDTKSKRVKASVRRLCEKWIDGSYRGRVEQGHDPAWLTRNDTDGWDFKPETVKAILRTIEMYKQGLGGKRIIEKLNAEGLRIYPTSKENQTLQVYRVTKMPQLAGHKPISVDGDEYLLKGYYPPLLSELEWEDLQRVVKSSGRRRVKGDLPHVITGIGITFCGYCGHPMAGQHLASKKRLPDGRIRDGYRRLLCSAAATFSEVCPVRGSTSVAPIERAIMSYCSDMMNLQGLFEADTSSESRKELLKAQKNVEAIKAQLDKLTDAMLASADEGIPLTFARRARQLEEDLAIAEKTLSAQERDIAMLARRDISGADEKWRALAAGVEAQDIETRLQARQLVADTFSRISVYHHGLRPNHTPKSRDYYIDLMLVAKGGSSRWLRIDRDGNWVHGENYEAAD

SEQ ID NO: 43532 - DNA, 50 bp, Comamonas testosteroni; identical to SEQ ID NO: 43527
  source 1..50: mol_type = genomic DNA

SEQ ID NO: 43533 - DNA, 40 bp, Comamonas testosteroni; identical to SEQ ID NO: 43528
  source 1..40: mol_type = genomic DNA

SEQ ID NO: 43534 - DNA, 50 bp, Comamonas testosteroni; identical to SEQ ID NO: 43529
  source 1..50: mol_type = genomic DNA

SEQ ID NO: 43535 - DNA, 40 bp, Comamonas testosteroni; identical to SEQ ID NO: 43530
  source 1..40: mol_type = genomic DNA

SEQ ID NO: 43536 - protein, 452 aa, Listeria monocytogenes
MKAAIYIRVSTQEQIENYSIQAQTEKLTALCRSKDWDVYDIFIDGGYSGSNMNRPALNEMLSKLHEIDAVVVYRLDRLSRSQRDTITLIEEYFLKNNVEFVSLSETLDTSSPFGRAMIGILSVFAQLERETIRDRMVMGKIKRIEAGLPLTTAKGRTFGYDVIDTKLYINEEEAKQLQMIYDIFEEEKSITTLQKRLKKLGFKVKSYSSYNNWLTNDLYCGYVSYADKVHTKGVHEPIVSEEQFYRVQEIFSRMGKNPNMNRDSASLLNNLVVCGKCGLGYVHRRKDTVSRGKKYHYRYYSCKTYKHTHELEKCGNKIWRADKLEELIIDRVNNYSFASRNVDKEDELDNLNEKLKTEHAKKKRLFDLYISGSYEVSELDVMMADIDAQINYYEAQIEANEELKKNKKIQKNLADLATVDFDSLEFREKQLYLKSLINKIYIDGEQVTIEWL

SEQ ID NO: 43537 - DNA, 50 bp, Listeria monocytogenes
  source 1..50: mol_type = genomic DNA
tttagtacctcgtttcctctcgttggagggagaagaaacgagataccaaa

SEQ ID NO: 43538 - DNA, 40 bp, Listeria monocytogenes; identical to SEQ ID NO: 5118
  source 1..40: mol_type = genomic DNA

SEQ ID NO: 43539 - DNA, 50 bp, Listeria monocytogenes
  source 1..50: mol_type = genomic DNA
tttagtacctcgtttcctctcgtttaagggagaagaaacgagataccaaa

SEQ ID NO: 43540 - DNA, 40 bp, Listeria monocytogenes
  source 1..40: mol_type = genomic DNA
ttttgtatcaagctataggtagccctaaaaatgaaccaaa

SEQ ID NO: 43541 - protein, 619 aa, Massiliimalia timonensis; identical to SEQ ID NO: 40101

SEQ ID NO: 43542 - DNA, 50 bp, Massiliimalia timonensis; identical to SEQ ID NO: 11112
  source 1..50: mol_type = genomic DNA

SEQ ID NO: 43543 - DNA, 40 bp, Massiliimalia timonensis
  source 1..40: mol_type = genomic DNA
tccctttatctgatccaatgagttggatcagatgaaggga

SEQ ID NO: 43544 - DNA, 50 bp, Massiliimalia timonensis; identical to SEQ ID NO: 19274
  source 1..50: mol_type = genomic DNA

SEQ ID NO: 43545 - DNA, 40 bp, Massiliimalia timonensis
  source 1..40: mol_type = genomic DNA
acactttaacttaaacaataaattgcagcagatgaaggca

SEQ ID NO: 43546 - protein, 457 aa, Peribacillus simplex
MERNGFVWDEKCVYKDEGISGTMFVDRPAIQLILQKAKDKKINMVIFKSISRLARDLKDSLEIREVFLAHNVRIISIEEGYDSVKAGKNDMAFELWSLFSAQYSRTLSSSISAALAAKVRRGEHIGKIPFGYDRVEQKLVINEEEGKVVRDIYEWYNNGLGYKNISNELNMLGIKPKSNQVWQLTSIQRIIHNTIYKGTFILNQFSSVKVGGRKKQIRNPPEKWLIFENHHPAIVDKDVWDKANSKNYTSKKLRNTPWNEFRSLAKCSECNSNMVIVQSYKKKVNGERTEWKYLKCSQYRRAGQKGCVNHTPIQYEDFREFMIELLIQKGEFITLTLQQSAEGKQVKETKKLQGSIKQNEQRKNNLLTLYLDELISKEEFEKKRQELDEEVEKANSQLFILSKKETVQTNIKTVKEAFLELNNQKQDLYYIFQTLIKSIIVHPDGTIDVIYTFEEPR

SEQ ID NO: 43547 - DNA, 50 bp, Peribacillus simplex
  source 1..50: mol_type = genomic DNA
ggtttgtaattactacgcatttcaaatgcgatgcgtagtgtatgcaaact

SEQ ID NO: 43548 - DNA, 40 bp, Peribacillus simplex
  source 1..40: mol_type = genomic DNA
agttcgaaaccatatttcgaatgcgatgcagaagcttgga

SEQ ID NO: 43549 - DNA, 50 bp, Peribacillus simplex
  source 1..50: mol_type = genomic DNA
ggtttgtaattactacgcatttcaattgcgatgcgtagtgtatgcaaact

SEQ ID NO: 43550 - DNA, 40 bp, Peribacillus simplex
  source 1..40: mol_type = genomic DNA
atttctaacccagttttctattgctatgcacaggcttggg

SEQ ID NO: 43551 - protein, 583 aa, Streptococcus suis; identical to SEQ ID NO: 15131

SEQ ID NO: 43552 - DNA, 50 bp, Streptococcus suis; identical to SEQ ID NO: 18192
  source 1..50: mol_type = genomic DNA

SEQ ID NO: 43553 - DNA, 40 bp, Streptococcus suis
  source 1..40: mol_type = genomic DNA
tgttttccaacaaccaatccagttcggcattggtatatgg

SEQ ID NO: 43554 - DNA, 50 bp, Streptococcus suis
  source 1..50: mol_type = genomic DNA
tgtattctcaaggaacagactacattcgtggagtgcgtagtgttgctaca

SEQ ID NO: 43555 - DNA, 40 bp, Streptococcus suis
  source 1..40: mol_type = genomic DNA
tgttttcccacaacccatttttctcagtgttggaatgtgg

SEQ ID NO: 43556 - protein, 464 aa, Mycobacterium colombiense
MRAAVYLRQSQDRSGEALGIDRQRNEVQRLIDARGWTVAAEFVDNDVSALSRKPRPQFSAMMARVDAGEFDVIVARHMDRLLRRLSELESTLERCQSANVAIVTATDGVDTSTDGGRLVARILSSVAQGEVERKGARQRSAAVQAAKQGRWVGGRRPFGYEKDGVTIREEEATLIKQAYVDVLAGESLSEVARRWNASGITPAQSEKSWYRGTVKDVLTNPRHAGLRRYRTPEERAKIRQNPELGIVGKAEWPAIVDETTWRAAVRVLTDPTRHTGPTGAKGLLTGVALCGVCGQTVHRGGAAGRYPMYRCVSGRHVSRSAEPVDDYVMAVAVDRLQQPDAASLWAAELPNADELMAEADKLRRERDGIDQDRAEGIIDRVRWRTMNERITGRLGDIEAKLAAAGSSSPLSIVASEHVEEAWAGLSIAQRRNIIAALMTPVLHLPGRGTRTFRPETVEIRWKIT

SEQ ID NO: 43557 - DNA, 50 bp, Mycobacterium colombiense
  source 1..50: mol_type = genomic DNA
gcgatcttgttgcgtttgtagtcgcgtggcatcaaagctagcagaactca

SEQ ID NO: 43558 - DNA, 40 bp, Mycobacterium colombiense
  source 1..40: mol_type = genomic DNA
gaccgcacgttgcgggtcgcgtggagcctggccgacctgg

SEQ ID NO: 43559 - DNA, 50 bp, Mycobacterium colombiense
  source 1..50: mol_type = genomic DNA
gcgatcttgttgcgtttgtagtcgagtggcatcaaagctagcagaactca

SEQ ID NO: 43560 - DNA, 40 bp, Mycobacterium colombiense
  source 1..40: mol_type = genomic DNA
cacctgaggttgcagttcgagagcagcctggccaacatgg

SEQ ID NO: 43561 - protein, 533 aa, Brevundimonas diminuta
MTRVALYARYSSERQNERSISDQLNVLIQHAAGKCWAVVGTYTDAAISGSAMANRPGLLAALAAADRGEFDLLLAEDEDRLARNLEHLAHVANRLADIGAGIATLSTDRVQDMHVAFKGLIAQDFIRNLSLKTKRGMASNAEKGLATGSRLYGYRSQPGGAVEIVPEQAEVIRRIFAMYVHDRLSSREIAERLNRDKIPSPAGREWNASSIQGSRQRANGILHSEIYAGVKVYNRVEMRKDRQTGRKITICNPPSEHKRVDVPHLAIIDRDIWNAARQRLDSRQTADPSQRASLRRRPGLLSGLTKCGCCGASYTSLSQGRLVCAAYREKGASACDNNRHVSRAEIEQRVLEGLRTRLLAPEAVAAYVRAYHAAWAEQASQAEDRRRPLTRRLAEVERAIERGAEALLSGATAAAVIGKKLEALEIEQAQIKATLEQLDSEDAPPVQLHPRAAENYARKIEQLQSRLAEAADSTEGADRDLIASVRDLIQRVDIEPVNKSRGAPVRVTLHGDLARFVLPQHPPASGCALVVGG

SEQ ID NO: 43562 - DNA, 50 bp, Brevundimonas diminuta
  source 1..50: mol_type = genomic DNA
tagtgggtgtgcgttggtggttggaggcggctaccaacgcacacccacat

SEQ ID NO: 43563 - DNA, 40 bp, Brevundimonas diminuta
  source 1..40: mol_type = genomic DNA
ggaaatccgtggtggttggaggcgggatcgaaccgccgac

SEQ ID NO: 43564 - DNA, 50 bp, Brevundimonas diminuta
  source 1..50: mol_type = genomic DNA
tagtgggtgtgcgttggtggttggtcgcggctaccaacgcacacccacat

SEQ ID NO: 43565 - DNA, 40 bp, Brevundimonas diminuta
  source 1..40: mol_type = genomic DNA
ggaaatttgtggtggtaggtcacaggattgaaaatcccac

SEQ ID NO: 43566 - protein, 522 aa, Blautia producta
MIESKSRVAIYCRLSEEDRNKQSETDDSNSIQNQKSMLLQYSLEHGWEVYNIYSDDDYTGSDRRRPEFNRLLEDAKNRKFDIVLCKTQSRFTRELELVEKYIHGLFPIWGIRFISIVDNADTANKGNKKSRQINGLVNEWYLEDMSENIKSVLTDRRKNGHHIGAFSLYGYKKDPDVKGHLIIDEEAAEVVREVFTLFSQGYGKTAIARMLNDRGIPNPTEYKRLHGLRYKQPKTKNSTLWKYFAISDMLVNEIYIGNMVQGKYGSVSYKTKQNKPRPKDEWYRVEGTHEPIIDRELWDRVQALVAQKAKPFTVGTIGLFARKARCMNCGYTMRSSKNRGKHYLQCSNRHVAKDACIGSFISVDKLEKAVIDELNKLSAEYLDKDELEQNVQFNNDLRGQKEALETEIAAYQKKIAEYTKGIRELYLDKVKGILSELDYLDLSKDFSTQKERLEKLVIDTQKQLDVIERKMLIGDNRRQLIEQYTNLEHLDRETVEKLIDYVLVGKKDPVTKEVPIEIHWNF

SEQ ID NO: 43567 - DNA, 50 bp, Blautia producta; identical to SEQ ID NO: 12237
  source 1..50: mol_type = genomic DNA

SEQ ID NO: 43568 - DNA, 40 bp, Blautia producta
  source 1..40: mol_type = genomic DNA
agtggtacgcgctttctgctctgctgccatatcctcaaat

SEQ ID NO: 43569 - DNA, 50 bp, Blautia producta
  source 1..50: mol_type = genomic DNA
tgttgtctttacacaatcgtaccatgtggtgcgacctcgtaagaacaaca

SEQ ID NO: 43570 - DNA, 40 bp, Blautia producta
  source 1..40: mol_type = genomic DNA
agtggtttgtgatttttgttgttgtttcatatcctcaaat

SEQ ID NO: 43571 - protein, 522 aa, Blautia producta
MTNQIKVALYCRLSEEDRNKQSESDDSNSIQNQKSMLLQYALEQGWEVYNIYSDDDYTGADRRRPAFNQLLEDAEKRKFNIILCKTQSRFTRELELVERYIHGLFPVWGIRFVSIVDNADTANKGNKKSRQINGLVNEWYLEDMSDNIKSVLTDRRKNGFHIGAFALYGYKKDPDIKGHLIIDEEAAQIVREVFTLFSQGYGKTAIARMLNDRGVPNPTEYKRLHGLRYKQPTRKNSTLWKYFAISDMLCNEMYIGNMVQGKYGSVSYKTKQNKPRPKDEWYRVEGTHEAIIDRELWDKVQSLIEQKAKPFSVGTIGLFAKKTRCMYCGYTMRSNKQTDGRRYLQCSNRHVSKDACIGSFISVPKLEQAVITELNRMSMAYLDKDELEQNVTFNNNLKEKQEALKSTISTYEKKIAEYTKGIRELYLDKVKGILSEQDYLDLSKDFVTQKERLEKLVADTQKQLDTLERKMENGDNRRQLIEQYTNLEHLDREIVEKLIDYILVGKKDPVTKEVPIEIHWNF

SEQ ID NO: 43572 - DNA, 50 bp, Blautia producta
  source 1..50: mol_type = genomic DNA
tgttgttcttacaaagttgcaccagagggtgcgacctcataaagataaca

SEQ ID NO: 43573 - DNA, 40 bp, Blautia producta
  source 1..40: mol_type = genomic DNA
gtttgaggatatggcagcagaacagaaagcgcgcaccact

SEQ ID NO: 43574 - DNA, 50 bp, Blautia producta
  source 1..50: mol_type = genomic DNA
tgttgttcttacaaagttgcaccacagggtgcgacctcataaagataaca

SEQ ID NO: 43575 - DNA, 40 bp, Blautia producta
  source 1..40: mol_type = genomic DNA
atttgaggatatgaaacaacaacaaaaatcacaaaccact

SEQ ID NO: 43576 - protein, 645 aa, Vibrio alginolyticus
MALIPYARVSSGKQLDGLSMSLQGDSKLLDKLAKEHNTTVSNLVYNDEGKSAYKGKNVDDGELGRLINDIKRNIIKQGDIIVMRALDRLSRQNLTDSENLYNSIVGSNVSILTTIDNHLYKRDCVMSSVLKTLAFKTANEESAKKSHLTNTYASHRIQQFLSNEKPDNGTAYDIGIGRHPFWIEIDNRVIQKGKHFALARVMFEKAMQGYGVARLQKFALEQGLELSHSAVGKMFRSHTVFGDLHINHQGKKYTLKSYYPALATESEYYKVRAIKDRLIKESNAQRKHVSILAGMQKLYCGCCNSSVGIARNTRQEINYYSCINKINKCYQPLRQDIIDNIVLNAIDIHIFNVDSTDTTVVDGLELEFSEKKKQHESAVERYMILGDSAGENAVNVIHQLKSELDDIQKKIETEKNQTASCAIDYDAITSFRDAMADYKAQQDKITEYVHGDSELKQEIKDVLKLILKRITIDHRHMITIEMLDGSISYLYLLRRKDGKRLHDRYYVPIKVHDKETVNIIRTSTPELVNWVTQSELDTLDIYLEDVTNPFLTIERNRHVRDLESEFFNLLQGNVYEWKRADIMKAGATASQWQGFKDADVLKYGFTKAECTITTRHYTKQHKTIIYRDLNKSELRNYFNCKRIEL

SEQ ID NO: 43577 - DNA, 50 bp, Vibrio alginolyticus
  source 1..50: mol_type = genomic DNA
atatcagagcaacttgccttcgcatcaccaaaaactaattactctacgag

SEQ ID NO: 43578 - DNA, 40 bp, Vibrio alginolyticus
  source 1..40: mol_type = genomic DNA
ctcaacactttctttcgcatcaccgaatagcattgatgta

SEQ ID NO: 43579 - DNA, 50 bp, Vibrio alginolyticus
  source 1..50: mol_type = genomic DNA
atatcagagcaacttgccttcgcatgaccaaaaactaattactctacgag

SEQ ID NO: 43580 - DNA, 40 bp, Vibrio alginolyticus
  source 1..40: mol_type = genomic DNA
cataacactttctatcttttgacagaatagctttcatata

SEQ ID NO: 43581 - protein, 555 aa, Planobispora rosea
MTSPMPTPSIKRAIIYLRVSSRGQVETDYDPEGISLPAQRAAAHRRAAELSADVVAEFVEPGRSATGVDNRPEFQRMMAMIKARKDIDYVIVYSRSRMHRNAIDAAITKRDLRTAGTRLISVTDYTEDSAVGDLVGTVLDAVNEYQSRASGADISYKMSQKAARGGCTGRSPLGYLNVREQFEGREVRTVAIDPERGPLVRMAFELYATGTYSFQDLAEMLTDAGLRMKPDKNHPTGARISIHKIGKMLRDRYYLGYLIYKGVEYQGRHEPLINPELFDKVQEVLYVQRGAGTRARTHNHYLKGTVWCDRCKRRLIVMRGKSKSGNLYFYYVCRGRQERACDLPYLPIDDVETAVAEHYTAIALPAKLRDLIRAGMDAALASSITTLGTLHDEVKKQLAEIDRKEDHFLDLVGDPDWPKEKLAKRMRTLRDERARLEYQLDQIERPDLDGGHQALTMLLGLLSEPHKLYEIADEHARRLLNQAFFTRLYLDASDDDRTPAVAADEATEPVAPLLHVHRAANNNGGASTGTAVGGTSALLVAALDERCSSNATWVE

SEQ ID NO: 43582 - DNA, 50 bp, Planobispora rosea
  source 1..50: mol_type = genomic DNA
gtgttcgagtaacgccacttgggtggaggtaatgaccgcttactcgaaca

SEQ ID NO: 43583 - DNA, 40 bp, Planobispora rosea
  source 1..40: mol_type = genomic DNA
tcaagaacggccctggtgtggagctatggggattcgaacc

SEQ ID NO: 43584 - DNA, 50 bp, Planobispora rosea
  source 1..50: mol_type = genomic DNA
gtgttcgagtaacgccacttgggtgcaggtaatgaccgcttactcgaaca

SEQ ID NO: 43585 - DNA, 40 bp, Planobispora rosea
  source 1..40: mol_type = genomic DNA
tgaagaacctgcctggtgagcagatatgggaataggcacc

SEQ ID NO: 43586 - protein, 568 aa, Mediterraneibacter faecis
MQSKKKQDKAGITALYCRLSRDDGVEGDSNSVANQKKLLKRFAKENGLTNTRYYVDDGYTGTNFERPGFQKMIEDIDLGYISTVIVKDLSRLGRRYDMVGYYMDTYFPDRDVRFIAVNDNIDSDEGESEIAPFKNVLNEFYARDISKKCRSSYRIRGSTGEPLAPPPYGYIKSPDNPKKWVIDPEAAQVVRDIFKMALEGKSNETIAHILQERKVLIPMAYWQEKGIRKGGKVTQPNKYKWCKTTVTKILTQQEYCGDIINFKTYSKSYKNKKRYDNPKENWVIFKDVHEPIISRDDFELMQTLVVKTKRRAPKQENGEKNMFCDFLYCADCGSKLWYHTNTTNKEIHYFSCSNYKKDTRGNCETRHYIRADAIEQIVMLELKRLAKYLEFHEEEFAKLLAEKTNADMLAEQKTLETELNRATARNEMLTSLFAKTYEDNVSGKLSDEMYMELSHKYEVERLELKTKIFEYKERLAKISEMEQNKDDFLKSVRKFMEMDFLTAPMLRELIDHIDVYEKEGGKKNYTQRIVIYYRFVGYLELPSSDDENYKANTRKGVDVEYISTAKSA

SEQ ID NO: 43587 - DNA, 50 bp, Mediterraneibacter faecis
  source 1..50: mol_type = genomic DNA
taaatccgttatgaacactcatactggtacgagtgttcataacggactta

SEQ ID NO: 43588 - DNA, 40 bp, Mediterraneibacter faecis
  source 1..40: mol_type = genomic DNA
ctgaataagtaatttccactggtgttttatccgggatttc

SEQ ID NO: 43589 - DNA, 50 bp, Mediterraneibacter faecis
  source 1..50: mol_type = genomic DNA
taaatccgttatgaacactcatactcgtacgagtgttcataacggactta

SEQ ID NO: 43590 - DNA, 40 bp, Mediterraneibacter faecis
  source 1..40: mol_type = genomic DNA
ctaaataagtaatttcctctcttggtttttaaattatttc

SEQ ID NO: 43591 - protein, 548 aa, Eubacterium limosum
MIKDIESGLINCVITKDLSRLGRNYLDCGLYLEVFFPEHNVRYIAVNDGVDTLNKSAMDITPFRNILNEMYSADVSVKIKSAYRARFQQGKFMGTTAPYGYVKDPADHNHLLIDDKVAHVVREIFDLALAGNGIAKIRKHINKQHILRPAAYAAEQGATGYERYFEENEENRYIWSENSVRGILRSPIYAGNLAGYKRIAANMKSKKRPSKLPEEWEVIPDTHEGIVTQEEFDTVQQLITSRRLPENKGGFENIFAGVIKCADCGYAMRAMSANRRKRPDIIDCVQYSCNNYGRYGNIMCTAHSIEARDLFNAVLTDINRFADMAVNDEKAVRAIEKRLTETDQSKAKALEKEQRKLNKRLAELDRLFSSLYEDKVMERITERNFEMMSGKYQKEQLEIEARLKEVTETLSDSYEKTQGVRDFLSLIRNYQGIKELDATIINALIDKILVSEREKLTDGMVRQEIKIYYKFIGFVGELHITPTKRWTALKPKNCTVCGVEYVPRSGISKYCPACAKKIQREKSNESKRRSRERNRQACIELSAKNDRL

SEQ ID NO: 43592 - DNA, 50 bp, Eubacterium limosum; identical to SEQ ID NO: 11112
  source 1..50: mol_type = genomic DNA

SEQ ID NO: 43593 - DNA, 40 bp, Eubacterium limosum
  source 1..40: mol_type = genomic DNA
ttgtccgtggcggccagcggatttggaacagcaggaaggg

SEQ ID NO: 43594 - DNA, 50 bp, Eubacterium limosum; identical to SEQ ID NO: 37649
  source 1..50: mol_type = genomic DNA

SEQ ID NO: 43595 - DNA, 40 bp, Eubacterium limosum
  source 1..40: mol_type = genomic DNA
ttgcccctggttgccaagggctttgcaacatcaagcaggg

SEQ ID NO: 43596 - protein, 537 aa, Clostridium innocuum; identical to SEQ ID NO: 43396

SEQ ID NO: 43597 - DNA, 50 bp, Clostridium innocuum; identical to SEQ ID NO: 43392
  source 1..50: mol_type = genomic DNA

SEQ ID NO: 43598 - DNA, 40 bp, Clostridium innocuum
  source 1..40: mol_type = genomic DNA
aatctcaaattgggagaatgaaagatcgtatccggatatc

SEQ ID NO: 43599 - DNA, 50 bp, Clostridium innocuum
  source 1..50: mol_type = genomic DNA
tcatatctttaactaagggagacgttagtttcccaaacaaaaggatatta

SEQ ID NO: 43600 - DNA, 40 bp, Clostridium innocuum
  source 1..40: mol_type = genomic DNA
actctaaaatttggagaattttaaatcttagactgttatc

SEQ ID NO: 43601 - protein, 511 aa, Pseudomonas fluorescens
MLDRWADANPTFTLNRELSFKDLGISGRSGRHLKSGFGKLLEAIEKGAIGAGDVVLVEAIDRAGRMEPGIMSGILIDILNAGVSLVTLDDNQVYTQESLRGGSFYILVGKVQAAFNYSESLSVRMKASYKSRNALAVAGVTPKRHTPVWLESDGTLREGIAPFIKQAFEDYAAGLGERRVYERIMEKVNTLPNDEKSDKVRACFVRMAPSTVKRWMTNRTVLGEWQGVPNVYPKVVEPELFYRVQKRKEEKFSPRGVPTKHKYTGLVVCGECGKNFNTKSYSKRIKGAIPPPVMECSSRARRGSTACSNSKGIPESVIAYVFNLSCWKHIKDALEGQILTESQKREVVIDGELRDLSVRITKVARAVAEVEDVEELIVSLNELKAQRRALESEKQSLQHGNVTVRDQITNMTGIMEDPLKVNALLQSVGYKIVCNVNRMIDTPVGIFVYQGWGRAEDVHKVVNPQGQMMKLPVVRQQPRKAAAKEGKTIDIMSGLSGKLERVKLVNVNIRL

SEQ ID NO: 43602 - DNA, 50 bp, Pseudomonas fluorescens
  source 1..50: mol_type = genomic DNA
aatccccacattgcagattcttgggtacagtagtttgcagtgtggggatc

SEQ ID NO: 43603 - DNA, 40 bp, Pseudomonas fluorescens
  source 1..40: mol_type = genomic DNA
ctcgtaatagaccggttgggtgaagatcatgtcgtagatc

SEQ ID NO: 43604 - DNA, 50 bp, Pseudomonas fluorescens
  source 1..50: mol_type = genomic DNA
aatccccacattgcagattcttggtcacagtagtttgcagtgtggggatc

SEQ ID NO: 43605 - DNA, 40 bp, Pseudomonas fluorescens
  source 1..40: mol_type = genomic DNA
ctcgtttttgtcaggtttgtcaaagatcaggttgtagatg

SEQ ID NO: 43606 - protein, 538 aa, Blautia wexlerae; identical to SEQ ID NO: 13576

SEQ ID NO: 43607 - DNA, 50 bp, Blautia wexlerae; identical to SEQ ID NO: 13577
  source 1..50: mol_type = genomic DNA

SEQ ID NO: 43608 - DNA, 40 bp, Blautia wexlerae
  source 1..40: mol_type = genomic DNA
taggtgaaatccgtaaaacaattttcattggtttacgcag

SEQ ID NO: 43609 - DNA, 50 bp, Blautia wexlerae
  source 1..50: mol_type = genomic DNA
ttgcttctttatcacacataagcatgtgctcatgtacggtaaggaagcaa

SEQ ID NO: 43610 - DNA, 40 bp, Blautia wexlerae
  source 1..40: mol_type = genomic DNA
tctgtgaaataggtacaattgttatcattgttttacacat

SEQ ID NO: 43611 - protein, 489 aa, Eggerthella lenta
MAKRAKRSAPKKGARAAIYARYSSHNQRGESIEIQLDNDYAYCHEHELEVVKVYIDEAKTGRDTNRADFQQMLEDAKRHLMDYVVIYKVPRIMRNRDEMAFARIMLRKCGVEILYAGEQIAEGSSGVLQLGMLEVLAEWESAVDSERITEGIAKNAERCMANGQRLYGWDIVDGFYALNEQQATVMRMMKDMLLSGSMIADIRRACEPYRTQFGNKFTQSAITKMLKRKQNAGIYVYAGYEIPGGMPALWSLEEQQMIWKILEKNARPRKRENTENYALTGKLFCGKCKTPMIGTSGTSKAGARYYYYRCKKCRRNVRKDIIEANVADDVIAALSDEATREKIADMVAEIEQDTGAKPQSEIIRSELHDIELSFDRIWQAIEGGYAPPGGKERVKELTKRKELLEDELRVAVSIESVTVDRNRILFWLEDIAQEEDPETLIEVFVSKVVLVGDDDLHIAFTFEGGDDDIGQIVDDSGGVRVNGPELHHG

SEQ ID NO: 43612 - DNA, 50 bp, Eggerthella lenta
  source 1..50: mol_type = genomic DNA
tgttcgggtaaatggtcctgaactccaccacggaaccaatatccgaacac

SEQ ID NO: 43613 - DNA, 40 bp, Eggerthella lenta
  source 1..40: mol_type = genomic DNA
ggttcgaatcccatcatctccaccacggaaacctgatcgg

SEQ ID NO: 43614 - DNA, 50 bp, Eggerthella lenta
  source 1..50: mol_type = genomic DNA
tgttcgggtaaatggtcctgaactctaccacggaaccaatatccgaacac

SEQ ID NO: 43615 - DNA, 40 bp, Eggerthella lenta
  source 1..40: mol_type = genomic DNA
ggttccaatctcctcatctctttcaggtaagcctaatcag

SEQ ID NO: 43616 - protein, 540 aa, Mediterraneibacter faecis
MKQPYNTTIYNTALYLRLSRDDELQGESGSIQTQRMMLRQYAAEHGLTVVDEYIDDGWSGTNFERPSFQRMIDDIEDGKINCVVTKDLSRLGRNYILTGQYTEIYFPSKGVRYIAINDNVDTINGESELAPFLNILNEMHARQTSKKVKAAMHTRFANGAHYGAYAPLGYVKDPDKKGHLLIDPETRWIVEKIFDLAVHGRGAASITRILVEEKVPTPGWLNYERYGTFANIYAGAPAEKAYAWTIAQVKSILKEETYIGHSIHNKQSNISFKNKKKVRKPQEEWYRVENTHEAIISEEVFQKVQELIASRRRKRRNGTTQIFAGLIKCADCGWSLAYGENKQNKNPYGYYHCSKNGQGLRQCSMHYIRYDVLYAYVLARLQYWSMLAQKDEDKLLKRLLNANDRERNSAKKKQAAELKKAEKRKAEVDGLFAKMYEDWSAGRITEYNFNMLSEKYQNEQKELETKIRQLYETMEAAVQTAADAEKWIALMKQYVNPVELTAELLNTLIEKITVHEAVKGEDGSREQEVEIYYRFIGKID

SEQ ID NO: 43617 - DNA, 50 bp, Mediterraneibacter faecis; identical to SEQ ID NO: 2472
  source 1..50: mol_type = genomic DNA

SEQ ID NO: 43618 - DNA, 40 bp, Mediterraneibacter faecis
  source 1..40: mol_type = genomic DNA
agtttcaaaatgggaaaagggattatccattccggatgca

SEQ ID NO: 43619 - DNA, 50 bp, Mediterraneibacter faecis; identical to SEQ ID NO: 17814
  source 1..50: mol_type = genomic DNA

SEQ ID NO: 43620 - DNA, 40 bp, Mediterraneibacter faecis
  source 1..40: mol_type = genomic DNA
agtttgaaaatgggaaaataaggtctccatctagaattca

SEQ ID NO: 43621 - protein, 540 aa, Mediterraneibacter faecis
MKQPYNTTIYNTALYLRLSRDDELQGESGSIQTQRMMLRQYAAEHGLTVVDEYIDDGWSGTNFERPSFQRMIDDIEDGKINCVVTKDLSRLGRNYILTGQYTEIYFPSKGVRYIAINDNVDTINGESELAPFLNILNEMHARQTSKKVKAAMHTRFANGAHYGAYAPLGYVKDPDKKGHLLIDPETRWIVEKIFDLAVHGRGAASITRILVEEKVPTPGWLNYERYGTFANIYAGAPAEKAYAWTIAQVKSILKEETYIGHSVHNKQSNISFKNKKKVRKPQEEWYRVENTHEAIISEEVFQKVQELIASRRRKRRNGTTQIFAGLIKCADCGWSLAYGENKQNKNPYGYYHCSKNGQGLRQCSMHYIRYDVLYAYVLARLQYWSMLAQKDEDKLLKRLLNASDRERNSAKKKQAAELKKAEKRKAEVDGLFAKMYEDWSAGRITEYNFNMLSEKYQNEQKELETKIRQLHEMMEAAVQTAADAEKWIALMKQYVNPVELTAELLNTLIEKITVHEAVKGEDGSREQEVEIYYRFIGKID

SEQ ID NO: 43622 - DNA, 50 bp, Mediterraneibacter faecis; identical to SEQ ID NO: 3657
  source 1..50: mol_type = genomic DNA

SEQ ID NO: 43623 - DNA, 40 bp, Mediterraneibacter faecis; identical to SEQ ID NO: 43618
  source 1..40: mol_type = genomic DNA

SEQ ID NO: 43624 - DNA, 50 bp, Mediterraneibacter faecis; identical to SEQ ID NO: 12409
  source 1..50: mol_type = genomic DNA

SEQ ID NO: 43625 - DNA, 40 bp, Mediterraneibacter faecis; identical to SEQ ID NO: 43620
  source 1..40: mol_type = genomic DNA

SEQ ID NO: 43626 - protein, 577 aa, Mycobacteroides chelonae
MSRSIEFEEPAKAVLYLRVSSKKQMDTAVDIDPDGNSIATQREVASRKASSLGADVVREFVEPGVSASTIEKRQAFQEMLAFLRENPDVRYVVVYARSRAFRNYIDAAITKRLLDKLNVKLVSAREDFGDGVYADMMEAVTDIFNDVQNKLSGEDIRIKLQHKAENGGTTGKAPLGYLNARVEHEGRLINTIQLDPKRAPLVRRAFELYSTGEYGLERLEATMADLGLTARAAGDLPERPVTFKWLHRMLQDRYYMGCVVYKGEVYAGRHEPIVDPVLFERVQEVVAFRSKSGQRDRVLQHYLKGILFCDRCERNERTSRLIYTEATNRSGNRYGYFLCRGRQDGVCDLPYLPVDKVEQAIVDHYETLNLPTNFVDDVRQLLDDALTEEQHSVAELHAAVSRKLKELETKEDRLLDLLTDDRLPQAKVREKLRKIQIERTATEARLANSGEVLAVGATALLDALDFMSDPAATYASGTDSIRRNLNETYYQRIFLDEEGVQAGELKPPFDEFHAALAMTKERRTTVTTSTSTTPPTKQGPLAGALDRVSDDRSSSGLALALTDILSDAGSSKTSLVE

SEQ ID NO: 43627 - DNA, 50 bp, Mycobacteroides chelonae
  source 1..50: mol_type = genomic DNA
gggttcgagtaagacctctttggtggaggctataggaagaacctcgaacc

SEQ ID NO: 43628 - DNA, 40 bp, Mycobacteroides chelonae
  source 1..40: mol_type = genomic DNA
gccgggggtttttcttggtggagctaaggggaatcgaacc

SEQ ID NO: 43629 - DNA, 50 bp, Mycobacteroides chelonae
  source 1..50: mol_type = genomic DNA
gggttcgagtaagacctctttggtgaaggctataggaagaacctcgaacc

SEQ ID NO: 43630 - DNA, 40 bp, Mycobacteroides chelonae
  source 1..40: mol_type = genomic DNA
gccaggatgttttctggaagaagctaaggggagtctatcc

SEQ ID NO: 43631 - protein, 585 aa, Cronobacter sakazakii
MRKLYSYVRWSTDKQSGNTSLERQTLKAQEFATIHNLEYVQILDAGISAFRGKNTTEGALGGFIEAVKAGVIPSDSYLYVENLDRLTRQDVATALNLFTGLLRLGLTIVTGMDGKIYTNEGLKNVTDLMMSLFLFSRAYEESLTKQKRAHETALRLIERHRAGLPVNIKSAGSAPWWIDASMSTYEAVKPHPVHWPAAKKAVELMLEGWGCFKVASYLNDHPEEFPPPRGNKGKGKKRGECWAVANLKKMRDNRALFGEKVITIGGATHTLTDYYPAICTRAEFAQLHDIACNNRHKVGEERRIITLLSGLRLLRCGHCNGSMSFFSKEGRIRYVCETGKNKTSDCKVWSVSGLLVERCLMLPLIRGYMDFMSGKASASEDLTQKIEDKKAEVLNVDTQIANLTSAIQLGGNIPALVSSIQALEQSKSAALVELERLTQRQALQDAKDQQVETLVDFYELLTPTMLEDTSDERRLKVREVVRAVIESVTLSKASDKALTLTYELPDKTVYTFTGELIESKKGKPTKSYRVEVENRGIRIDGIEDTPAGREAINRANEAEQEYHRIISQILVDFPPLKGSHFFGKR

SEQ ID NO: 43632 - DNA, 50 bp, Cronobacter sakazakii
  source 1..50: mol_type = genomic DNA
attggcacctaaaaatatttcgggttgcctaaagtcatttacatgccaat

SEQ ID NO: 43633 - DNA, 40 bp, Cronobacter sakazakii
  source 1..40: mol_type = genomic DNA
atcgacgggatattttgggtttccggggtggctgatgata

SEQ ID NO: 43634 - DNA, 50 bp, Cronobacter sakazakii
  source 1..50: mol_type = genomic DNA
attggcacctaaaaatatttcgggaggcctaaagtcatttacatgccaat

SEQ ID NO: 43635 - DNA, 40 bp, Cronobacter sakazakii
  source 1..40: mol_type = genomic DNA
attgaaggaatttcttgggagtcgggggtgtttgagtata

SEQ ID NO: 43636 - protein, 484 aa, Roseburia hominis
MKGVIYARYSSDNQREESIEGQLRECKDYAERNGITILGTYIDRALSAKTDNRPEFQKMIKDSAKGLFDVVLVWKLDRFARNRYDSARYKNLLKKNGVKVISARENISEGSEGIILEAMLEGYAEYYSAELSEKVIRGLTDNALKCKYNGGTVPMGYYIDEQQFYQIDPKTAPVVLEMFTKYSEGATMQELVNLLNSRGMRSIRGGKITLNIMNHLLKNRRYMGEYSYRDVVKEDGIPAIVPKELFERVQERLAKNKKAPARHKAEDDYLLTTKLYCGKCGSFMVGESGTSHTMKVHRYYRCVNTKKKKLCDKKAVKKDWIEDLVVNYTMKAIMNDEVMERLIDTLMELQKKESTDLPLLKKQLAETEKGINNMLNAIQAGIFTPSTKQRLDELEETKSQLEVSILQEEMHKPLLTREQIAFFIYRFRKFDVTKREQRQRLIDSFVNAVYLYEDKIILTFNYKDGSKTITLADVEGSDLSSFGA

SEQ ID NO: 43637 - DNA, 50 bp, Roseburia hominis
  source 1..50: mol_type = genomic DNA
ggttcggatttatcctcattcggtgcaccagaccatgataatccgaaccc

SEQ ID NO: 43638 - DNA, 40 bp, Roseburia hominis
  source 1..40: mol_type = genomic DNA
ggttcaagtcctgtcacccgcagtctttgaaaatagccgg

SEQ ID NO: 43639 - DNA, 50 bp, Roseburia hominis
  source 1..50: mol_type = genomic DNA
ggttcggatttatcctcattcggtaaaccagaccatgataatccgaaccc

SEQ ID NO: 43640 - DNA, 40 bp, Roseburia hominis
  source 1..40: mol_type = genomic DNA
tgttgaagtcctgacacccaaagtgttagaaagtgactgt

SEQ ID NO: 43641 - protein, 512 aa, Faecalibacterium prausnitzii
MCAKKKPAMLEPDMQDAVIYTRYSSHNQRDCSIEQQVADCEIFARQNNLRVVKVYADRHLSGTTDNRPQLQQMLKDATHGHWAYVICWKIDRFARNRYDSATYKFRLKKAGVRVLYAKESIPDGPEGILLESVLEGSAEYYSAALAQNIRRGMKYNAEQCKVNSGSIPFGYRKGPDGRFAIHEANAEVVREIFRKAAAGMPFVDIANDLNSRGLKTSRGGRWNKGSFRLLMNEAYIGVYHFSDTRIEGGMPALIDQGTFWAANERLKANSSVRGRHQDGGDYLLTGKLKCAHCGSYMIGFSGTGKSGELHYYYGCQKRRRERACKKANVPREWIERVVVKAALDYVLRPDVMEWIADAVMEYQEREAASAQLAALTAELEENQKATDNVMKAIEAGIITSTTKQRLLDLEAKAQDLKRAIELEKLSHVRLERDQVLFWLDRFRGGSLQSQEFRRKVIDAFVSVVYLSDDHLRIAFNYSGGSNAEADFDLVMDAEAAAGELSKKFAQGHVAST

SEQ ID NO: 43642 - DNA, 50 bp, Faecalibacterium prausnitzii
  source 1..50: mol_type = genomic DNA
caaaaagttcgcacaaggtcacgtcgcctccaccaaatgtgaatcaggcg

SEQ ID NO: 43643 - DNA, 40 bp, Faecalibacterium prausnitzii
  source 1..40: mol_type = genomic DNA
acatgggttcgactcccatcgcctccaccacacaaaaaaa

SEQ ID NO: 43644 - DNA, 50 bp, Faecalibacterium prausnitzii
  source 1..50: mol_type = genomic DNA
caaaaagttcgcacaaggtcacgtcacctccaccaaatgtgaatcaggcg

SEQ ID NO: 43645 - DNA, 40 bp, Faecalibacterium prausnitzii
  source 1..40: mol_type = genomic DNA
aaatgcatcccacacccaccaccaccaccaaaaaaaaaaa

SEQ ID NO: 43646 - protein, 514 aa, Alphaproteobacteria bacterium
MNPQNVDAALLYVRVSSKKQEDEGDGSGSQEHLCRRHAAKLGVPVEAVFYDSKSGFHNFMTRPGMVSVLKHLKSNRRKRYVVIFDDLKRLARRTRFYWELRDTFDEYGAVVASPNFRFDNTPHGRHHETITVSHGELEREENRIQVIQKMTSRVERGYAVTRAPIGYRYKKVKGSGSVLVPDETFAPIVREALEGYASRRFEIQAEVQRFLESHPEWPRNCSGKRTGRVNETRVAAMLRNPVYAGLIAAPYWDVSLRKGLHEPLIGVETHNRIIARLDGDKRAPARKDLSKDFPLRGFVHCGCCGSPLTASWSRGSKGGLYAYYLCPKRGCEVYGKSIQRAKIEGEFEALLKTLTPSADLFHLAVATFKRAWDMRRENSASRLQALRGQLKDTEGQIEMLLDRIVEAKTQLVAYALEERVEKLTKEKLALAEKIASGGQPLRSFDQSLRTALTFLSNPWKLWSFDRIECKRTVLKLAFADNLHYARNEGFRTPNLALPFMALADFSAPERGMVG

SEQ ID NO: 43647 - DNA, 50 bp, Alphaproteobacteria bacterium
  source 1..50: mol_type = genomic DNA
ccgcgccagaaagaggaatggtgggccaaacaggggaaagtttgaacctc

SEQ ID NO: 43648 - DNA, 40 bp, Alphaproteobacteria bacterium
  source 1..40: mol_type = genomic DNA
tggcttaagaaaatggtgggcggtacaaggattgaacttg

SEQ ID NO: 43649 - DNA, 50 bp, Alphaproteobacteria bacterium
  source 1..50: mol_type = genomic DNA
ccgcgccagaaagaggaatggtggaacaaacaggggaaagtttgaacctc

SEQ ID NO: 43650 - DNA, 40 bp, Alphaproteobacteria bacterium
  source 1..40: mol_type = genomic DNA
tgacttaacaaaatggaggaagttaaaaccaaagaacttt

SEQ ID NO: 43651 - protein, 623 aa, Paraburkholderia domus
MARAYSYVRFSTPEQSKGDSLRRQQALSEAYALENSLTLDTTLTFHDLGVSAFKGGNVERGRLGAFLEACDTGLVAPGSYLLVESLDRLSREAVMEALQLFLSILNKGIIIVTLGDSRLYSKGGDNAMDLIISITIMSRAHEESLTKSKRQRAAWNNKRANIGTKKLTARCPLWLKLNADRTEFSFIPERVEVVREMIGLAKNGMGQAAIAKMLNERGAPSFSGNDAGWYPSYIQKILTSKQLYGEFQPGETQNGRKLVAGEPIDNYYPPLLTKDEFYSLQAFRSQNYVGGGRAKKGSTVPNLLSGLLKCGYCGSTMVIAGAAAKRIKTADGETIRPPKKILVCDSARRGMGCYAVQWGFNEFETAFMSFCRGVNLDGLLADLRKNSELPAPIKLEDQVKAEEQKIIDLQKAIDKLFDLYLGTDGQAQAAVQTRLSKLTLEKSNAEVTKERLLKEIQQRKDSGTDSHEVARLTKSLIEQMGSVNDEERFRVRAALSAQLRRFIDKVNLYAAGRLYSKDFIRKQKAALIASGISKANASKYCDENYPTEPKRQGRGNRGRYASRADIGRFFAIATKNGGFRVVYPEFNDPTVAIVQGGFGDGGPSLTAIRDDPYGLPHTLLQDE

SEQ ID NO: 43652 - DNA, 50 bp, Paraburkholderia domus
  source 1..50: mol_type = genomic DNA
ttgtgtgttcttcgccacaatgttgcaagttagcggttatgaacacatat

SEQ ID NO: 43653 - DNA, 40 bp, Paraburkholderia domus
  source 1..40: mol_type = genomic DNA
aatatgcaagcccgaaatcgccaccagatgacttgtgccc

SEQ ID NO: 43654 - DNA, 50 bp, Paraburkholderia domus
  source 1..50: mol_type = genomic DNA
ttgtgtgttcttcgccacaatgttttaagttagcggttatgaacacatat

SEQ ID NO: 43655 - DNA, 40 bp, Paraburkholderia domus
  source 1..40: mol_type = genomic DNA
aatatgtaagccagcaaggttaaacagatcccctgtgccc

SEQ ID NO: 43656 - protein, 540 aa, Amedibacillus dolichus
MKQPYNTTIYNTALYMRLSRDDENYGDSVSIETQRTILQQYAKEQGLHVVGEYVDDGWSGTNFERPDFQRMMDDVEAGKVNCIVTKDLSRFGREHVMMDYYLEFLFPEKRVRYIAVAENEDTEKGLSDFVPFKNLFNEWFAKDTSRKVKAAFKAKFATGQRIGAYAPIGYRKHPEIKNKLIIDEETRWIVEKIFDLAIHGRGAASITRILIEEKVPTPGFINFQRDGTFANIYAGAPEEKSYAWTIAQVKSIMKDETYIGHTIHYRETNISFKNKRRVRKPQSEWVRVENTQEPIISEQVFRQVQEQIANRRRKCKDGTTQIFSGLVKCADCGWSLSYGENRQNSKPYGHYHCSKYGQGTRQCSMHYIRYDVLYAYVLSRLQYWSGLVQHDEERLLKRLLNATDKGQAAARKKQAAELKKAEKRKAEVDTLFARMYEDWAAGRITEYNFSMLSGKYQSEQAELDTKIEQLQSAIATESQNAADAEKWIALMKECVNPTELTAELLNTLIEKIVVHEAVKGEDGSREQEVEIFYRFIGKID

SEQ ID NO: 43657 - DNA, 50 bp, Amedibacillus dolichus; identical to SEQ ID NO: 4067
  source 1..50: mol_type = genomic DNA

SEQ ID NO: 43658 - DNA, 40 bp, Amedibacillus dolichus
  source 1..40: mol_type = genomic DNA
aatcagcaagtgggaaaatggaaagagtctacccgatcct

SEQ ID NO: 43659 - DNA, 50 bp, Amedibacillus dolichus; identical to SEQ ID NO: 13284
  source 1..50: mol_type = genomic DNA

SEQ ID NO: 43660 - DNA, 40 bp, Amedibacillus dolichus
  source 1..40: mol_type = genomic DNA
aatcagaaggaaggaaaattgacaaagtctaagtgatgct

SEQ ID NO: 43661 - protein, 540 aa, Butyrivibrio crossotus; identical to SEQ ID NO: 12131

SEQ ID NO: 43662 - DNA, 50 bp, Butyrivibrio crossotus; identical to SEQ ID NO: 2472
  source 1..50: mol_type = genomic DNA

SEQ ID NO: 43663 - DNA, 40 bp, Butyrivibrio crossotus
  source 1..40: mol_type = genomic DNA
aatttctaaatgggaacggggaaacggatttcctgaagta

SEQ ID NO: 43664 - DNA, 50 bp, Butyrivibrio crossotus; identical to SEQ ID NO: 17814
  source 1..50: mol_type = genomic DNA

SEQ ID NO: 43665 - DNA, 40 bp, Butyrivibrio crossotus
  source 1..40: mol_type = genomic DNA
aatttctagattgaaaaaaaaaaaaggatatcctcaagga

SEQ ID NO: 43666 - protein, 525 aa, Muricauda olearia
MDLEVFDQFAKKEKGRTIGKNNTAVIYTRVSSKEQFDNNASLTTQLKYCQEYAIRKELEVLEYFGGTYESAKSDERREFQRMLSYVKRRKNIGYIIVYSYDRFSRTGANGAYISEQLKKQGVAVISATQEIDVTTSAGTFQENLYHIFSHFDNQIRRDKSITGMREKLRRGHWTGSYPFGYTNTNPGKGKIPNFVISGEGRLLKQAFLWKANSNMSHVEIAKRLKDKGLDIHAKRLTDLFRNPFYCGLIVNSLIPGEVIEGKHEALISKKNFLKIHNLLHSGEPPKKYSFDDENLPLKMFVRSSACGTPYTGYIVKKKGLYYYKNRRKGSRENRSANKLHKEFLDVLGRFTMADKKYIEPLTHIIHDTLIDNNQEALEDQKRLTKELGQLKERMDTLERRYVVLNEITKSQYDLFMPELKAEQRELEMKLENGGINSSNLKKSVKLALQYACNLPKLWKLGDLETKRAIQYMVFPDGIGYDFKNKQVRTFRVNEIFGAIRSFSGNLKEIKNGNFHSMCENSRLVT

SEQ ID NO: 43667 - DNA, 50 bp, Muricauda olearia
  source 1..50: mol_type = genomic DNA
atgtgtgaaaactcccgtttagtgaccttaacaggacagaattcaaactt

SEQ ID NO: 43668 - DNA, 40 bp, Muricauda olearia
  source 1..40: mol_type = genomic DNA
aaacgtgtagtttttagtgaccgcgggaggattcgaaccc

SEQ ID NO: 43669 - DNA, 50 bp, Muricauda olearia
  source 1..50: mol_type = genomic DNA
atgtgtgaaaactcccgtttagtgggcttaacaggacagaattcaaactt

SEQ ID NO: 43670 - DNA, 40 bp, Muricauda olearia
  source 1..40: mol_type = genomic DNA
aaatgtgtatttataagtgggtgccggattatttgaagcc

SEQ ID NO: 43671 - protein, 527 aa, Bacillus mycoides
MGEEIVNYNNDKVAIYIRVSTDEQAKEGFSLQAQEDHLRQYAKAKGYEVYDVYSDEGYSGKDYNRPEIQRLFKDLSQEKFKGILVKSVDRVSRRVSDVTKLIDDVLVPRNSYIVISDANLDSSTTGGIAIIHFLATFAQLERSMIVQRVKAGMSKRAELGYWNGGHVLGYDIKNKELKVNAEEAEIIRKVFNLRAEGKGYKKIAVILNQQGFKTKRGQLFSICTIKTIVENPLYIGYCRWGRKKNRIEETSKEKIDEYNLVKGKHEPIISEGLWKKVQGVNYAHKESISKNRNFNGEFLLSGILRCPSCGAGMVMHKTKKRDGSGYHLYYMCQTFHSKGKLACKSNLIRKEEIEDKVIQCVNKIISMPSIVDKTLERIQEKREWGMERIKSDLLYINEELKRRRNRIVKLNKDYFDEKIRVETYTELSDPLRKEIDELEAEKHKLEKKIESAEVPITKEMVIRALGNFTDLYKHANYELKKSLLRAIIKKIEVQSNRTDIKQITYWFDYGNNPEDALLVSKEGRTVS

SEQ ID NO: 43672 - DNA, 50 bp, Bacillus mycoides; identical to SEQ ID NO: 14487
  source 1..50: mol_type = genomic DNA

SEQ ID NO: 43673 - DNA, 40 bp, Bacillus mycoides
  source 1..40: mol_type = genomic DNA
gtttcggattaatcgtggtgaaccgtatcataaataaatt

SEQ ID NO: 43674 - DNA, 50 bp, Bacillus mycoides
  source 1..50: mol_type = genomic DNA
ctttactagttagtaaagaggggattaccgtatcacaagtgatagtaaag

SEQ ID NO: 43675 - DNA, 40 bp, Bacillus mycoides
  source 1..40: mol_type = genomic DNA
gtgtcagatacattttggtttacagtatctaaaatatatt

SEQ ID NO: 43676 - protein, 515 aa, Bacillus mycoides
MNKKVKAGIYIRVSTEEQKQGHSLEAQESMLKEFADRKGYEIYDVYNDGGYSGKNFNRPEIQRLLRDLKDDKIDVILVWKVDRLSRNNTDVMSLIDTELTPRKKNLIITSIDMDSSSPTGHMFISLLSTFARYERATIIDRVKAGMQKRAEKGYWNGGSILGYDSVDKKLIINENESEIVREIFQLRAEGKGYKFIVNILNDKGVKTKTGKNFSIPAIKVIVNNHIYNGKMVWKKHQDWNTRRRTGKSEPIIVEGIHDAIIDEGLWTRVQKVNELQKNSFSSNRNFNGNFLLTGILKCPKCGAGTVMSKTKKRNSDDYHLYYMCQAYHNKGSSVCSANLIRKDQVEQQVLNIISLLVNENDIINALIDELNSDNNKTNESHIAHIKMLKKQLGKAYDKRKKLDNDYFEGNIEGSTYNRLMNELQLDINKLKRNVRESESEIIKNDSTINKEEVIYALENFNKLFKIVNDEEKKLLIRSLIREVQMEANRKDVKEITFWFLPSGVLPSNKVRRTVS

SEQ ID NO: 43677 - DNA, 50 bp, Bacillus mycoides
  source 1..50: mol_type = genomic DNA
ttttaccatctaataaagtgcgcagaaccgtatcacaagtgatggtaaac

SEQ ID NO: 43678 - DNA, 40 bp, Bacillus mycoides; identical to SEQ ID NO: 43673
  source 1..40: mol_type = genomic DNA

SEQ ID NO: 43679 - DNA, 50 bp, Bacillus mycoides
  source 1..50: mol_type = genomic DNA
ttttaccatctaataaagtgcgcattaccgtatcacaagtgatggtaaac

SEQ ID NO: 43680 - DNA, 40 bp, Bacillus mycoides; identical to SEQ ID NO: 43675
  source 1..40: mol_type = genomic DNA

SEQ ID NO: 43681 - protein, 500 aa, Bacillus pumilus
MKAIYVRVSTEEQAIKGSSIDSQIEACVKKAGTTNVLKYADEGFSGELLERPALNRLREDARKGLITELICYDPDRLSRKLMNQLIIDDELRKKGIVLTFVNGEYADSPEGQLFFSMRGAISEFEKAKIKERTSAGRLQKIKKGMVIKDSNLLGYRMNKEKRTLEIIEKEAKVVRMIFDLFTNHSSHFFNRVNGIALHLTKLGIPTKKGAKVWHRQVVRQILMNPTYKGKHEQYKYDTEGSYVSKQAGGTAIVKLRPEEERYVIEVPSVVSDEQWEYAQELLDKSRRKQLQYGTHQYLLSGLVRCGNCGNTMTGKKKKSHGNDFYVYECRKNYAGAKNRGCGKSMSENKLNRIVWDEIYKFITNPEKYKVYKEEEKATHKADELELIQKEIEKAKKGRQRLITLISLSEEDDLDIEEVKTQIVELQKKQNNLMIQHDKIEKEIKESEGSAAGENAMKRALDYLSSVNADNLKLEDKKAIINFIVEEIFIVDSETIHIKTH

SEQ ID NO: 43682 - DNA, 50 bp, Bacillus pumilus
  source 1..50: mol_type = genomic DNA
caccccccttttgtcattaatatctcattattaatgtcaaaaggggggtg

SEQ ID NO: 43683 - DNA, 40 bp, Bacillus pumilus
  source 1..40: mol_type = genomic DNA
gcgtaaatgcatcagaatttcattttcaatacaccgcgcc

SEQ ID NO: 43684 - DNA, 50 bp, Bacillus pumilus; identical to SEQ ID NO: 43682
  source 1..50: mol_type = genomic DNA

SEQ ID NO: 43685 - DNA, 40 bp, Bacillus pumilus; identical to SEQ ID NO: 13400
  source 1..40: mol_type = genomic DNA

SEQ ID NO: 43686 - protein, 495 aa, Bacillus pumilus
MRVSTEEQAIKGSSIDSQIEACVKKAGTTNVLKYADEGFSGELLERPALNRLREDARKGLITELICYDPDRLSRKLMNQLIIDDELRKKGIVLTFVNGEYADSPEGQLFFSMRGAISEFEKAKIKERTSAGRLQKIKKGMIIKDSNLLGYRMNKEKRTLEIIEKEAKVVRMIFDLFTNHSSHFFNRVNGIALHLTKLGIPTKKGAKVWHRQVVRQILMNPTYKGKHEQYKYDTEGSYVSKQAGGTAIVKLRPEEERYVIEVPSVVSDEQWEYAQELLDKSRRKQLQYGTHQYLLSGLVRCGNCGNTMTGKKKKSHGNDFYVYECRKNYAGAKNRGCGKSMSENKLNRIVWDEIYKFITNPEKYRVYKEEEKATHKADELELIQKEIEKAKKGRQRLITLISLSEEDDLDIEEVKTQIVELQKKQNHLMIQHDKIEKEIKESEGSAAGENAMKRALDYLSSVNADNLKLEDKKAIINFIVEEVLIVDSETIHISTH

SEQ ID NO: 43687 - DNA, 50 bp, Bacillus pumilus
  source 1..50: mol_type = genomic DNA
caccccccttttgtcattaatatctcattattaaagtcaaaaggggggtg

SEQ ID NO: 43688 - DNA, 40 bp, Bacillus pumilus; identical to SEQ ID NO: 43683
  source 1..40: mol_type = genomic DNA

SEQ ID NO: 43689 - DNA, 50 bp, Bacillus pumilus; identical to SEQ ID NO: 43687
  source 1..50: mol_type = genomic DNA

SEQ ID NO: 43690 - DNA, 40 bp, Bacillus pumilus; identical to SEQ ID NO: 13400
  source 1..40: mol_type = genomic DNA

SEQ ID NO: 43691 - protein, 491 aa, Vibrio alginolyticus
MTKAYSYIRFSTKGQIEGRSLQRQLETAREYAEENGLELQSLSFQDLGVSGFKGRNSEQGALSQFIEAVKEGTIPEGSWLLLESFDRMSRQPVEKSMRLLMELVELGITVVTLMDKQVYRRGQLDMTKLIISLVIMSRAHEESAAKSKRLADVWHAKQAVAHLKPLGTHLPAWLEYNEDKTKIQINYEKAVIVRYIFELSANGYGRSALIRKLNSQGIAPIGSRAKRWHVSYVTKLLNNTAVLGEYIPHVTDKLGQRVPTGEVIENYYPPIIEKDLWLRAKAAAQSRKIRGTGAIRRGHTRNILSGMVSCECGSSMQFVNKGSSDKGGYYLVCSTARHGAGCQYIGHRYYSIQWVVLIALQKLLHTFANKADNHEKEMLLEGELVELDRKLNNLINDLEENGASKYISSAIRKTEQRVDIVKNELLMLQSSKAVENDEVDLQEITLRLNENFERLRLHQYLKRHIANIVVYKNKERLERLCCVIQTRNQTS

SEQ ID NO: 43692 - DNA, 50 bp, Vibrio alginolyticus
  source 1..50: mol_type = genomic DNA
ataggtcttttaggttccaaaagtaggaatcttagatataatagacccac

SEQ ID NO: 43693 - DNA, 40 bp, Vibrio alginolyticus
  source 1..40: mol_type = genomic DNA
acctggcgggccaagaaaaagtaagttgtggtttccagcg

SEQ ID NO: 43694 - DNA, 50 bp, Vibrio alginolyticus
  source 1..50: mol_type = genomic DNA
ataggtcttttaggttccaaaagtgggaatcttagatataatagacccac

SEQ ID NO: 43695 - DNA, 40 bp, Vibrio alginolyticus
  source 1..40: mol_type = genomic DNA
acctgccgtgccaacaaaaggtaagaatttcttaccagtg

SEQ ID NO: 43696 - protein, 515 aa, Vibrio alginolyticus
MTKAYSYIRFSTKGQIEGRSLQRQLETARKYAEENGLELQSLSFQDLGVSGFKGRNSEQGALSQFIEAVKEGTIPEGSWLLLESFDRMSRQPVEKSMRLLMELVELGITVVTLMDKQVYRRGQLDMTKLIISLVIMSRAHEESAAKSKRLADVWHAKQAVAHLKPLGTHLPAWLEYNEDKTKIQINYEKAVVVRYIFELSANGYGRSALIRKLNSQGIAPIGSRAKRWHLSYVTKLLNNTAVLGEYIPHVTDKLGQRVPTGEVIENYYPPIIEKDLWLRAKAAAQSRKIRGTGAIRRGHTRNILSGMVSCECGSSMQFVNKGSSDKGGYYLVCSTARHGAGCQYIGHRYYSVQWVVLIALQKLLHTFANKTDNHEKEMQLEGELVELDRKLNNLINDLEENGSSNYISAAIRKTEQRMDIVKNELLILQSSKAVENDEVDLQEITLRLNENFERLRLHQYLKRHIANIVVYKNKERLEISLKTGEDITLTFNTSDSLWQTNTGISFRVTFDTRWG

SEQ ID NO: 43697 - DNA, 50 bp, Vibrio alginolyticus
  source 1..50: mol_type = genomic DNA
ataggtcttttaggttccaaaagtagaaatcttagatataatagacccac

SEQ ID NO: 43698 - DNA, 40 bp, Vibrio alginolyticus; identical to SEQ ID NO: 43693
  source 1..40: mol_type = genomic DNA

SEQ ID NO: 43699 - DNA, 50 bp, Vibrio alginolyticus
  source 1..50: mol_type = genomic DNA
ataggtcttttaggttccaaaagtggaaatcttagatataatagacccac

SEQ ID NO: 43700 - DNA, 40 bp, Vibrio alginolyticus; identical to SEQ ID NO: 43695
  source 1..40: mol_type = genomic DNA

SEQ ID NO: 43701 - protein, 501 aa, Eggerthella lenta
MRRRIDPNGRYCAYLRKSRDDRDERGNVMTVEETLRKHESWIVELAIRHGIRVEKWYREVVSAETIDARPEVQQVLRELAEGKWDGVLCVDVQRLARGDTKDQGIMCEFLEVSGALVITTDGYFDTTDEADMDYLEYGLFRSRQEYKAINKILKRGRKRSKLDGNWPFSIAPYGYVKVRDEIGPTLAHGDCAKYVVIVDELSAQGLSFGSIARRMVEIGAPGEWSATKVRRIVTNEAYLGRTPVEKFVVVKRMKADGSGLEKVSIPVKDPQYRPGRHDPIVTQELFDAANANRCNPSLKKSNELRNPLASLLVCSGCGFAMRMIKDSKTGMFRYYHSMKPNGCSVKSCGYDLMMDAVIAELKRRIDDSRVEVRQRSDRSAEREIAAMKESLSVVDRSLASLLDRLMREVVTEDEYMAMKRKLSDEKQSLEATLAAAEADRERETSIEHRNVTIHQAIDILRSDATAGEANAFLRTFIERIEYSNDGVGLNVHNIKLDIFFK

SEQ ID NO: 43702 - DNA, 50 bp, Eggerthella lenta
  source 1..50: mol_type = genomic DNA
gacatgcatcatattacagctatctcaactgttgtaacaggatgcatgta

SEQ ID NO: 43703 - DNA, 40 bp, Eggerthella lenta
  source 1..40: mol_type = genomic DNA
ctcgctcatgtcggccgtctcaaacattgtcatcaccgtt

SEQ ID NO: 43704 - DNA, 50 bp, Eggerthella lenta
  source 1..50: mol_type = genomic DNA
gacatgcatcatattacagctatcataactgttgtaacaggatgcatgta

SEQ ID NO: 43705 - DNA, 40 bp, Eggerthella lenta
  source 1..40: mol_type = genomic DNA
ctcactcatgaatgtggacataaacattgttatcaaagtt

SEQ ID NO: 43706 - protein, 549 aa, Blautia faecis
MKKTKTKCYLYTRVSTSMQVDGYSLDAQRDKLRKYAEYEDMVVAGEYSDEGFSGKNIQGRHEFQRMLQDIQDGKDGVEYVLVFKLSRFGRNAADVLNSLQLMQDFGVNLICVEDGIDSSKDSGKLMISVLSAVAEIERENIRTQTMAGREQKAREGKWNGGFAPYGYRLEKGELLIAEDEVDVIRTIFDRYIHTNDGVSGVAKYLNRQGFVKKLRQNGTIPGFSASFVKSIIDNPVYMGKIAYGRRRTEKKIGTRNEMHVVEQSEFPVYEGKHEAIISEEDWNLAQEKRKVNAYRREKVNDPTHAHILSGILKCPCCGKSLYGNIAKAHSKDKKTRYYYYCKNTVTPTGHECTFRLNIEQTEMNRMVASIISAMVSDPRFADAIKAKIGSAVDTNDLEKQLEALQAQLRQTLGTKARLERQMDGLDVNDPYYDRKISDLQRRYDEQYGRIDEIEVQIDDVQSQIRSIRQEKISGDNIYRLLLAFDQVYEAASEVERKEFMRAFIERIELFPEKQPDGNWIRKIIFNFPVPVNGTEVTELPLENETTVET

SEQ ID NO: 43707 - DNA, 50 bp, Blautia faecis
  source 1..50: mol_type = genomic DNA
cccttggaaaatgaaacaacagtcgagacggttgttttgctttccaaggg

SEQ ID NO: 43708 - DNA, 40 bp, Blautia faecis
  source 1..40: mol_type = genomic DNA
ttgtgagacggtgcatgtcgagacggtatgtttattgtcc

SEQ ID NO: 43709 - DNA, 50 bp, Blautia faecis
  source 1..50: mol_type = genomic DNA
cccttggaaaatgaaacaacagtccagacggttgttttgctttccaaggg

SEQ ID NO: 43710 - DNA, 40 bp, Blautia faecis
  source 1..40: mol_type = genomic DNA
gtgagccaccgtgcctggccagactgtatctttattatcc

SEQ ID NO: 43711 - protein, 477 aa, Streptomyces olivaceus; identical to SEQ ID NO: 35656

SEQ ID NO: 43712 - DNA, 50 bp, Streptomyces olivaceus; identical to SEQ ID NO: 35657
  source 1..50: mol_type = genomic DNA

SEQ ID NO: 43713 - DNA, 40 bp, Streptomyces olivaceus
  source 1..40: mol_type = genomic DNA
gccgtacgacgggcggcaggacactccacgggaagttgat

SEQ ID NO: 43714 - DNA, 50 bp, Streptomyces olivaceus
  source 1..50: mol_type = genomic DNA
ccccgacttatgtactggaggcaacccgctctagctgacttgactcgatg

SEQ ID NO: 43715 - DNA, 40 bp, Streptomyces olivaceus
  source 1..40: mol_type = genomic DNA
gccatgaggcaggggtcagcccactgcacgggaagatggt

SEQ ID NO: 43716 - protein, 587 aa, Klebsiella oxytoca; identical to SEQ ID NO: 24196

SEQ ID NO: 43717 - DNA, 50 bp, Klebsiella oxytoca; identical to SEQ ID NO: 17412
  source 1..50: mol_type = genomic DNA

SEQ ID NO: 43718 - DNA, 40 bp, Klebsiella oxytoca; identical to SEQ ID NO: 34153
  source 1..40: mol_type = genomic DNA

SEQ ID NO: 43719 - DNA, 50 bp, Klebsiella oxytoca; identical to SEQ ID NO: 17414
  source 1..50: mol_type = genomic DNA

SEQ ID NO: 43720 - DNA, 40 bp, Klebsiella oxytoca
  source 1..40: mol_type = genomic DNA
tcagtccattagtttgttatagcagccaaaacagaccaag

SEQ ID NO: 43721 - protein, 587 aa, Klebsiella oxytoca; identical to SEQ ID NO: 17391

SEQ ID NO: 43722 - DNA, 50 bp, Klebsiella oxytoca; identical to SEQ ID NO: 17392
  source 1..50: mol_type = genomic DNA

SEQ ID NO: 43723 - DNA, 40 bp, Klebsiella oxytoca
  source 1..40: mol_type = genomic DNA
tgagtccacgaggtttttcgggcagcccagagagacaaag

SEQ ID NO: 43724 - DNA, 50 bp, Klebsiella oxytoca; identical to SEQ ID NO: 17394
  source 1..50: mol_type = genomic DNA

SEQ ID NO: 43725 - DNA, 40 bp, Klebsiella oxytoca; identical to SEQ ID NO: 43720
  source 1..40: mol_type = genomic DNA

SEQ ID NO: 43726 - protein, 587 aa, Klebsiella oxytoca; identical to SEQ ID NO: 17381

SEQ ID NO: 43727 - DNA, 50 bp, Klebsiella oxytoca; identical to SEQ ID NO: 17382
  source 1..50: mol_type = genomic DNA

SEQ ID NO: 43728 - DNA, 40 bp, Klebsiella oxytoca; identical to SEQ ID NO: 43723
  source 1..40: mol_type = genomic DNA

SEQ ID NO: 43729 - DNA, 50 bp, Klebsiella oxytoca; identical to SEQ ID NO: 17384
  source 1..50: mol_type = genomic DNA

SEQ ID NO: 43730 - DNA, 40 bp, Klebsiella oxytoca; identical to SEQ ID NO: 43720
  source 1..40: mol_type = genomic DNA

SEQ ID NO: 43731 - protein, 475 aa, Klebsiella michiganensis
MPQLYSYIRWSSERQQKGTTRQRQVIGAKEFAIANGLELVEIEDPGVSAFRGKNTTHGKLGDFIDAVRQGAIPPDSWLYVENLDRLTRQEVTTAQKLFIELLDLGLTLVTGMDKRVYTLESVNKNPTDLMISLLLFSRANEESKTKQARTIGNVESLIERHRQGLPVNIKSCGKHPFWIDDSGSQYESVKRHAIYWEIAREAIELFLSGYGIYKVKRFLDEKYPNGLNGKEWGYQVLKKMRESRALIGERQINIGSHTYTLRDYYPCLCKNEVEFLHLQELKGQNSYKSKKNPLKEQIKLLSGLAILRCSKCGGTMSSFMNKGKPRYICLNGRHLQKGCVGWSLTAPLVDHCVIIALLMGYMDANRKERQDTSDISALIEAKNTSVGELNVSITNLVAVIEAGVNVSELASRLKVLSTERETFLKEIERLKERKALIDSKGSFEVSMMDFINLIHWNVLSDYAHESRDKIRDVAP

SEQ ID NO: 43732 - DNA, 50 bp, Klebsiella michiganensis; identical to SEQ ID NO: 17392
  source 1..50: mol_type = genomic DNA

SEQ ID NO: 43733 - DNA, 40 bp, Klebsiella michiganensis; identical to SEQ ID NO: 43723
  source 1..40: mol_type = genomic DNA

SEQ ID NO: 43734 - DNA, 50 bp, Klebsiella michiganensis; identical to SEQ ID NO: 17394
  source 1..50: mol_type = genomic DNA

SEQ ID NO: 43735 - DNA, 40 bp, Klebsiella michiganensis; identical to SEQ ID NO: 43720
  source 1..40: mol_type = genomic DNA

SEQ ID NO: 43736 - protein, 587 aa, Klebsiella michiganensis; identical to SEQ ID NO: 24196

SEQ ID NO: 43737 - DNA, 50 bp, Klebsiella michiganensis; identical to SEQ ID NO: 17412
  source 1..50: mol_type = genomic DNA

SEQ ID NO: 43738 - DNA, 40 bp, Klebsiella michiganensis; identical to SEQ ID NO: 43723
  source 1..40: mol_type = genomic DNA

SEQ ID NO: 43739 - DNA, 50 bp, Klebsiella michiganensis; identical to SEQ ID NO: 17414
  source 1..50: mol_type = genomic DNA

SEQ ID NO: 43740 - DNA, 40 bp, Klebsiella michiganensis; identical to SEQ ID NO: 43720
  source 1..40: mol_type = genomic DNA

SEQ ID NO: 43741 - protein, 587 aa, Klebsiella oxytoca; identical to SEQ ID NO: 17381

SEQ ID NO: 43742 - DNA, 50 bp, Klebsiella oxytoca; identical to SEQ ID NO: 17382
  source 1..50: mol_type = genomic DNA

SEQ ID NO: 43743 - DNA, 40 bp, Klebsiella oxytoca; identical to SEQ ID NO: 34153
  source 1..40: mol_type = genomic DNA

SEQ ID NO: 43744 - DNA, 50 bp, Klebsiella oxytoca; identical to SEQ ID NO: 17384
  source 1..50: mol_type = genomic DNA

SEQ ID NO: 43745 - DNA, 40 bp, Klebsiella oxytoca; identical to SEQ ID NO: 43720
  source 1..40: mol_type = genomic DNA

SEQ ID NO: 43746 - protein, 587 aa, Klebsiella oxytoca; identical to SEQ ID NO: 17391

SEQ ID NO: 43747 - DNA, 50 bp, Klebsiella oxytoca; identical to SEQ ID NO: 17392
  source 1..50: mol_type = genomic DNA

SEQ ID NO: 43748 - DNA, 40 bp, Klebsiella oxytoca; identical to SEQ ID NO: 34153
  source 1..40: mol_type = genomic DNA

SEQ ID NO: 43749 - DNA, 50 bp, Klebsiella oxytoca; identical to SEQ ID NO: 17394
  source 1..50: mol_type = genomic DNA

SEQ ID NO: 43750 - DNA, 40 bp, Klebsiella oxytoca; identical to SEQ ID NO: 43720
  source 1..40: mol_type = genomic DNA

SEQ ID NO: 43751 - protein, 586 aa, Microbacterium sp BH-3-3-3
MSSDLEPRTAQGRRRTSFAGWESLLGLDGSAPPEFDLGIQGQAVLYLRVSTQRQMFTAIDIDADGNSIATQREACLVRAKRVKAPVIKEFVEPGNSAQTIAKRPVFRELLQYVEEHPEISYVVIYMRSRAFRNSGDAAITKRILAGMGVKLISAKEDFGDGYMAEAMEAVTDIMNEVQVRQSGEDIKQKLLNKAKNGGTVGRAKLGYINDRRDFDGRLVNTIGIDEARAPLIRWAFEQYATGDYSTTKLAALLAEQGLTTRKSSKWPERPLSRSQLGLILRDPYYLGMVTFKGHVYPGRHEALVTPALFDRVQQVIDARVKRGQRDRVHNHFARGMLHCGRCHDAGREHRLIFAEAKNHANQIYEYFLCRGRQDGLCDLPYLPTAELERALTREFASLRLSPEAIDEAKREVQAALDHVLSRHAEQRARLQKELKKLDVQEERLVDLASDGALATDKLRLRLRDLQIKKHEVRASLDTTTESLQQHTEMVLSYLDLMARPDALFTAATGAVKRKLLAAFFSRIWVDDDGHLPQVAREFQSLVTDIRDAVLTSPANTKSVGENSDASDSERLDLYLKVICSSKTSLV

SEQ ID NO: 43752 - DNA, 50 bp, Microbacterium sp BH-3-3-3
  source 1..50: mol_type = genomic DNA
atttgttcgagtaaaactagtttggtaggcccagtacgccgcaactcgaa

SEQ ID NO: 43753 - DNA, 40 bp, Microbacterium sp BH-3-3-3
  source 1..40: mol_type = genomic DNA
cacgattccgggggctgacgtagcgggagcggggcttgaa

SEQ ID NO: 43754 - DNA, 50 bp, Microbacterium sp BH-3-3-3
  source 1..50: mol_type = genomic DNA
atttgttcgagtaaaactagtttgagaggcccagtacgccgcaactcgaa

SEQ ID NO: 43755 - DNA, 40 bp, Microbacterium sp BH-3-3-3
  source 1..40: mol_type = genomic DNA
caaggtgccgggagatggcagcgcggcagccgggcctgaa

SEQ ID NO: 43756 - protein, 434 aa, Butyricicoccus pullicaecorum
MTIEGYGPYQIASKLKSEKVLIPSAYLAQHGEGVNKNKTFKDVYGWGSSTICNILEKREYLGHTINFKTRKHFKDKKSHYVPEDEWTIFENTHEPIIDQQTFDLVQKIRGNVRRYPDGWGEAAPLTGLLYCADCGGKMYVHRTNNGKRISQYTCSQYSKVPVGKLCTTQHRINEDVVLSLVSEMLKAIAEYAKHDRAEFVRVVQEAQSSQQTAEVKKQRIRLATAKQRVSELEVLLCKIYEDNILGKLSDSRYATLDAQYEKEQSELTAEISALEKAVKSYEKHEKDADRFIALIDKYENFDKLTIAMLNEFIEKILVHERDRKGSIQTTQEVEIYFNFVGRFVPPAFGEVELTPEELEEIRKREERKDRLHQNYLKRKASGAQKRYEDKIKGRKKAEIEAKKAAIRAEDIAKGVFVPVSSLPQREPQKGAQIA

SEQ ID NO: 43757 - DNA, 50 bp, Butyricicoccus pullicaecorum
  source 1..50: mol_type = genomic DNA
ccccgctgcgaaacttatttaacgagtattacgccagagacaccagccgt

SEQ ID NO: 43758 - DNA, 40 bp, Butyricicoccus pullicaecorum
  source 1..40: mol_type = genomic DNA
gaataacctctgttcaacgaatggctggtgagagatacga

SEQ ID NO: 43759 - DNA, 50 bp, Butyricicoccus pullicaecorum
  source 1..50: mol_type = genomic DNA
ccccgctgcgaaacttatttaacggatattacgccagagacaccagccgt

SEQ ID NO: 43760 - DNA, 40 bp, Butyricicoccus pullicaecorum
  source 1..40: mol_type = genomic DNA
cagtaacctctgtacaaaggatggcaagacagagttacaa

SEQ ID NO: 43761 - protein, 553 aa, Vibrio hepatarius
MTTIAYSYTRLSTEKQLKGHGEERQRKAIEQACLEHGWTLSEQTFSDLGVSAWKGLNRQSGALSEFLTLARNGSIEAGSVLIVENGDRLSREGVQKALRLLLELLDLGVHVYTLSDNKLYTDDGQNAMLDLMQWMMVAQRAYEESAMKSVRILAVKDKAKELMRQGVIVTRKCPAWLHVSADKSHFELIDERVKVVQMVFKLYSEGYSTKPIALKLNEQGIPYWGSSKTWTYITVRNLLKNRAVIGELQPLKRLNGKDVPDGEVIKDYYPSIISKELYARCLTLRTSKATSSGRLSNNAMANLFRGLLKCQCGSGMALNSSIVKGKRYSSLRCSQLRSADCKSKNWHYGNVESIVMIALHNIDWELNSTQDSAQSIRDLEQRIELTKAELVDVQKMAESAEEALLLAPSSARLAKRLAECETREAELERLVESLNQELTTEKAKSLVRENELETIQQVLEDVANDDGARFKANALLNRKLKSITFSQADSYYTQQLTEFSNTPMHGVITIELNNGKLIEIEVCEGYRSSFVREDDGSFTEIELDINRYQRRVS

SEQ ID NO: 43762 - DNA, 50 bp, Vibrio hepatarius
  source 1..50: mol_type = genomic DNA
gtttgggtaattgaattaataactaaagttctatatcgtattccctgaac

SEQ ID NO: 43763 - DNA, 40 bp, Vibrio hepatarius
  source 1..40: mol_type = genomic DNA
gttcggttggcatgtggtgaaagtgctctatcgcacatag

SEQ ID NO: 43764 - DNA, 50 bp, Vibrio hepatarius; identical to SEQ ID NO: 43762
  source 1..50: mol_type = genomic DNA

SEQ ID NO: 43765 - DNA, 40 bp, Vibrio hepatarius
  source 1..40: mol_type = genomic DNA
gttgggtttgcttctggggaatgtgccctaaggcacatat

SEQ ID NO: 43766 - protein, 544 aa, Brucella intermedia
MKIQSPYVAQRAALYLRVSTMRQAEHDVSIPDQRKQGEAYCTSRGYQLVETFVEAGASATNDRRPEFQRMIEAGTSKPAPFDVVVVHSFSRFFRDHFELEFYVRKLAKNGVKLVSITQEMGDDPMHVMMRQIMALFDEYQSKENAKHVLRAMNENARQGFWNGARPPIGYRVVAAEQRGSKIKKKLEIDPLHAETVRLIYRLFLEGSGTSGPKGVKAIATYLNERRMFTRDGGKWGLAQIHAILTRTTYIGEHRFNTRSFKNREKKPENEVSIMAVPPLIERKTFDAVQARLKSRNPMRVPARVTSGPTLLTGICFCAKCGGAMTLRTGRGNGGQYTYYTCSTKARQGKDGCEGRSIRMDKLDHLVARHLEERLLQPKRLETILSSLLDRRQERAERRREHLADLNRRITETDQRLGRLYDAIESGVAALDDMGLKDRIANLKAIRDQAAADAERIRSTLDSSGHRTVTPDMIDALSETARSSLRIEGGGYRRDHLRAFAQRVEVADDEVRIMGRKSDLLQSLVTASSGESAAFAVRSSVLKWR

SEQ ID NO: 43767 - DNA, 50 bp, Brucella intermedia
  source 1..50: mol_type = genomic DNA
ttcgcagttctgtactgaaatggcgcgccgcgccgggtgaagatgagaac

SEQ ID NO: 43768 - DNA, 40 bp, Brucella intermedia
  source 1..40: mol_type = genomic DNA
caaccagtaagggaatggcgcacccgaaaggattcgaacc

SEQ ID NO: 43769 - DNA, 50 bp, Brucella intermedia
  source 1..50: mol_type = genomic DNA
ttcgcagttctgtactgaaatggcgagccgcgccgggtgaagatgagaac

SEQ ID NO: 43770 - DNA, 40 bp, Brucella intermedia
  source 1..40: mol_type = genomic DNA
tgacccttaggggaatggagaaccacaaaggattctaaac

SEQ ID NO: 43771 - protein, 482 aa, Streptococcus dysgalactiae; identical to SEQ ID NO: 2446

SEQ ID NO: 43772 - DNA, 50 bp, Streptococcus dysgalactiae; identical to SEQ ID NO: 2447
  source 1..50: mol_type = genomic DNA

SEQ ID NO: 43773 - DNA, 40 bp, Streptococcus dysgalactiae
  source 1..40: mol_type = genomic DNA
ggaggaaactcttatcatttcgaacaacgttatagtcgca

SEQ ID NO: 43774 - DNA, 50 bp, Streptococcus dysgalactiae
  source 1..50: mol_type = genomic DNA
ctaagaattttactatcctacatcgtaatgaaagatactaaaattcctag

SEQ ID NO: 43775 - DNA, 40 bp, Streptococcus dysgalactiae
  source 1..40: mol_type = genomic DNA
ggggggaactttgatcattgtcaaatatgtgacagtcgca

SEQ ID NO: 43776 - protein, 638 aa, Enterobacter hormaechei
MKPKLYSYVRFSSVKQREGNSLERQQDTALKIAARYNLELDTTAFHDLGMSAFKGKNAHEGKLSEFIKQIGAKVPVGSWLVVENLDRISRDDAWSALDIFKNILSRGIVVVTGMDEKVYKYADVKNNPTDLIISLLMFTRAHDESLTKKNRVEAQARSLIRHNLTRESGTPAKAIESVGQNVWWVDTKSGYVTPHPLYFTAAQKIIELKQNGETLLGIQRYLNEHYPAPKKRVYKDQTGQALTPKTEQWGKHLIRTFLNPTVHGQKTFTLDKRDESGVIMYDSESDEPLKETFIIPDYYPALMSEVDYLTLSKLDRHRAITRNSSKYPAGNPEPEIPLLSGIGILFCGKCGSFMFKSGSSENKYRYICGSKIVQGKPCGKKGFTSYQLEHTVLQLIADHVWNNHQEDKTAWYESEIEKASEAVKKLLKLATLTDDLEELADQINANKQKKITLEREYQQYKISRSEIQTTGWDQFRNFDVHDTKNPDRKRIRLKIKQAIKRIDCYDIDGRYGHFEVTFADETKQRIVIKFNRNRSPGVSYVEAQTVNDHDLLKMQGLVLHSFIDELISPEKFAQHIKDKHEVSILNPTFITKLEDGVNQSEGNGLAIKVASTTSKSYATVNGIKYEINSLEDLEKLLQ

SEQ ID NO: 43777 - DNA, 50 bp, Enterobacter hormaechei
  source 1..50: mol_type = genomic DNA
actatgaataattgactattaggtttgcctaacatataattattcactgt

SEQ ID NO: 43778 - DNA, 40 bp, Enterobacter hormaechei
  source 1..40: mol_type = genomic DNA
gcagcgggtattggcaggcttgcccgccggcatgcctgga

SEQ ID NO: 43779 - DNA, 50 bp, Enterobacter hormaechei
  source 1..50: mol_type = genomic DNA
actatgaataattgactattaggttggcctaacatataattattcactgt

SEQ ID NO: 43780 - DNA, 40 bp, Enterobacter hormaechei
  source 1..40: mol_type = genomic DNA
ggggtggggatgggctggctggccagccggcctggctggg

SEQ ID NO: 43781 - protein, 548 aa, Rhodopseudomonas palustris
MNKHVFRNSVSGQPDAAKRVATYYRVSTGRQFSNEASIPSQRKITAGFCDQNGYFVAEEFVEAKTATDDRRPVLQDMIERACAPDHPYDAIVFYAFNRFFRNVAEMELTIRKLRKHGVEVVSVTQPTGDDPSQILVRQIIGAFDEHTSREISKNTTRAMRESAKQGFWNGATPPLGLQIVEAERRGQKIKKKLDINVVEAETVRLIFKLYLEGDGNTGPLGVKETTKWLNGQGYRTRRGATFGVGPVHKILTNACYATGQWPYGVRSSRDRSKHDPSTVIYIPVPILIEQAYFDRVQAKLAHNNPKTTPPRVVNGPSLLTGIAVCASCSSGMTRTGTTNRQGRSYSYYSCAGCQQKGKSVCKGRHIPAATLDEIVLTNLKQRVLAPDRIADLLKFLMERQAAKSESADGRLLGLQKELTDCEDRMKRLYRSIEDGIVELDDILRERTAALKAQRERAKAALDHARAQCGVAAAVNAEKIDAFARLMNAKLDAGDTNTRKSYIRSIVDAVEVDDHAIRIIGSRDILQAAIVGKQTENGNVRGFVRKWRA

SEQ ID NO: 43782 - DNA, 50 bp, Rhodopseudomonas palustris
  source 1..50: mol_type = genomic DNA
ttcgtggttttgtacgcaaatggcgcgccatccagaataaaactacgaac

SEQ ID NO: 43783 - DNA, 40 bp, Rhodopseudomonas palustris
  source 1..40: mol_type = genomic DNA
cgggaaaattcgaaatggcgcgcccgaaaggattcgaacc

SEQ ID NO: 43784 - DNA, 50 bp, Rhodopseudomonas palustris
  source 1..50: mol_type = genomic DNA
ttcgtggttttgtacgcaaatggcgtgccatccagaataaaactacgaac

SEQ ID NO: 43785 - DNA, 40 bp, Rhodopseudomonas palustris
  source 1..40: mol_type = genomic DNA
gccaataatttgaaatggtgtgcccgaatggatacgaccc

SEQ ID NO: 43786 - protein, 572 aa, Streptomyces griseus
MTASMQVSAENPRHSSARMTSTTALRGVSALRLSVLTDETTSPERQRDANQAAAAALSIDLGDREAVDLGVSASKTTPFERPELGAWLRRPDDFDALCFWRFDRAVRSMDDMHELAKWARENRKMIVFAEGPGGRLVLDFRNPLDPMAQLMVTLFAFAAQMEAQAIRERVTSAQAAMRVMPLRWRGSRPPYGFTPAPLEKGGWTLVQDTETDEQTGPAPVVVIERIIKELMDGKSAVAVAQGLNESGIPSPRDYWALKKGRATGGKTGGKAGETTTRDRFTWRHNAIKELLTSERMLGWKVTGGKPVRDSDGAPIMATTDPILTREEFDAVGALFAERSVGNKKVFRSDSVSLLLRVILCDGCGQRMYMHVPSSTNKGTSKTETYKCGSYTRGHSCAAPASIKRQWADEYAAQEFLRTVGSLRLTHTKMIPGYDPQPEIDATAAEYASHMESEGTQTNPVTRTIWEKRRDALDKRITELMGREKVEPRRDIIQLDRTFGDEWHSADTASKREMLVNAGVEIRVKKAKRGKVFRLDEGRVNFRFTEPFFEEAADAMRGIESEFAHLGSAPATV

SEQ ID NO: 43787 - DNA, 50 bp, Streptomyces griseus
  source 1..50: mol_type = genomic DNA
aagtagaagttacgagccttcgggtttccgaaggttcacaacttgtactt

SEQ ID NO: 43788 - DNA, 40 bp, Streptomyces griseus
  source 1..40: mol_type = genomic DNA
cgaggggtgcccgtacgggttgtccgcgccgcaggagatc

SEQ ID NO: 43789 - DNA, 50 bp, Streptomyces griseus
  source 1..50: mol_type = genomic DNA
aagtagaagttacgagccttcgggaatccgaaggttcacaacttgtactt

SEQ ID NO: 43790 - DNA, 40 bp, Streptomyces griseus
  source 1..40: mol_type = genomic DNA
cgaggggtgcccgtgcgggaagcccccgccccagctccct

SEQ ID NO: 43791 - protein, 587 aa, Streptococcus dysgalactiae
MKKEVKVIKGDTTLKRTASGCVERSIKRVAAYCRVSTDTEDQINSYNSQVEHYTEFIQKNNEWTLAGIYADEAITGTQVDRRIDFQRLINDCMNGDIDMIITKSISRFARNTLDTLKYVRKLKEFNVAVFFEEENINTLTMDGELLLTILSSVAQQEVENISANVKKGLRMKMERGEMVGFQGCLGYDYDPETKSISINEKEAEIVRYIFRRYIEGVGGMVISRELEEQGYLSPRGNKRWTETTVLGIIKNEKYKGDLMMGKTYTVDPISKRRLDNFGEQDKFYIENHHEPIISEEDFEKAQGIRLRRSKNRNTVANNGGKREKYSRKYAFSSMLECGFCGYNLSRRNWHSSSEYTKVIWQCVNATKNGKKYCPHSKGIEEEAIEKAFMESYRQVCHNNVEITNEFLKTVEEELKDNSLSKDLKKISNQLDKILKKEKDLVELRLNESISMDIYQDKYNEIAISKEKLLAEKRTLEVTLTDEKALKKRLEGFKKLLESNKYLEEFDRAVFESIVDKIIIGGTNDEGEIDPAMITIIYKTGKKDSQDGRLFKSRRKNAKEVNEKADSKLYPQSSDEVNNLYSYPIDNT

SEQ ID NO: 43792 - DNA, 50 bp, Streptococcus dysgalactiae; identical to SEQ ID NO: 1792
  source 1..50: mol_type = genomic DNA

SEQ ID NO: 43793 - DNA, 40 bp, Streptococcus dysgalactiae
  source 1..40: mol_type = genomic DNA
gtgttttacccctcaacccaacttgtttaaaggcatacaa

SEQ ID NO: 43794 - DNA, 50 bp, Streptococcus dysgalactiae
  source 1..50: mol_type = genomic DNA
gtattcctatcctattgacaacaccagtggagtgcatagcgttgatacaa

SEQ ID NO: 43795 - DNA, 40 bp, Streptococcus dysgalactiae
  source 1..40: mol_type = genomic DNA
tagttttacccctcaataccaatgttttaatggcattaaa

SEQ ID NO: 43796 - protein, 607 aa, Streptococcus dysgalactiae; identical to SEQ ID NO: 10731

SEQ ID NO: 43797 - DNA, 50 bp, Streptococcus dysgalactiae; identical to SEQ ID NO: 1792
  source 1..50: mol_type = genomic DNA

SEQ ID NO: 43798 - DNA, 40 bp, Streptococcus dysgalactiae; identical to SEQ ID NO: 43793
  source 1..40: mol_type = genomic DNA

SEQ ID NO: 43799 - DNA, 50 bp, Streptococcus dysgalactiae; identical to SEQ ID NO: 43794
  source 1..50: mol_type = genomic DNA

SEQ ID NO: 43800 - DNA, 40 bp, Streptococcus dysgalactiae; identical to SEQ ID NO: 43795
  source 1..40: mol_type = genomic DNA

SEQ ID NO: 43801 - protein, 550 aa, Streptococcus dysgalactiae
MSKEKIKVYLYTRVSTSIQIEGYSLEAQKSRMKAFAIYNEYEIVGEYEDAGKSGRSIEGRIQFNRMMEDIKSGKDGVSFVLVFKLARFARNAADVLSTLQIMQDYGVNLICVDDGIDSSKDAGKLMISVLSAVAEIERENIRIQTMEGRIQKAREGKWNGGFAPYGYKLEDGKLFINEEEAVAIRTIFDQYVNTTIGANGLSKYLENHGIRKIPRQNGKNPLFDAGLIRKILKNPVYNGKIAFGRRTLEKVHGTRNEYKQVEQDEYLISEGIHEAIVSDEVWQAAQVKLKSQAKKYEHVNKGKDTRTHLLSGIVKCPICGVGMFGNKCTKKKKDGTKYKDFYYYGCKHRQMIRGHKCTFSKQIREELLDDAVAEVIVKIVSNPKFASMMQEKINMKVDTSEIEKEIDNYQKELRKSHSTKFRLIEEIDNLDAEDKHYKRRKQDLDDRLYRMYDKIDELESSLIDAKAKKQTIEAEKLTGDNIYKVLIYFDKLYKVMNDVERRQLITALISEIQVYEEKQPNGQWLKSITFKLPIIDDDLNISLDNNEQVE

SEQ ID NO: 43802 - DNA, 50 bp, Streptococcus dysgalactiae
  source 1..50: mol_type = genomic DNA
aagtttggacaataatgaacaagttgagtgtatagcgttgatacaaagag

SEQ ID NO: 43803 - DNA, 40 bp, Streptococcus dysgalactiae
  source 1..40: mol_type = genomic DNA
ttccacagacgcatcatgtggagtgcgtagtgttgctaca

SEQ ID NO: 43804 - DNA, 50 bp, Streptococcus dysgalactiae
  source 1..50: mol_type = genomic DNA
aagtttggacaataatgaacaagtcaagtgtatagcgttgatacaaagag

SEQ ID NO: 43805 - DNA, 40 bp, Streptococcus dysgalactiae
  source 1..40: mol_type = genomic DNA
ttccactgaagcattctttcatgtgggtcctgttcctaca

SEQ ID NO: 43806 - protein, 551 aa, Streptococcus dysgalactiae; identical to SEQ ID NO: 38046

SEQ ID NO: 43807 - DNA, 50 bp, Streptococcus dysgalactiae; identical to SEQ ID NO: 38047
  source 1..50: mol_type = genomic DNA

SEQ ID NO: 43808 - DNA, 40 bp, Streptococcus dysgalactiae; identical to SEQ ID NO: 43803
  source 1..40: mol_type = genomic DNA

SEQ ID NO: 43809 - DNA, 50 bp, Streptococcus dysgalactiae; identical to SEQ ID NO: 38049
  source 1..50: mol_type = genomic DNA

SEQ ID NO: 43810 - DNA, 40 bp, Streptococcus dysgalactiae; identical to SEQ ID NO: 43805
  source 1..40: mol_type = genomic DNA

SEQ ID NO: 43811 - protein, 512 aa, Clostridium beijerinckii
MKKIAIYTRKSRLTDTGDSIGTQIKLVKDYFRNQECEFEVFEDEGFSGGNTNRPAFQLMMEKIKRREFDTIAVYKIDRIARNIIDFFKIFETLEKENVSLVSISEGFDPNTPGGRITMTLIAGIAEMERMNIKQRVKDNMIELAKRGNWTGGNLPLGYESVRVNKNGKEFSYLKIKDDEKEIIEDIYNLFIEGYSIRKIAKIIEEKHNIYNNANRVSNILYSPIYASSCDTINKFLELKGYKIFGTANGNGYLTYQKSSFKNGKLKSDIDNKAIAAISKHEAIISSDIWLKVQERLKEVTVDPSPRSSQYTFLSKLVKCGYCKTNMRVYEGISYSGEPYRYFRKKCTCDHGNKKGSRLRSEKAEKAVLEILKSIHSSGVEELINKNLENSNEKDNSQKIKKELSKTDKMINNLTDKLALANENIIETLMNRIDDLVNKKRALQEELLIYEQRKNFKNKEKDDINILFNSIEQFIDDFNNMDVESKRIKTSQIFNCFYWYGKEKILDYELNTL

SEQ ID NO: 43812 - DNA, 50 bp, Clostridium beijerinckii
  source 1..50: mol_type = genomic DNA
gtgcgtatttatgatattagtgcatgtccacaaatatcataaatactcat

SEQ ID NO: 43813 - DNA, 40 bp, Clostridium beijerinckii
  source 1..40: mol_type = genomic DNA
atgagctgcaatagtcgcatgtccacaaataggaacttcg

SEQ ID NO: 43814 - DNA, 50 bp, Clostridium beijerinckii
  source 1..50: mol_type = genomic DNA
gtgcgtatttatgatattagtgcacttccacaaatatcataaatactcat

SEQ ID NO: 43815 - DNA, 40 bp, Clostridium beijerinckii
  source 1..40: mol_type = genomic DNA
atcaagtgcaaaagtcacacttctacatataggagattgg

SEQ ID NO: 43816 - protein, 617 aa, Streptococcus parasanguinis
MAGIRTENKIYEVGIYCRLSKDDGTDNESASIATQKSILTDYVKRQGWHLAKTYVDDGYSGTNFQRPSFQNMIKDIENGLINCVITKDLSRLGRNYLDCGLYLEVFFPEHNVRYIAVNDGVDTLNKSAMDITPFRNILNEMYSADVSVKIKSAYRARFQQGKFMGTTAPYGYVKDPADHNHLLIDDKVAHVVREIFDLALAGNGIAKIRKHINKQHILRPAAYAVEQGATGYERYFEDNEENRYIWSENSVRGILRSPIYAGNLAGYKRIAANMKSKKRPSKLPEEWEVIPDTHEGIVTQEEFDTVQQLMTSRRREQNAGGFENIFSDVIKCADCGYAMRAASANRRKRPDIIDCVQYTCNNYGNVMCTAHSIEARDLFNAVLADINRFADMAVNDEKAVRAIERRLTETDQSRAKSLEKEKKKLNKRLAELDRLFSSLYEDKVMERITERNFEMMSGKYQKEQLEIEARLKEVTETLNDSYEKSQGVRDFLSLIRNYQGLKELDATIINALIDKILVSEREKLADGTVRQEIKIYYKFIGFVGELHITPTKRWTALKPKNCTVCGVEYVPSSGISKYCPACAKRIQREKSNESKRRSRERNRRACIELSAKNDRLM

SEQ ID NO: 43817 - DNA, 50 bp, Streptococcus parasanguinis; identical to SEQ ID NO: 11112
  source 1..50: mol_type = genomic DNA

SEQ ID NO: 43818 - DNA, 40 bp, Streptococcus parasanguinis
  source 1..40: mol_type = genomic DNA
ctggccttctaagccaagggatgttggtcgctttggtcaa

SEQ ID NO: 43819 - DNA, 50 bp, Streptococcus parasanguinis; identical to SEQ ID NO: 38139
  source 1..50: mol_type = genomic DNA

SEQ ID NO: 43820 - DNA, 40 bp, Streptococcus parasanguinis
  source 1..40: mol_type = genomic DNA
caggccatccaagccacagcatgtgggtagtttgggtcag

SEQ ID NO: 43821 - protein, 620 aa, Streptococcus parasanguinis
MAGIRTENKIYEVGIYCRLSKDDGTDNESASIATQKSILTDYVKRQGWHLAKTYVDDGYSGTNFQRPSFQNMIKDIENGLINSVITKDLSRLGRNYLDCGLYLEVFFPEHNVRYIAVNDGVDTLNKSAMDITPFRNILNEMYSADVSVKIKSAYRARFQQGKFMGTTAPYGYVKDPADHNHLLIDDKVAHVVREIFDLALAGNGIAKIRKHINKQHILRPAAYAVEQGATGYERYFEDNEENRYIWSENSVRGILRSPIYAGNLAGYKRIAANMKSKKRPSKLPEEWEVIPDTHEGIVTQEEFDTVQQLMTSRRREQNAGGFENIFSGVIKCADCGYAMRAASANRRKRPDIIDCVQYTCNNYGRYGNVMCTAHSIEARDLFNAVLADINRFADMAVNDEKAVRAIERRLTETDQSRAKSLEKEKKKLNKRLAELDRLFSSLYEDKVMERITERNFEMMSGKYQKEQLEIEARLKEVTETLNDSYEKSQGVRDFLSLIRNYQGLKELDATIINALIDKILVSEREKLADGTVRQEIKIYYKFIGFVGELHITPTKRWTALKPKNCTVCGVEYVPSSGISKYCPACAKRIQREKSNESKRRSRERNRRACIELSAKNDRLM

SEQ ID NO: 43822 - DNA, 50 bp, Streptococcus parasanguinis; identical to SEQ ID NO: 11112
  source 1..50: mol_type = genomic DNA

SEQ ID NO: 43823 - DNA, 40 bp, Streptococcus parasanguinis; identical to SEQ ID NO: 43818
  source 1..40: mol_type = genomic DNA

SEQ ID NO: 43824 - DNA, 50 bp, Streptococcus parasanguinis; identical to SEQ ID NO: 38139
  source 1..50: mol_type = genomic DNA

SEQ ID NO: 43825 - DNA, 40 bp, Streptococcus parasanguinis; identical to SEQ ID NO: 43820
  source 1..40: mol_type = genomic DNA

SEQ ID NO: 43826 - protein, 620 aa, Streptococcus parasanguinis; identical to SEQ ID NO: 36306

SEQ ID NO: 43827 - DNA, 50 bp, Streptococcus parasanguinis; identical to SEQ ID NO: 11112
  source 1..50: mol_type = genomic DNA

SEQ ID NO: 43828 - DNA, 40 bp, Streptococcus parasanguinis; identical to SEQ ID NO: 43818
  source 1..40: mol_type = genomic DNA

SEQ ID NO: 43829 - DNA, 50 bp, Streptococcus parasanguinis; identical to SEQ ID NO: 38139
  source 1..50: mol_type = genomic DNA

SEQ ID NO: 43830 - DNA, 40 bp, Streptococcus parasanguinis; identical to SEQ ID NO: 43820
  source 1..40: mol_type = genomic DNA

SEQ ID NO: 43831 - protein, 521 aa, Paenibacillus xylanexedens
MTILRASAYCRFSSDNQRDESIDAQMRAIEDYCSKNGYQLVKVYADRAKTATSDRRPDFQQMIADSEKGLFDAVIVHKLDRFSRDKYDSAKYKRKLKANDVKLLSVTENLDGSPESIILESLLEGMAEYYSKNLAREVMKGMKETAYKCMHTGGLPPIGYTVDPISKKYIINEDERGIIEITFSMYRDGYGYNQIITALHEKGFRSRYGKPIGKNTLHGILRNEKYTGVYIFNLTDSKDALGKRNSNRKKDSEEVIRIEGGMPTIISKELFQQVQAKIASNKRQTGRYKAKELYLLSGLIVCGECLNNLGYEYAMMGNTKFSGRNKLKYVTYRCGNRDQCKACKNPELRREYIESYVIDELQKKIFNDESIPMLARQLTEFQAKKDVSYQSEAVRLEKKLGETNKQIDNIVNAVANGVSNPTLLNKLNELEDLKLKLEQSIIEHQAKKERAPVTEEVLRQLLSKFKDHIAARNLPEIKKFVASYVDKVIVYKEHVELILKLHLPETQNPQPDSVVDLTNGG

SEQ ID NO: 43832 - DNA, 50 bp, Paenibacillus xylanexedens
  source 1..50: mol_type = genomic DNA
gttgtggatttgactaatggaggcgaaccgtggctaatcaaaaccacaat

SEQ ID NO: 43833 - DNA, 40 bp, Paenibacillus xylanexedens
  source 1..40: mol_type = genomic DNA
acttgactctaatggaggcgaggggagtcgaacccctgtc

SEQ ID NO: 43834 - DNA, 50 bp, Paenibacillus xylanexedens
  source 1..50: mol_type = genomic DNA
gttgtggatttgactaatggaggccaaccgtggctaatcaaaaccacaat

SEQ ID NO: 43835 - DNA, 40 bp, Paenibacillus xylanexedens
  source 1..40: mol_type = genomic DNA
acttgactctaattgagatcaggggagctgtaaccctcaa

SEQ ID NO: 43836 - protein, 559 aa, Bacillus simplex
MKVAIYTRVSTDKKEQKLSFQSQSEYYTQYCLEKGYDLYHIYADEGITGTKKDRKEFINMMLEAGLDVERNKSNKIISFEKSDREPKFNYILMKDITRFSRNLNIIDTVRALRDKKVYLIFEDMNITTEDDKWEFQFGLYMTFSQQESLDKSSKLKWAYERRKEQGKWHMSNPLFGYEYNKDKGIYEVNEEEAVWVKKAFDLYVNELEGTKNVATYLNNNNVKTRRGKEWRADGIKRMLTNEKYIGKVAMGKLQNAAVTSETKTQIKIDKENWKVIENGIAAIIDEETFNKAQEILSSRVAKMADGSKVGSKKVKSIFHKKIKCSKCGSFFTRVKGYKVKEGKTIPEYNYFCINRRTLKSCDMRGVSHNVLIRELQRLIDSGIIRSLILKTSGAGNEGLEINLFEKILDDINKQRSEIDTNTVEIQKQIDDVAKKIDLLYENFFNDDTTDLMKQMTTKKLEQLAEEQNKLELKKLECSTAAIDEKERYIKEYYSSMQQLSKKKKFTVEELIEWIDRIEVHENRVLHFYFKFPSMYKIQFGDGITPEESELVYTRFDVKY

SEQ ID NO: 43837 - DNA, 50 bp, Bacillus simplex
  source 1..50: mol_type = genomic DNA
tacttgtgtttgtaagctttcgtgaagatagctcattactaaaacaagtt

SEQ ID NO: 43838 - DNA, 40 bp, Bacillus simplex
  source 1..40: mol_type = genomic DNA
aggatgtgaagctttcgtgaagatggcccaagcacaggtg

SEQ ID NO: 43839 - DNA, 50 bp, Bacillus simplex
  source 1..50: mol_type = genomic DNA
tacttgtgtttgtaagctttcgtgcagatagctcattactaaaacaagtt

SEQ ID NO: 43840 - DNA, 40 bp, Bacillus simplex
  source 1..40: mol_type = genomic DNA
aggatgtaactctttggggcacatatcctaagcataggtg

SEQ ID NO: 43841 - protein, 559 aa, Peribacillus simplex
MKVAIYTRVSTDKKEQKLSFQSQSEYYTQYCLEKGYDLYHIYADEGITGTKKDRKEFINMMLEAGLDVERNKSNKIISFEKSNREPKFNYILMKDITRFSRNLNIIDTVRALRDKKVYLIFEDMNITTEDDKWEFQFGLYMTFSQQESLDKSSKLKWAYERRKEQGKWHMSNPLFGYEYNKDKGIYEVNEEEAVWVKKAFDLYVNELEGTKNVATYLNNNNVKTRRGKEWRADGIKRMLTNEKYIGKVAIGKLQNAAVTSETKTQKKIDKENWKIIENGIAAIIDEKTFNKAQEILSSRVAKMADGSKVGSKKVKSIFHKKIKCSKCGSFFTRVKGYKVKEGKTIPEYNYFCINRRTLKSCDMRGVSHNVLIRELQRLIDSGIIRSLILKTSGAGNEGLEINLFEKILEDINKQRSEIDTNTVEIQKQIDDVTKKIDLLYENFFNDDTTDLMKQMTTKKLEQLAEEQNKLELKKLECSTAAIDEKERYIKEYYSSMQQLSKKKKFTVEELIEWIDRIEVHENRVLHFYFKFPSMYKIQFGDGLTPEESDLVYTRFDVKY

SEQ ID NO: 43842 - DNA, 50 bp, Peribacillus simplex
  source 1..50: mol_type = genomic DNA
tacttgcgtttgtatgctttcgttaagatggcccattacaaacgcaagta

SEQ ID NO: 43843 - DNA, 40 bp, Peribacillus simplex; identical to SEQ ID NO: 43838
  source 1..40: mol_type = genomic DNA

SEQ ID NO: 43844 - DNA, 50 bp, Peribacillus simplex
  source 1..50: mol_type = genomic DNA
tacttgcgtttgtatgctttcgttcagatggcccattacaaacgcaagta

SEQ ID NO: 43845 - DNA, 40 bp, Peribacillus simplex; identical to SEQ ID NO: 43840
  source 1..40: mol_type = genomic DNA

SEQ ID NO: 43846 - protein, 569 aa, Faecalibacterium prausnitzii
MKTKDTPKQYVIYSRKSKFTGKGESIENQIELCRQYIAMHFGEDASENVLVYEDEGFSGGNLERPQFKKMMKDSQKIEFAAIVVYRLDRISRNIGDFAKLIEDLGDRHIDFISIREQFDTSSPMGRAMMYIASVFSQLERETIAERIRDNMHELSKTGRWLGGTTPTGYASESLSSVTVDGKVKKACKLKPIPEEIQLVKTIFSVFMETGSLSKTDQYLLEHRCVTKRGKQFTRFAIRGILTNPVYMIADETAYQYLKENNVDLFAERAEFDGEHGVMAYNRTLQRPGKANQIRPMEEWIVAVGKHPGIIAGSDWVRVQAMLDVNKSKSYRRPRSNVALLSGLLRCGECGDYMRPKLTNRKNADGELIYTYMCSTKERSHGTVCSMKNCNGNTLDAKIIEEIRKLSADKETLTRLLAQTKRVISGSKEGYDAELALLREKHTETEERIKRLVESLSVASDTSAKYVMEQIDALHQESETQQLRLAELKALTEQSRMLHQEFAFHQEMIESFASAVDSATLEEKRRLLRTIVKKVVWDGKNAYVYLFAEDGEADLPPVEQPMYPLGEDSE

SEQ ID NO: 43847 - DNA, 50 bp, Faecalibacterium prausnitzii
  source 1..50: mol_type = genomic DNA
tgtatccgttgggagaggatagcgaatgctatactatcgcagcagaacaa

SEQ ID NO: 43848 - DNA, 40 bp, Faecalibacterium prausnitzii
  source 1..40: mol_type = genomic DNA
cgccagccgctgcattgaaaatgaactccggatgcatttc

SEQ ID NO: 43849 - DNA, 50 bp, Faecalibacterium prausnitzii
  source 1..50: mol_type = genomic DNA
tgtatccgttgggagaggatagcgcctgctatactatcgcagcagaacaa

SEQ ID NO: 43850 - DNA, 40 bp, Faecalibacterium prausnitzii
  source 1..40: mol_type = genomic DNA
ctccaacctcgacattgaacctgatctccaaatgaagttc

SEQ ID NO: 43851 - protein, 611 aa, Enterobacter hormaechei
MRTVKAYIYSRVSSLQQVDAFGLDRQISTVLDFLENAKLPAELGYQLDPSNYEVLESDKGLSGYKGHNFTKGSLGQFKRCVEAGEITEGCLLIESVDRFSRKQGYDAIDEFTFLIKRNIDIVEVETGQIYSYKLDHKLSALSTSIERAHQESKRKARISKKSWNRRKEESLATGVALNNNTPDWLSLSQDKKTYEIDAQKVQTITSIFEWYRDGYGVTEIVNRLNSEGIRYNGRGWNTVTVYNKLRDRRLNGYLIGKYKTIPKKDSESTTDTEKRILENIKIKKEANDNAQRIYPVVIDDELFTKIQSMMDRNVSSKKQRSTTTKQRNLFNGLTKCHECGSPMIVQSMSNGGQYLRCYRQRTKDEKCNSKMLRYFESEKVLLGHIKNLNLDEIYSDRKHAQSLDVLKRQLSDVNEKIVLLNDKVKSASDEDELFAIMEFKRKRILEKDELNQKISSLENESEIVRLNYNYDIDKLTDQDNTALRRKANEHIAKVISSIKCRRIDSSYIGAYYLYDITYHRDILKHILITDNSGKLISEITISEKDNERTYLVREEDQTVFKVESNGNAWVMYASRTKTIDDLLYYINTMMVGREPDDFTYQLNEDHIEWID

SEQ ID NO: 43852 - DNA, 50 bp, Enterobacter hormaechei
  source 1..50: mol_type = genomic DNA
gatatgtattttactttacgctgcttccagcgtactatagaatacatatt

SEQ ID NO: 43853 - DNA, 40 bp, Enterobacter hormaechei
  source 1..40: mol_type = genomic DNA
gagcggcatcaattgcttcttccagcgtggcgtacatggt

SEQ ID NO: 43854 - DNA, 50 bp, Enterobacter hormaechei
  source 1..50: mol_type = genomic DNA
gatatgtattttactttacgctgctaccagcgtactatagaatacatatt

SEQ ID NO: 43855 - DNA, 40 bp, Enterobacter hormaechei; identical to SEQ ID NO: 2680
  source 1..40: mol_type = genomic DNA

SEQ ID NO: 43856 - protein, 597 aa, Enterobacter hormaechei
MQQVDAFGLDRQISTVMDFLENAKLPVELGYRLDPNNHEVLESDKGLSGYKGHNFTKGSLGRFKERVRSGEITEGCLLIESVDRFSRKQGYDAIDEFTFLIKRNIDIVEVETGQIFSNKLEHRLSALSTSIERAYQESKRKARISKKSWKHRKEESLANGVALNNNTPDWLALSNDKKTYEIDIQRVQTITKIFELYRDGYGVTQIVNLLNKEGERYNGKGWNTVTVYNKLRDRRLNGYLVGKYPSIPKKDNESTSETEKRVLENLKIKREANENAKRIYPIVVEDDLFLKVQSMMDRNVSTKKQRSSTTKQRNLFNGLTKCHECGSPMIVQSMSNGGQYLRCYRQRTKDEKCNSKMLRYYVTERVLLEHIKGLNLDDIYGDKSGNLSLESLNNLLSQVNNKLVVLNEKIKSASDEEELFAIMDFKRKRIAEKEDILNQINALENESEVVRLSYDYDIEEITNQDNTVLRRKTNEHIAKVVSSVKCLRMDSSYIGAYYLYDISYHKDIIKHLLLTNNDGVLLSEISINEINNQRVYSVKEDNKIVFKVESNGDVWVLHASRQKSIDELLHYINVMMVGREPEGFAYEVNEDMIEWVD

SEQ ID NO: 43857 - DNA, 50 bp, Enterobacter hormaechei
  source 1..50: mol_type = genomic DNA
atgatgtattttactttacgctgcttccagcgtactatagaatacatatt

SEQ ID NO: 43858 - DNA, 40 bp, Enterobacter hormaechei
  source 1..40: mol_type = genomic DNA
gagcggcatcaattgcttcttccatcgtggcgtacatggt

SEQ ID NO: 43859 - DNA, 50 bp, Enterobacter hormaechei
  source 1..50: mol_type = genomic DNA
atgatgtattttactttacgctgctaccagcgtactatagaatacatatt

SEQ ID NO: 43860 - DNA, 40 bp, Enterobacter hormaechei; identical to SEQ ID NO: 2680
  source 1..40: mol_type = genomic DNA

SEQ ID NO: 43861 - protein, 611 aa, Enterobacter hormaechei
MRTVKAYVYSRVSSMQQVDAFGLDRQISTVMDFLENAKLPVELGYRLDPNNHEVLESDKGLSGYKGHNFTKGSLGRFKERVRSGEITEGCLLIESVDRFSRKQGYDAIDEFTFLIKRNIDIVEVETGQIFSNKLEHRLSALSTSIERAYQESKRKARISKKSWKHRKEESLANGVALNNNTPDWLALSNDKKKYEINIQRVQTITKIFELYRDGYGVTQIVNLLNKEGERYNGKGWNTVTVYNKLRDRRLNGYLVGKYPSIPKKDNESTSETEKRVLENLKIKREANENAKRIYPIVVEDDLFLKVQSMMDRNVSTKKQRSSTTKQRNLFNGLTKCHECGSPMIVQSMSNGGQYLRCYRQRTKDEKCNSKMLRYYVTERVLLGHIKGLNLNDIYGDKSGNLSLESLNNLLSQVNNKLVVLNEKIKSASDEEELFAIMDFKRKRNAEKEDILNQINALENESEVVRLSYDYDIEEITNQDNTVLRRKTNEHIAKVVSSVRCLRMDSSYIGAYYLYDISYHKDIIKHLLLTNNDGVLLSEISINESNNQRVYSVKEDNKIVFKVESNGDVWVLHASRQKSIDELLHYINVMMVGREPEGFAYEVNEDMIEWVD

SEQ ID NO: 43862 - DNA, 50 bp, Enterobacter hormaechei
  source 1..50: mol_type = genomic DNA
atgatgtattttgctttacgctgcttccagcgtactatagaatacatatt

SEQ ID NO: 43863 - DNA, 40 bp, Enterobacter hormaechei; identical to SEQ ID NO: 43853
  source 1..40: mol_type = genomic DNA

SEQ ID NO: 43864 - DNA, 50 bp, Enterobacter hormaechei
  source 1..50: mol_type = genomic DNA
atgatgtattttgctttacgctgctaccagcgtactatagaatacatatt

SEQ ID NO: 43865 - DNA, 40 bp, Enterobacter hormaechei; identical to SEQ ID NO: 2680
  source 1..40: mol_type = genomic DNA

SEQ ID NO: 43866 - protein, 611 aa, Enterobacter asburiae; identical to SEQ ID NO: 32796

SEQ ID NO: 43867 - DNA, 50 bp, Enterobacter asburiae
  source 1..50: mol_type = genomic DNA
cagatgtatttcactttacgctgcttccagcgtactatagaatacatatt

SEQ ID NO: 43868 - DNA, 40 bp, Enterobacter asburiae
  source 1..40: mol_type = genomic DNA
gagcggcatcaatagcttcttccagtgtggcgtacatggt

SEQ ID NO: 43869 - DNA, 50 bp, Enterobacter asburiae
  source 1..50: mol_type = genomic DNA
cagatgtatttcactttacgctgctaccagcgtactatagaatacatatt

SEQ ID NO: 43870 - DNA, 40 bp, Enterobacter asburiae; identical to SEQ ID NO: 2680
  source 1..40: mol_type = genomic DNA

SEQ ID NO: 43871 - protein, 620 aa, Escherichia coli; identical to SEQ ID NO: 2676

SEQ ID NO: 43872 - DNA, 50 bp, Escherichia coli; identical to SEQ ID NO: 2677
  source 1..50: mol_type = genomic DNA

SEQ ID NO: 43873 - DNA, 40 bp, Escherichia coli; identical to SEQ ID NO: 6273
  source 1..40: mol_type = genomic DNA

SEQ ID NO: 43874 - DNA, 50 bp, Escherichia coli; identical to SEQ ID NO: 2679
  source 1..50: mol_type = genomic DNA

SEQ ID NO: 43875 - DNA, 40 bp, Escherichia coli; identical to SEQ ID NO: 2680
  source 1..40: mol_type = genomic DNA

SEQ ID NO: 43876 - protein, 587 aa, Escherichia coli
MAVIQSIDGVLKGVKPHVKAWLYCRVSTLIQIDGYGLQRQQDTVKAFITSYKVPDELGYDIDRENYEVIEDVGRSAYHGNNFTKGELGKFRQKVLDREIISGLLLIENVDRFTRMPEYLSMQEFNNLILRGIDILEVETGTIFSKKIDGSLTKLSVSISRAYSESKRKSNISKRSWANRKRKSLEQGIAINNNTPEWLILHDDKQSYILDEQKIKIINDAFQLYVEGHGATSIINRLNKQKIFINSTGWSTNKFYHLLRNKRLIGFLGDERHYPEVVDPVLFNQVQTLLDGRARQRKKSGTMMRSLFNGIAKCKYCGNGMVCQTMTSSQSYLRCIAERSKTTKCDTAKLIRYKEAEKVLLEHIRNVDWASLQKESSRDAHELNELKIQAAIINGKIEDAQKELVKADDDLIVLLSRVITNRRNELRTLEEKIINLEGNVEEPDVSIIKDLEAIQDQSNIELRQKIYTLLNKTVSTITCARYDIPETIYVFELNYIGTEQKHVVYCTKALEKVIAIYIKKKDDVDLYVTSSFSIEATDKEITLYIPSAIIMEDYATLKNYLELTDANSKIAIWMQTHYDEVLSQAYYR

SEQ ID NO: 43877 - DNA, 50 bp, Escherichia coli; identical to SEQ ID NO: 2687
  source 1..50: mol_type = genomic DNA

SEQ ID NO: 43878 - DNA, 40 bp, Escherichia coli; identical to SEQ ID NO: 6273
  source 1..40: mol_type = genomic DNA

SEQ ID NO: 43879 - DNA, 50 bp, Escherichia coli; identical to SEQ ID NO: 2689
  source 1..50: mol_type = genomic DNA

SEQ ID NO: 43880 - DNA, 40 bp, Escherichia coli; identical to SEQ ID NO: 2680
  source 1..40: mol_type = genomic DNA

SEQ ID NO: 43881 - protein, 611 aa, Enterobacter hormaechei
MRTVKAFVYSRVSTLQQVDAFGLSRQISTVMDFLENAKLPAELGYQLDPSNHEILESDKGLSGYKGHNFTKGSLGRFKERVRAGEITEGCLLIESVDRFSRKQGYDAIDEFTFLIKRNIDIVEVETGQIFSHKLEHKLSALSTSIERAHQESKRKARISMKSWKHRKEASLANGVALNNNTPDWLSLSTDKLSYEIDYHRVETIKRIFQMYRNGYGVTHIVKVLNDEGNRYNGKGWNTVTVYNKLRDRRLNGFLVGKYKTIPKRINESTNEAEKRILENLKIKKEAHDNAKRIYPVVVDDDLFLKVQSLMDRNVSNKKQKSTTTKQRNLFNGLTKCYECGSPMIVQSMSNGGQYLRCYRQRTKDEKCNSKMLRYSVTEKVLLEHIKGLDLDDIYGDKTQNYSVDTLKNLLQQTNNKLLELNVKIKSANDEEELFAIMEFKRKRNIEKEDLIAKINSIENASEVVRLSYNYDIGEIVNQDNTVLRRKTNENISKVVSSIKCLRTDSSYIGAYYSYDIAYHKDIIKHLLITDNNGVLLSEISIYQKNNERTYIVKEDNKMVFKVESNGDVWVLYASRKKSINDLLHYINVMMVGREPEVFAYVLNEDMIEWID

SEQ ID NO: 43882 - DNA, 50 bp, Enterobacter hormaechei; identical to SEQ ID NO: 43857
  source 1..50: mol_type = genomic DNA

SEQ ID NO: 43883 - DNA, 40 bp, Enterobacter hormaechei; identical to SEQ ID NO: 43853
  source 1..40: mol_type = genomic DNA

SEQ ID NO: 43884 - DNA, 50 bp, Enterobacter hormaechei; identical to SEQ ID NO: 43859
  source 1..50: mol_type = genomic DNA

SEQ ID NO: 43885 - DNA, 40 bp, Enterobacter hormaechei; identical to SEQ ID NO: 2680
  source 1..40: mol_type = genomic DNA

SEQ ID NO: 43886 - protein, 611 aa, Enterobacter hormaechei
MRTVKAYIYSRVSSLQQVDAFGLDRQISTVLDFLENAKLPAELGYQLDPSNHEVLESDKGLSGYAGHNFTKGSLGRFKERVRSGEITEGCLLIESVDRFSRKQGYDAIDEFTFLIKRNIDIVEVETGQIYSYKLDHKLSALSTSIERAHQESKRKARISMKSWKHRKEASLANGVALNNNTPDWLSLSTDKLSYEIDYHKVETIKRIFQMYRDGYGVTHIVKVLNDEGNRYNGKGWNTVTVYNKLRDRRLNGFLVGKYKTIPKKINESTNEAEKRILENLKIKKEAHDNAKRIYPVVVDDDLFLKIQSLMDRNVSNKKQRSTTTKQRNLFNGLTKCYECGSPMIVQSMSNGGQYLRCYRQRTKDEKCNSKMLRYSVTEKVLLEHIKGLDLDDIYGDKTQNYSVDTLKNLLQQTNNKLLELNEKIKSANDEEELFAIMEFKRKRNIEKEDLIAKINSIENASEVVRLSYNYDIGEISNQDNTVLRRKTNDNISKVVASIKCLRTDSSYIGAYYSYDITYHKDILKHLLLTDNNGALLSEISIYQKNNERTYIVKEDKEMVFRVESNGDVWVLYASRKKSINDLLHYINVMMVGREPDSFAYVLNEDMIEWID

SEQ ID NO: 43887 - DNA, 50 bp, Enterobacter hormaechei; identical to SEQ ID NO: 43857
  source 1..50: mol_type = genomic DNA

SEQ ID NO: 43888 - DNA, 40 bp, Enterobacter hormaechei; identical to SEQ ID NO: 43853
  source 1..40: mol_type = genomic DNA

SEQ ID NO: 43889 - DNA, 50 bp, Enterobacter hormaechei; identical to SEQ ID NO: 43859
  source 1..50: mol_type = genomic DNA

SEQ ID NO: 43890 - DNA, 40 bp, Enterobacter hormaechei; identical to SEQ ID NO: 2680
  source 1..40: mol_type = genomic DNA

SEQ ID NO: 43891 - protein, 611 aa, Enterobacter hormaechei
MRTVKAYIYSRVSSLQQVDAFGLDRQISTVLDFLENAKLPTELGYQLDPSNHEVLESDKGLSGYAGHNFTKGSLGRFKERVRSGEITEGCLLIESVDRFSRKQGYDAIDEFTFLIKRNIDIVEVETGQIYSYKLDHKLSALSTSIERAHQESKRKARISMKSWKHRKEASLANGVALNNNTPDWLSLSTDKLSYEIDYHRVETIKRIFQMYRDGYGVTHIVKVLNDEGNRYNGKGWNTVTVYNKLRDRRLNGFLVGKYKTIPKKINESTNEAEKRILENLKIKKEANDNAKRIYPIVIDDDLFLKVQSLMDRNVSNKKQRSTTTKQRNLFNGLTKCYECGSPMIVQSMSNGGQYLRCYRQRSKDEKCNSKMLRYSVTEKVLLEHIKGLDLDDIYGDKTQNYSVDTLKNLLHQTNNKLLELNEKIKSANDEEELFAIMEFKRKRNIEKEDLIAKINSIENASEVVRLSYNYDIGEIVNQDNTVLRRKTNENISKIVASIKCLRTDSSYIGAYYSYDITYHKDMLKHLLLTDNNGALLSEISIYQKNNERTYIVKEDKGMVFRVESNGDVWVLYASRKKSINDLLHYINVMMVGREPDTFSFVLNEDMIEWID

SEQ ID NO: 43892 - DNA, 50 bp, Enterobacter hormaechei
  source 1..50: mol_type = genomic DNA
tctatgtattttactttactctgcttccagcgtactatagaatacatatt

SEQ ID NO: 43893 - DNA, 40 bp, Enterobacter hormaechei; identical to SEQ ID NO: 43853
  source 1..40: mol_type = genomic DNA

SEQ ID NO: 43894 - DNA, 50 bp, Enterobacter hormaechei
  source 1..50: mol_type = genomic DNA
tctatgtattttactttactctgctaccagcgtactatagaatacatatt

SEQ ID NO: 43895 - DNA, 40 bp, Enterobacter hormaechei; identical to SEQ ID NO: 2680
  source 1..40: mol_type = genomic DNA

SEQ ID NO: 43896 - protein, 597 aa, Enterobacter hormaechei
MQQVDAFGLDRQISTVMDFLENAKLPVELGYRLDPNNHEVLESDKGLSGYKGHNFTKGSLGRFKERVRSGEITEGCLLIESVDRFSRKQGYDAIDEFTFLIKRNIDIVEVETGQIFSNKLEHRLSALSTSIERAYQESKRKARISKKSWKHRKEESLANGVALNNNTPDWLALSNDKKTYEIDIQRVQTITKIFELYRDGYGVTQIVNLLNKEGERYNGKGWNTVTVYNKLRDRRLNGYLVGKYPSIPKKDNESTSETEKRVLENLKIKREANENAKRIYPIVVEDDLFLKVQSMMDRNVSTKKQRSSTTKQRNLFNGLTKCHECGSPMIVQSMSNGGQYLRCYRQRTKDEKCNSKMLRYYVTDRVLLEHIKGLNLDDIYGDKSGNLSLESLNNLLSQVNNKLVVLNEKIKSASDEEELFAIMDFKRKRIAEKEDILNQINALENESEVVRLSYDYDIEEITNQDNTVLRRKTNEHIAKVVSSVKCLRMDSSYIGAYYLYDISYHKDIIKHLLLTNNDGVLLSEISINEINNQRVYSVKEDNKIVFKVESNGDVWVLHASRQKSIDELLHYINVMMVGREPEGFAYEVNEDMIEWVD

SEQ ID NO: 43897 - DNA, 50 bp, Enterobacter hormaechei; identical to SEQ ID NO: 43857
  source 1..50: mol_type = genomic DNA

SEQ ID NO: 43898 - DNA, 40 bp, Enterobacter hormaechei; identical to SEQ ID NO: 43858
  source 1..40: mol_type = genomic DNA

SEQ ID NO: 43899 - DNA, 50 bp, Enterobacter hormaechei; identical to SEQ ID NO: 43859
  source 1..50: mol_type = genomic DNA

SEQ ID NO: 43900 - DNA, 40 bp, Enterobacter hormaechei; identical to SEQ ID NO: 2680
  source 1..40: mol_type = genomic DNA

SEQ ID NO: 43901 - protein, 611 aa, Enterobacter hormaechei
MRTVKAYIYSRVSSLQQVDAFGLDRQISTVLDFLENAKLPAELGYQLDPSNYEVLESDKGLSGYKGHNFTKGSLGQFKRRVEAGEITEGCLLIESVDRFSRKQGYDAIDEFTFLIKRNIDIVEVETGQIYSYKLDHKLSALSTSIERAHQESKRKARISKKSWNRRKEESLATGVALNNNTPDWLSLSQDKKTYEIDAQKVQTITSIFEWYRDGYGVTEIVNRLNSEGNRYNGRGWNTVTVYNKLRDRRLNGYLIGKYKTIPKKDSESTTDTEKRILENIKIKKEANDNAQRIYPVVIDDELFTKIQSMMDRNVSSKKQRSTTTKQRNLFNGLTKCHECGSPMIVQSMSNGGQYLRCYRQRTKDEKCNSKMLRYFESEKVLLRHIKNLNLDEIYSDRKHAQSLDVLKRQLSDVNEKIVLLNDKVKSASDEDELFAIMEFKRKRILEKDELNQKISSLENESEIVRLNYNYDIDKLTDQDNTVLRRKANEHIAKVISAIKCRRIDSSYIGAYYLYDITYHRDILKHILITDNSGKLISEITISEKDNERTYLVREEDQTVFKVESNGNAWVMYASRTKTIDDLLYYINTMMVGREPDDFAYQLNEDHIEWID

SEQ ID NO: 43902 - DNA, 50 bp, Enterobacter hormaechei; identical to SEQ ID NO: 43857
  source 1..50: mol_type = genomic DNA

SEQ ID NO: 43903 - DNA, 40 bp, Enterobacter hormaechei; identical to SEQ ID NO: 43853
  source 1..40: mol_type = genomic DNA

SEQ ID NO: 43904 - DNA, 50 bp, Enterobacter hormaechei; identical to SEQ ID NO: 43859
  source 1..50: mol_type = genomic DNA

SEQ ID NO: 43905 - DNA, 40 bp, Enterobacter hormaechei; identical to SEQ ID NO: 2680
  source 1..40: mol_type = genomic DNA

SEQ ID NO: 43906 - protein, 538 aa, Enterobacter ludwigii
MGRFKERVRSGEITEGCLLIESVDRFSRKQGYDAIDEFTFLIKRNIDIVEVETGQIYSYKLDHKLSALSTSIERAHQESKRKARISMKSWKHRKEASLANGVALNNNTPDWLSLSTDKLSYEIDYHRVETIKRIFQMYRDGHGMTHIVKVLNDEGNRYNGKGWNTVTVYNKLRDRRLNGFLVGKYKTIPKKINESTNEAEKRILENLKIKKEANDNAKRIYPVVVDDDLFLKVQSLMDRNVSNKKQRSTTTKQRNLFNGLTKCYECGSPMIVQSMSNGGQYLRCYRQRTKDEKCNSKMLRYSVTEKVLLEHIKGLDLDDIYGDKTQNYSVDTLKNLLQQTNNKLLELNEKIKSANDEEELFAIMEFKRKRNIEKEDLIAKINSIENASEVVRLSYNYDIGEISNQDNTVLRRKTNENISKVVSSIKCLRTDSSYIGAYYSYDITYHKDILKHLLLTDSNGALLSEISIYQKNNERTYIVKEGKEMVFRVESNGDIWVLYASRKKSIDDLLYYINVMMVGREPDSFAYVLNEDMIEWID

SEQ ID NO: 43907 - DNA, 50 bp, Enterobacter ludwigii; identical to SEQ ID NO: 43857
  source 1..50: mol_type = genomic DNA

SEQ ID NO: 43908 - DNA, 40 bp, Enterobacter ludwigii; identical to SEQ ID NO: 43868
  source 1..40: mol_type = genomic DNA

SEQ ID NO: 43909 - DNA, 50 bp, Enterobacter ludwigii; identical to SEQ ID NO: 43859
  source 1..50: mol_type = genomic DNA

SEQ ID NO: 43910 - DNA, 40 bp, Enterobacter ludwigii; identical to SEQ ID NO: 2680
  source 1..40: mol_type = genomic DNA

SEQ ID NO: 43911 - protein, 611 aa, Enterobacter ludwigii
MRTVKAYIYSRVSSLQQVDAFGLDRQISTVLDFLENAKLPAELGYQLDPSNYEVLESDKGLSGYKGHNFTKGSLGQFKRRVEAGEIAEGCLLIESVDRFSRKQGYDAIDEFTFLIKRNIDIVEVETGQIYSYKLDHKLSALSTSIERAHQESKRKARISKKSWNRRKEESLATGVALNNNTPDWLSLSQDKKTYQIDAQKVQTITSIFEWYRDGYGVTEIVNRLNSEGNRYNGRGWNTVTVYNKLRDRRLNGYLIGKYKTIPKKDSESITDTEKRILENIKIKKEANDNAQRIYPVVIDDELFTKIQSMMDRNVSSKKQRSTTTKQRNLFNGLTKCHECGSPMIVQSMSNGGQYLRCYRQRTKDEKCNSKMLRYFESEKVLLGHIKNLNLDEIYSDRKQAQSLDVLKRQLSDVNEKIVLLNDKVKSASDEDELFAIMEFKRKRILEKDELNQKISSLENESEIVRLNYNYDIDKLTDQDNTALRRKANEHIAKVISAIKCRRIDSSYIGAYYLYDITYHRDILKHILITDNSGKLISEITISEKDNERTYLVREEDQTVFKVESNGNAWVMYASRTKTIDDLLYYINTMMVGREPDDFAYQLNEDHIEWID

SEQ ID NO: 43912 - DNA, 50 bp, Enterobacter ludwigii
  source 1..50: mol_type = genomic DNA
tgtatgtattttactttacgcttcttccagcgtactatagaatacatatt

SEQ ID NO: 43913 - DNA, 40 bp, Enterobacter ludwigii; identical to SEQ ID NO: 43868
  source 1..40: mol_type = genomic DNA

SEQ ID NO: 43914 - DNA, 50 bp, Enterobacter ludwigii
  source 1..50: mol_type = genomic DNA
tgtatgtattttactttacgcttctaccagcgtactatagaatacatatt

SEQ ID NO: 43915 - DNA, 40 bp, Enterobacter ludwigii; identical to SEQ ID NO: 2680
  source 1..40: mol_type = genomic DNA

SEQ ID NO: 43916 - protein, 461 aa, Kocuria rhizophila; identical to SEQ ID NO: 23846

SEQ ID NO: 43917 - DNA, 50 bp, Kocuria rhizophila
  source 1..50: mol_type = genomic DNA
ccaagaaacctaaacgcgttttacgcgggtgtcaagattgagctagaatc

SEQ ID NO: 43918 - DNA, 40 bp, Kocuria rhizophila
  source 1..40: mol_type = genomic DNA
gcgggccacgtagatctcggcaggcccgttgatccagatc

SEQ ID NO: 43919 - DNA, 50 bp, Kocuria rhizophila
  source 1..50: mol_type = genomic DNA
ccaagaaacctaaacgcgttttactggggtgtcaagattgagctagaatc

SEQ ID NO: 43920 - DNA, 40 bp, Kocuria rhizophila
  source 1..40: mol_type = genomic DNA
gagaggcaggtagatcacttgaggccaggagttccagatc

SEQ ID NO: 43921 - protein, 558 aa, Blautia obeum; identical to SEQ ID NO: 3086

SEQ ID NO: 43922 - DNA, 50 bp, Blautia obeum; identical to SEQ ID NO: 3087
  source 1..50: mol_type = genomic DNA

SEQ ID NO: 43923 - DNA, 40 bp, Blautia obeum
  source 1..40: mol_type = genomic DNA
ctggaaacttggtctttggaaatttgtgccagagtaaccg

SEQ ID NO: 43924 - DNA, 50 bp, Blautia obeum
  source 1..50: mol_type = genomic DNA
aggtatcgttatcttacctcaacagtagctgacgttagataacgatactt

SEQ ID NO: 43925 - DNA, 40 bp, Blautia obeum
  source 1..40: mol_type = genomic DNA
tttgaagcttggtgtattggtttgtgtgacagagtaactg

SEQ ID NO: 43926 - protein, 626 aa, Vibrio parahaemolyticus
MSVDIEQIHQEKLAYSYIRYSSKRQEFGDSFRRQTQQTKDFCEKYGYTLANQFEDLGVSGFKDDQEALQAFIRDCESGKIKKGSLLIVESLDRLSRKQTKIALRQMLQILEYVDVYSHHEQKFYRSEADNSDNQMIDLMMSIMVMSRAYNESFAKQKRLKEAWDAARNKAKKGIGKVKGSLPHWLSLSPDATKFIIKEDRTDIIFTMFELSASGMGSTQIIKFLNKNIDKYPSPSPKTKLWVRSTVKRILGDKRLLGEHQFFKADPTNVKKKIPAGDVIPDYFPQVIDEELFYEVQSGMRSRKIKAGRVSSTHFPNVFRHILKCGCCGASMSYVNKGLMNAKVRKPTKYLACSVAKRSDECSQSKHFRYEPIEHMLIHLATANGFMPKVESSADLTVRYEKLLATHEKEQKQLEMLLSRDLTSQIIMDKISALDKSVQRISSEIQALEDLIAANKGQYQYKDLYRDLVLLDDEIMKYSNRAQFNSHMQQEIDLAYLYHRYGQPHLVFKMKSGLVHAALLDQQGTFGGCSLEDGSDTFKRLEGKNSLEDDARLWKLLKYVGDISDDVENADLYAHHRSQIHDLMSKLSAKLSKYVQKPTDESLFEEIYELSDRVYAEIGKNEKVFIE

SEQ ID NO: 43927 - DNA, 50 bp, Vibrio parahaemolyticus
  source 1..50: mol_type = genomic DNA
aaggtggtttattgacataggttgataaacctatgtcaatagactaccat

SEQ ID NO: 43928 - DNA, 40 bp, Vibrio parahaemolyticus; identical to SEQ ID NO: 26873
  source 1..40: mol_type = genomic DNA

SEQ ID NO: 43929 - DNA, 50 bp, Vibrio parahaemolyticus
  source 1..50: mol_type = genomic DNA
aaggtggtttattgacataggttgtgaaacctatgtcaatagactaccat

SEQ ID NO: 43930 - DNA, 40 bp, Vibrio parahaemolyticus
  source 1..40: mol_type = genomic DNA
tctgtgagttctggcaatctgccataaagcactgccattt

SEQ ID NO: 43931 - protein, 576 aa, Nocardia abscessus
MTRTMTSKEPAWLAEINAALAAGVADVDPSEWVYGYVRISRDEKDRAEGVQLQAKNEVAYAARKGLALARILCDNDLSGADAERPGLREALRLVTAGPSKMVLARDVARLTRDYDLGNELMKLGRDDGVRYVFVKDTEYDLTTGAGRKNFMVKVAEAAEYRETNTENLLDRMSEEAAKGVMQGGSRRFGYGKVVGTHPITGDDILDRYALREDEVAVLREGRDRIINGESQTTIVTDWNARGITTSEGGSWRVGKLSHLLLLEAYVAYDLGEHTDANGQRCECLDNPEGSGIRVHERTGTRHRGQWPAVFTRAEHDAMRAAIKAHSRAKNPDRPRARNGEYWLTGLAECGGKWPEGSERAGQGCGSWLVGSLLERKRKNGTITQRRYGCRAKDSARVACGCGRVFRDAGALEMYVAQAVIAAYEDPEILGRLDRGNDNAGRIAQLQQRIETTAGNLDAETDRRAEVLTGARDEDDLRVIERTIASLKQALKTLRAEQDSLRSAQALAVLADIGSTPGELRKAWDTKGSRWRHEATARLVEKVIVEPAKIYAAKWEDQNGKVWRFDTSSVQIVWRQL

SEQ ID NO: 43932 - DNA, 50 bp, Nocardia abscessus
  source 1..50: mol_type = genomic DNA
ggagtgcgtaaccgagatgtgaccccggcgagatgtcacctatacactcc

SEQ ID NO: 43933 - DNA, 40 bp, Nocardia abscessus
  source 1..40: mol_type = genomic DNA
gtaatagtcggcgctcacccccgcgagcaaagcgatctcc

SEQ ID NO: 43934 - DNA, 50 bp, Nocardia abscessus
  source 1..50: mol_type = genomic DNA
ggagtgcgtaaccgagatgtgacctaggcgagatgtcacctatacactcc

SEQ ID NO: 43935 - DNA, 40 bp, Nocardia abscessus
  source 1..40: mol_type = genomic DNA
gtaatagtgtgcgctctgctatgtcaccaaagccacctcc

SEQ ID NO: 43936 - protein, 514 aa, Roseburia hominis
MLRIGIYPRKSVYRDNSDSVQVQITACKDYARLMFKDQELDFRIYDKDEGFSGKNTHRPSFTELMADVKADELDIIIVYKLDRISRSVKDFSEIYETLQQHNVSFLSVKESFDTSTPMGRTVMYILSAFAQLERENTAERVADNMASLGEAGKWTGGTLPPGMTSVRKKIGDKTHSYLIVDEQRIKTVKYIFSLMLSGTSITKLEHTLRQEGIRTERDAFYSCSKLYNLFTNPVYCANDMDAYYYFLEKGYKLPDPALFDGRHGLIGYGRTTQSNGTTVRKDTYSIAIGIHDPILSGADWIAIQKRLGQNKSTRYAKYEAGILKGTLRCKCGVKMNIRTYKKNGSLFSYYYCPKMAREGVSACDTGYTRVDDIDDRFLQELKKIKLSPDSIELEENVSYVDTGKMRTDLKKTTDSIRNLMNALSGSADSAAAKYIIAELEALDKEKAVLEKKLRTAEQRNRRAAVSAETKEFVYHRICNLLDNMDSMSYTEINELIRSIVKSCVFDGDHLDVTF

SEQ ID NO: 43937 - DNA, 50 bp, Roseburia hominis
  source 1..50: mol_type = genomic DNA
tttctacttttcgttctgattggggttccgataggaatataaagtaaccc

SEQ ID NO: 43938 - DNA, 40 bp, Roseburia hominis
  source 1..40: mol_type = genomic DNA
ttctacggcgatgattggggttccgacctgccccatcata

SEQ ID NO: 43939 - DNA, 50 bp, Roseburia hominis
  source 1..50: mol_type = genomic DNA
tttctacttttcgttctgattgggactccgataggaatataaagtaaccc

SEQ ID NO: 43940 - DNA, 40 bp, Roseburia hominis
  source 1..40: mol_type = genomic DNA
ggctacaacaatgattgggactgagacctgcccccacaga

SEQ ID NO: 43941 - protein, 534 aa, Pseudomonas fluorescens
MPYAVGYARFSSIKQGSGSSLERQQAMIGKWIGENPEYTIYPKSFEDLGRSASKGDHLKHGLGKLLQAIELKEIGKGDVILVEAIDRIGRLTETKMFSLINEIIEAGVQIITLQDGTVYGPIIKTDQVWLLLGKIQQAYLYSKDLGGRIKESYTIRAKMAKKGIVPKRRTPIWLNTDGTLKDNIAVAMKTAFEDALSGLGERRILKRLKEKDSAFEKSHPASVRKWLTNKTAIGFWRETLIYPPIVSQDLFYQVQKRFEETYVPASAPTKHFLSGLVKCGDCGSSFQVKVNKSSPNTMHCSARSIHGIERCKNGTSFPVPVLLHVCHDTATRAMENALQHIELSQAKKKTIILDGQLNDIAKKISNLIGSLEKYGAVPEIDAQITALITERKKLENEKLYLAIDDPDNTTSYEDAWDYQYELIEDDPMRLNALLQTVNYQLKCHANRSILANTTGNQFSKCTYLNYDRKKQAYRIQANGNIHHIANRDGTLTKRRLELFKEMLQAQRDGTTAYKEIKTSPVELEILEFLAEIDD

SEQ ID NO: 43942 - DNA, 50 bp, Pseudomonas fluorescens
  source 1..50: mol_type = genomic DNA
cgtagttgcattgccgacttcttctcactataatctgcaatatcactacg

SEQ ID NO: 43943 - DNA, 40 bp, Pseudomonas fluorescens
  source 1..40: mol_type = genomic DNA
ggtactggcagccttgaactcgcagttcttgtggtcgatc

SEQ ID NO: 43944 - DNA, 50 bp, Pseudomonas fluorescens
  source 1..50: mol_type = genomic DNA
cgtagttgcattgccgacttcttcagactataatctgcaatatcactacg

SEQ ID NO: 43945 - DNA, 40 bp, Pseudomonas fluorescens
  source 1..40: mol_type = genomic DNA
ggaaatgccagccttgaacagggagttcaggtgagccatg

SEQ ID NO: 43946 - protein, 641 aa, Actinomyces oris
MPDALAPDPFTAMAAQLTPKRAVSYIRVSTREQAQRGGSEEGFSLPAQREANKRKAQSMGALVVKEFADRGESARSANRPELQKMLAYLKEDGGIDYVIVHKLDRLARNRADDVEINRAFEQAGVRLVSTSENIDQTPGGMLLHGIMSSIAEFYSRNLANEVIKGMGEKARNGGTLGKAPLGYVNVRARDENGREVRTIALDEERAPLIRLAFTEYATGQWTTKRLAAHLHDRGLTTVPTARKPAKAVTGAQLHRMLRHPYYKGVISFQGVEYAGAHEPLVDEETWSQVQAVLDSHRFGERERQHNHHLKTTVYCSLCGARLLVQNTRNSKGDLYPYFICARRQRTHDCAFRAVLIDVVEERMSDLYRTIQLSSQDRQLVEQYVREELRHLERDKDRTIRSLTTRRTNIEDKRRRLMHAHYEGAVPLELLREEQTQLTSELDHIERQLAAYQADITEVRQRLTQALDLLEDCHRLYTAAPAHLKKLLNQVFFERVLVNPAVDEEGRVILPDDGTNDGRGKTMTDIAAGDCPIGESDDGPLQRAAAPRLLADASSDASLAADLRRPFDWLTSRRMHNVARQHRATLLQDNTQENRDNQVDCPVTNTVCNDEALTSGGERFASSSTNPDRVTHDLGLGKAIVV

SEQ ID NO: 43947 - DNA, 50 bp, Actinomyces oris
  source 1..50: mol_type = genomic DNA
aggtttgggtaaggctatcgtggtacaactccgcaccatcgactctaaca

SEQ ID NO: 43948 - DNA, 40 bp, Actinomyces oris
  source 1..40: mol_type = genomic DNA
gagtaaaagaggcgtcagtacccccactgggattcgaacc

SEQ ID NO: 43949 - DNA, 50 bp, Actinomyces oris
  source 1..50: mol_type = genomic DNA
aggtttgggtaaggctatcgtggtgaaactccgcaccatcgactctaaca

SEQ ID NO: 43950 - DNA, 40 bp, Actinomyces oris
  source 1..40: mol_type = genomic DNA
caggacatgggggctcagtgaacccagtgggatttgaacc

SEQ ID NO: 43951 - protein, 500 aa, Bacillus pumilus
MKAIYVRVSTEEQAIKGSSIDSQIEACVKKAGTTNVLKYADEGFSGELLERPALNRLREDARKGLITELICYDPDRLSRKLMNQLIIDDELRKKGIVLTFVNGDYADSPEGQLFFSMRGAISEFEKAKIKERTSTGRLQKIKKGMIIKDSNLLGYKMNKDKRTLEIIEKEAKVVRMIFDLFTNHSSQFFNRVNGIALHLTKLGIPTKKGAKVWHRQVVRQILMNPTYKGKHEQYKYDTEGSYVSKQAGGTAIVKLRPEEERYVIEVPSVVSDEQWEYAQELLDKSRRKQLQYGTHQYLLSGLVRCGNCGNTMTGKKKKSHGNDFYVYECRKNYAGAKNKGCGKSMSENKLNRIVWDEIYKFITNPGKYRVYKEEEKAIHKAEELEFIQKEIEKAKKGRQRLITLISLSEEDDLDIEEVKTQIVELQKKQNHLMTQHDKIKKEIKESEGSAAGENAMKRALDYLNSVSADNLKLEDKTAIINFMVKEVLIVDSETIHIRTH

SEQ ID NO: 43952 - DNA, 50 bp, Bacillus pumilus
  source 1..50: mol_type = genomic DNA
cccccttttgtcattaatatctcgttattaatgtcaaaaggggggtgcgt

SEQ ID NO: 43953 - DNA, 40 bp, Bacillus pumilus
  source 1..40: mol_type = genomic DNA; mol_type = genomic DNA
taaatgcatcagaatttcattttcaatacaccgcgccgca

SEQ ID NO: 43954 - DNA, 50 bp, Bacillus pumilus
  source 1..50: mol_type = genomic DNA; mol_type = genomic DNA
cccccttttgtcattaatatctcgtgattaatgtcaaaaggggggtgcgt

SEQ ID NO: 43955 - DNA, 40 bp, Bacillus pumilus
  source 1..40: mol_type = genomic DNA; mol_type = genomic DNA
tcaaagcatcagaattacatggttaatacacccagctccc

SEQ ID NO: 43956 - protein, 525 aa, Vibrio parahaemolyticus
MAYYGLLKGSNMKAYIYSRISSAIQKKGHGLDRQQDIALTYATQLGFDISEEVLQDVASGYHGKQMEGRLGVFLEGIKRGKIESPAALIVESLDRLGREHTMDALPRFIDIVNHGVEIHEVSTGIVYNREETHKIHIAIAIMERAHNESLMKSKRARAAANKRLQRAQQGENVVINVNLPCWIRSQDGKLELVPEYAVVIRRIFELYLEGKGSNKVAQILREENHPYFTSNIHSKKIRSRVWTDQRVMDIIKKDSTCGVFRSTANPDTVIDGYYPAAIDKATFERAQALRMSRVRTAKKSKKGLNILSGLLRCGHCGSSLQYTRSYSNKKKTRMYENLRCRDRAARMNCDSRSVPLRPLEKLVLGWVGTIPLFDIKAASNDELEQKKAELTQLEQQAENLVELLATGLTRVKDKYLQLEQQIDSVKKEISSLSVTNSSSVDKIDYFQAIDLENEEYREQVQQELALIIDRVSVKCDGEDAEIDIFLNSKIHNHQRFIGKKKQLDKARQTIRTLRPCAAHVDSFVD

SEQ ID NO: 43957 - DNA, 50 bp, Vibrio parahaemolyticus
  source 1..50: mol_type = genomic DNA; mol_type = genomic DNA
tacagtggtttacattggaacagcacgctgttagtatgtataccacagtt

SEQ ID NO: 43958 - DNA, 40 bp, Vibrio parahaemolyticus
  source 1..40: mol_type = genomic DNA; mol_type = genomic DNA
aaaagtgcactaccacggcacgcttatcgatggcactgtt

SEQ ID NO: 43959 - DNA, 50 bp, Vibrio parahaemolyticus
  source 1..50: mol_type = genomic DNA; mol_type = genomic DNA
tacagtggtttacattggaacagctggctgttagtatgtataccacagtt

SEQ ID NO: 43960 - DNA, 40 bp, Vibrio parahaemolyticus
  source 1..40: mol_type = genomic DNA; mol_type = genomic DNA
aggagtgcactaccacgcctggctgattttttgcattttt

SEQ ID NO: 43961 - protein, 468 aa, Heyndrickxia oleronia
MTVGIYIRVSTQEQAQEGYSIAAQKERLTAYCAAQGWDDYKFYVDEGVSAKDTNRPQLKMLLDHVKKESISMILVYRLDRFTRSVRDLYNLLDTLEKHKCSFKSATELYDTSNAMGRMFIGLVALLAQWETENLSERVKMALEKKVSGGERVGNIPYGFDLDEDEKLVKNGKSSIVLDMIEKVKQGMSANQLSDYLNTTNSDRQWRPNSVLRILRNPALYGATRWNDEIYENTHEGIITKKEFVKLQQILEDRSLHHRREVKSIYLFQGVISCYQCGSILSPNRYIRQRKDGSQYQGLTYRCQACVRNKRKSVSVGEYRFLDALKSYMKNVKFQHIEPLTIEDEQKIIIDQINQVERKREKYQKGWAADLISDEEFTKLMNETRTVHDELKNKLEQFETPVIIDTEALQNIVLTFNQNFTHLTHQEKQMFISQFIRRIEFKLTPQPPIRPDKSSKGKDLVEITSVEFY

SEQ ID NO: 43962 - DNA, 50 bp, Heyndrickxia oleronia
  source 1..50: mol_type = genomic DNA; mol_type = genomic DNA
attagtatttatgatacgttaccggttggtagcgtatcataaatacaact

SEQ ID NO: 43963 - DNA, 40 bp, Heyndrickxia oleronia
  source 1..40: mol_type = genomic DNA; mol_type = genomic DNA
tgacgatttgccacttcccgttggtccagtaaaaataatc

SEQ ID NO: 43964 - DNA, 50 bp, Heyndrickxia oleronia
  source 1..50: mol_type = genomic DNA; mol_type = genomic DNA
attagtatttatgatacgttaccggatggtagcgtatcataaatacaact

SEQ ID NO: 43965 - DNA, 40 bp, Heyndrickxia oleronia
  source 1..40: mol_type = genomic DNA; mol_type = genomic DNA
tatagatttgccaattctggatgttcctataaatataatc

SEQ ID NO: 43966 - protein, 562 aa, Nocardia cyriacigeorgica
MHEWGELEAVLYARVSDDRDGRSRSTSQQIDEGNDWCEREGISVIATIIDDDIGASRYSRKKRDGYDRALELLQAPSERRRILVSWESSRAQRNLKVYLMLREICEESGSLWCYDGRIYDMSDPADRRRTAMDAVEDEYEVERTRRRVMRDMRDNAAAGRPHGKIAYGYRIVRDDRTGRAIDRVPDEDVFDAEGNLVRVGTATIVREIAQRLLEAESIRSITIDLNRRGIPAPRPMRKGPNKGKPGPWLTQTVTTLMRSPTYAGLRVANGKVIRTGTWKPLLTVDQHERLVALLTDPTRRTNHRGAAPAWLLSFIATCGVCGSHVTRLAPRGTDMYVCATNFCVARSIKGVDRLVEQAVIERLMSDDIFALMAKSSDEAATAYEEERKLKARLNKFIAMAASGEISEESFVQIDKDLRAKIKKAESKARAKFTSPLVRKLAEGRNAREEWPRLDLAEKRQVIRELCEVTIFKARTKGQRQVNPRYIGLWWIGSDAPKPTAPPPPAPLAEGGDPGEYTVPEVLQYLRSAGIDERIRIQELERAGQGRGDIMKLSTDRKRARTG

SEQ ID NO: 43967 - DNA, 50 bp, Nocardia cyriacigeorgica
  source 1..50: mol_type = genomic DNA
tcatccccctaatcaactgtcagcggactcaattgtcaatactcagatgt

SEQ ID NO: 43968 - DNA, 40 bp, Nocardia cyriacigeorgica
  source 1..40: mol_type = genomic DNA; mol_type = genomic DNA
gcatctgaccgtggtgagcggcgcgaacttcacgattctg

SEQ ID NO: 43969 - DNA, 50 bp, Nocardia cyriacigeorgica
  source 1..50: mol_type = genomic DNA; mol_type = genomic DNA
tcatccccctaatcaactgtcagcagactcaattgtcaatactcagatgt

SEQ ID NO: 43970 - DNA, 40 bp, Nocardia cyriacigeorgica
  source 1..40: mol_type = genomic DNA; mol_type = genomic DNA
ccgtctgtccttggtgagcagggcacacttcactgtcctg

SEQ ID NO: 43971 - protein, 605 aa, Burkholderia ubonensis
MSPFLPSLTVPVAYSYIRFSTPDQNKGDSRRRQLDASARYAADHGLTLDESLTVQDLGVSAFTGSNFERGALGQFVTAINEGRVAPDSYLLVESLDRLSRLPVTEALAVFQTIINLGVTIVTLVDSAVYSKDRLRNDWTPLLVALVSMSRAHEESAVKSRRVKAAWDAKKERVKAKKEVMSGRCPWWLKPSDDNSHYEIVEENAATVRLIFDLAKDGLGGEAIAKQLNARNIRPAQHAKRWQNSTVQFNLRNIAVIGVLQLDQDNNGRTTTNTFVEDYYPPVIDKALFYEVQALRAERNRNKNTMSAGRKGQCYNIFQGTAKCGYCGSPMHIRRKPGVNSGFLYCSKSLQGGGCVGVSYNIRQLEAEFIEFTRELDLSHILGDTSTDNALTEKKAGLSVCNAMLEEAQTKLANLLNAIEAGGDMPILVQRLRDVEAQVNDLKKQRLALQSEVEILSNTSRDEQVSLEMLSRLMEQLGSKESDLEEKLRLRFRMLGEVQKVVRRLDLFPGGPMLAQEQIDELRSQLQSGGFDNGRIDDYLTQLPIKPDRSARYFIAHLRNGISRTVRQGQVMETDSARSQKVRSAIHGAVTEEANRDDETLLPSGR

SEQ ID NO: 43972 - DNA, 50 bp, Burkholderia ubonensis
  source 1..50: mol_type = genomic DNA; mol_type = genomic DNA
gagtgtcaaattagccaaaatatcaagattgggtggtcaatttgacaaca

SEQ ID NO: 43973 - DNA, 40 bp, Burkholderia ubonensis
  source 1..40: mol_type = genomic DNA; mol_type = genomic DNA
gtattacgcgcatccgcgcaaccagttctggcggctgctc

SEQ ID NO: 43974 - DNA, 50 bp, Burkholderia ubonensis
  source 1..50: mol_type = genomic DNA; mol_type = genomic DNA
gagtgtcaaattagccaaaatatcgcgattgggtggtcaatttgacaaca

SEQ ID NO: 43975 - DNA, 40 bp, Burkholderia ubonensis
  source 1..40: mol_type = genomic DNA
ttctgatccccacccgcgcgcccagtcctgccggcttctc

SEQ ID NO: 43976 - protein, 499 aa, Lentzea guizhouensis
MAVAVETEPAHSGVMTRYVALYCRISIDRRGRKEGVQAQERWGHEYAAATWPGMPVRVFKDNHLSAADDDVVRPDYENLRAAINRGEVAHVWSVEQYRIERREIQWFQLAAEMDAVGITELHTNRDGIVRVQDEVAGIKAVLGAGEVRRLKRRINDTLAEKAALGEPAGSRPFGYKHGKLADGTKTYVQVPAEAAAIRQAAEWVLTGWSLANIAKQFRERGLRGAHGGTIQPSAVRGMVLSPTIAGHRVYRGQIVARGNWKPILDDATWQACRLKLSQPRRVTRADGKGEYAVGERHIGNPTGRKYLLTGGLAVCGVCEHNMTGTTQTVGKRRVPYLTCHPNKGGRGCTGIVLEKAQASVVERLFEKLDNPEFLATVAADEHGARRAEISNALDALDKQRGELAALWATPGELTATEWKEARHGLKENERELRRELAEMPPPVINVNIEGAKEAWPDMTLDEKREFLRLFIVKITVNRARPGAPRRFDPERIEIDYVAR

SEQ ID NO: 43977 - DNA, 50 bp, Lentzea guizhouensis
  source 1..50: mol_type = genomic DNA
gttacgtcttgattacagatgcctgatggcagttgccgttgagacagaac

SEQ ID NO: 43978 - DNA, 40 bp, Lentzea guizhouensis
  source 1..40: mol_type = genomic DNA
cctgttccagcgggtgcccgagggcaagaccgcgaagaac

SEQ ID NO: 43979 - DNA, 50 bp, Lentzea guizhouensis
  source 1..50: mol_type = genomic DNA
gttacgtcttgattacagatgccttgtggcagttgccgttgagacagaac

SEQ ID NO: 43980 - DNA, 40 bp, Lentzea guizhouensis
  source 1..40: mol_type = genomic DNA
ccagttcaggaggatgccctggggtgagaccgagaggaag

SEQ ID NO: 43981 - protein, 508 aa, Pseudomonas syringae group genomosp 3
MIAKWLLDHQDYELSELNYSDLGKSGFHGDHVKEGGNFGKLLKAVMDGYIKRDDVVLVEAIDRTGRLPALQMLSDVIAPILRAGVSIITLDDNTTYTEASVGGPHLFMLVAKIQAAHEYSRTLSRRVEDSYKKRRKDAKEKGVAPKRMTPVWLNSDGTVREDVAPWIKTAFELYVSGVGKSTIAKRLRESGVERLAKTSGPSVEGWLRNKAVIGKWETLIGTPEHHVIDDVYPLIIEPSLFYKAQVHAEKMKTQRPIKTAKHFLVGLVHCGECGKNYIMQNLHGKPHSMRCRTRQSQNNCSNSYVVPKPVLDAIYRYTSVTAALEAVQLQQLGVNEKEIVTREAELLTITKRVEGFVQAVNEAGPMPELLVALKQARIERESAENALVILRATVVTPPANQWREMGKVWSLEAEDAQRLAAMLRQVGYHITVGKGAIIKSSHSDVVYQYLGVDRVKDMYRVLADGEMKLIHKSQVDDYPYHEPFHEVVGEATMDETDKENLLLQYQSS

SEQ ID NO: 43982 - DNA, 50 bp, Pseudomonas syringae group genomosp 3
  source 1..50: mol_type = genomic DNA
cagtgttacttacaaagaggttgctcccaacgttttcacatgtaacactt

SEQ ID NO: 43983 - DNA, 40 bp, Pseudomonas syringae group genomosp 3
  source 1..40: mol_type = genomic DNA
catgcccatcaggcccaggtcccaacctttgatgacgcgt

SEQ ID NO: 43984 - DNA, 50 bp, Pseudomonas syringae group genomosp 3
  source 1..50: mol_type = genomic DNA
cagtgttacttacaaagaggttgcctccaacgttttcacatgtaacactt

SEQ ID NO: 43985 - DNA, 40 bp, Pseudomonas syringae group genomosp 3
  source 1..40: mol_type = genomic DNA
cagcaccatcaggcccaggctccctcctttgtcaaagcct

SEQ ID NO: 43986 - protein, 594 aa, Mesorhizobium amorphae
MDSNASKPSAYSYVRMSTDIQLKGDSLRRQEQASKLYAEQNDLQLVEDFKLEDIGVSAFKGANVVSGALGKFLTLIKSGGVPKGSYLLVESLDRISRQQIMDSLTVFFDIIRNGVSVVTLADSHVYRAGEAEITDILYSLIILSRAYEESATKSLRVGEAWRNKRDNASHKKLTKMAPAWVQLREDRSTFDLIPEKAEIVRQIFQMADAGHGSFAIARRLNQTGVPTFTKSNGWHESYVTKILRSRAALGEFQPHRYDDKGKRIPSGDPVADYFPGLVDEDQFLRIQASRRRRLVEGAGRKGPEYRNLFTKIAKCHYCGEPMRFVHKGRPPKGSQALKCTNAVRNLGCESTSWRYSDFETSFLFFVKEIDLTATLRAATDNSERQTIEQKIAANEEKLHQLRDKQEATFELVSSPGPSAAFLKTKLDQIADEIVGIEQQLVKLKNQLADTQLLPSISAFELRSQIDSLQDMSAPDIFDRRAAVANRLKSIVTSLRVAANGSRPRLKTIADALGDQGIDEEYREKLLAHIDHVNAVTQSYSRTFTVTLADGVQRLVVVKGDDPTDFVSEVVIEANGKTTGSILGKPLGYPPVTTS

SEQ ID NO: 43987 - DNA, 50 bp, Mesorhizobium amorphae
  source 1..50: mol_type = genomic DNA
gggtaattaatccacctcatgatccagatggtaaggcggattaatttcct

SEQ ID NO: 43988 - DNA, 40 bp, Mesorhizobium amorphae
  source 1..40: mol_type = genomic DNA
gccgggcaaggtcggcatgcatattgtcggcctgccggac

SEQ ID NO: 43989 - DNA, 50 bp, Mesorhizobium amorphae
  source 1..50: mol_type = genomic DNA
gggtaattaatccacctcatgatcgcgatggtaaggcggattaatttcct

SEQ ID NO: 43990 - DNA, 40 bp, Mesorhizobium amorphae
  source 1..40: mol_type = genomic DNA
gccggcccagcacaggatggctattgcaggcctggcggag

SEQ ID NO: 43991 - protein, 541 aa, Brevundimonas naejangsanensis
MNMQSPHVSLRAALYLRVSTARQAEHDVSIPDQRKQGEAYCASRGYQLVETYVEAGASATNDRRPEFQRMIEAGTSKPAPFDVVVVHSFSRFFRDHFELEFNVRKLAKNGVKLVSITQEMGDDPMHVMMRQIMALFDEYQSKENGKHVMRALKENARQGFWNGSLPPIGYRVVDAEQRGAKMKKKLEIDPLHADTVRLIFRLASEGDGMSGPMGVKNIVNYLNKHRMFTRNGGRWGIGQLHRVLTRRTYIGEHRFNRRSNKGVVKPEDEIVTVAVPPLIDLEIFEAVQHRLKVNNPKVTPPRVVSGPNLLTGICHCGNCGGAMTLRTGKNGRYRYYACSTRARQGDTGCKGRAIPMDKLDRIVVSHIEERLLDPERIEDVLASLLDRRQESVERRSQHIAELNHRAAEADNRLKRLYDAIEAGSLDPAESSLGERIAGLTALRDQARADATRIEAMLASSTHQRLTGAAVRELASEARTRLRLGKGGYRREHVRAFAQHVEVADDAIYIKGNKNVLLRTLAATKGGKTAGIGVPGFIPKWR

SEQ ID NO: 43992 - DNA, 50 bp, Brevundimonas naejangsanensis
  source 1..50: mol_type = genomic DNA
cggcgttcccggttttataccgaagtggcgggccgaagccgacgaaacgg

SEQ ID NO: 43993 - DNA, 40 bp, Brevundimonas naejangsanensis
  source 1..40: mol_type = genomic DNA
tttcgggaaggcaaagtgtgtggcggagagggggggattc

SEQ ID NO: 43994 - DNA, 50 bp, Brevundimonas naejangsanensis
  source 1..50: mol_type = genomic DNA
cggcgttcccggttttataccgaattggcgggccgaagccgacgaaacgg

SEQ ID NO: 43995 - DNA, 40 bp, Brevundimonas naejangsanensis
  source 1..40: mol_type = genomic DNA
cttcaggagggcaacgcgcttggctgtgaggggaggattg

SEQ ID NO: 43996 - protein, 470 aa, Bacillus paralicheniformis
MRAAIYVRVSTEEQAKEGYSISAQIQRLEDFARSQDWVVFDHYIDDGYSAKNLNRPDMNRMIKDIRERKFDVVLVYRLDRMVRSVSDLHELLELFDSNNVKFKSATEMFDTTSAMGRFFITLVAAMAQWERENLAERVHMGMRRMVEESKRPGASAPFGYDLINGELVINEEEAKWVKKIFEGFLSKGRTAIAAMLNDAGVKTKKGNYWNDSVVTFIVNNPVYCGVIRWNHRKVSGKKTNESILVEGNHEPIISKELYEQVQQIQRDRAGRGYKGNSEYPFSGVLRCARCGKVLVGAKRKRNYGYNRFYRCVGRTQFKICDLPMVSEEVLEDVFLNHLPAPKQPVILEQESKDMEQLEKELIKINKKIERIKELYLEGELERKDYNIKVATEREKAKGIQFQLDNIEKPVNVNEVMEMLNEVKTVWPHLDYTEKKAAINSIVQEIKVDVLYTAKHRAEKSVIEITEFKAK

SEQ ID NO: 43997 - DNA, 50 bp, Bacillus paralicheniformis
  source 1..50: mol_type = genomic DNA
tggtatctttgtgacagccacggatttccgtggccgtcattaatacatta

SEQ ID NO: 43998 - DNA, 40 bp, Bacillus paralicheniformis
  source 1..40: mol_type = genomic DNA
cctttcttctttccaaggatttcccctcatatggtacccg

SEQ ID NO: 43999 - DNA, 50 bp, Bacillus paralicheniformis
  source 1..50: mol_type = genomic DNA
tggtatctttgtgacagccacggaactccgtggccgtcattaatacatta

SEQ ID NO: 44000 - DNA, 40 bp, Bacillus paralicheniformis
  source 1..40: mol_type = genomic DNA
cctttcttcttcctaggggactcccagcatagtttaccct

SEQ ID NO: 44001 - protein, 539 aa, Pseudomonas qingdaonensis
MVKNGARVYSYLRFSDPRQATGSSADRQLQYAHRWAADKGLVLDDSLSLRDEGLSAYHQRHVTQGALGVFLRAIEDGRIASGSVLVVEGLDRLSRAEPIQAQAQLAQIINAGITVVTASDGREYNRAGLKAQPMDLVYSLLVMIRAHEESDTKSKRVKAAIRRQCEGWMAGTFRGLIRNGRDPQWVQWTGDAWELMPERVLAVRRALELYRQGLGAGRAANLMHQEGYKLTEWGISGLQIYRMIKLPALRGVKRLSVDGEDYELEDYYPRILSDVEWGELQHLAGQRLRRRGAGEIPGIITGVGLTYCGYCGTALVAQNIMNRRRPDGSLSDGHRRLQCTSYSKQGGCSAGGSCSVVPIERALLNFCSDQFNLQRLLEVGDDGQGIQHQLAAANAEADKISTQLGRVTEALLADDSGAAPLAFIRKARELEQLQAIAQKKVRDLEYEASAFAGVAQPAQAGRWEELAAQVEAGDYTAREQVRQLVMDTFERIVIFMRGMEAQDRSGRVIDVQLISRTGQHRVIQINRRTGAWVASEDWM

SEQ ID NO: 44002 - DNA, 50 bp, Pseudomonas qingdaonensis
  source 1..50: mol_type = genomic DNA
ggtatatttcagcgatcgctggggcaccctaacgatatcattcctacacg

SEQ ID NO: 44003 - DNA, 40 bp, Pseudomonas qingdaonensis
  source 1..40: mol_type = genomic DNA
atcgaccagggctttggggcaacccagggaaacgaagccg

SEQ ID NO: 44004 - DNA, 50 bp, Pseudomonas qingdaonensis
  source 1..50: mol_type = genomic DNA
ggtatatttcagcgatcgctggggtaccctaacgatatcattcctacacg

SEQ ID NO: 44005 - DNA, 40 bp, Pseudomonas qingdaonensis
  source 1..40: mol_type = genomic DNA
gctgaccagggatttggggtaaacctgtgcagcaaagccg

SEQ ID NO: 44006 - protein, 499 aa, Clostridium tetanomorphum
MNAAIYARYSSDNQREESIDAQIRAIKEYADKNGIIITKVYTDEARSATTDNRPKFLEMIKDSEYGLFDAVIVHKLDRFSRDRYDSAHYKRILKKNNVRLISVLEHLDDSPESIILESVLQGMAEYYSKNLAREVMKGMKETALQCKHTGGLPPLGYNVDPETKKYIINEQEAKAVKLIYEMYSEGHGYNTIVDRLNLLGYKTKIGRSFGKNSISEILRNEKYIGTFIFNKAPKSFNGKRNSHRTKSPEEIIKIENGLPAIISKDIFDKVQKRMLNNKRNASNKAKEVYLLSGKMLCGCCGASMVGHTSYSGRNKAKYSTYNCSARYRTKQCGMKNIQKNFVEELVLNEIKSKILNPSSIKRITKKLIEHYNKMLNSNNDELKSLDKRLKEIDFEIGNIVNAISQGMFHNSFKEKMDNLEAEKTRISSYINEIKATMNSSELNEKLIEQYLIKDINAINEKSANDLKTIINTYVESVLVHEDKVDINLILFFVHINGGG

SEQ ID NO: 44007 - DNA, 50 bp, Clostridium tetanomorphum
  source 1..50: mol_type = genomic DNA
tttgtacatatcaatggtggaggcgaaccgtatcgtatgaaatgtacaat

SEQ ID NO: 44008 - DNA, 40 bp, Clostridium tetanomorphum
  source 1..40: mol_type = genomic DNA
taatatgtatggtggaggcgaggggaatcgaacccctgtc

SEQ ID NO: 44009 - DNA, 50 bp, Clostridium tetanomorphum
  source 1..50: mol_type = genomic DNA
tttgtacatatcaatggtggaggcgtaccgtatcgtatgaaatgtacaat

SEQ ID NO: 44010 - DNA, 40 bp, Clostridium tetanomorphum
  source 1..40: mol_type = genomic DNA
taacaagtgtggtgaagacgtgggtattggaacccttgtg

SEQ ID NO: 44011 - protein, 542 aa, Salipiger thiooxidans
MNVHNPNVALRAALYLRVSTSRQAEHDVSIPDQRKQGEGWCEARGYQLVETFVEAGASATNDRRPEFQRMIEAGTSKPAPFDIVVVHSFSRFFRDHFELEFYVRKLAKNGIRLISITQEMGDDPMHVMMRQIMALFDEYQSKENAKHVLRALKENARQGFWNGSLPPVGYRVVAAEQRGAKTKKKLEIDPLHADTIRLIYRLALEGDGDSGQMGVKAIVKHLNGKGIFTRDGGRWGVGQVHRILTRRTYMGEHQWGKKRKNKTDKDSDEIVIVPVPPIIDCETFDAVQKLLQARNPKTELPARVVIGPTLLTGICYCGNCGGAMTIRTGKSGRYRYYACSIRARQGETGCKGRAIPMDKLDTMVVDHIENRLLDPERLEKLLGSVLGRRSDQAERRRQHIAELQRRAAESELRLKRLYDAIEAGVADLDDPALTERIAGLKVIRDQARADADRAQALLDSPGQSAVSPAMVRQFSQIARDRIRDREGGYRRGHLRALAQRVEVADDAIRIMGSKTELLRTLAGGQVRQSAAAGVPRSGLKWR

SEQ ID NO: 44012 - DNA, 50 bp, Salipiger thiooxidans
  source 1..50: mol_type = genomic DNA
ctggcgtgcccagaagcggactgaagtggcggggcatgcgggatagcgat

SEQ ID NO: 44013 - DNA, 40 bp, Salipiger thiooxidans
  source 1..40: mol_type = genomic DNA
aactctttcaggaagagcttgtggcggagagacagggatt

SEQ ID NO: 44014 - DNA, 50 bp, Salipiger thiooxidans
  source 1..50: mol_type = genomic DNA
ctggcgtgcccagaagcggactgaggtggcggggcatgcgggatagcgat

SEQ ID NO: 44015 - DNA, 40 bp, Salipiger thiooxidans
  source 1..40: mol_type = genomic DNA
acctttgtccggaagagctggcctcggagggacagagact

SEQ ID NO: 44016 - protein, 535 aa, Flavonifractor plautii
MELRSNQTMTALYCRLSQEDELAGESNSIHNQKQILQEYADRNGFQNPRFFVDDGYSGVTFDRPAYLEMMAEVEAGRVSTIIVKDHSRLGRNRLVVGILLEETFAQYHVRYIAINDGVDTINGIDDSIAVRDLFNEWHARDTSKKVKAVIMASARRGERIGTSAPYSYKKDEGNPKRLVPDEQTAPVVARIFELCAGGPGPDKVARMLTQEQVLTPTAYAYRTRGVRHSALNPDRPYAWSGSTVAGILEHEEYIGNTINCRTYTPSFKNKKSLLNPPDKILRFEETHEPLIDLDTWEIVQRVRQGKRRPTKLGQQDMLSGLVYCKDCGSRHYLCRCGSWDESQYTFVCGKYHCHKEDCTPHTIKAAALRQIVLSEIQRVSAEARGHWDELFQRLTSSHQSRAKKELAAKQRELDKGERRLKDLETLFRRSFEELALGHLSDGQFQTLVRGYEQEKSELDAKAETLKDEIANRQDTLLNAERFHKLVDKYTDITELTPELVREFIQRIEIHERSGRYKKKHYTQQVDIYFNFIGQA

SEQ ID NO: 44017 - DNA, 50 bp, Flavonifractor plautii
  source 1..50: mol_type = genomic DNA
atacatccttatcaggacggatgcttgggaccgtaaggataaggatgtta

SEQ ID NO: 44018 - DNA, 40 bp, Flavonifractor plautii
  source 1..40: mol_type = genomic DNA
acagaaaaggcgcggccctttagggccgcgcctcttctgt

SEQ ID NO: 44019 - DNA, 50 bp, Flavonifractor plautii
  source 1..50: mol_type = genomic DNA
atacatccttatcaggacggatgcgcgggaccgtaaggataaggatgtta

SEQ ID NO: 44020 - DNA, 40 bp, Flavonifractor plautii
  source 1..40: mol_type = genomic DNA
acagccaaggcgcgtccgtgcaggggcacacgccttctgc

SEQ ID NO: 44021 - protein, 535 aa, Flavonifractor plautii
MELRSNQTMTALYCRLSQEDELAGESNSIHNQKQILQEYADRNGFQNSRFFVDDGYSGVTFDRPAYLEMMAEVEAGRVSTIIVKDHSRLGRNRLVVGILLEETFAQYHVRYIAINDGVDTINGIDDSIAVRDLFNEWHARDTSKKVKAVIMAAARRGERIGTSAPYGYKKDEGNPKRLVPDEQTAPVVARIFELCAGGPGPDKVARMLTQEQVLTPTAYAYRTRGVRHSALNPDRPYAWSGSTVAGILEHEEYIGNTINCRTYTPSFKNKKSLLNPPDKILRFEETHEPLIDLDTWEIVQRVRQGKRRPTKLGQQDMLSGLVYCKDCGSRHYLCRCGSWDESQYTFVCGKYHCHKEDCTPHTIKAAALRQIVLSEIQRVSVEAREHWDELFQRLTSSHQSRVKKELAAKQRELEKGERRLKDLETLFRRSFEELALGHLSDGPFQTLVKVYEQEKAELEAKSEMLRGEIANRQDTLLNADRFRRLVDKYMDITELTPELVREFIQRIEIHERSGRYKKKHYTQQVDIYFNFIGQA

SEQ ID NO: 44022 - DNA, 50 bp, Flavonifractor plautii; identical to SEQ ID NO: 44017
  source 1..50: mol_type = genomic DNA

SEQ ID NO: 44023 - DNA, 40 bp, Flavonifractor plautii; identical to SEQ ID NO: 44018
  source 1..40: mol_type = genomic DNA

SEQ ID NO: 44024 - DNA, 50 bp, Flavonifractor plautii; identical to SEQ ID NO: 44019
  source 1..50: mol_type = genomic DNA

SEQ ID NO: 44025 - DNA, 40 bp, Flavonifractor plautii; identical to SEQ ID NO: 44020
  source 1..40: mol_type = genomic DNA

SEQ ID NO: 44026 - protein, 491 aa, Corynebacterium sp ATCC 6931
MADTTTQRAAIYARISLDKQEEAGVKRQIHLATKQAEADEAEIIATYVDNNVSAFSGEYRPEYDKLIHAIESREIDIVYVYALDRLTRRTKDTLTLFELCEEHNVSVKANRGYNIDPSDPASRLTIVILGLIAEQESIDRAARIRAAYEDRARTGRPKTGGRRMFGYEADAVTVIDEEAQAILDAAAMVIAGKTLRETVREIFDARGLTATTGRPMTAPTLRDILLNPRVRGLSTFNPTDPKTRKRLIKNRQIIGKGNWPAIIDEATGKKLDAVLRDPSRRRSHSGNAPRYFLASVLTCTCGDPMYARSRRNKAGEPRRYYTCKRSEPGGKHVSIGAEVDDLIEAVILKRMAQPDAIEALQQALSPEDDGLTEQLQELAGERNALLARREQIEEAIIAADVDMSTFARVSKKIEDQISTIDEKMRELTTSRDADPLAVELADGPDFAEWWSGASVEDKRRLTRLLMEIRILPGKAGAKKFDPHRVKITWRQ

SEQ ID NO: 44027 - DNA, 50 bp, Corynebacterium sp ATCC 6931
  source 1..50: mol_type = genomic DNA
cgtacccacaacccgtgttcatttaattccgaacgggggtttagggtacg

SEQ ID NO: 44028 - DNA, 40 bp, Corynebacterium sp ATCC 6931
  source 1..40: mol_type = genomic DNA
tggtgccacaggatcgggtaagtcggaattcctccgaacg

SEQ ID NO: 44029 - DNA, 50 bp, Corynebacterium sp ATCC 6931
  source 1..50: mol_type = genomic DNA
cgtacccacaacccgtgttcatttctttccgaacgggggtttagggtacg

SEQ ID NO: 44030 - DNA, 40 bp, Corynebacterium sp ATCC 6931
  source 1..40: mol_type = genomic DNA
tggggccactggatcgagcctgtcctgattcctctggact

SEQ ID NO: 44031 - protein, 514 aa, Streptosporangiaceae bacterium
MDAATGRGRPVPIDAEYARISRDKRGAAEGVETQQGENADAADELGLTIGASYVDNDLSAYAGVERPEYERLLADVAAGKIGTLIIWHANRLHRSTEEVNAFIKLARAHKLRLYSTTKGAFYNLDKASGRKELRDDTSEAEYESEHRGERVAIARKRQARQGVYGGGVRPYGWGVDTGRVRSVCVNPKAPAMERRYEDRPVLDMTRHSPAEAEEISRWADDLLSGVSMNHVLRDLAARKVATVAMSDDRRVRRNGKAAEHGGWNSRTVQQILTHPRTSGHAVYKGEIVLRNAYEPILHEDVRQALITLFGDPARRTSPGNTPKWLGSLIYRCGKCDDGTTMTVRRNKSGTPVYRCRKTGHCCWPAERTDKYVENVIVARLSRDDVAGLIPHEAEVDVAALRDELVVCDNRKRGAAQSYARGGIDEAQLETITAELDHRMTEIRADLNSATSHSPLSAFAMTDDARRTWEELPIGRKREIVRILLTVTLPPLGRGHSFNRDLIQISGTTPAARAA

SEQ ID NO: 44032 - DNA, 50 bp, Streptosporangiaceae bacterium
  source 1..50: mol_type = genomic DNA
ggttgtcacaatcccgtaacgggcttcccgtctaatggtttgggacattc

SEQ ID NO: 44033 - DNA, 40 bp, Streptosporangiaceae bacterium
  source 1..40: mol_type = genomic DNA
gatgccgagcagcgtcgacttgcccgcgccgttggggccg

SEQ ID NO: 44034 - DNA, 50 bp, Streptosporangiaceae bacterium
  source 1..50: mol_type = genomic DNA
ggttgtcacaatcccgtaacgggcggcccgtctaatggtttgggacattc

SEQ ID NO: 44035 - DNA, 40 bp, Streptosporangiaceae bacterium
  source 1..40: mol_type = genomic DNA
gctgctgtgcagctgctgcgggcccccgccgctgcggccg

SEQ ID NO: 44036 - protein, 510 aa, Pantoea ananatis; identical to SEQ ID NO: 34551

SEQ ID NO: 44037 - DNA, 50 bp, Pantoea ananatis
  source 1..50: mol_type = genomic DNA
tttcaacccatacgccaatgatgcagcagtacctataatatcaattaata

SEQ ID NO: 44038 - DNA, 40 bp, Pantoea ananatis
  source 1..40: mol_type = genomic DNA
acgcacacgccaatgatgcagcaatatttacgcctcaagg

SEQ ID NO: 44039 - DNA, 50 bp, Pantoea ananatis
  source 1..50: mol_type = genomic DNA
tttcaacccatacgccaatgatgcctcagtacctataatatcaattaata

SEQ ID NO: 44040 - DNA, 40 bp, Pantoea ananatis
  source 1..40: mol_type = genomic DNA
atgcaacagccaatgttgactcagtatttacccatcaatg

SEQ ID NO: 44041 - protein, 510 aa, Pantoea ananatis; identical to SEQ ID NO: 10931

SEQ ID NO: 44042 - DNA, 50 bp, Pantoea ananatis
  source 1..50: mol_type = genomic DNA
tttctactcatacgccaatgatgcagcagtacctataatatcaatcaata

SEQ ID NO: 44043 - DNA, 40 bp, Pantoea ananatis; identical to SEQ ID NO: 44038
  source 1..40: mol_type = genomic DNA

SEQ ID NO: 44044 - DNA, 50 bp, Pantoea ananatis
  source 1..50: mol_type = genomic DNA
tttctactcatacgccaatgatgcctcagtacctataatatcaatcaata

SEQ ID NO: 44045 - DNA, 40 bp, Pantoea ananatis; identical to SEQ ID NO: 44040
  source 1..40: mol_type = genomic DNA

SEQ ID NO: 44046 - protein, 538 aa, Mycobacterium avium
MRALIAIRLSRVTDATTSPERQLEACRTLCDQRGYEVVGIAEDLDVSGAVDPFNQKHRPNLARWLAGEHVDDSGNVVPFDVIVAWRVDRLTRSVRHLRRLVDWAEDHGKLVVSATEAHFDMSSPFAAVLIALLGTVAEMELTAMRERNRSAAQHNIRAGKYRGGLPPWGYIPDNSTGEWRLVQDDEQVAIIKEVVRRVLKHEPLRAIAHDLTDRGVPTPRDSFAKHKGRPAKGRGWSSGRLKQSLTSESLLGYAMSGGAVVRAEDGSPVVRAEPILTRDKFDRLVKELAGRENRKEPYARSTALLLRVIFCSCGRQMYALKGGQGRQYRYRCASAQYKNNCGGPSCLAPDADQLVEGAVLGLLKDSERLEKVWDPGDDRSAELATIDAELTDLAGQLGTAAFLPGTPQRQRLNDRIEKLAHRQAVLSRDVTRPAGWAWKPTGELFGAWWKSQDVVGRNVWLRDAGVRLTFDHGQYRLDLGDVDTMTKQLKPAGAVAQWQQNFATMTESGIAGIEILTNGEMIFHHKSGATVSSSELDN

SEQ ID NO: 44047 - DNA, 50 bp, Mycobacterium avium
  source 1..50: mol_type = genomic DNA
ccgttgtaattctgaatagtcgactacgcggcgatgtgaatttagcatcg

SEQ ID NO: 44048 - DNA, 40 bp, Mycobacterium avium
  source 1..40: mol_type = genomic DNA
gggcatgtcgaccgtcgagtacgccatcggcaccatcgcg

SEQ ID NO: 44049 - DNA, 50 bp, Mycobacterium avium
  source 1..50: mol_type = genomic DNA
ccgttgtaattctgaatagtcgacaacgcggcgatgtgaatttagcatcg

SEQ ID NO: 44050 - DNA, 40 bp, Mycobacterium avium
  source 1..40: mol_type = genomic DNA
gggcatatagaccagggagaagcccatcggcaccttggtg

SEQ ID NO: 44051 - protein, 526 aa, Mycobacterium avium
MKALIVIRLSRVTDATTSPERQLQACKELCATRGYEVVGIAEDLDISAGKTTPFNRPELGQWLKRPGEFDVIVVYRVDRIVRRLFDLSDLIKWCQEHRVALVSATEAFLDLTAPFGDIVALLVAKVAEMELAAISERNRSAAQHNLRAGKYRGGPPPWGYLPQQNDAGVWTYVQDPVQVEVILEVVERVLKGEPLRAIAHDLTERGVPTPRDRFAEVRGRPVRGYAFHPGGLKRALTSPTLLGRVVISDTTKDAQDRTEALLVGDDGAPVVRAEPIISRDVFDRLGVELAGRENRKEPTKRTTSLLLGVIFCGECGKPAYKLKGGTGRKPRYRCASAQYKNPCSNRSIPLEWAEEELERRILQNLGSFERRQRVWVPGEDHSSELQEVNDLLADLTDQIGVGQFKRGTPQRARLDSRIAALSARQAELSASPTEPAGWRYEPTGELFSEWWEASDTEARNVWLRQMDFRVVWKSHSEGTRTVVDEFKLDGDLTMDLDADWLFGPMADIVSVLSDPANIEAYNALSK

SEQ ID NO: 44052 - DNA, 50 bp, Mycobacterium avium
  source 1..50: mol_type = genomic DNA
cgggtgtaaagcctgacattggtgtacgcgaaaagttgactttgatcgca

SEQ ID NO: 44053 - DNA, 40 bp, Mycobacterium avium
  source 1..40: mol_type = genomic DNA
cgcgatggtgccgatggcgtactcgacggtcgacatgccc

SEQ ID NO: 44054 - DNA, 50 bp, Mycobacterium avium
  source 1..50: mol_type = genomic DNA
cgggtgtaaagcctgacattggtgttcgcgaaaagttgactttgatcgca

SEQ ID NO: 44055 - DNA, 40 bp, Mycobacterium avium
  source 1..40: mol_type = genomic DNA
caccaaggtgccgatgggcttctccctggtctatatgccc

SEQ ID NO: 44056 - protein, 522 aa, Mycobacterium avium
MRALIVIRLSRVTDATTSPERQLAACKELCTQRGYDVVGIAEDLDISAGKTTPFNRPHLGKWLKRPGEFDVIVVFRVDRIVRKLFDLADLIKWCQEHRVALVSATEAFLDLTAPFGDIVALLVAKVAEMELAAISERNRSAAQHNLRAGKYRGGPAPWGYMPVHTDEGWKLVQDSEQVVVIHEVVERVLSGEPLRSVAHDLTERGVLTPRDRFAQMRGREVKGYSWHPGGLKRALTSPTLLGRIAVTDTSIGAQDRPEASLVVSDDGTPFVRAEPIIDRDKFDRVGVELAGRENRKEPTKRTTSLLLGIIHCGVCGKPAYKLKGGAGRKPRYRCASSQYKNPCSNRSIPLEYAEDEVESKIMHAFGFHPRMVRVWSPGSDSSSDLAEVNAALADLTDQLGTPAFRRGTPQRARLDAKIDALATRQAELSSKPTQLAGWAYEATDELVIEWWATATNEERNVWLRQMDIRVQWRSHSEGTRTVVDEFKMSGGVDALERFVEDGEWTFDVGTTVDIESLTAGRG

SEQ ID NO: 44057 - DNA, 50 bp, Mycobacterium avium
  source 1..50: mol_type = genomic DNA
cgggtgtaaagcgacgcaatcgcgtacgcgaaaagttgactttgatcgca

SEQ ID NO: 44058 - DNA, 40 bp, Mycobacterium avium; identical to SEQ ID NO: 44048
  source 1..40: mol_type = genomic DNA

SEQ ID NO: 44059 - DNA, 50 bp, Mycobacterium avium
  source 1..50: mol_type = genomic DNA
cgggtgtaaagcgacgcaatcgcgaacgcgaaaagttgactttgatcgca

SEQ ID NO: 44060 - DNA, 40 bp, Mycobacterium avium; identical to SEQ ID NO: 44050
  source 1..40: mol_type = genomic DNA

SEQ ID NO: 44061 - protein, 538 aa, Mycobacterium avium
MRALIAIRLSRVTDATTSPERQLEACRTLCDQRGYEVVGIAEDLDVSGAVDPFNQKHRPNLARWLAGEHVDDSGNVVPFDVIVAWRVDRLTRSVRHLRRLVDWAEDHGKLIVSATEAHFDMSSPFAAVLIALLGTVAEMELTAMRERNRSAAQHNIRAGKYRGGLPPWGYIPDNSTGEWRLVQDDEQVAIIKEVVRRVLKHEPLRAIAHDLTDRGVPTPRDSFAKHKGRPAKGRGWSSGRLKQSLTSESLLGYAMSGGAVVRAEDGSPVVRAEPILTRDKFDRLVKELARRENRKEPYARSTALLLRVIFCSCGRQMYALKGGQGRQYRYRCASAQYKNNCGGPSCLAPDADQLVEGAVLGLLKDSERLEKVWDPGDDRSAELATIDAELADLAGQLGTAAFLPGTPQRQRLNDRIEKLAHRQAVLSRDVTRPAGWAWKPTGELFGAWWKSQDVVGRNVWLRDAGVRVTFDHGQYRLDLGDVDTMTKQLKPAGAVAQWQQNFATMTESGIAGIEILTNGEMIFHHKSGATVSSSELDN

SEQ ID NO: 44062 - DNA, 50 bp, Mycobacterium avium; identical to SEQ ID NO: 44047
  source 1..50: mol_type = genomic DNA

SEQ ID NO: 44063 - DNA, 40 bp, Mycobacterium avium; identical to SEQ ID NO: 44053
  source 1..40: mol_type = genomic DNA

SEQ ID NO: 44064 - DNA, 50 bp, Mycobacterium avium
  source 1..50: mol_type = genomic DNA
ccgttgtaattctgaatagtcgacttcgcggcgatgtgaatttagcatcg

SEQ ID NO: 44065 - DNA, 40 bp, Mycobacterium avium; identical to SEQ ID NO: 44055
  source 1..40: mol_type = genomic DNA

SEQ ID NO: 44066 - protein, 546 aa, Mycobacterium avium
MTTNRPLRALIVIRLSRVTDATTSPERQLKDCREVCRQRGYEEVGIAEDLDISGAVNPFDLKKRPHLARWLTQEHHAFDVIVVYRVDRLTRSIRHLQELMHWADDHGKLVVSATEPHFDTSSPFAPVVIALMGTVAQMELEAIRERNASAFKHNFEKGKYRGGVPPFGYVPVRDESGDWRLVQDPAQVDVIREVVERVLAGEPLRAISHDLTRRGVPTPRDAFAAYQGREPKGYAWHSSRLKAFLTSQTLLGRVVSREHLTDAHGRPQRDAKGHKVFGDDVLVRGDDGSPVVRAEPILSRDVFQRLQAELETREVRSDPTSRTTGLLLRIIYCGVCGSPAYRLKGGPGRKARYRCSSAQGSSVQACGNKTIALDWADGEVERQILQNMGPLERKRRVWFAGNDHTDELADINAALTDIADVIGSGQFKRGTPQRAKLDERLTHLTARQAELASLPSQPAGWVYEPTGETLGEWWADASDEEKNIWLRQYGFRYEWHSHSGDNGRIVVDEFKQVGDLAMDLDADVLLGPLGDIMAALASSPPDDDES

SEQ ID NO: 44067 - DNA, 50 bp, Mycobacterium avium
  source 1..50: mol_type = genomic DNA
ggggtgtaaagcacaataatcgcgtagtcgattccctttgattcataccc

SEQ ID NO: 44068 - DNA, 40 bp, Mycobacterium avium; identical to SEQ ID NO: 44048
  source 1..40: mol_type = genomic DNA

SEQ ID NO: 44069 - DNA, 50 bp, Mycobacterium avium
  source 1..50: mol_type = genomic DNA
ggggtgtaaagcacaataatcgcgaagtcgattccctttgattcataccc

SEQ ID NO: 44070 - DNA, 40 bp, Mycobacterium avium; identical to SEQ ID NO: 44050
  source 1..40: mol_type = genomic DNA

SEQ ID NO: 44071 - protein, 545 aa, Mycobacterium avium
MTTNRPLRALIVIRLSRVTDATTSPERQLKDCREVCRQRGYEEVGIAEDLDISGAVNPFDLKKRPHLARWLTQHHAFDVIVVYRVDRLTRSIRHLQELMHWADDHGKLVVSATEPHFDTSSPFAPVVIALMGTVAQMELEAIRERNASAFKHNFEKGKYRGGVPPFGYVPVRDESGDWRLVQDPAQVDVIREVVERVLAGEPLRAISHDLTRRGVPTPRDAFAAYQGREPKGYAWHSSRLKAFLTSQTLLGRVVSREHLTDAHGRPQRDAKGHKVFGDDVLVRGDDGSPVVRAEPILSRDVFQRLQAELETREVRSDPTSRTTGLLLRIIYCGVCGSPAYRLKGGPGRKARYRCSSAQGSSVQACGNKTIALDWADGEVERQILQNMGPLERKRRVWFAGNDHTDELADINAALTDIADVIGSGQFKRGTPQRAKLDERLTHLTARQAELASLPSQPAGWVYEPTGETLGEWWADASDEEKNIWLRQYGFRYEWHSHSGDNGRIVVDEFKQVGDLAMDLDADVLLGPLGDIMAALASSPPDDDES

SEQ ID NO: 44072 - DNA, 50 bp, Mycobacterium avium; identical to SEQ ID NO: 44067
  source 1..50: mol_type = genomic DNA

SEQ ID NO: 44073 - DNA, 40 bp, Mycobacterium avium; identical to SEQ ID NO: 44048
  source 1..40: mol_type = genomic DNA

SEQ ID NO: 44074 - DNA, 50 bp, Mycobacterium avium; identical to SEQ ID NO: 44069
  source 1..50: mol_type = genomic DNA

SEQ ID NO: 44075 - DNA, 40 bp, Mycobacterium avium; identical to SEQ ID NO: 44050
  source 1..40: mol_type = genomic DNA

SEQ ID NO: 44076 - protein, 526 aa, Mycobacterium avium
MRALIVIRLSRVTDATTSPERQLAACQELCTQRGYEVVGLAEDLDISAGKTTPFNRPQLGKWLKRPGEFDVIVVYRVDRIVRRLFDLADLIRWCQEHRVALVSATEAFLDLTAPFGDIVALLVAKVAEMELAAISERNRSAAQHNLRAGKYRGGPPPWGYLPQQDDAGVWKFVQDPVQVEVILEVVERVLKGEPLRPIAHDLNERRVPTPRDRFAEVRGRPVKGYAFHPGGLKRALTSPTLLGRVVISDTTTGAQDRTEALLVGDDGAPVVRAEPIISRDVFDRLGVELAGRENRKEPTKRTTSLLLGVIFCDVCGKPAYKLKGGTGRKPRYRCASAQYKNPCANRSIPLEWAEDELERRILRNLGSFERRQRVWFPGEDHSSELQEVNDLLADLTDQIGVGQFKRGTPQRARLDQRIAALTTRQAELAATSTEPAGWRYEPTGELFSEWWEASDTEARNVWLRQMGFRVVWRSHSEGTRTVVDDFRLDGDLTMDLDADWLFGPIADIVTDPASLPILVVPSDDDE

SEQ ID NO: 44077 - DNA, 50 bp, Mycobacterium avium
  source 1..50: mol_type = genomic DNA
tgggtgtaaagctccacgttcgcgtacgcgaaaagttgactttgatcgca

SEQ ID NO: 44078 - DNA, 40 bp, Mycobacterium avium; identical to SEQ ID NO: 44048
  source 1..40: mol_type = genomic DNA

SEQ ID NO: 44079 - DNA, 50 bp, Mycobacterium avium
  source 1..50: mol_type = genomic DNA
tgggtgtaaagctccacgttcgcgaacgcgaaaagttgactttgatcgca

SEQ ID NO: 44080 - DNA, 40 bp, Mycobacterium avium; identical to SEQ ID NO: 44050
  source 1..40: mol_type = genomic DNA

SEQ ID NO: 44081 - protein, 531 aa, Mycobacterium avium
MTSNTQPRALIVTRLSRVTEATTSPERQLAACEDLCRQRGYKVVGEARDLDVSAGKTTPFNRPQLGKWFKRPGEFDVIVVYRVDRIVRRLFDLADLIRWCQEHRVALVSATEAFLDLTAPFGDIVALLVAKVAEMELAAISERNRSAAQHNLRAGKYRGGPAPWGYVPVHTDEGWKLAHDPDQVVVIHEVVERVLAGEPLRSVAHDLTERGVLTPRDRFAQLRGREVKGYAWHPGGLKRALTSPTLLGRVVISDTTSGAQDRTEALLVGDDGAPVVRADPIITRDVFDRVGAELAGRENRKEPTKRSTSLLLGVIFCDVCGKPAYKLKGGTGRKPRYRCASAQYKNPCSNRSIPLEWAEDELERRILKNLGSFERRQRVWFPGEDHSSELQEVNDLLADLTDQIGVGQFKRGTPQRARLDQRIAALTTRQAELSASPTEPAGWRYEPTGELFSEWWEASDTEARNVWLRQMGFRVVWRSHSEGTRTVVDEFKLDGDLSMDLDADWLFGPIADVVGALSDPANIEAYNALPE

SEQ ID NO: 44082 - DNA, 50 bp, Mycobacterium avium
  source 1..50: mol_type = genomic DNA
tgatggcaaaacgaagcattcgcgtacgcgaatgttgggctttcagtccc

SEQ ID NO: 44083 - DNA, 40 bp, Mycobacterium avium; identical to SEQ ID NO: 44048
  source 1..40: mol_type = genomic DNA

SEQ ID NO: 44084 - DNA, 50 bp, Mycobacterium avium
  source 1..50: mol_type = genomic DNA
tgatggcaaaacgaagcattcgcgaacgcgaatgttgggctttcagtccc

SEQ ID NO: 44085 - DNA, 40 bp, Mycobacterium avium; identical to SEQ ID NO: 44050
  source 1..40: mol_type = genomic DNA

SEQ ID NO: 44086 - protein, 583 aa, Streptococcus suis; identical to SEQ ID NO: 15121

SEQ ID NO: 44087 - DNA, 50 bp, Streptococcus suis; identical to SEQ ID NO: 18192
  source 1..50: mol_type = genomic DNA

SEQ ID NO: 44088 - DNA, 40 bp, Streptococcus suis
  source 1..40: mol_type = genomic DNA
tatttttgctcatagtaggcatgggcttgtagggctggta

SEQ ID NO: 44089 - DNA, 50 bp, Streptococcus suis
  source 1..50: mol_type = genomic DNA
tgtattctcaaggaacagactacagacgtggagtgcgtagtgttgctaca

SEQ ID NO: 44090 - DNA, 40 bp, Streptococcus suis
  source 1..40: mol_type = genomic DNA
tatttcttttcaaagtagggatgggcctgaagtgctgtat

SEQ ID NO: 44091 - protein, 444 aa, Enterococcus gallinarum
MRVSTDQQAKHGDSLREQQETLDEYIKQNKNLKVVDKYIDGGISGQKLNRDEFQRLLDDVKNDQIDLILFTKLDRWFRNLRHYLNTQEILEKHNVSWNAVSQQYYDTTTAYGRTFIAQVMSFAELEAQMTSERIKSVFSNKIQQGEVVSGKVPLGYKIENKRLVPTPDKDIVIDLFDYYVRVGSLRKTTTYLEEKHGIVRDYQSVRKLLTNEKYIGKLRNNPNYCEPIIDKDVFETVQLRLSQNVKTSGSHDYIFRGLVRCADCNGSMSCSTLKSKYIKKTDGEVSYYIRSCYRCTRRRNNPTRCKNKKTYYERALERYLLDNIQTNIAMHVRTLKKEVTKKDSVKRKKDALFVKIERLKKAYLNEIIELDEYKRDREMLENEIANLKEPKINKNIAPLKKVLSDDFFEKYEKASINQKNELWRSIIESIEVSVDGNITINFLP

SEQ ID NO: 44092 - DNA, 50 bp, Enterococcus gallinarum
  source 1..50: mol_type = genomic DNA
tgtgcctaactgatactttccgctgggatgggattaattagtacgtctaa

SEQ ID NO: 44093 - DNA, 40 bp, Enterococcus gallinarum
  source 1..40: mol_type = genomic DNA
aaggttggggactgccactgggatgattgtgcacgcagat

SEQ ID NO: 44094 - DNA, 50 bp, Enterococcus gallinarum
  source 1..50: mol_type = genomic DNA
tgtgcctaactgatactttccgctgtgatgggattaattagtacgtctaa

SEQ ID NO: 44095 - DNA, 40 bp, Enterococcus gallinarum
  source 1..40: mol_type = genomic DNA
aaccttggggtatgcctctgtgatgattggggaagtatat

SEQ ID NO: 44096 - protein, 581 aa, Raoultella ornithinolytica; identical to SEQ ID NO: 13606

SEQ ID NO: 44097 - DNA, 50 bp, Raoultella ornithinolytica; identical to SEQ ID NO: 13582
  source 1..50: mol_type = genomic DNA

SEQ ID NO: 44098 - DNA, 40 bp, Raoultella ornithinolytica
  source 1..40: mol_type = genomic DNA
cggattagccaacttagtgttgcccataattcctcagaat

SEQ ID NO: 44099 - DNA, 50 bp, Raoultella ornithinolytica; identical to SEQ ID NO: 13584
  source 1..50: mol_type = genomic DNA

SEQ ID NO: 44100 - DNA, 40 bp, Raoultella ornithinolytica; identical to SEQ ID NO: 13585
  source 1..40: mol_type = genomic DNA

SEQ ID NO: 44101 - protein, 581 aa, Raoultella ornithinolytica
MKKLYSYIRWSTDKQTGNTSLERQTEKAKQYAAIHGLEYVQLLDAGVSAFRAKNSTSGKLAGFISAVESGVIPSDSWLYVENLDRLSRADATTANELFLRLLRLGLTLVTGMDGKTFTRDSVNQNPTDLMLSILLFMRANEESLTKQKRAFETTLKLIERYRSGLPVNIKSAGSSPWWIDASGPNNEAVKQHPIHFKAAKEAVRLLLSGWGNYRVTNYLNDNSELYPPPAGKKSKNERKEVRWTVPNIKKMRLNRALMGEKVLTLNNITHHLENYFPPVCTSAEFARLQDVASNNKMPQGEQKQVITLLSGMGILRCSHCGGAMTSSSKQGKIRYMCESGKKRMSSCKAWSVSGALVERCLLQPLINGYISLVMDKQDSDQSISGLIDSLRGELEAIQSQIDNTTTAISMGGNLGSLVAMLQGFESRKSAILVDLDKLAQRELLQGSRDQQIEKIVDTVELITPELLEDTTDPDRLNIREVVRAVIARVTIGKGEDKALKLIFDVYDRQRFIYQGEIQTDDRGWIRRGYSIHIEDQSVETHDGIDPALSSKLEELIKVQHDKVDEMLSAFPPLKASWFVSK

SEQ ID NO: 44102 - DNA, 50 bp, Raoultella ornithinolytica
  source 1..50: mol_type = genomic DNA
ttctttgccaaaataaattttggcttgcccaagttcgaaaaggtgataat

SEQ ID NO: 44103 - DNA, 40 bp, Raoultella ornithinolytica; identical to SEQ ID NO: 44098
  source 1..40: mol_type = genomic DNA

SEQ ID NO: 44104 - DNA, 50 bp, Raoultella ornithinolytica
  source 1..50: mol_type = genomic DNA
ttctttgccaaaataaattttggcaagcccaagttcgaaaaggtgataat

SEQ ID NO: 44105 - DNA, 40 bp, Raoultella ornithinolytica; identical to SEQ ID NO: 13585
  source 1..40: mol_type = genomic DNA

SEQ ID NO: 44106 - protein, 454 aa, Mycolicibacterium rutilum
MPTTTARRAAVYLRISLDQTGEGLAVARQREACQQIIEQRGWTAVAEFVDNSISASDARKNRPGYDGLVKAYETRQFDALVCYDLDRLTRQPRQLEDWVDAAEGKGLALVTANGEADLTTDAGRLFARIKMAVARSEVERKSARQKAAALQRAQLGRPPLGVRLTGYTPKGETVPDEADVVRRVFKLFHSGESLKSTARILTDDGVMARNGKPWNPSSVRDILTNPRYAGRAVYDGQVLEGVRGKWEALVADDVFDVVQARLSDPRRRTQQGTDRKHLGSGLYYCDECGARVTGFAGSQYRCKATHVNRVRAGVDQYVMDVVTERLSREDAAVLLARPDESLAPLVERTRELRDQLAAADADYDAGYIDGVRYHARTERVRAELEAVEREMRGYQTGTALDEVLGAPDPAAAFRDGSLMARRAVIEALCEVRLRRGRHGSKTFDPDTVQIIWRS

SEQ ID NO: 44107 - DNA, 50 bp, Mycolicibacterium rutilum
  source 1..50: mol_type = genomic DNA
gatgcttgtccgtggcggaactccaccacattccgcgatggataaacgta

SEQ ID NO: 44108 - DNA, 40 bp, Mycolicibacterium rutilum
  source 1..40: mol_type = genomic DNA
cacgttgaacctgaactccaccacgtcgccgtcggccatg

SEQ ID NO: 44109 - DNA, 50 bp, Mycolicibacterium rutilum
  source 1..50: mol_type = genomic DNA
gatgcttgtccgtggcggaactcctccacattccgcgatggataaacgta

SEQ ID NO: 44110 - DNA, 40 bp, Mycolicibacterium rutilum
  source 1..40: mol_type = genomic DNA
cacgtagaatgtgacttgctcctcttcgccttctgccatg

SEQ ID NO: 44111 - protein, 575 aa, Vibrio parahaemolyticus
MTKIAYSYTRLSTEKQIKGHGFTRQREAIEKVCCQHGWQLSDQTFNDLGVSAWKGANATTGALSQFIDLAKKGAIRPNSVLIVESVDRLSRQQVDKSLRLMLELLEVGVSIFTLSDSRLYTTNSDSVMLDLMMWLMTAQRAHEESEIKSLRVRAAKKKNKELIRKGIIVTRKCPEWLTVSDDKSCFLVNNERAEIVRKIFTWYSQGFSTKPIALKLNELGIPYWGKSSTWSYRHIRSLLKHRGVIGEIQLLKRIDGRDVADGDPVEDYYPAIIDRGLWATCQQIKSSKTTAKGRVVERGMANLFRGLLKCECGSGLAINSSTVKGRTYRFLRCSQLKTTGCQAKNWHYEKTERILLIALRHSLSSFSEEDHAVSLRECQHYLARISEELKEKERQAENAINYLLDKPSKLLEARLQTLEDDIARLKAIQEQAEHRLEAVHYEKSTALDKVEELQRVLEDIANDDDSRHKANGLLRRLIDTITLGSISTPRSKEFMEVSGNDYHGLIIIKRRDGLELRIEVLKDYGLSISWEGDDFTVIECSPTQQLNSQHVSQRLINLGGQTVDLWDDEGWVASS

SEQ ID NO: 44112 - DNA, 50 bp, Vibrio parahaemolyticus; identical to SEQ ID NO: 43507
  source 1..50: mol_type = genomic DNA

SEQ ID NO: 44113 - DNA, 40 bp, Vibrio parahaemolyticus; identical to SEQ ID NO: 4863
  source 1..40: mol_type = genomic DNA

SEQ ID NO: 44114 - DNA, 50 bp, Vibrio parahaemolyticus
  source 1..50: mol_type = genomic DNA
attttgggaatggacaatagtattctggtgctttatcgtattccctaaac

SEQ ID NO: 44115 - DNA, 40 bp, Vibrio parahaemolyticus
  source 1..40: mol_type = genomic DNA
ctccggtgggcatgttctcctggttctttacagactatgg

SEQ ID NO: 44116 - protein, 575 aa, Vibrio parahaemolyticus; identical to SEQ ID NO: 43506

SEQ ID NO: 44117 - DNA, 50 bp, Vibrio parahaemolyticus; identical to SEQ ID NO: 43507
  source 1..50: mol_type = genomic DNA

SEQ ID NO: 44118 - DNA, 40 bp, Vibrio parahaemolyticus; identical to SEQ ID NO: 4863
  source 1..40: mol_type = genomic DNA

SEQ ID NO: 44119 - DNA, 50 bp, Vibrio parahaemolyticus; identical to SEQ ID NO: 44114
  source 1..50: mol_type = genomic DNA

SEQ ID NO: 44120 - DNA, 40 bp, Vibrio parahaemolyticus; identical to SEQ ID NO: 44115
  source 1..40: mol_type = genomic DNA

SEQ ID NO: 44121 - protein, 575 aa, Vibrio parahaemolyticus
MTKIAYSYTRLSTEKQIKGHGFTRQREAIEKVCCQHGWQLSDQTFNDLGVSAWKGANATTGALSQFIDLAKKGAIRPNSVLIVESVDRLSRQQVDKSLRLMLELLEVGVSIFTLSDSKLYTTNSDSVMLDLMMWLMTAQRAHEESEIKSLRVRAAKKKNKELIRKGIIVTRKCPEWLTVSDDKSCFLVNNERAEIVRKIFTWYSQGFSTKPIALKLNELGIPYWGKSSTWSYRHIRSLLKHRGVIGEIQLLKRIDGRDVADGDPVEDYYPAIIDRGLWATCQQIKSSKTTAKGRVVERGMANLFRGLLKCECGSGLAINSSTVKGRTYRFLRCSQLKTTGCQAKNWHYEKTERILLIALRHSLSSFSEEDHAVSLRECQHYLARISEELKEKERQAENAINYLLDKPSKLLEARLQTLEDDIARLKAIQEQAEHRLEAVHYEKSTALDKVEELQRVLEDIANDDDSRHKANGLLRRLIDTITLGSISNPRSKEFMEVSGNDYHGLIIIKRRDGLELRIEVLKDYGLSISWEGDDFTVIECSPTQQLNSQHEHQKFINVGEQTVDLWDDEGWVASS

SEQ ID NO: 44122 - DNA, 50 bp, Vibrio parahaemolyticus
  source 1..50: mol_type = genomic DNA
gtttggttaattgaataagtaattaaggtgctttatcgtattccctaaac

SEQ ID NO: 44123 - DNA, 40 bp, Vibrio parahaemolyticus; identical to SEQ ID NO: 4863
  source 1..40: mol_type = genomic DNA

SEQ ID NO: 44124 - DNA, 50 bp, Vibrio parahaemolyticus
  source 1..50: mol_type = genomic DNA
gtttggttaattgaataagtaattctggtgctttatcgtattccctaaac

SEQ ID NO: 44125 - DNA, 40 bp, Vibrio parahaemolyticus; identical to SEQ ID NO: 44115
  source 1..40: mol_type = genomic DNA

SEQ ID NO: 44126 - protein, 516 aa, Vibrio parahaemolyticus
MSNNKALAFLYIRFSTKKQEQGDSIRRQINAAEAWCKEKDIELSAQTFEDLGVSAFKEGGKRPALEDMLFAIEQGRIPRNSYLLLEDHDRLSRRGWLHTQTLVHKVVKLGVKIVMLRSRTVYDQSNINNISDNIMLMFSADRAFQESERKSQLIKASRNNARKNREVTGKLPAWIARNGDEFIFNDKLTTIQELIGCKLSGKSHQATAKHLNSLGMTTGSGSVWSASGVRAIIQNHALYGAKAYFDTGADGRMNAKPIEIVPDIFPQLISFQQYQSLNVKKASGRTSKRGAFTQLLKCGCCGSAMTTRSSNYKGQPRTYKMCVRATEGSCSQVERVREPERYLNDVLRKLTYQIIKGAYVSRTGEYEKQLETLNETKDKLISLGLTDALTDVYVDMNRVRELIEDSKIADQANIEPDVDFAYVCDIENIEERNTELRKLLSKIVFYCISKRGQTSQWKVVIHQVNGFTISFLLDQQYGFGNTNVKFVADKQQYIKDTQVDMYAWEDEYVDAILDNV

SEQ ID NO: 44127 - DNA, 50 bp, Vibrio parahaemolyticus
  source 1..50: mol_type = genomic DNA
gtacattgcaatgaacatgttactaaagtactatacagattatgatgcac

SEQ ID NO: 44128 - DNA, 40 bp, Vibrio parahaemolyticus; identical to SEQ ID NO: 4863
  source 1..40: mol_type = genomic DNA

SEQ ID NO: 44129 - DNA, 50 bp, Vibrio parahaemolyticus
  source 1..50: mol_type = genomic DNA
gtacattgcaatgaacatgttactctagtactatacagattatgatgcac

SEQ ID NO: 44130 - DNA, 40 bp, Vibrio parahaemolyticus; identical to SEQ ID NO: 44115
  source 1..40: mol_type = genomic DNA

SEQ ID NO: 44131 - protein, 514 aa, Vibrio parahaemolyticus
MNNNKALAVLYVRFSTKKQEAGDSQRRQIESAEQWCERNNAELSAQTYEDLGVSAFKEGGKRPALEDLINAIRMGKIPRDSYLLIEDHDRLSRRGWRYTQDLVYQLVQLGVRLVMLKTGVVYDANNINNIADNIVLMISAERAHQESERKSHLIKASREKARRDKKVTGKLPAWVSRDGDGFTFNDKKATIQELINCKLSGKSHQSTAKHLNSLKMTTGNDSAWSASGVRAIVQNHALYGAKAYFDTGKDGRMNKDPIEIVSDIFPALITYEQYQVLNKRQQSGRTSKRGAYSRLLKCGACGGAMTTRTSNYKGKPRAYKMCVKATEGSCNQVERIREPEVYLNEALHYLKYESSSTLYVSRTSEYQQRLETLNATVDLLTKNGNIEALARVYTDIKEVSDLIEESKVLDQNNVDVKVDFSLISSIEDLEQRNIELRKVLREIRFYCIEKVGQTSKWKIVIEQINGIKKYLVLDQKYGFGNTVVDYASLLTQGTEDNREPWEIEDSEEWESYSY

SEQ ID NO: 44132 - DNA, 50 bp, Vibrio parahaemolyticus
  source 1..50: mol_type = genomic DNA
gtgcattgaaatgaacatgttactaaagtactatacagattgtgatgcac

SEQ ID NO: 44133 - DNA, 40 bp, Vibrio parahaemolyticus; identical to SEQ ID NO: 4863
  source 1..40: mol_type = genomic DNA

SEQ ID NO: 44134 - DNA, 50 bp, Vibrio parahaemolyticus
  source 1..50: mol_type = genomic DNA
gtgcattgaaatgaacatgttactctagtactatacagattgtgatgcac

SEQ ID NO: 44135 - DNA, 40 bp, Vibrio parahaemolyticus; identical to SEQ ID NO: 44115
  source 1..40: mol_type = genomic DNA

SEQ ID NO: 44136 - protein, 454 aa, Clostridium innocuum
MYLGFRSFLVLSINVKEWKKWEEIIMERKDAWYIRESTKKQVLEGFNFDMQLKKIQQFTEIYDYTDEHEVYRESGYSAKTTNRPELNRLKADIRKGEIKRLIVYKMDRLVRRHAGYEEIRKLCDEYNVALVSVFEMFDTATPQGCYALNMLISAAEYEQDILSQRTNDGLTEGAEQGYYMIGGQKPFGWSRYEVGGHKKICVNEHERKVIHKMAALLKAGYSMFQIKMIINDDEYMKSINKTFCENQITNILKSKLNIGIVEYKGKEYTIEGETIFTEEEYAQVQKDLSERSKEGKYDYLFYRKVRNKNGEMAKVKCTVKKNAVYLYHYDIQTKKRINEKDIKDQVVSYLKSTNLLYKQKRNRTHNADVRYLTTRRNQLKKLHENMDLTTEIYLEEMAKLEKEQKKIDKCYKKYVQNFDTWFNSLNFDQQSKLIWQTINYIEVDFETKDLVIYS

SEQ ID NO: 44137 - DNA, 50 bp, Clostridium innocuum
  source 1..50: mol_type = genomic DNA
tcgacatgcgaattactatccgctccaatattgagttgtcgtactgtggt

SEQ ID NO: 44138 - DNA, 40 bp, Clostridium innocuum
  source 1..40: mol_type = genomic DNA
tttatcatccgttctccctccatatatcaaataagccgat

SEQ ID NO: 44139 - DNA, 50 bp, Clostridium innocuum
  source 1..50: mol_type = genomic DNA
tcgacatgcgaattactatccgcttaaatattgagttgtcgtactgtggt

SEQ ID NO: 44140 - DNA, 40 bp, Clostridium innocuum
  source 1..40: mol_type = genomic DNA
tttatcatcacttctcccataataaatctatgcagtcaat

SEQ ID NO: 44141 - protein, 538 aa, Streptomyces ipomoeae
MAKQTGARAAGQRQYDVETEWTEADLALLEELKHAEALLPDDAPRALLSVRLSVLTDDTTSPVRQELDLRMLARERGSRVVGVASDLNVSATKVPPWKRKALGEWLNNRAPEFDEILFWKLDRFVRRLSDLSVMIDWCLKYGKNLVSKYDSIDLTTTAGKIMVTVIGGIAEIEATNTSTRVTSLWDYTKTQSAWLVGKPAYGYTTSKNKDDKTVLVIDRDAYRALHWCRKATMRERPASARRMVKVLVRAGLCGPGLTASTLLRRLRNAALLGYRVEENKSGGVRRSKVILGNDGKPIRVADPVFTEAEFESLQKALDRRGKNQPTRNPDGATKFLGVLLCEDCGTNMTVQKTSNKGRSYEYLRCGKCRSGGQGAPNPEEIYGQLVDDVLRVLGDEPVMVREYHQGAEARRELKQLEESISYYMAGLEPGGRFTKTRFTKERAEKTLDDLIKKLEAIDPESTTDRWVAVHNGKSFRAHWEEGGMEAMAADLLRVGVKCKIKRTKVKGVRAPRIHMKLMIPKDVRDRLVLKEDDFAEAF

SEQ ID NO: 44142 - DNA, 50 bp, Streptomyces ipomoeae
  source 1..50: mol_type = genomic DNA
cgtttgtggccatgtgtcgaactgcgggcataaaccaacgcctccaaatc

SEQ ID NO: 44143 - DNA, 40 bp, Streptomyces ipomoeae; identical to SEQ ID NO: 21558
  source 1..40: mol_type = genomic DNA

SEQ ID NO: 44144 - DNA, 50 bp, Streptomyces ipomoeae
  source 1..50: mol_type = genomic DNA
cgtttgtggccatgtgtcgaactgtaggcataaaccaacgcctccaaatc

SEQ ID NO: 44145 - DNA, 40 bp, Streptomyces ipomoeae
  source 1..40: mol_type = genomic DNA
gaatgcgtgtgtgcatgtgtatgtgcaccctgcagtggaa

SEQ ID NO: 44146 - protein, 542 aa, Anaerotruncus colihominis
MAERVYCLYRVSTNKQVDHDENNQADIPMQRKACHDFAAKMGWVIVGEEQETGVSGYKVSADDRDKLQLIKKYAEQGKFDILLVFMFDRLGRKSDETPFVVEWFTKKGVRVWSVQEGEQRFESHTDRLTNYIRFWQADGESQKTSMRTKTALGQMVEEGRFRGGNAPYGYRLEKSGILNKRKHEVYMLVIDEDEARVVRMMFDLCISSGYGRWRLANFLNDHRIKNRKGQNWHDASVGGILHNPLYKGILRSGETYAGPFEALQIIAPDQFDLAQKLMLERTNERKERRTVPLNTTGQSLLSGNIFCGHCGGRLVLTTNGTTTRLADGTPVHKKRIRYVCYNKTRRRQECTGQTGYTMHILDEIVTEVLHQVFDKMQGASNDMIVGSAVQKQMAMIRSELQRARAENTKANKEYESLKAEVLKAIQGKSALPQDVLTEMLEDTRQKVLSTSERITTLTAELNDGNSKIEEMKAEFNRIVSWSKIFDESPMEVKKMICGYIIKKVSVFRDYRVKIEFNINVEQFLNGIDSINECATYELPMAQ

SEQ ID NO: 44147 - DNA, 50 bp, Anaerotruncus colihominis
  source 1..50: mol_type = genomic DNA
ggggtgcatacccgatggttcgggagcgcaagcaaccgggtgtgctcccc

SEQ ID NO: 44148 - DNA, 40 bp, Anaerotruncus colihominis
  source 1..40: mol_type = genomic DNA
ggggcgtagctcacctgggagagcgcttgaatggcattca

SEQ ID NO: 44149 - DNA, 50 bp, Anaerotruncus colihominis; identical to SEQ ID NO: 44147
  source 1..50: mol_type = genomic DNA

SEQ ID NO: 44150 - DNA, 40 bp, Anaerotruncus colihominis
  source 1..40: mol_type = genomic DNA
gggaattagctcaagtggtagagcgcttgcttagcatgca

SEQ ID NO: 44151 - protein, 540 aa, Angelakisella massiliensis
MENNILIGTRVDCLYRVSTDKQVDYDDKSQADIPMQRRECHRFCEKMGWTIVHEEQEDGVSGHKVRAENRDKLQIIKERAKQGKFDILLVFMFDRIGRIADETPFVVEWFVKNGIRVWSTQEGEQRFDTHTDKLTNYIRFWQADGESEKTSIRTKTALGQLVEDGGFKGGLAPYGYDLVKSGRFNKRKHEVYELVVNEAEAAVVRIIFDKYVHEGYGAQRIATYLNKLGYRARSGKMWHHASIRGIICNLTYTGVLRSGDSRSQVLLHLQIIPPELFEAAQHIRTSRANSAEQERRVPLNTRGQSLLAGNVFCGHCGSRLSLTTNGKAYPCKDDPNRIVKRVRYICYGKTRKQTECDGQTGYTAHTLDGIIDKVVRQIFERMKAVPKSEIVNIRYKEKMEERKALLRSIRAEHTKVSAELNMLKAEVIKSLRGESAFSQDLLGSLISDCETKCLEVQQQLEAAQLAYDEGQAVLEHLNAQYDDIISWADMYDTASMEAKKMIVNCLIKRVEVYRDYKLHIDFNIDFEQFSMGMDIVAIAA

SEQ ID NO: 44152 - DNA, 50 bp, Angelakisella massiliensis
  source 1..50: mol_type = genomic DNA
gggttgtttaccgcttcaaccgggctcccggttagatcggttacataccc

SEQ ID NO: 44153 - DNA, 40 bp, Angelakisella massiliensis
  source 1..40: mol_type = genomic DNA
tgaatgccattcaagcgctctcccaagtgagctacacccc

SEQ ID NO: 44154 - DNA, 50 bp, Angelakisella massiliensis; identical to SEQ ID NO: 44152
  source 1..50: mol_type = genomic DNA

SEQ ID NO: 44155 - DNA, 40 bp, Angelakisella massiliensis; identical to SEQ ID NO: 20
  source 1..40: mol_type = genomic DNA

SEQ ID NO: 44156 - protein, 544 aa, Agrobacterium tumefaciens
MNIQSPHIVQRAALYLRVSTTRQAEHDVSIPDQRKQGETYCASRGYQLVETFVEAGASATNDRRPEFQRMIEAGTSKPAPFDVVVVHSFSRFFRDHFELEFYVRKLAKNGVKLVSITQEMGDDPMHVMMRQIMALFDEYQSKENAKHVLRAMNENARQGFWNGARPPIGYRVVAAEQRGSKIKKKLEIDPLHAETVRLIYRLFLEGGGTSGPKGVKAIATYLNERRMFTRDGGKWGLAQIHAILTRTTYIGEHRFNTRSFKNRERKPENEVSIMAVPPLIERETFDAVQARLKSRNPMLVPARVTSGPTLLTGICFCAKCGGAMTLRTGKGNGGQYTYYTCSTKARQGKVGCEGRSIRMDKLNHLVARHLEERLLQPKRLETILSSLLDRRQERAERQREHLADLNRRITETDQRLGRLYDAIETGVAALDDMGLKDRIANLKAIRDQAAADAERIRARLGSSGHRAVTPDMIDALSETARSSLRIEGGGYRRDHLRAFAQRVEVADDEVRIMGRKSDLLQSLVAASSGESAAFAVRSSVLKWR

SEQ ID NO: 44157 - DNA, 50 bp, Agrobacterium tumefaciens; identical to SEQ ID NO: 43767
  source 1..50: mol_type = genomic DNA

SEQ ID NO: 44158 - DNA, 40 bp, Agrobacterium tumefaciens
  source 1..40: mol_type = genomic DNA
tcagggtaagataaatggcgcacccggcaggattcgaacc

SEQ ID NO: 44159 - DNA, 50 bp, Agrobacterium tumefaciens
  source 1..50: mol_type = genomic DNA
ttcgcagttctgtactgaaatggcgtgccgcgccgggtgaagatgagaac

SEQ ID NO: 44160 - DNA, 40 bp, Agrobacterium tumefaciens
  source 1..40: mol_type = genomic DNA
ttagggtaaaatttcaaacgtagtcggcaggattcgaacc

SEQ ID NO: 44161 - protein, 531 aa, Bradyrhizobium liaoningense
MTTRTKSTRKVAIYARYSSDLQNDRSIEQQFEICRSYAAKMGWEVAEQFEDRAKSGASVFGRPNFIKMVEAAELTRFDIILAEDLDRLSRSQRDTAELYEDLTFKGLEIHTCTDGRINEMHVGIKGVMNKLYLTNLANKVHRGQKDVLNDGRNPGGDIYGYRVRKGEAGILDIDPDTSRIVKRIFEEYAAGASPRKIAAGLNRDGIPSPRGGVWNASTINGNIARGQGILLNERYAGLVVWNKRKNLKNPKTGKLVRRDNPQSDWIYKEVPHLRIIGKDLFETVKRKRTSAGTPNARRAPKSNRLLSGLLRCGACGSGMTLDGHDRNGPRIRCSRHRESGSCANGTKYYVEKVERLVIDRLNNSIDNPQRMGDFIEAYIAERRALSAAAAKNKGKLSSRLVACRKEMERLIDAVKTGILEAHEVAARITTNREEAARLEAEIAAADEAITKIDLHPASLARFRQHLEEASAIGSGEVSDTVRNSIRALIESVAVLPRQRGEPYKVQVAGRVSGLIGEPDRRLNSVIPSAGT

SEQ ID NO: 44162 - DNA, 50 bp, Bradyrhizobium liaoningense
  source 1..50: mol_type = genomic DNA
gtcggctaaacagcgtgatcccctcagccggcaccatcgatttagccgac

SEQ ID NO: 44163 - DNA, 40 bp, Bradyrhizobium liaoningense
  source 1..40: mol_type = genomic DNA
gtcgggggttcaatcccctcagccggcaccagcttttgac

SEQ ID NO: 44164 - DNA, 50 bp, Bradyrhizobium liaoningense
  source 1..50: mol_type = genomic DNA
gtcggctaaacagcgtgatcccctgcgccggcaccatcgatttagccgac

SEQ ID NO: 44165 - DNA, 40 bp, Bradyrhizobium liaoningense
  source 1..40: mol_type = genomic DNA
gtcccgggttcaatccccggcacctccaccagttttggga

SEQ ID NO: 44166 - protein, 513 aa, Chryseobacterium gambrini
MIADLYIRVSTDEQADKGYSQRDQEERLRLHCDRLAITIDRVIFEDHSAKSFDRPEWKSYLQSFKRSRGYREERLILFTKWDRFSRNTSEAYQMIGHLKKNNILPQAIEQPLDLSIPENKVLLAIYLSTPEVENDRRALNVTNGMRRAIKEGRLMGIAPYGYVNKCTEDGRKYVAVKQPEASNIIWAFEQVAKGHLPTAKVRVEMNKREGKNISSNAFMVALRNVTYCGKIYVRAYKNEEEDIVPGKHEALISEELFLKVQHVLKKKGTKDLRLPGGRIINEERYPLRGLLLCPNCGKNLTASSSKGHTKHYYYYHCTTACGFRHHSDKVNKLFKEELSKYDFPTGVLEILKKIIVKNTKSTSENFDGERSTLKSRISELNDRISKARDMYLSDKIDEEDFRDIKNRYKGELDDLEYKLSLLVKSERKEGVEDKIGKALKIVGNISERYINASPIDKRAIVSLIYPEKIIFDGSDFQTSKINSFVDHIFLIRRELSKQKKGDLNSKNLNPRLV

SEQ ID NO: 44167 - DNA, 50 bp, Chryseobacterium gambrini; identical to SEQ ID NO: 41042
  source 1..50: mol_type = genomic DNA

SEQ ID NO: 44168 - DNA, 40 bp, Chryseobacterium gambrini
  source 1..40: mol_type = genomic DNA
aacttctaatgccggtttttgtgacctcgacaggattcaa

SEQ ID NO: 44169 - DNA, 50 bp, Chryseobacterium gambrini
  source 1..50: mol_type = genomic DNA
ttcgaaaaatttaaacccccgtctgatgaactcgctggtaggctatccaa

SEQ ID NO: 44170 - DNA, 40 bp, Chryseobacterium gambrini
  source 1..40: mol_type = genomic DNA
agtttctcagacttgttttgatgaccttgacagcattgaa

SEQ ID NO: 44171 - protein, 471 aa, Mycolicibacterium setense
MNTPADQRIRRAVIYTRVSSDKAKGRSVKEQESECRTECERRGWAVADVLTDNDRSATRFATKDRPEYARLSHVLQPGDVLVVWEPSRAGRSLDHYVDLRRLCTDRGVMLSYSGKLFDLDDGDDRFTTGLDALIAEREAEDIRKRIVRAHNANRAAGKPHGKVSYGYRIIRDPQTGKSVGREPDPVRGPLLAEAAQRVLDGQSFKSVLTWIETRDPDQKWSDVQLRRMLISPTSAGLRTHRGEVTGPGTWKAILTAEQHADLVALFAARRSAPRGPGPRHLLSGIAVCAECEKPMWRHTGGKLADGSRSTVYTCRDRHAARSQATVDAAVLAVIERILSAPESLAALAVAPEPSDTTAAAKAELHDVRHQLAAIEDKMADLSMPAEVGARVAVRLSERIVELERAIAPVYVDPTVREIATAPDALAAWRDLPLTGKRSFIRATLTVTVAPVGRGRWHAKEAGIDITPRKTR

SEQ ID NO: 44172 - DNA, 50 bp, Mycolicibacterium setense
  source 1..50: mol_type = genomic DNA
tataggggatagtcaacgtttaactggttgaaggttataaactccctatt

SEQ ID NO: 44173 - DNA, 40 bp, Mycolicibacterium setense
  source 1..40: mol_type = genomic DNA
tctggcggcgacgatggtgtgattgaaggtgattgccatt

SEQ ID NO: 44174 - DNA, 50 bp, Mycolicibacterium setense
  source 1..50: mol_type = genomic DNA
tataggggatagtcaacgtttaacacgttgaaggttataaactccctatt

SEQ ID NO: 44175 - DNA, 40 bp, Mycolicibacterium setense
  source 1..40: mol_type = genomic DNA
tttggtgtcaacggtggtaacattgaaggtgactcccttg

SEQ ID NO: 44176 - protein, 556 aa, Pseudomonas aeruginosa
MPAAYAYIRYSRAVQQTGDSENRQYTALELFEHTTGIAIAEVVYDRGKSAFRGDNAKTGKFKEILDRIEQGSIHKGDFLVVESIDRITRQRVLDGVELLQGILKKGINIYTTTDQKTYSYNDPSRDFENLLMISLIAKRANEESETKSKRLLSSWNKRREKAQSGEIIIKKGNSIPYGLSVVDGQFVINEEEQKEIQTLFEYLLTYGLNTAIKKINLISKRTWNNGTVNKIITNKTVIGCLATHRVEYENGKSRKISTGYIENYYPKLISPALFYQALDKMKERKSKNYNGRRTEQDFNIFKNQIFCLSCGDKIYYDHRGSRYKGKIYPHFKCNTKRTNPSKCNTDNIRFEYVFGLLLKSLEKLKKTTDVWKLLQIDEGEAGKNNLLNAQFGGLLRRSPSVDTNTLIKEKAAELGQFRTTYENLSISIRSFGGKIPLPVMQELASTEAKIEELTLEVAALEARNHTETIEIEDYQSLIDLFMTEEGRAKINTFFKENNIVFYAEHHKQSTLSQLRISRSTDGAEEELIHTSAFLPKKQILKAWNLNDLQEMFDLTV

SEQ ID NO: 44177 - DNA, 50 bp, Pseudomonas aeruginosa
  source 1..50: mol_type = genomic DNA
acgcggagaaacatttacccgatcataatccggtgttatatttgtccgag

SEQ ID NO: 44178 - DNA, 40 bp, Pseudomonas aeruginosa; identical to SEQ ID NO: 20163
  source 1..40: mol_type = genomic DNA

SEQ ID NO: 44179 - DNA, 50 bp, Pseudomonas aeruginosa
  source 1..50: mol_type = genomic DNA
acgcggagaaacatttacccgatcgcaatccggtgttatatttgtccgag

SEQ ID NO: 44180 - DNA, 40 bp, Pseudomonas aeruginosa
  source 1..40: mol_type = genomic DNA
tccccgccgcaccctcctcgccctcgcactcacccttggt

SEQ ID NO: 44181 - protein, 568 aa, Pseudomonas aeruginosa
MIGCYYFQSEFLRRFIMPKAYAYVRYSRAIQATGDSESRQLTALDLFETSTGTPIAEVVYDKGKSAFRGDNARSGNFKEMLDRMESGAIRKGDYLVVESIDRITRQRVLDGVELLQGILKKGINIYTTVDKKTYSYNDPSRDFENLLMISLIAKRANEESETKSDRLLSVWKARKAKAANGEVIIKKGKSIPYGLRVENDKFVIHEEEQKEIIQLFELLLKFGMNTALIKINETSNRKWSNGSLNKIIKHKTVIGCMATHRIEYTADGKAKKILTGFIENYYPNLIKPTLFYKVIDVMSNRKQKNWSGRRTEQDYNIFKHCIFCSECGGKLYYDHRGSRYKNKIYPFFKCDNARIQKHICAADNIRFEYIFGSLLECINMANRLANDFPKGFKGISTQAIFLNSRVENLLASSDTSQDIEFEKKQNELTSCRTKLSSLNAILTGADFKLPQIMLKEISNLEVRIEKLKIELDLLTASIEVESLEIENSKSIIDLFMTDEGRAKLNTFFKHYEISFFVSHDKSTKQTNFEMRNSKGERVARSIKTYPLKNILGKFGLGDLQTMFDLTVN

SEQ ID NO: 44182 - DNA, 50 bp, Pseudomonas aeruginosa
  source 1..50: mol_type = genomic DNA
ctcggagaaagcatttaccttatgatgattgggtgttattattttcagag

SEQ ID NO: 44183 - DNA, 40 bp, Pseudomonas aeruginosa; identical to SEQ ID NO: 20163
  source 1..40: mol_type = genomic DNA

SEQ ID NO: 44184 - DNA, 50 bp, Pseudomonas aeruginosa
  source 1..50: mol_type = genomic DNA
ctcggagaaagcatttaccttatggcgattgggtgttattattttcagag

SEQ ID NO: 44185 - DNA, 40 bp, Pseudomonas aeruginosa; identical to SEQ ID NO: 44180
  source 1..40: mol_type = genomic DNA

SEQ ID NO: 44186 - protein, 496 aa, Lachnospiraceae bacterium
MEKLRTGALYIRVSTDKQEELSPDAQRRLLLEYAAKNNIILSNEYIFEEDGISGRKADKRPNFQRMIGLAKSKEHPFDAILVWKFSRFARNQEESIVYKSLLRKNNVEVISVSEPLVDGPFGTLIERIIEWMDEYYSIRLSGEVTRGMTENAMRGNFQASPPLGYSITAHKATPVIVESEAKIVRMIFNLYTEQGYSIIEITRQLNALGYKTRAGKSFENRGIKYILTNEVYTGKSVWNKRDSASRPKDKTEWIIADGAHEPIISPEQFQRAKVRLESNYRPRYAKPSGVCSHWLSGIVKCSACGRSLSISLAGANKQGKRYIYLQCYGYLKGKCNVSHAISEKKIVPMVLAALKDAISSENLSFKVINTDSQSNYPAAIDIYQNQLDELTKKEKRIKMAYMDGIDTIEEYRKNKELLLEERKSIESRINALPKPAAKSDTTAALRSKIKTVYDSLLNEDLSMQTRNDLLKSVVEKIVFNKKEATIDVYFYTSNPL

SEQ ID NO: 44187 - DNA, 50 bp, Lachnospiraceae bacterium
  source 1..50: mol_type = genomic DNA
gtttatacgcaaacgcaatctggtcatccaaattgtatttgcgtatatag

SEQ ID NO: 44188 - DNA, 40 bp, Lachnospiraceae bacterium
  source 1..40: mol_type = genomic DNA
ttttagagccccactgtgtcatccagctcggacaggagac

SEQ ID NO: 44189 - DNA, 50 bp, Lachnospiraceae bacterium
  source 1..50: mol_type = genomic DNA
gtttatacgcaaacgcaatctggtcttccaaattgtatttgcgtatatag

SEQ ID NO: 44190 - DNA, 40 bp, Lachnospiraceae bacterium
  source 1..40: mol_type = genomic DNA
tctcagagccccactgtgtcttgcagcttgcaatggaact

SEQ ID NO: 44191 - protein, 561 aa, Nocardia nova
MARRTQPSRSQRSDKAVLLLRVSTKKQLDTAIDIDPDGLSISTQRTQGHAKADAMGVDVVEEFIEPGYSAKTIDKRPVFRELLKYLADHPEVRYVIVYMRSRAFRNRFDAAIIETQLNKMGVRIISAKEDFGEGPHAVAMEGMLDVMNHLMNTLQGLDIQEKMRTKARNGGTIGFAKVGYLNVRVEYEGKQINTIALDPERAPLVHKAFELYATGDYGLEQLEATMTDLGLTARARGTIPERPVSFKLLHRMLQDPYYAGWIEVDSELRPGRHEPIVTQELFDRVQDVVDMRSRRGQRDRIHQHYLKGDLFCDRCHNRGRTSRFIYTEARGRNGHLYGYFLCRGRQDNHCDMPHIPAEQVERAIVDHYATLSLPSSFHTTIRGLLDEALADEQSSVRTMHATLTTRLKELDAKEERLLDLAADGTLPQAKIKSRLRAIETDRSSVQASLAATGAELAVGVEVLKRGLDLLNEPAQLYRTRTDAVRRHLNHTFFERFYLDIDGVRTDRLRQPFADLHNAAGTRSICEHPGTSPRQATSRNGKSGPTLHDVLTDPVSSKAAVV

SEQ ID NO: 44192 - DNA, 50 bp, Nocardia nova
  source 1..50: mol_type = genomic DNA
gaccccgtttcgagtaaggccgctgtggtggacctcgcaggaaactactc

SEQ ID NO: 44193 - DNA, 40 bp, Nocardia nova
  source 1..40: mol_type = genomic DNA
gggctcaggtgaggggcctgtggtggagctgccgggaatt

SEQ ID NO: 44194 - DNA, 50 bp, Nocardia nova; identical to SEQ ID NO: 44192
  source 1..50: mol_type = genomic DNA

SEQ ID NO: 44195 - DNA, 40 bp, Nocardia nova
  source 1..40: mol_type = genomic DNA
tgggtgaggtgaggggcgggtgagggggctgctgggaatg

SEQ ID NO: 44196 - protein, 468 aa, Plantibacter flavus
MRSRLFRNFTDAAVTKRELLAKGIRLVSAKEQFGDGYMGDAMEAITDIMNEVQVRQSGEDIAVKMAHKVAQGGSVGRAKLGYLNARKDFNGNLVNTIEVDRERAPLVTWAFEQYATGHYSIAQLCSLMEEHGLRTRPSRQRPEGAVSKSRMAQMLRDPYYTGVIRYKGKLHGGRHEPLVSKQTFLAVQAVLDQRHRQGDRDRIHFHYLKGLLYCGHCDTAGRASRLVYTQHTGNGGTYEYFVCTGKQRGVCSMGVIRVAAMEAAVARAVAAESIDPATIDALQQTIAGTIDDLLAADREAKVSLRRQLQKLEAQEARLVDLAADGNVAVPVLKQKLEQTQFQREALTEKLGMSEDRLSYGAEKAVAYLELLKQPGRLYEVASDSVRRDLLMAFFERLLVEVVEENSGVDVLQLEGERTAANRAIRQLEGGVASDPQKTNNPSRADAEGVGEPNKRFIHSLGSNKNRLA

SEQ ID NO: 44197 - DNA, 50 bp, Plantibacter flavus
  source 1..50: mol_type = genomic DNA
ttcacttggttcgaacaagaaccgtctggctgaagttctggacctctact

SEQ ID NO: 44198 - DNA, 40 bp, Plantibacter flavus
  source 1..40: mol_type = genomic DNA
cttcatcgtgatgttgctgtctggctggggtacctggact

SEQ ID NO: 44199 - DNA, 50 bp, Plantibacter flavus
  source 1..50: mol_type = genomic DNA
ttcacttggttcgaacaagaaccgtttggctgaagttctggacctctact

SEQ ID NO: 44200 - DNA, 40 bp, Plantibacter flavus
  source 1..40: mol_type = genomic DNA
catcatcttgatgtggatgttgggctgaggctgcttgact

SEQ ID NO: 44201 - protein, 458 aa, Streptomyces atratus
MTLSAIYLRLSRESDDSASLETQRAACRRWLEANGHDPAGAVEYVDSNVSGAKPIEAREGLGTLMDARPGVVVAWKLDRFARSVSEFLRLVAWAESRGTRLATSDNAVNTTTPTGRMVATVLASLAEWERSMISDRITDGHATRRAQGRWGAGRAPFGYRIVRRDGAAYLEVEPEQASKVHAGIRELLNGGTVAGTARTVGLSEPQWRRMLKAPTFRGQRNHKGTLVVAADGVTPVQFAEPIISAAELLAVRQRMLDLATGAERAPRQATPRCSEMSSCYRCGGRLNGGTSDKGVPLYRCKGGHVTIYQETLDGRVEGEFLKVFGRFAEVDIHLEGGNDLSAEMIEAREQAARIGAQMATAGPLMLATYEEMSAKLEAAYAALLAAHDPEVREVETPTGRTMGDAWTAADEPGRTRLLRAMGLRVVLHPKSREDRLDVTWERRDPERDALEDAEAQAS

SEQ ID NO: 44202 - DNA, 50 bp, Streptomyces atratus
  source 1..50: mol_type = genomic DNA
tgtactcaagcatttgctatcgagggggaacacgcctagccttgagtaca

SEQ ID NO: 44203 - DNA, 40 bp, Streptomyces atratus
  source 1..40: mol_type = genomic DNA
gatgttcacctccgtcgagggggagtgggacgaggtcatg

SEQ ID NO: 44204 - DNA, 50 bp, Streptomyces atratus
  source 1..50: mol_type = genomic DNA
tgtactcaagcatttgctatcgagtcggaacacgcctagccttgagtaca

SEQ ID NO: 44205 - DNA, 40 bp, Streptomyces atratus
  source 1..40: mol_type = genomic DNA
gaagtcaccctccttcgcctcggagtgggatgaggtaagg

SEQ ID NO: 44206 - protein, 537 aa, Enterococcus faecium; identical to SEQ ID NO: 43391

SEQ ID NO: 44207 - DNA, 50 bp, Enterococcus faecium; identical to SEQ ID NO: 43392
  source 1..50: mol_type = genomic DNA

SEQ ID NO: 44208 - DNA, 40 bp, Enterococcus faecium
  source 1..40: mol_type = genomic DNA
ctctcctggttgggaaaacgaagttggttaccctgtagaa

SEQ ID NO: 44209 - DNA, 50 bp, Enterococcus faecium
  source 1..50: mol_type = genomic DNA
tcatatctttaactaagggagacgaaagtttcccaaacaaaaggatatta

SEQ ID NO: 44210 - DNA, 40 bp, Enterococcus faecium
  source 1..40: mol_type = genomic DNA
ctcccatggtggggaaatcaaagttgcttggcctgtgtag

SEQ ID NO: 44211 - protein, 514 aa, Flavobacterium psychrophilum
MTHIKQNRKRTAVIYTRVSTDEQKENGFSLQDQHSKLLTDCERNNIEVLKHYQDDHSAKDFNRPEFKNFLKDVESKKLKPDLFICVRPDRFSRNLQNTMGMLTKFKSLGIEFKTLENHTDLDSPESLLPFLIYNLMPQIDNERRGLNTKQGMRQAQREGRTMGRPPLGYLNEKFTKTIVFDPNNAPLIKLGFEELSKGIYTIEEVRKKLIKHGLKNCCKQSFLNHVRNPYYFGLIKVLAWKNEPEEEIIGQHPPLISKELFEEVQTVLFGKRRKLPVALTRKDELPLRGYLTCNKCGGNLTGSPSTSGNGCSKTFYYHCQKGCKERFRADLANDCFENYLDSFKVDPAVLNLYKIILEDVFNQDEQERFKNIKQVEDMIALVKIKLNSLEDKMLDNVVSSEDYHSIKTRINGELSDWKFKKEDLSIDKSAYQKYFEFGLSFLSNAKEYYQKADLEIKQKIVGSIFPEKIIFSNNKYRTSQTNELLKLLTFNINELGNIKNEKATPKSGLSNYAP

SEQ ID NO: 44212 - DNA, 50 bp, Flavobacterium psychrophilum
  source 1..50: mol_type = genomic DNA
agtggcttgtccaactatgctccctcaagtttccttttatcgaaccaact

SEQ ID NO: 44213 - DNA, 40 bp, Flavobacterium psychrophilum
  source 1..40: mol_type = genomic DNA
tggctttttaaaagctccctctcttgggctcgaaccaagg

SEQ ID NO: 44214 - DNA, 50 bp, Flavobacterium psychrophilum; identical to SEQ ID NO: 44212
  source 1..50: mol_type = genomic DNA

SEQ ID NO: 44215 - DNA, 40 bp, Flavobacterium psychrophilum
  source 1..40: mol_type = genomic DNA
ggggattttaaaagctcactcttttggccatgattcaagg

SEQ ID NO: 44216 - protein, 577 aa, Ruminococcus flavefaciens
MEDKLRIAGYCRISVDEELDRDNTSIENQKAIIADYVSKTFPTAELDFYEDRDRSGYTFEQREDYQKLRKKMLLHEYNILIIKDFSRFSRRNSKGLVELEDLRDAGMRIISIGDSIDYPTFDDWTAIQFRFLINEMPVTDTSKKVRSVVKRRQEEGKWICAVPYGYIMTNSKTMQFEVDEPAAEVVREIFRLYSEGWGYKRIANHLTDQHIPTPRMVEKERLEAKGEECKLRGKTEWSIVTVSGILRNDFYIGTLRQGKYRRKKINGSDMKLEETDHIVFENNHTPIVDYKLFASVQEQMKRRTTSNYRGVKKYDNIYSGYLFCGDCGSPMFSMSRPDLSPAYRCGTYHQRGVKGCTSHHTRVDMLDGLLKSFVEKVRDNSAAMLEKLQESIDKERSETSSSKSVIEVLEQQMEDTRTEIKMLARQHVKDIAKHPEREEMLEEIYTEQIDELTLRLEGLRNQMQFTADKHNMIVNVNRTAKTVIEVFDAIINKEKLSKVDVDFIIERITVYEEHVDIKLRPDIDTLLKTGALPEHSNEETAVNFKQGTEITEEASRFAKITSSNGKILSVNVISEGD

SEQ ID NO: 44217 - DNA, 50 bp, Ruminococcus flavefaciens
  source 1..50: mol_type = genomic DNA
agtgtcaatgttatcagtgagggcgaccccttactgacatcattgacaga

SEQ ID NO: 44218 - DNA, 40 bp, Ruminococcus flavefaciens
  source 1..40: mol_type = genomic DNA
catgcgtatcagggaaggcgatccgctggagatatatacc

SEQ ID NO: 44219 - DNA, 50 bp, Ruminococcus flavefaciens
  source 1..50: mol_type = genomic DNA
agtgtcaatgttatcagtgagggctcccccttactgacatcattgacaga

SEQ ID NO: 44220 - DNA, 40 bp, Ruminococcus flavefaciens
  source 1..40: mol_type = genomic DNA
gctgcgtatcaggtcagggtctcagcaggagacagatgcc

SEQ ID NO: 44221 - protein, 541 aa, Enterocloster bolteae; identical to SEQ ID NO: 15221

SEQ ID NO: 44222 - DNA, 50 bp, Enterocloster bolteae
  source 1..50: mol_type = genomic DNA
agttgccttttggctggtggcgcatttccgccaccatacaaagggaaaca

SEQ ID NO: 44223 - DNA, 40 bp, Enterocloster bolteae
  source 1..40: mol_type = genomic DNA
tgtgccatgcaatggaaggttccccacactcatcgccatc

SEQ ID NO: 44224 - DNA, 50 bp, Enterocloster bolteae
  source 1..50: mol_type = genomic DNA
agttgccttttggctggtggcgcagatccgccaccatacaaagggaaaca

SEQ ID NO: 44225 - DNA, 40 bp, Enterocloster bolteae
  source 1..40: mol_type = genomic DNA
cgagccaagcagtggaactgaccacacactcatgtccttc

SEQ ID NO: 44226 - protein, 575 aa, Vibrio fluvialis; identical to SEQ ID NO: 38651

SEQ ID NO: 44227 - DNA, 50 bp, Vibrio fluvialis
  source 1..50: mol_type = genomic DNA
ttggggaatagacattaggattaaagtgctttatcgtattccctgaactt

SEQ ID NO: 44228 - DNA, 40 bp, Vibrio fluvialis
  source 1..40: mol_type = genomic DNA
ttggctggcacgttgttaaggtgctgtaccgtacttaatc

SEQ ID NO: 44229 - DNA, 50 bp, Vibrio fluvialis
  source 1..50: mol_type = genomic DNA
ttggggaatagacattaggattaatttgctttatcgtattccctgaactt

SEQ ID NO: 44230 - DNA, 40 bp, Vibrio fluvialis
  source 1..40: mol_type = genomic DNA
atgcctggaaaattattaatttgctgtagcctagttattc

SEQ ID NO: 44231 - protein, 474 aa, Eggerthella lenta
MANAVIYARYSSAGQREESIEDQVRVCRQAAERDGAAVARVYHDDATTGRTAEGRDGFLRMVADARRGLFDVVYVYKLDRFARNRYDAAVYKAKLRRCGVELRSATEAVGDGPESILLESMLEGLAEYYSVALAENVKRGQLGNAMKCKHNGVRTYGYDLGEDGYYHVNEEEAAVVRRMFRMYADGASMPEIAAAMPEARTKMGKPLSVGFISKSLRLEKYRGVYSYGQTRVEGGMPAIVDGELFEGVQGMLAARARRRRSTMEYLLSGKLFDAEGHRYQSSSGHGKSGRKYTYYRCPATGHQVPQHVLEDAVAKAAADVIAADDDAVEAIVAMVMAAQAEEMADSIAAADATRKRLEQNAREQSRVVDLAAKTGAVDAVAAKLGQLADEREELEASLAEMELSCAMVDEERAEFWVRRLMGRSDPLEAVRLFVDRVVLDRGAGEMRVAFSFDGIKKNPHQAESDGGSRNCRLA

SEQ ID NO: 44232 - DNA, 50 bp, Eggerthella lenta
  source 1..50: mol_type = genomic DNA
gggttcgcgtaactgtcgactggcggggcactcgctacttatagcgaaca

SEQ ID NO: 44233 - DNA, 40 bp, Eggerthella lenta
  source 1..40: mol_type = genomic DNA
gggtttgaaatgcggtggcggagagctggggattcgaacc

SEQ ID NO: 44234 - DNA, 50 bp, Eggerthella lenta
  source 1..50: mol_type = genomic DNA
gggttcgcgtaactgtcgactggcgcggcactcgctacttatagcgaaca

SEQ ID NO: 44235 - DNA, 40 bp, Eggerthella lenta
  source 1..40: mol_type = genomic DNA
gagtttgaaatgaggtggggcatcttttgtgattctaacc

SEQ ID NO: 44236 - protein, 474 aa, Eggerthella lenta
MANAVIYARYSSAGQREESIEDQVRVCRQAAERDGAAIARVYHDDATTGRTAEGRDGFLRMVADARRGLFDVVYVYKLDRFARNRYDAAVYKAKLRRCGVELRSATEAVGDGPESILLESMLEGLAEYYSVALAENVKRGQLGNAMKCKHNGVRTYGYDLGEDGYYHVNEEEAAVVRRMFRMYADGASMPEIAAAMPEARTKMGKPLSVGFISKSLRLEKYRGVYSYGQTRVEGGMPAIVDGELFEGVQGMLAARARRRRSTMDYLLSGKLFDAEGHRYQSSSGHGKSGRKYTYYRCPATGHQVPQHVLEDAVAKAAADVIAADDDAVEAIVAMVMAAQAEEMADSIAAADATRKRLEQNAREQSRVVDLAAKTGAVDAVAAKLGQLADEREELEASLAEMELSCAMVDEERAEFWVRRLMGRSDPLEAVRLFVDRVVLDREAGEMRVAFSFDGIKKNPHQAESDGGSRNCRLA

SEQ ID NO: 44237 - DNA, 50 bp, Eggerthella lenta; identical to SEQ ID NO: 44232
  source 1..50: mol_type = genomic DNA

SEQ ID NO: 44238 - DNA, 40 bp, Eggerthella lenta; identical to SEQ ID NO: 44233
  source 1..40: mol_type = genomic DNA

SEQ ID NO: 44239 - DNA, 50 bp, Eggerthella lenta; identical to SEQ ID NO: 44234
  source 1..50: mol_type = genomic DNA

SEQ ID NO: 44240 - DNA, 40 bp, Eggerthella lenta; identical to SEQ ID NO: 44235
  source 1..40: mol_type = genomic DNA

SEQ ID NO: 44241 - protein, 582 aa, Anaerostipes hadrus
MPRVRKVKKSNSKNHMVWRIAVYIRLSKDDGNDESLSVTNQKKIIREYLENFFEEEYILVDIYIDDGISGTTDDARTEFIRMIDDVKAGLVNCIICKTLARTFRNYADQGYYLEELFPLYNTRFICLGSPSFDTYKNPESITDGMDVPITGLMNDRYSARTSNDVRRTFNMKRRNGEFIGAFAPYGYKKDPTNKNCLIIDEVPAQVVRDIYRWYVEDGMSKIGIVRHLNELGVPTPMDYKHSQGLNLKTPNQAKNDGMWGISTIARILSNRMYIGDMVQGKQRVISYKVHKAIATPESEWFIVENTHEPIIDKVTFEMAQSLSQRDTRTAPTKRNVYLFSGFLRCADCDKSMTKKTNKKNMANGETKEYTYYVCSTYALKNKDKCSRHSISLEDLTEAVLNAIQVQISLVCNMAEVITEINKQEAVCNQSLRLTKQLQTKEHELEKITNVIDNLYMDWKCGEITRAEYVRMKAKFEAKADSMKNAIVNLKAEIELSSKGVGNNDPYLQMFLKHKNITELNRGILAELIDTIYIHENNEITIKFNFADQHKRLLDFISNNQNTSKKEGRVYTLPSLSKSTLAV

SEQ ID NO: 44242 - DNA, 50 bp, Anaerostipes hadrus
  source 1..50: mol_type = genomic DNA
ttttgtctatatatctatgcaccgttcggtacatgcttatatagacaaag

SEQ ID NO: 44243 - DNA, 40 bp, Anaerostipes hadrus
  source 1..40: mol_type = genomic DNA
tgttgtctttccagaaccattgggtcctaaaagcccgatg

SEQ ID NO: 44244 - DNA, 50 bp, Anaerostipes hadrus
  source 1..50: mol_type = genomic DNA
ttttgtctatatatctatgcaccgctcggtacatgcttatatagacaaag

SEQ ID NO: 44245 - DNA, 40 bp, Anaerostipes hadrus
  source 1..40: mol_type = genomic DNA
ggttgtctttccagaaccactgggcccaagagtcatcaag

SEQ ID NO: 44246 - protein, 540 aa, Flavonifractor plautii; identical to SEQ ID NO: 13311

SEQ ID NO: 44247 - DNA, 50 bp, Flavonifractor plautii; identical to SEQ ID NO: 3657
  source 1..50: mol_type = genomic DNA

SEQ ID NO: 44248 - DNA, 40 bp, Flavonifractor plautii
  source 1..40: mol_type = genomic DNA
ggtaaacaagtgggagcggggcgcatgctgccccgatctc

SEQ ID NO: 44249 - DNA, 50 bp, Flavonifractor plautii; identical to SEQ ID NO: 38979
  source 1..50: mol_type = genomic DNA

SEQ ID NO: 44250 - DNA, 40 bp, Flavonifractor plautii
  source 1..40: mol_type = genomic DNA
agtaaggaagtgggggagaagggcatgctgccccgacacc

SEQ ID NO: 44251 - protein, 483 aa, Flavonifractor plautii
MKSRRTRRADSPETSSGFSKFFGSLLTQGDLSRLGRNYILTGQYTEIYFPSKGVRYIAINDNVDTINGESELAPFLNILNEMHARQTSKKVKAAMHTRFANGAHYGAYAPLGYVKDPDKKGHLLIDPETRWIVEKIFDLAVHGRGAASITRILVEEKVPTPGWLNYERYGTFANIYAGAPPEKAYAWTIAQVKSILKEETYIGHSVHNKQSNISFKNKKKVRKPQEEWYRVENTHEAIISEEVFQKVQELIASRRRRQKNGTTQIFSGLVKCADCGWSLAYGVNSQNKNPYAHYHCSKYGQGLRQCSMHYIRYDVLYAYVLARLQYWSMLAQKDEDKLLKRLLNASDRERNSAKKKQAAELKKAEKRKAEVDGLFAKMYEDWSAGRITEYNFNMLSEKYQNEQRELETKIRQLHETMEAAVQTAADAEKWIALMKQYVNPVELTAELLNTLIEKITVHEAVKGEDGSREQEVEIYYRFIGKID

SEQ ID NO: 44252 - DNA, 50 bp, Flavonifractor plautii; identical to SEQ ID NO: 3657
  source 1..50: mol_type = genomic DNA

SEQ ID NO: 44253 - DNA, 40 bp, Flavonifractor plautii; identical to SEQ ID NO: 44248
  source 1..40: mol_type = genomic DNA

SEQ ID NO: 44254 - DNA, 50 bp, Flavonifractor plautii; identical to SEQ ID NO: 38979
  source 1..50: mol_type = genomic DNA

SEQ ID NO: 44255 - DNA, 40 bp, Flavonifractor plautii; identical to SEQ ID NO: 44250
  source 1..40: mol_type = genomic DNA

SEQ ID NO: 44256 - protein, 582 aa, Cereibacter sphaeroides
MTNPASRPKAYSYIRMSSAIQIKGDSFRRQAEASAKYAAEHDLDLIDDYKLADLGVSAFKSDNLTTGALGRFVAECEAGEIEAGSFLLIESLDRLSRDKILDAFSLFARILKTGVKIVTLSDGQVYDGSSDQVGSIYYAISVMIRSNDESKIKSTRGLANWSQKRKLAAEHGVKMSSQCPAWLKLSDDRKSYLIDKERAKIVQRIFEASASGKGANLITKELNRDNVPTFGRGALWAEAFVSKTLRNRAVLGEFQPGQYVNGKRQPAGDPIPNYFPPVIEEELFDIVQASLRGRLLAGGRRGEGQSNIFTHVAFCGYCGSKMRHRSKGSRVKGNPPHRYLTCFNRFNGPGCDCKPLPYAAFERSFLTFVRDVDLRGLLEGAKRKSEAKTIADRITVNQEKVKKADERIRDYLMKIEGAPDLAEIFMERIRELKTEKDDLVRSIEESNDALSKIKSDNVTDEELASLISTFQNPCGENRIRLADRIKSIIERIDVYPNGEIRKDDPAIDLVRASGDPDAEKIIAAMNAGSRLKDDPYFIVTFRNGAVQTVVPNPSNPDDIRVSVYAGEKTRRVEGSAYEYESD

SEQ ID NO: 44257 - DNA, 50 bp, Cereibacter sphaeroides
  source 1..50: mol_type = genomic DNA
aggggtaaaatacccttcacattcttgaacatgattggtattgtgacccc

SEQ ID NO: 44258 - DNA, 40 bp, Cereibacter sphaeroides
  source 1..40: mol_type = genomic DNA
ggtggggccgttcatcttcttcgatcagatgggcccggcg

SEQ ID NO: 44259 - DNA, 50 bp, Cereibacter sphaeroides
  source 1..50: mol_type = genomic DNA
aggggtaaaatacccttcacattccagaacatgattggtattgtgacccc

SEQ ID NO: 44260 - DNA, 40 bp, Cereibacter sphaeroides
  source 1..40: mol_type = genomic DNA
gagggagcagttcatcttccaataacagctaggcccagcg

SEQ ID NO: 44261 - protein, 552 aa, Streptomyces malaysiensis
MPNVVSSPMSELVQRAQWGKLDGMNWAGLTRLSTEEAEGEPLETDADERPGTVRFLTGRDIKSTAEQEKDTRAFIEARGGRYVHTYTEPDTSAWKRKRIRLPDGRAVHRVVRPVFEAALEDLKAGRTPSGEPLDGLIVYDIDRLTRDTRHLEDAIEVVEHYHRPIIDITGTLDLLTDNGRAMARVIVAMANKQSADTARRVKRKHKAMQQQGIPAGGGRPFGWQEDRRTLDRGEAKILREAARRLIDGSPWYTIIAAWNRAGILTANGKKWNVQVLKKIMTNPRICGYRSRTVYEFDPETKTESAHTVIVHDDEGNPVAGQHQPILSVEQWRAMCAIIEASPKRGSGHNARTYLLTGTLRCGKEGCGAKLRAGKAGPSQKKPEGFYFYSCHNSASGQGCGGIRIPGPEADELVRKLLISKHQEEAARRQAVTATAQWPDEEKLARVREDIDDLKQARRDRLISAERYYRDLSEYEAQEKRLTRERNAWQRKALVSSGKPVDIAAEWTRPDITLAEKRAYVERAFTAIVVLPVGRGRRVPLRERLVPLYAEEE

SEQ ID NO: 44262 - DNA, 50 bp, Streptomyces malaysiensis; identical to SEQ ID NO: 2012
  source 1..50: mol_type = genomic DNA

SEQ ID NO: 44263 - DNA, 40 bp, Streptomyces malaysiensis
  source 1..40: mol_type = genomic DNA
aaaacgcttgatctgacgcaactaatacatcaagcgattt

SEQ ID NO: 44264 - DNA, 50 bp, Streptomyces malaysiensis
  source 1..50: mol_type = genomic DNA
aaaatacattcgccagggtgttgcgagcagcggaatgccgaatgtagttt

SEQ ID NO: 44265 - DNA, 40 bp, Streptomyces malaysiensis
  source 1..40: mol_type = genomic DNA
aaaacccttgagatgaggggagaaatacatgaagtgactt

SEQ ID NO: 44266 - protein, 500 aa, Pectobacterium aroidearum; identical to SEQ ID NO: 20091

SEQ ID NO: 44267 - DNA, 50 bp, Pectobacterium aroidearum
  source 1..50: mol_type = genomic DNA
atatgaaactgcatggtgatattgttacttaatagcaaaggatttactct

SEQ ID NO: 44268 - DNA, 40 bp, Pectobacterium aroidearum
  source 1..40: mol_type = genomic DNA
gaactgcatggtgatattgttggtacttaacacagcactt

SEQ ID NO: 44269 - DNA, 50 bp, Pectobacterium aroidearum
  source 1..50: mol_type = genomic DNA
atatgaaactgcatggtgatattgggacttaatagcaaaggatttactct

SEQ ID NO: 44270 - DNA, 40 bp, Pectobacterium aroidearum
  source 1..40: mol_type = genomic DNA
tccctccaaggtagtcttgggggtacttaacacatccctt

SEQ ID NO: 44271 - protein, 510 aa, Pectobacterium quasiaquaticum
MPQDNNGIAYSYVRFSSKKQASGDSLRRQTEMAEEYASRHMLRLSSKNFQDLGISAFREGRRPSLADMLTAIDEGQITAGSTIIIEALDRLSRRGIDATQETVKEILRKDVQIVSLSDGLVLTKSSLNELQSVIRIALAADLAYKESERKAQRLRETKGQQRKDALNGIPINKILPFWLKRTETGYAFSDKVETARQIVTLKQEGKGSNMIAKFLNKQGIAGIRTAQWNHASITKMLKNPALYGAYQTGETNKEREMIQLEIVEGYYPALISKDEWLLLQSDQSKSTRGRRSTDNPYSGLLRCGCGGALIKRKSTVRGKLYVYHGCLNAKDGRCSQNLSIKGLDDALATMLGRLEFKKAVTSDRSAYLEKKQLEKRIANLNITLQEVDEVPSSVIKTISTMEARVKEITEQQAKVEREQRGIDAVNNAKLSSITDSLELNLMLKRVLKSITVTRSGSSWAVRIFHLSGHTQSFMLDNGKLKFVSDSIAMQRLLAEFTEDDQTSSYEPIYD

SEQ ID NO: 44272 - DNA, 50 bp, Pectobacterium quasiaquaticum; identical to SEQ ID NO: 44267
  source 1..50: mol_type = genomic DNA

SEQ ID NO: 44273 - DNA, 40 bp, Pectobacterium quasiaquaticum; identical to SEQ ID NO: 44268
  source 1..40: mol_type = genomic DNA

SEQ ID NO: 44274 - DNA, 50 bp, Pectobacterium quasiaquaticum; identical to SEQ ID NO: 44269
  source 1..50: mol_type = genomic DNA

SEQ ID NO: 44275 - DNA, 40 bp, Pectobacterium quasiaquaticum; identical to SEQ ID NO: 44270
  source 1..40: mol_type = genomic DNA

SEQ ID NO: 44276 - protein, 494 aa, Anaerotruncus massiliensis
MKAVIYARYSSDSQREESIEGQLRECTAFAEKNGITILRHYIDRAFSAKTDNRPEFQNMIKDSSKKLFDMVIVWKLDRFARNRYDSARYKSTLKRNGVKVVSATEVISEGAEGIILESVLEGYAEYYSADLSEKVIRGMTDNALKCKYNGGMLPVGYIVDDEQHFQIDPLTAPFVLETFKRYDEGATMTQIRDWLNEQGMKNTRGQPMTYNSVEHMLKNRRYIGEFRYRDTVVPDGIPIIVPQDMFDRVQERLEKNRKAPARHKAEEDYLLTTKLFCGYCGAYLCGESGTSHTNKIHRYYKCVSVKKRRANCKKKPVKKQWVEDLVVGATMKMVMDDKAIEAIVSMIMDLQDRENTNLPLYEQQLQEAETGIQNLLNAIQQGILTKSTKSRLEELEAVKEDLEIRISNEKLNKPKVSAEFATFWLHRFRKLDVRQMSHRKVLIDTFINAIYLYDDKMVITFNYKDSTKTIAFDDVKTALKKENMGSDLDCDGAP

SEQ ID NO: 44277 - DNA, 50 bp, Anaerotruncus massiliensis
  source 1..50: mol_type = genomic DNA
ggttcggatttggattgcgatggtgcaccaaaccaatataatccgaaccc

SEQ ID NO: 44278 - DNA, 40 bp, Anaerotruncus massiliensis
  source 1..40: mol_type = genomic DNA
ggttcgaccccctctacccgcaccatgactgacaccctaa

SEQ ID NO: 44279 - DNA, 50 bp, Anaerotruncus massiliensis
  source 1..50: mol_type = genomic DNA
ggttcggatttggattgcgatggtcaaccaaaccaatataatccgaaccc

SEQ ID NO: 44280 - DNA, 40 bp, Anaerotruncus massiliensis
  source 1..40: mol_type = genomic DNA
tgtgccacctcctcctcctcagccctggctgacaccctaa

SEQ ID NO: 44281 - protein, 503 aa, Flavonifractor plautii
MNNRIDAIYARQSVDKKDSISIESQIEFCKYELKGGNCKEYTDKGYSGKNTDRPKFQELVRDIKRGLIAKVVVYKLDRISRSILDFANMMELFQQYNVEFVSSTEKFDTSTPMGRAMLNICIVFAQLERETIQKRVTDAYYSRSQRGFKMGGKAPYGFHTEPIKMDGINTKKLVVNPDEAANIRLMFEMYAQPTTSYGDITRYFAEQGILFHGKELIRPTLAQMLRNPVYVQADLDVYEFFKSQGTVIVNDAADFTGMNGCYLYQGRDVKPSKKNDLKDQMLVLAPHEGIVPSDIWLTCRKKLMNNMKIQSARKATHTWLAGKIKCGNCGYALMSIFNPSGKQYLRCTKRLDNKSCPGCGKIITSELEAVVYQQMVKKLASYKTLTGRKKAAKANPKIAALQVELAHVDSEIEKLVDSLTGANNVLLSYVNVKIAELDGRKQELLARIAELTVEAISPEQVSQISGYLDTWENVSFDDKRRVVDLMITTIAATSDSLNITWKI

SEQ ID NO: 44282 - DNA, 50 bp, Flavonifractor plautii; identical to SEQ ID NO: 12
  source 1..50: mol_type = genomic DNA

SEQ ID NO: 44283 - DNA, 40 bp, Flavonifractor plautii
  source 1..40: mol_type = genomic DNA
agctgttttgcaatgcgacttcatcaattagaagccaccg

SEQ ID NO: 44284 - DNA, 50 bp, Flavonifractor plautii; identical to SEQ ID NO: 39864
  source 1..50: mol_type = genomic DNA

SEQ ID NO: 44285 - DNA, 40 bp, Flavonifractor plautii
  source 1..40: mol_type = genomic DNA
aactgttttgcaaagtgacagcagcattttgaaatcccag

SEQ ID NO: 44286 - protein, 514 aa, Streptomyces rhizosphaericus
MATQTAHIGALITNPTSAALSDAREYRRLSDDRGGNSIQEQADGNKEAADGQSWNLGAPYVDADRSASSFATRKRDDFERLISDLETGNFGARILMLWESSRGSRKVSEWARLIDLCRAVHVMIWVTTHGRLYDMEKWSDRKVLLGEAIENEGESERISVRGRRTAASQAKLGRPHGLAPYGLMPTYDPKTGKLDNWIEDEAISIVPKELFRLLEKGYSLRAIERLFLKRGYLNGPRPYVKYKEGKEPKERPFTRHNLRNMATRHAYAGVRVHTDPESGKTEEIQGTWDWIVSPERFYNVQRIINAPGRNPAESREPKYELTMTLKCDPCGGPITVTRANLKSHRESYTCRDGHVFIAKADVDAIVIPAMLGYLARPDVYEMLTARKADDENVRKVRADLAQARANREEMEKATPESLSEARVLARSIEALADKIAGLEEQERGLTLPPVLASLLGAAESVEESWEKAPISARREIAKIILTPQLFGEARILRAPRDVFDPVPASERIDWRRVA

SEQ ID NO: 44287 - DNA, 50 bp, Streptomyces rhizosphaericus
  source 1..50: mol_type = genomic DNA
actaacaatggcgtaacattgtcgccggacggggtcacgcggttgtgagc

SEQ ID NO: 44288 - DNA, 40 bp, Streptomyces rhizosphaericus
  source 1..40: mol_type = genomic DNA
cttgggggcccgcccgtcgcccgaggagcggccggtcagc

SEQ ID NO: 44289 - DNA, 50 bp, Streptomyces rhizosphaericus
  source 1..50: mol_type = genomic DNA
actaacaatggcgtaacattgtcgtcggacggggtcacgcggttgtgagc

SEQ ID NO: 44290 - DNA, 40 bp, Streptomyces rhizosphaericus
  source 1..40: mol_type = genomic DNA
gtttgggcccctccctccctcagaggagcggccaggcagc

SEQ ID NO: 44291 - protein, 461 aa, Micromonospora chalcea
MSCHDQGVISAAIYVRISSDATGEGLGVARQEADCRALAERLGWTVTEVYRDNDISAYSGKVRPDYERLLAAVDAGSVRGLISWHPDRLHRSPKELERFIDLAERTGLQIQTVQSGAVDLTSPSGRMVARMLGATARYESEHKAARIRRKLAENAAAGKPHGGHRPYGWEVDRMTVRESEAAVIRDAARRILAGEPVRSILRDLNDRGLYNASGKPWTHPTFRNVLLHARHAGLREYNGQEMGQAAWPAIIPPETWRALRRVLTDPERVTTPGRAGRLHLLSGIAQCGVCGGPLRVGQAKGQEVYRCQLRTCVSRRRDRLEEYVEAVVIGRLSRPDAAALLTPEDDGGERERAAQAAERVRQRLDDAAASFAAGVITARQLATITGQLRPELAALEAAAAPPPDRAGVLGELVSAEDVSAAWGELSPDARRTVVRLLLEVTVDRGRRGPGFSVEGITLTWR

SEQ ID NO: 44292 - DNA, 50 bp, Micromonospora chalcea
  source 1..50: mol_type = genomic DNA
acccgccttagttgcgtggtgacgcatgtcatgccacgatcaaggcgtga

SEQ ID NO: 44293 - DNA, 40 bp, Micromonospora chalcea
  source 1..40: mol_type = genomic DNA
ccgggccaccgggatgacgcacctcaacgcggtgtccggc

SEQ ID NO: 44294 - DNA, 50 bp, Micromonospora chalcea
  source 1..50: mol_type = genomic DNA
acccgccttagttgcgtggtgacgcgtgtcatgccacgatcaaggcgtga

SEQ ID NO: 44295 - DNA, 40 bp, Micromonospora chalcea
  source 1..40: mol_type = genomic DNA
ccgggccacgtgactgccgcgcctcagcacgggggccggg

SEQ ID NO: 44296 - protein, 566 aa, Mycobacteroides chelonae
MSNNTFATTESTTAVKIAVSYLRVSTKEQAERDGEPDGYSIPAQRDANQRKAISMSAVVQMEFVDRGASARSADRPQLQEMLRYLENNHVDYVIVHKVDRLARNRADDVEISLAIKKAGAELVSATENIDETPSGMLLHDIMSSIGAFYSRNLAVEVLKGMDQKAKTGGTPGMAPIGYLNIPKLNANGSQVRTVEVDPVRGPLIAWAFQAYATGNWTVTALAEELSTRGLTTRPNSRTPGRPVSRSSVHQFLINPYYKGIVTYRKATYDGRHEPLTDAVTWARVQEILRDHAVGEKQREHPHYLKSSVYCWSCGSRLVVTMAKNRHGTVYPYFMCVGRHQKRNACQQKAKLIPVVEQEIEDEYDRQLVHLKAEERDEIEAMISDGLQDFRRSSETNRKTLTVQKDRLVSERMRLLQAHYAGAIPLDLLKQEQDRIASQLASIEERLTSSNTEFDRFEQLIKRALDLATYAAKAYRHAATVKGSDQIRRLFNQAFFTRIRVSDDRATGELAEPFKTLLSPEMAAAAKHHRQTKSAAQNATHTPTGAITGENNKPAPRGAGLKETFLV

SEQ ID NO: 44297 - DNA, 50 bp, Mycobacteroides chelonae
  source 1..50: mol_type = genomic DNA
aggtttgaaagaaacatttttggtacacctccgcgacgccgtttcaaatc

SEQ ID NO: 44298 - DNA, 40 bp, Mycobacteroides chelonae
  source 1..40: mol_type = genomic DNA
gcttcgaagaagagctggtacccccgatgggattcgaacc

SEQ ID NO: 44299 - DNA, 50 bp, Mycobacteroides chelonae
  source 1..50: mol_type = genomic DNA
aggtttgaaagaaacatttttggtccacctccgcgacgccgtttcaaatc

SEQ ID NO: 44300 - DNA, 40 bp, Mycobacteroides chelonae
  source 1..40: mol_type = genomic DNA
gctccccagaagacgtggcccccccgttgggtttccaaac

SEQ ID NO: 44301 - protein, 541 aa, Eubacterium rectale
MAYRKITDIKDTIGMRAVFYARVSTAEEEQLNAIELQIEENRGCIKDHGWKLVGEYIDRSKSGTMVKGRDDYQRLYEDLYEDLFDIVVIKDQERLQRNTLDWYLFINRVVQTGKLLFMYMDGKFYSPDDALITGIRAIIAEEFSRNLSKKLHNYHDHRIEKARQGQEIALQGSGNVYGWDKKDGKYYINPEQAKVRRLMCEGIMARKGSTLIAKELNDAGYRNTVGKPWKPMDIPKFVYDCKNVGTMIINKERHDFESKQTIKLPKEEWVYVENALPPIVTQEEWDLICKIHEERVIATGSDRRGKKTSGYSFSGKLVCGICGAPYWRKQRVSKDEYWVCSTKQTKGRRTRKRDSTMGKAGEINPLGCDNENISYNSLMEIMGVVSERLQANTDTIKHDMINWLTKLRKQLLEANGGHTEADLQRELSRKSKLLDAYLDGILNKQEYQKKAEELDERIIQLKAETEKNKANSGDIAEIDKVLANIDEEVSRYVDGNEKLKVEYLLEHLEQVQIFPDKVIVIVPILSEGIVVEKAQYVSREK

SEQ ID NO: 44302 - DNA, 50 bp, Eubacterium rectale
  source 1..50: mol_type = genomic DNA
aagctcagtatgtatctagggagaaatgttccaagatacatactgaaagc

SEQ ID NO: 44303 - DNA, 40 bp, Eubacterium rectale
  source 1..40: mol_type = genomic DNA
ttatggactgcttggaccgaatggtgctggtaaatctact

SEQ ID NO: 44304 - DNA, 50 bp, Eubacterium rectale
  source 1..50: mol_type = genomic DNA
aagctcagtatgtatctagggagatgtgttccaagatacatactgaaagc

SEQ ID NO: 44305 - DNA, 40 bp, Eubacterium rectale
  source 1..40: mol_type = genomic DNA
ttatggtctgcttggattgtgtggtgctgctggaattccc

SEQ ID NO: 44306 - protein, 506 aa, Escherichia coli
MRSVITYLRYSSAIQGAEGADSTRRQNDLFKQWLKKNSDAQVVASFSDEGLSGYKGKHLTGQFGDMLARIESGEFPEGTILLVESIDRIGRLEHLETEALMNRILGNGLEIHTLQDGLIYTKDALADDLGISIIQRVKAYIAHQESKQKSFRVSQKWEQRTKLALAGEQRLTKMVPGWIDPDTFKLNEHAETVRLIFKLLLSGESLHNIARHLQSNGIKSFSRRKDANGFSVHSVRTILRSETTIGTLPASQRNDRPAIPNYYEAAIDAATFNKAQEILDKNRKGRTPASDNPLTINIFKGLFRCQCGASVHPTGTKNKYAGVYRCNNHLDGRCDVPPLKRKPFDKWVLENFLGMIDVGNDGESERKIAALQHEVEIVTARIKKATALLLEMDDIDELKIQLKELNQKRTELQTTIDSMRRKASLTDKELPQLKDIDLTTKAGRVECQLILSKHLKGLTLGKDSVTVTLQNDTEITIPTNPLPLNDGSPIFEIADKELLDIDAYQL

SEQ ID NO: 44307 - DNA, 50 bp, Escherichia coli; identical to SEQ ID NO: 36192
  source 1..50: mol_type = genomic DNA

SEQ ID NO: 44308 - DNA, 40 bp, Escherichia coli; identical to SEQ ID NO: 7688
  source 1..40: mol_type = genomic DNA

SEQ ID NO: 44309 - DNA, 50 bp, Escherichia coli
  source 1..50: mol_type = genomic DNA
aaaccgaatagactttattcaagggacattgtattgtagctattcggcat

SEQ ID NO: 44310 - DNA, 40 bp, Escherichia coli
  source 1..40: mol_type = genomic DNA
acagccaggaaactcttttgataatgaagtcataatcatt

SEQ ID NO: 44311 - protein, 478 aa, Collinsella aerofaciens
MPKGTRAAIYARFSSHNQRSESIDIQVEKSREHCAENGLDVVRVYSDYAQTGRDVQRVEFQRMMADAKLGLFDYVVIYKVTRIMRNRDEMALARIRLRKAGVEILYAGESLGEGSTRVLNLGMLEVLAEWESAIDSERIRDGINKNAQRGMANGRTHYGWDIVNGYYEVNEREAAVMHRMKNMLFAGSTVAEIKRAVAGERGKRGKPLTHGVITKLLRREQNCGVYDYAGVRIEDGMPALWSREDQDMINSILGSNGRKHNKTRDTNDYPLSGKMWCPECGQYYVGTCGTSKTGRVYHYYKCKKCRRTFRRDAVEEAVLDTVLETIKKPDVRQRIVDVMALYNETKEEKEEPESKRIEREIRRIDTAFERIWQAIEDGIAPPGGKERVAMLREQKAALEADLRQAQASEGANLSGEAIAAWLDHIAQEPDAAEIIETFVRLIEVDGDELKLYFAFDYWGDDFQPKQKKANPEKGSPNN

SEQ ID NO: 44312 - DNA, 50 bp, Collinsella aerofaciens
  source 1..50: mol_type = genomic DNA
accccgaaaagggttcgcctaataatccgtgggtggagcctcagaaaatc

SEQ ID NO: 44313 - DNA, 40 bp, Collinsella aerofaciens
  source 1..40: mol_type = genomic DNA
aatgtcagcggcttatcaaatccaatggtggagacgaagg

SEQ ID NO: 44314 - DNA, 50 bp, Collinsella aerofaciens
  source 1..50: mol_type = genomic DNA
accccgaaaagggttcgcctaatatcccgtgggtggagcctcagaaaatc

SEQ ID NO: 44315 - DNA, 40 bp, Collinsella aerofaciens
  source 1..40: mol_type = genomic DNA
aatgttagcagttaataaatctcaatggtagagatagagg

SEQ ID NO: 44316 - protein, 585 aa, Streptococcus ruminantium
MKKNNVEIIKADSLVRRRGDNFERESKRVAAYCRVSSDSEDQKNSYESQVRHYKDYISQRSDWELAGIYADEGISGTQVGKRQDFQRLINDCVNGEIDYIVTKAIARFARNTLDTLKYVRMLKDMQIGVYFEEENIDTLTMDGELLLTILSSVAQQEVENTSAHVKKGLKMKMQRGELIGFQGCLGYDYDVETKQLSINKKEAKIVRYIFERYLEGIGGKVIARELDELGYKSPRGLDHWNDTTVLGIIKNEKYKGDILMGKTFTVDPISKRRLSNFGEEDKYYIKDNHEPIISKEDFEKAQEIRLRRAGNKKTAANVNGKRERYSKMYAFSSMLECGFCGSILSRRSWHCRSDYRKVVWHCVTSIKKGKKFCKHSKGLEELAIEGAFMEAYRKLYHSNENLMTDLLETIESELNDNSLNKELKRITNKLRTLLKKEENLVNLRLEGKISDTIYNEKYNEISSEKEFLAEEKVNIETTLKSEIDVKKRLTEFKHLLSSQKMLTEFDRAVFESIVEKIIVGGVNSDGEIDPAMLTIIFKTGETQNKDGKQFKSKRKNAKLETDKLCPQNSDEDKKMYSQGPDNTRG

SEQ ID NO: 44317 - DNA, 50 bp, Streptococcus ruminantium; identical to SEQ ID NO: 9832
  source 1..50: mol_type = genomic DNA

SEQ ID NO: 44318 - DNA, 40 bp, Streptococcus ruminantium
  source 1..40: mol_type = genomic DNA
tctattcccgaatacgcatcacgtggaggtagttggtttg

SEQ ID NO: 44319 - DNA, 50 bp, Streptococcus ruminantium
  source 1..50: mol_type = genomic DNA
tgtattctcaaggaccagacaacagacgtggagtgcgtagtgttgctaca

SEQ ID NO: 44320 - DNA, 40 bp, Streptococcus ruminantium
  source 1..40: mol_type = genomic DNA
tgtattcccagctacgcaggaggttgaggtagaaggattg

SEQ ID NO: 44321 - protein, 584 aa, Streptococcus ruminantium
MKKNNVEIIKADSLVRRRGDNFERESKRVAAYCRVSSDSEDQKNSYESQVRHYKDYISQRSDWELAGIYADEGISGTQVGKRQDFQRLINDCVNGEIDYIVTKAIARFARNTLDTLKYVRMLKDMQIGVYFEEENIDTLTMDGELLLTILSSVAQQEVENTSAHVKKGLKMKMQRGELIGFQGCLGYDYDVETKQLSINKKEAKIVRYIFERYLEGIGGKVIARELDELGYKSPRGLDHWNDTTVLGIIKNEKYKGDILMGKTFTVDPISKRRLSNFGEEDKYYIKDNHEPIISKEDFEKAQEIRLRRAGNKKTAANVNGKRERYSKMYAFSSMLECGFCGSILSRRSWHCRSDYRKVVWHCVTSIKKGKKFCKHSKGLEELAIEGAFMEAYRKLYHSNENLMTDLLETIESELNDNSLNKELKRITNKLRTLLKKEENLVNLRLEGKISDTIYNEKYNEISSEKEFLAEEKVNIETTLKSEIDVKKRLTEFKHLLSSQKMLTEFDRAVFESIVEKIIVGGVNSDGEIDPAMLTIIFKTGETQNKDGKQFKSKRKNAKLETDKLCPQNSDEDKKMYSQGPDNTR

SEQ ID NO: 44322 - DNA, 50 bp, Streptococcus ruminantium; identical to SEQ ID NO: 9832
  source 1..50: mol_type = genomic DNA

SEQ ID NO: 44323 - DNA, 40 bp, Streptococcus ruminantium; identical to SEQ ID NO: 44318
  source 1..40: mol_type = genomic DNA

SEQ ID NO: 44324 - DNA, 50 bp, Streptococcus ruminantium; identical to SEQ ID NO: 44319
  source 1..50: mol_type = genomic DNA

SEQ ID NO: 44325 - DNA, 40 bp, Streptococcus ruminantium; identical to SEQ ID NO: 44320
  source 1..40: mol_type = genomic DNA

SEQ ID NO: 44326 - protein, 562 aa, Cronobacter sakazakii
MEKRKLYSYIRWSSDKQAKGSSLQRQLETARRVAHENDLELVEIIDAGLSAFRSKHLEKGSLGAFIEAVKVGQIASDSWLTVESLDRISRDAILKAQGLFMELLELGITIYTGMDNRIYTKSSVTDNPMELMLSIMTFSRANQESMVKSQRQKSATQLKINKFNASVRADNGYPHAIRNSGANVFWSDVSDGTVRPHEYYFPIAKLIVSLRLKGWGYMRIAKHLNENYTPPKGTAKRKHFKDLWSPKLICNFLQSRTLMGEKSIRVDGVEHILKGYYPQVISENEFYSLQNVINRKLANEPNNYIPLLTGIRRFKCGCGAAMVAFFQYDKIRYRCDGMKSLDKRMHCGAKSFNGASIENAIVQICADKIFKDVKTHTSNVGAIQAMLVEAKRKYNRGMDMLLEDTAPQGLNIKLIELEKQIEELQKKLNDELVTEAGVNSSVSWGAVPKDYRDVFNTERLEIKQKIQASTLSIVCTTIKTKGHLFEIKFNDGDVIRFFSDKRRVHVDVHSINNAEIMQSEGIILHDHLDYLVGPEEFIERIRQKHLQMKALQERTLDDIFDI

SEQ ID NO: 44327 - DNA, 50 bp, Cronobacter sakazakii
  source 1..50: mol_type = genomic DNA
tttatcaggttttagtatttcgctaacactaaacgggaaaaccttgtaaa

SEQ ID NO: 44328 - DNA, 40 bp, Cronobacter sakazakii
  source 1..40: mol_type = genomic DNA
tttctcgcgccctttggctaacactaaacgtacgctcata

SEQ ID NO: 44329 - DNA, 50 bp, Cronobacter sakazakii
  source 1..50: mol_type = genomic DNA
tttatcaggttttagtatttcgcttccactaaacgggaaaaccttgtaaa

SEQ ID NO: 44330 - DNA, 40 bp, Cronobacter sakazakii
  source 1..40: mol_type = genomic DNA
tttctagtgtcctgaggcttccactcaacacacgctaaaa

SEQ ID NO: 44331 - protein, 509 aa, Chryseobacterium viscerum
MKTADLYIRVSTDEQADKGYSQRDQEERLRRFCSQNNITVGRIVYEDHSAKSFNRPEWTKLLVDLKKKGSKTNLILFTKWDRFSRNAGDAYQMISILTKLGIDPQAVEQPLDLSIPENKMMLAIYLAAPEVENDRRALNVFYGMRRAVKEGRVMGKAPFGYANKTTENGKKYIALSEPEASKMKWAFEEISKGIYASNQIRLKMNESLRKKISRTSFHIAIRNPVYCGKVFIPKFKEEDAYFIIGQHQPLITESLFYRVQDILDGKKRIQRPNTKILSDEYFPLRGFLICPNCGKNITASASKGRNNRYYYYHCNATCGFRQRAEIVNTVFEDGLKALEMTETVKKLVRKVFLNSYERFIKTPRLEKKTLSDEIDKLNSRLSVARNKLLAETIDDDEYIEIKKDCKEQIERLEIQLNILPEQSKVDIPKLIDQAIESLTNIWKTYSEGGIAVKRQIIGSIFPEKLEFDGNHYRTTRINTIVNLIFQINNELPKKENRRNDNHNHFSCYV

SEQ ID NO: 44332 - DNA, 50 bp, Chryseobacterium viscerum
  source 1..50: mol_type = genomic DNA
tcataatcatttctcctgctatgtagtcaatatagagcaaatgtcgaacc

SEQ ID NO: 44333 - DNA, 40 bp, Chryseobacterium viscerum
  source 1..40: mol_type = genomic DNA
ttgttagatggttaattgtagacccacagggattcgaacc

SEQ ID NO: 44334 - DNA, 50 bp, Chryseobacterium viscerum
  source 1..50: mol_type = genomic DNA
tcataatcatttctcctgctatgtcatcaatatagagcaaatgtcgaacc

SEQ ID NO: 44335 - DNA, 40 bp, Chryseobacterium viscerum
  source 1..40: mol_type = genomic DNA
gggttagcaggataattgacaaaccacagggattgaatcc

SEQ ID NO: 44336 - protein, 535 aa, Pseudomonas fluorescens
MPKAISYIRFSTGKQAKGNSEERQEEAVTQWLKQHPTYTLYDQPFRDRGKSGFSGEHIKQGGGWAKILVAVKQGDFQPGDCILVEAIDRTGRMHTGDMLGDLILPILRSGVSIITLDDNNEYSNDSINTAHMHLLVARIQAAHMFSKQLSERTKASYAIRREKAKSGKEVKRHTAVWLTTSGELEREELVSHIKQVFDLYISGVGKHAIANRLRESGVPEFATCVGSTVGKWLNNKSAIGYWNDIPNACEPVVTHEVFNQAQKRQREVKTTPKTYTSKNFLVGLIKCGVCGANYSIHRKDGKPHNMRCLKHHLQRDAGCTNNETIPYVVIRYIYSLTARHWLGKALQKIQLSINDKRKLEVEVEIETVSTSIDKIVDAIDIVPDSKELINKLSKLNENRKKLDDELEILSRTANGDSDFHEVSLAESNLLLNDPVKLNSLLKLSGYALTVHPDKLITAAEELYPWKYVGVKRSGNNTVGYRIHYLGTETVISPDVKETPDWGLPTDDFAEKWRYLMRKEHKLISVHQPVDWVDLE

SEQ ID NO: 44337 - DNA, 50 bp, Pseudomonas fluorescens
  source 1..50: mol_type = genomic DNA
cggtgtaataaaccggaactgtgcgtgcacaggtgcgataggttacactg

SEQ ID NO: 44338 - DNA, 40 bp, Pseudomonas fluorescens
  source 1..40: mol_type = genomic DNA
cgtggtgctcgacttctgcgtgcagatgaacatggtcctc

SEQ ID NO: 44339 - DNA, 50 bp, Pseudomonas fluorescens
  source 1..50: mol_type = genomic DNA
cggtgtaataaaccggaactgtgcttgcacaggtgcgataggttacactg

SEQ ID NO: 44340 - DNA, 40 bp, Pseudomonas fluorescens
  source 1..40: mol_type = genomic DNA
ggtggggcccgatgcctgcttgcagttgaaaacagtcctc

SEQ ID NO: 44341 - protein, 583 aa, Streptococcus gallolyticus
MKKNNVEIIKADSLVRRRGDNIERHLKRVAAYCRVSSDSEDQKNSYESQVRHYKDYISQRSDWELADIYADEGISGTQVGKRQDFQRLINDCVNGEIDYIVTKAIARFARNTLDTLKYVRMLKDMQIGVYFEEENIDTLTMDGELLLTILSSVAQQEVENTSAHVKKGLKMKMQRGELVGFQGCLGYDYDVETKQISINKKEAKIVRYIFERYLEGIGGKVIARELDELGYKSPRGLKHWNDTTVLGIIKNEKYKGDILMGKTFTVDPISKRRLSNFGEEDKYYIKDNHEPIISKEDFEKAQEIRLRRAGNKKTAANVNGKRERYSKMYAFSSMLECGFCGSILSRRSWHCRSDYRKVVWHCVTSIKKGKKFCKHSKGLEELAIEGAFMEAYRQLYHSNENLMTDLLETIESELNDNSLNKELKRITNKLRTLLKKEENLVNLRLEGKISDSIYNEKYNEISSEKEFLSEEKVNIETTLKSEVDVKKRLTEFKHSLSSQKMLTEFDRTVFESIVEKIIVGGVNSDGEIDPAMLTIIFKTGETQNKNGKKFKSKRKNAKLEPDKLCPQNSDEDKKLYSQGTDNT

SEQ ID NO: 44342 - DNA, 50 bp, Streptococcus gallolyticus
  source 1..50: mol_type = genomic DNA
tgtattctcaaggaacagacaacacacgtcgagtgcgtagtgttgctaca

SEQ ID NO: 44343 - DNA, 40 bp, Streptococcus gallolyticus
  source 1..40: mol_type = genomic DNA
tttgtttccgaatacgcatcatgtggagacggtagtcttg

SEQ ID NO: 44344 - DNA, 50 bp, Streptococcus gallolyticus
  source 1..50: mol_type = genomic DNA
tgtattctcaaggaacagacaacaggcgtcgagtgcgtagtgttgctaca

SEQ ID NO: 44345 - DNA, 40 bp, Streptococcus gallolyticus
  source 1..40: mol_type = genomic DNA
gtatgttccaaaaaagtatggtgtggagatggtagtattg

SEQ ID NO: 44346 - protein, 550 aa, Candidatus Thiodiazotropha sp ex Codakia orbicularis
MQRAAIYARYSSDLQNDASIEDQIRLCSERATAEDWTIQNCYTDAGISGASLMRPGIQSLMQAAMNGEFDVLLCEALDRLSRDQEDIAGIYKRMEFAGVKIITLSEGEISTLHIGLKGTMNAMFLKDLADKTRRGLRGKVENGKSGGGLAYGYKVVKKFDASGEAIKGYREIDEDQAKVICRIFSEYANDNKSPKAIASDLNDEGIPCPSGKAWGQSTIYGNRRRGTGIINNELYIGQLVWNRQRFLKDPRTGKRVARPNPESEWIRQDVPELRIVPQELWDAVKARQKALDALTGHLGAKKRPKYLLSGLLKCGVCGGGFAKINSERYGCASARNKGESVCNNKITVKRDYLEGKVLDALQTHLMRPALVELFCREYTKHMNEMIAAQHAEVKQHKSNMAKLAKEKQNIIEAIKRGIDPDLVKDELEALKAREADLEAKLEVSGHEPKPFIHPAMASRYHAEVKALTHALKESQAGQAAEHIRTLIEKVVLSPKADEDALQIDLYGDLAGILTIATEGNTMSGNEKRPVDGTANGSAIYRPSVQMVAGA

SEQ ID NO: 44347 - DNA, 50 bp, Candidatus Thiodiazotropha sp ex Codakia orbicularis
  source 1..50: mol_type = genomic DNA
gccgtctgttcaaatggtagcgggggctggctaccatcggtacagacccc

SEQ ID NO: 44348 - DNA, 40 bp, Candidatus Thiodiazotropha sp ex Codakia orbicularis
  source 1..40: mol_type = genomic DNA
ttttctgattggtagcgggggctggatttgaaccaacgac

SEQ ID NO: 44349 - DNA, 50 bp, Candidatus Thiodiazotropha sp ex Codakia orbicularis; identical to SEQ ID NO: 44347
  source 1..50: mol_type = genomic DNA

SEQ ID NO: 44350 - DNA, 40 bp, Candidatus Thiodiazotropha sp ex Codakia orbicularis; identical to SEQ ID NO: 13750
  source 1..40: mol_type = genomic DNA

SEQ ID NO: 44351 - protein, 581 aa, Blautia obeum
MEVEIIKAKGAGEDTSTGRKIDRLRVAAYCRVSTDDEDQIKSYNSMVRYYTDLIKSNKQWVFAGVFADKAITGTKTDKREEFQLLIQECLSGNIDLVIAKSIPRFARNTLDTLKYVRMLRERNIAVYFEVEKINTLKDGEFLLTILSSVAQQEVENTSAYVKKGLKMKMKRGELVGFQGCLGYDYDVVTKSLSINEEGAETVRYIFDRYVAGAGSTMIARELNEQGISTIKGNLWTSSSVMGIINNEKYKGDILLGKTFTVDPISKRRLENLGEEDRFYIKNHHEPIISEEKFARAQEIRERRNGGRKKGVAPGKREKFSRQYAFSCMLECGFCGASLSRRRWHSSSKYKKTIWQCVKSTKHGKRFCPDSKGIPEQVIEDAFIESYRMLCTDHKDVLEEFIKRVEKTLSEDSIEDKIEKLNKNAYNIQYKRKKLLESYLEGVVAKDIYEETDMGYEKKLSEVNAQLGMLEQQYDNEGSLQRRLVDFRKALSKNQILEGFDRGIFESIIEKVIVGGYDENGEKDPYKIIFIYKTGFKNEIGNAKERFGKKSKAVEKAKEMCSHIADEVKDVCSYVSDNTCGD

SEQ ID NO: 44352 - DNA, 50 bp, Blautia obeum
  source 1..50: mol_type = genomic DNA
tcctatgttagtgacaatacatgtggagactgtggtgggactacaaagga

SEQ ID NO: 44353 - DNA, 40 bp, Blautia obeum
  source 1..40: mol_type = genomic DNA
gggacaaagaaagtaccgttgagacggtatgcttactctc

SEQ ID NO: 44354 - DNA, 50 bp, Blautia obeum
  source 1..50: mol_type = genomic DNA
tcctatgttagtgacaatacatgttgagactgtggtgggactacaaagga

SEQ ID NO: 44355 - DNA, 40 bp, Blautia obeum
  source 1..40: mol_type = genomic DNA
gggagaaagaagctatctttgagactggatgcctattcta

SEQ ID NO: 44356 - protein, 526 aa, Paraclostridium bifermentans
MKIAIYSRKSVFTGKGESIENQIQLCSDYAKSHFGASQSDIFVYEDEGFSGKNLDRPEFQKLLHDAKNKKFDILICYRLDRVSRNIADFSSLIEDLQKYNISFVSIREQFDTSTPMGRAMMFIASVFAQLERETIAERVRDNMLELAKSGRWLGGTAPLGFNSENISYIDDELKERKMSKLIPNKEELEIIQLIYRKYLELGSITQVVAFMYTTNFTGKRNKEFSASTISKILRNPIYVKSDESVLNYLKNKGINVSGDPNGCGILTYNKKSKGVKQDKSEWIAAVCNSKGIINGNDWLLVQQLLDKNKDNTKSLRLGTSKKGLLTGIIRCSKCGSPMRVTYGRNYHYYTCTKKVNSKGVACDNKNVKGPDIEKVIIESIMDIDTNMLLSNLNDGESSASSREKDITDIQAKIKSKKIQLNSLFERMVDFDDELSDLFKEKINELGKEIKELNKKYSDLVNEVDNTKRDFRNVELVINAVNEFKSYFDCIEDFHKRKFMLGVIVDKINWDGEKQEVDIEFWGSKKK

SEQ ID NO: 44357 - DNA, 50 bp, Paraclostridium bifermentans; identical to SEQ ID NO: 12587
  source 1..50: mol_type = genomic DNA

SEQ ID NO: 44358 - DNA, 40 bp, Paraclostridium bifermentans
  source 1..40: mol_type = genomic DNA
cggtgccattagttttgcatgacctgtatctattagaatt

SEQ ID NO: 44359 - DNA, 50 bp, Paraclostridium bifermentans
  source 1..50: mol_type = genomic DNA
tgtcgcaatacatacaatcatgcaaaacctcggttgttagtattgcaact

SEQ ID NO: 44360 - DNA, 40 bp, Paraclostridium bifermentans
  source 1..40: mol_type = genomic DNA
cagttccaaaagttatgcaaaagctggaactatgaaaatt

SEQ ID NO: 44361 - protein, 596 aa, Escherichia albertii
MMSKIIPYGYLRVSSLEQVKSGGGLDSQDEAVRRYINERSDLFDIEQMVMMSDMASAYSGKQLSEGQLGGGLADVEAGKVPSGSALIAYSIDRLSRQNPWIGTKLISTLIGAGIQIHSVAENQILKSSDPVGAIMSTIYLMRANNESEIKSDRAKTGYQKRLKESIQNKKVLTRQMPRWLFDNDGKYAVEPKMKRVIEFVFDSYIAGQSSGYIANELNNKGWLYGNTYWRGSYVAKLIRDERLIGKHLRYSKQIKGVKREVIETIPDFYPNAVDVEKYHLANNMLTNVAENIRGRTRITYGDTSILRNIFSNVIKCGLCGGDTSVVQNTRKKVVGDKFVYIPYKMFLRCRNKYELKTCTHGDIRYEIIERAILVHLMGLDIANLLATPIDNSIELYKTELERCIADESQYREIIELRRKAGKRVRPETVEVLEDVLDRIDELNRLIESHVVENFVPDFNVDLGNIADVSNVEERSLIKKGIAAIAKRIFYKRVGGYILVEVMYRNLSIKHILVIDNKSSNTVVNFSIKYEEEKHIYTCNSFNMNYLIKSGDFEIHEETTMEDYAQMMNFIDIVSEDEAKKAKEFLVKNFNQNFISK

SEQ ID NO: 44362 - DNA, 50 bp, Escherichia albertii
  source 1..50: mol_type = genomic DNA
aagtgtaggtatgttcctggaaccctgctatcttagagctaactacactg

SEQ ID NO: 44363 - DNA, 40 bp, Escherichia albertii
  source 1..40: mol_type = genomic DNA
ttagtgtaaagcataatgtctcggatctacacctgtgtag

SEQ ID NO: 44364 - DNA, 50 bp, Escherichia albertii
  source 1..50: mol_type = genomic DNA
aagtgtaggtatgttcctggaacctagctatcttagagctaactacactg

SEQ ID NO: 44365 - DNA, 40 bp, Escherichia albertii; identical to SEQ ID NO: 13765
  source 1..40: mol_type = genomic DNA

SEQ ID NO: 44366 - protein, 533 aa, Escherichia albertii
MKGNWGGGLADVEAGKVPSGSALIAYSIDRLSRQNPWIGTKLISTLIGAGIQIHSVAENQILKSSDPVGAIMSTIYLMRANNESEIKSDRAKTGYQKRLKESIQNKKVLTRQMPRWLFDNDGKYAVEPKMKRVIEFVFDSYIAGQSSGYIANELNNKGWLYGNTYWRGSYVAKLIRDERLIGKHLRYSKQIKGVKREVIETIPDFYPNAVDVEKYHLANNMLTNVAENIRGRTRITYGDTSILRNIFSNVIKCGLCGGDTSVVQNTRKKVVGDKFVYIPYKMFLRCRNKYELKTCTHGDIRYEIIERAILVHLMGLDIANLLATPIDNSIELYKTELERCIADESQYREIIELRRKAGKRVRPETVEVLEDVLDRIDELNRLIESHVVENFVPDFNVDLGNIADVSNVEERSLIKKGIAAIAKRIFYKRVGGYILVEVMYRNLSIKHILVIDNKSSNTVVNFSIKYEEEKHIYTCNSFNMNYLIKSGDFEIHEETTMEDYAQMMNFIDIVSEDEAKKAKEFLVKNFNQNFISK

SEQ ID NO: 44367 - DNA, 50 bp, Escherichia albertii; identical to SEQ ID NO: 44362
  source 1..50: mol_type = genomic DNA

SEQ ID NO: 44368 - DNA, 40 bp, Escherichia albertii; identical to SEQ ID NO: 44363
  source 1..40: mol_type = genomic DNA

SEQ ID NO: 44369 - DNA, 50 bp, Escherichia albertii; identical to SEQ ID NO: 44364
  source 1..50: mol_type = genomic DNA

SEQ ID NO: 44370 - DNA, 40 bp, Escherichia albertii; identical to SEQ ID NO: 13765
  source 1..40: mol_type = genomic DNA

SEQ ID NO: 44371 - protein, 596 aa, Klebsiella oxytoca
MSKIIPHLYCRVSTSHQLQGSGMDDQSRVVTENVKSKPEVFDVSKMTLLKDEGLSAYKGEHLQGDGALRGFVDDVESGVIPSGSALIVYSLDRLSRLNPWVGSHLISTLISKGIEIHSVSENSVLKSDDPIGSIISGIYLLRANNESVLKSERAKDGYKARLQKSILNKTILTKQMPRWLFDDNGSYGVKKDMKEAIDYIFESYIDGLSSGHIAKELNTKGLKNNNTSWTGSYVAKLIRDRRLIGEHIRLSAQIKGVKREIIEKIPEFYPVVVDKDRFNLANNMLDNVAKNIRGRTRLTYGDTSVLKNLFSGVIKCGLCNGMTTVVKNSKPVKLPDGSRKYVAGTTFIRCRTKYEYKSCKQGDVKYQTIEKAILEHLMGLDIPALLAKPVDNKLDIWKSELNLCISDRNDYKRLIDERKALGKRASVESLEALQEVTDRIEELTSLIESHVDEDFVPVFDAIDLEQITDITNVEERALIKKSINSLVEKITYRTVSGFVLLEFTYLYRSIKHVVIINKTESKVVVNFSVESRDDVVEFVCNQFMMRYYKYNNEFDVMGSSLIDYSHMVNFVDYLEDDVSRLAKEFLVKNMDRMVLL

SEQ ID NO: 44372 - DNA, 50 bp, Klebsiella oxytoca; identical to SEQ ID NO: 13852
  source 1..50: mol_type = genomic DNA

SEQ ID NO: 44373 - DNA, 40 bp, Klebsiella oxytoca; identical to SEQ ID NO: 21888
  source 1..40: mol_type = genomic DNA

SEQ ID NO: 44374 - DNA, 50 bp, Klebsiella oxytoca; identical to SEQ ID NO: 13854
  source 1..50: mol_type = genomic DNA

SEQ ID NO: 44375 - DNA, 40 bp, Klebsiella oxytoca; identical to SEQ ID NO: 13765
  source 1..40: mol_type = genomic DNA

SEQ ID NO: 44376 - protein, 599 aa, Klebsiella oxytoca
MEKIIPYGYLRVSSLEQVRSGGGLEAQDDAVRNYINEHSDLFDTDRTVMISDAGLSAFSGQQLSEGQLGVFLSDVETGKVPTGSALVCFSIDRLSRQNPWIGTKLISTLIGAGIQIHSVAERQVLKSDDPVGAIMSTIYLMRANNESEIKSSRAKDGYQQRLLKSIHNKTVLTGQMPRWLFNNEGKYAIDPDMQKIINFTFDSYIAGQSTGYIAKQLNDKGWMYGSTSWRGSYVAKLIRDERLIGKHIRYGKQIKGVRREVIETISDFYPVAVDVDKFYLANNMLTNIADKIRGRTRITYGDTSILRNLFSGVIKCGVCGGDTSVVQNTRKNVVNGTVKYIPYKTFLRCRNKYELKSCTQGDLRYEVIEQAILLHLKSLDINALLNKPIDNTVELYKSELEGCISDSLQYQSMINLRKADKKRVRPDTLEAYENVMDRIDELNKLIESHVVDDFVPDFNIDLNRVKNVSNVAERSIIKKGIASISESIKYRRVGDYVLIEIMYRNINAKHVLVIDNKSTEIAVDFSIEYNEMNKMYICNSFNMEYDNSSCKFTLSKTTMEDYAHMMNFVDYVSDDESYKAKEFLVDNFNKFKFLTKNNE

SEQ ID NO: 44377 - DNA, 50 bp, Klebsiella oxytoca
  source 1..50: mol_type = genomic DNA
tagtgttcttaacttccttaatgcctgctattgtagtgttatctacacta

SEQ ID NO: 44378 - DNA, 40 bp, Klebsiella oxytoca; identical to SEQ ID NO: 21888
  source 1..40: mol_type = genomic DNA

SEQ ID NO: 44379 - DNA, 50 bp, Klebsiella oxytoca
  source 1..50: mol_type = genomic DNA
tagtgttcttaacttccttaatgctagctattgtagtgttatctacacta

SEQ ID NO: 44380 - DNA, 40 bp, Klebsiella oxytoca; identical to SEQ ID NO: 13765
  source 1..40: mol_type = genomic DNA

SEQ ID NO: 44381 - protein, 626 aa, Serratia fonticola
MRVSTRGQFKSGGGWDEQDRQTKAYIVNRPDVFDTENIHYITDEGVSAFSGSNVTEGKLGDFLELVKCGDIGEGHALICYSIDRLSRQNTWAGSQLISTLVTAGIEIHSVIDNRPLRKNDQVGAIISTIELMRSNSESMVKSERAVAGYQARLTKSKKNGSVLTGQMPRWLFNKNGMYAIKSEMKLVIDFIFEQYINGVSTGHIADELNLKGWQYKTYWTDSIVDRLLNANDSQMIEGKKNKSKVHECREYISNAYKNDFTLSQIAEDLNGKDIPYTMTAWRGTFVARLIRDRRLIGEHTRYSKSVKGKKRDVIERVSNFYPTAIDNDRFNIANNMLTAVAGNIRGRTRISYGDTTQLKNIFSGILVCGQCNGAISVNKNSKDGVQFIRCRNRYELKACDARDIKYSTVENNILTHLKGINLDELISSPIDTKLELLKSELVLCLEEEQEYLNNIKKRESEKLRIRPTTIQALEEVQDRIDELSREIEVFEVDNFIPTFDVELNRITDQKNVKERSLIKKGISSVVDVIKYYRLDDGVICIEMVYKAKILKHFLIIDNKTGSLLTQSSLEDINGAFWLRSSFCDIDFSTNKVVYHRPPTELDLKIHNMLSRLLLNTVEAMRKDLDP

SEQ ID NO: 44382 - DNA, 50 bp, Serratia fonticola
  source 1..50: mol_type = genomic DNA
tagtgatgttagcatcctgaatgcctgctatgatagccctacatacactt

SEQ ID NO: 44383 - DNA, 40 bp, Serratia fonticola
  source 1..40: mol_type = genomic DNA
ttagtgtaaagcataatgcctccgatctgcacctttgtac

SEQ ID NO: 44384 - DNA, 50 bp, Serratia fonticola
  source 1..50: mol_type = genomic DNA
tagtgatgttagcatcctgaatgctagctatgatagccctacatacactt

SEQ ID NO: 44385 - DNA, 40 bp, Serratia fonticola; identical to SEQ ID NO: 13765
  source 1..40: mol_type = genomic DNA

SEQ ID NO: 44386 - protein, 596 aa, Streptomyces buecherae
MVASVLVREHSGNPSVPTGTMNSAPRNPLVGTVYETETLRGVRCVRLSVLTDETTSPERQREADDIVAAALNIDFGEGDQLREAVDLDVSASKISPFDRPALGGWLSRPDEFDALVWWRFDRAIRSMADMHELAKWAREHRKVLVFAEGIGGGRLVFDFRNPMDPMGELMMMMFAFSAQVEAQSISDRVTGAMAAIRKMALRWRGARPPYGYMPAPMSKEHGGIGWTLAPDPDAVLIIERIVRELFEGKTVSAIAVGLNTEGVPSPRDHWAVKKGRKTGGKTGGVKGLVRDAFMWNPGVITRMLRNETLLGWKMHKGRPVRDAEGNPITATTQPIMTREEFDRIGAVLDERSIDNGDRKDTDALLLRVIHCDSCGGRMYLNKQDSRNNQHPTYKCNPYSRGFKCEKSAHVRGDWADEYVTVEFLRLMGPVETTHVVTVPGYDPEPELRATLAEFAEHQEQKGRQKSRHAAAEWQKRADALDNRIAELETREKREPQRIVTPTGRTIRDEWEAADTAGRRALLVEAGVRLNVRRGTPGGWRKLDTRRVTFTMSGEPDPAADALAGEASALEAETRGDEPTEGASVRLVDPVRELVAA

SEQ ID NO: 44387 - DNA, 50 bp, Streptomyces buecherae
  source 1..50: mol_type = genomic DNA
aactggcagtcaggagtgttggggtctcccaacactcagaactagacgtt

SEQ ID NO: 44388 - DNA, 40 bp, Streptomyces buecherae
  source 1..40: mol_type = genomic DNA
gaattcgttgccctccgggtcgagaagggtcgcccagtgc

SEQ ID NO: 44389 - DNA, 50 bp, Streptomyces buecherae
  source 1..50: mol_type = genomic DNA
aactggcagtcaggagtgttggggcatcccaacactcagaactagacgtt

SEQ ID NO: 44390 - DNA, 40 bp, Streptomyces buecherae
  source 1..40: mol_type = genomic DNA
gaattcgtggccttccgggcattaaggggccccctggtgc

SEQ ID NO: 44391 - protein, 497 aa, Eggerthella guodeyinii
MKAIIYTRVSTTEQADEGGSLASQERICRSFANRSGYEVAKVFEERGVSAKAAERPRLQEMKEYCAEHCGDVDALLIYKVDRLARNARDYTALREYFNGLDIEIISVTEPFKNDPAGRFMENMLAIAAQFENEQRAERCKGGMVEAVKEGRWVWLAPFGYRNTRVNGKKNIAPENNLLRVELLREAWSLIDCGHTVSDALRIVTAKGLVGVSGSPLSFAVFSKMFRKKVYMGVIETDLVPYDVKSDSIVPIVDEDLWWRVYDRLEGRKVNPSKYCMINPLYPLRGLLRCPEGHRMTGSAPTGSSGKRYPKYHCPRCKGKHASYGVAKVDAEFKDYADALSFDTSFSDALAEAVRLNYEEETVLTDKRRKSLERELGELEDYDMEVVRKNLRGKIPDDSMQRMLEANDRRRAEINEELRELAQDAPISDTVIEYGLNALSHLGGTWVTIENIAVRQRFQEWIFPEGVTYDGKTFGTPRLPRCLQINRGDNPPDVPVVE

SEQ ID NO: 44392 - DNA, 50 bp, Eggerthella guodeyinii
  source 1..50: mol_type = genomic DNA
taatccccccgatgtaccagtggtggagcagcagtatatagattggaacg

SEQ ID NO: 44393 - DNA, 40 bp, Eggerthella guodeyinii
  source 1..40: mol_type = genomic DNA
ggccctgtcattgagtggtggaggcgcggagaatcgaact

SEQ ID NO: 44394 - DNA, 50 bp, Eggerthella guodeyinii
  source 1..50: mol_type = genomic DNA
taatccccccgatgtaccagtggtcaagcagcagtatatagattggaacg

SEQ ID NO: 44395 - DNA, 40 bp, Eggerthella guodeyinii
  source 1..40: mol_type = genomic DNA
agccctgtcagtgcctggtcaagcctgaaagaatcaaact

SEQ ID NO: 44396 - protein, 564 aa, Faecalicatena orotica
MKKQQEKKVVRILLRVSSDQQLEADGDLGIQREIVIEDIRQHSDWILDSKEYFEGSNSGYKNSITDRDVLQEALRDAENGEYDILAAYKDDRLGRRMFEVPVYIMSLKNFGVDVYTVKDKMITPQNPNDVTELMMLTMRYGMAQKSSSDTGLRVRDTAQKLVQQGRFLGGKAPYGYRFELSDIITKRQRMINQLVIVPEQAEVVKYIYNLSFHKEFGSGKIASTLNEDDRYRAMAPNDVWKSGTITSILTNPIYAGYPTYNRRQSLNGKHRSLNREDWTYSEIQIEEYIIIEQELWEKVQIKRTERAKKYVKNPKNEGATVISRNDGMLALIDVAYCGYCGRKMTNGTKYDYWTIKATGERRTSKKAIYKCQNVWQGVPHEPWKQIRADKVEPIVFGALAEYIGKLQENENVFEQIMDNQNKEKKQQERKLLQEKQKLDTIKKNIDIMEDKIPEAMTGTYILSLEDLVHNIEKQKQNEQKQAEIVEQIETELQNTTVSIDDWETLRSKIPTWQEIFLSADTPTKRVLVNKLIERIDMTEDEVVIRFKINLDNFLTQSRMTDNES

SEQ ID NO: 44397 - DNA, 50 bp, Faecalicatena orotica
  source 1..50: mol_type = genomic DNA
tcccgaatgaccgataacgaatcggtcactccgtataaggtcattcaggg

SEQ ID NO: 44398 - DNA, 40 bp, Faecalicatena orotica
  source 1..40: mol_type = genomic DNA
accgcgtatacacggagtggtacaggaacaaaggatacga

SEQ ID NO: 44399 - DNA, 50 bp, Faecalicatena orotica
  source 1..50: mol_type = genomic DNA
tcccgaatgaccgataacgaatcgtgcactccgtataaggtcattcaggg

SEQ ID NO: 44400 - DNA, 40 bp, Faecalicatena orotica
  source 1..40: mol_type = genomic DNA
acaacagagaaacggattgtgacagaaacaaaggatactc

SEQ ID NO: 44401 - protein, 496 aa, Paenibacillus sp RUD330
MRCAVYIRVSTDKEEQKTSLQNQRSLFYEYLEKQGWDVFDFYIDVESGTTGKRENLQRLIKDAKERKFDVIAAKELSRLARNGGLSYQIRDIAMENRIHIVTLDNAINTLEGKGEMFGLYAWMYEQESQRTSTRIKAALSSKARKGEFKGSVPPYGYRLNSGKLILAEDDTPNNVKRIFRMYLEGKGFDAIARTLTREGCPTPAQVVGKKNAGLYWQGTSIKKILTNPHYVGDLVQGRQTTVSVTSKVREEIPREKQIVTENAHQAIISREDFEAVQQYMKGRKRQKAKPKAKKHLFTNYLFCADCGKALWYVQYRKGYVCGNYYKHGKHVCSQHSVKEKELIEVILTDIRNNAQTLNENEIMGRLEVKTLQARKQAEKQIQSLQRRIEKLKEQKTGLIRLLASGTITEIEYKEATESGNAELYSLQEQLKGFQSQQGNKSTGESIARLKKELKHFMKLKELTPEMVHRLVERIEVQADGSVNIHYKFAATALLTA

SEQ ID NO: 44402 - DNA, 50 bp, Paenibacillus sp RUD330
  source 1..50: mol_type = genomic DNA
aaatacagtgaccgacactcaagtcatgtggagtgttgctcactgttggt

SEQ ID NO: 44403 - DNA, 40 bp, Paenibacillus sp RUD330
  source 1..40: mol_type = genomic DNA
tatgttcccgcatacgagtcatgtggagtgcgtggtagga

SEQ ID NO: 44404 - DNA, 50 bp, Paenibacillus sp RUD330
  source 1..50: mol_type = genomic DNA
aaatacagtgaccgacactcaagttttgtggagtgttgctcactgttggt

SEQ ID NO: 44405 - DNA, 40 bp, Paenibacillus sp RUD330
  source 1..40: mol_type = genomic DNA
taggtttcaacatacgaatttggggtagtgggtggaagga

SEQ ID NO: 44406 - protein, 587 aa, Oscillibacter sp
MKSSVTLRSLKKTAEELVNTIKVAIYIRVSTHWQVDKESLPVQRRDLISYCKLILNTENYVIFEDPGYSAKNTDRPDFQKMMARVRTGEFTHILVWKIDRISRNLLDFAAMYQELKELGVTFVSKNEQFDTSTAIGEAMLKIILVFAELERHMTSERVTAAMLSRATNGKWNGGKVPFGYRYDKDAQEFLIDEDEAKVVKLMYDLYDEQRSLLAVSKELNERGYRSRKGALWSPVTVGNLMRSPFYIGVMRYNYRDESGTTFSFKPESEWIMFEEHHPQIVTHEQWSRVVTTMQSQRRGQPGHGKTFNRGNVHIFAGLVTCGYCGSLMRATKDRVRSDGSRPSIYTCASKRTGNSCPNKYISDLTIGPFVLNYIANIIRARKSFGASTSIEVLERKLLRGDTFRDVAHIGRPGLEELYRHFQGTQGVEQNFMASPGATASNEEEERELLLAEKHRKERALNRLKALYLYSEEEQAMSEAEYIVERKRLMDSLEAIDSRLKEIDVALAQQIKLSDEEFIQKASYFIMAQQLTEKRHIDYTRFMRRADPQIVKNFVQNVCANFCIKSGRVTSIRFKNGIEHQFFYKDSE

SEQ ID NO: 44407 - DNA, 50 bp, Oscillibacter sp
  source 1..50: mol_type = genomic DNA
atctggtctccaatgaacatggcatcccgtatgttcacgggagaccagat

SEQ ID NO: 44408 - DNA, 40 bp, Oscillibacter sp
  source 1..40: mol_type = genomic DNA
tcagctgatgaacatggcgtcgccaaaggagaagaagcgg

SEQ ID NO: 44409 - DNA, 50 bp, Oscillibacter sp
  source 1..50: mol_type = genomic DNA
atctggtctccaatgaacatggcaaaccgtatgttcacgggagaccagat

SEQ ID NO: 44410 - DNA, 40 bp, Oscillibacter sp
  source 1..40: mol_type = genomic DNA
tcagaggatgaagttgccgaagacaactgagaaaaagagg

SEQ ID NO: 44411 - protein, 502 aa, Streptococcus pneumoniae; identical to SEQ ID NO: 38421

SEQ ID NO: 44412 - DNA, 50 bp, Streptococcus pneumoniae
  source 1..50: mol_type = genomic DNA
ggtttggacaatgatgaacaagttgagacggtagcacttttgtccaaact

SEQ ID NO: 44413 - DNA, 40 bp, Streptococcus pneumoniae; identical to SEQ ID NO: 20423
  source 1..40: mol_type = genomic DNA

SEQ ID NO: 44414 - DNA, 50 bp, Streptococcus pneumoniae
  source 1..50: mol_type = genomic DNA
ggtttggacaatgatgaacaagttttgacggtagcacttttgtccaaact

SEQ ID NO: 44415 - DNA, 40 bp, Streptococcus pneumoniae
  source 1..40: mol_type = genomic DNA
tgctcaaagaaataaagtattttgcttaagtttattagag

SEQ ID NO: 44416 - protein, 506 aa, Streptococcus pneumoniae
MSKEKIKVYLYTRVSTSIQIEGYSLEAQKSRMKAFAIYNDYEIVGEYEDAGKSGKSGKSIEGRIQFNRMMEDIKSGKDGVSFVLVFKLSRFARNAADVLSTLQIMQDYGVNLICVEDGIDSSKDAGKLMISVLSAVAEIERENIRIQTMEGRIQKAREGKWNGGFAPYGYKLEDGKLFINEEEAVAIRTIFDQYVNTTIGANGISKYLENHGIRKIPRQNGKNPLFDAGLIRKILKNPVYNGKIAFGRRTLEKVHGTRNEYKQVEQDEYLISEGIHEAIVSDEVWQAAQVKLKSQAKKYEHVNKGKDTRTHLLSGIVKCPICGVGMFGNKCIKKKKDGTKYKDFYYYGCNHRQMIRGHKCTFSKQIRKELRKSHSTKFKLIEEIDNLDVEDKHYKRRKQDLDDRLYRMYDKIDELESSLIDAKAKKQTIEAEKLTGDNIYKVLIYFDKLYKVMNDVERRQLISALISEIQVYEEKQSNGQWLKSITFKLPIIEENLNIGLDNDEQV

SEQ ID NO: 44417 - DNA, 50 bp, Streptococcus pneumoniae; identical to SEQ ID NO: 44412
  source 1..50: mol_type = genomic DNA

SEQ ID NO: 44418 - DNA, 40 bp, Streptococcus pneumoniae; identical to SEQ ID NO: 20423
  source 1..40: mol_type = genomic DNA

SEQ ID NO: 44419 - DNA, 50 bp, Streptococcus pneumoniae; identical to SEQ ID NO: 44414
  source 1..50: mol_type = genomic DNA

SEQ ID NO: 44420 - DNA, 40 bp, Streptococcus pneumoniae; identical to SEQ ID NO: 44415
  source 1..40: mol_type = genomic DNA

SEQ ID NO: 44421 - protein, 549 aa, Streptococcus pneumoniae; identical to SEQ ID NO: 20421

SEQ ID NO: 44422 - DNA, 50 bp, Streptococcus pneumoniae
  source 1..50: mol_type = genomic DNA
gatttggacaatgatgaacaagttgagacggtagcacttttgtccaaact

SEQ ID NO: 44423 - DNA, 40 bp, Streptococcus pneumoniae; identical to SEQ ID NO: 20423
  source 1..40: mol_type = genomic DNA

SEQ ID NO: 44424 - DNA, 50 bp, Streptococcus pneumoniae
  source 1..50: mol_type = genomic DNA
gatttggacaatgatgaacaagttttgacggtagcacttttgtccaaact

SEQ ID NO: 44425 - DNA, 40 bp, Streptococcus pneumoniae; identical to SEQ ID NO: 44415
  source 1..40: mol_type = genomic DNA

SEQ ID NO: 44426 - protein, 549 aa, Streptococcus pneumoniae
MSKEKIKVYLYTRVSTSIQIEGYSLEAQKSRMKAFAIYNDYEIVGEYEDAGKSGKSIEGRIQFNRMMEDIKSGKDGVSFVLVFKLSRFARNAADVLSTLQIMQDYGVNLICVEDGIDSSKDAGKLMISVLSAVAEIERENIRIQTMEGRIQKAREGKWNGGFAPYGYKLEDGKLFINEEEAVAIRTIFDQYVNTTIGANGISKYLENHGIRKIPRQNGKNPLFDAGLIRKILKNPVYNGKIAFGRRTLEKVHGTRNEYKQVEQDEYLISEGIHEAIVSDEVWQAAQVKLKSQAKKYEHVNKGKDTRTHLLSGIVKCPICGVGMFGNKCIKKKKDGTKYKDFYYYGYKHRQMIRGHKCTFSKQIREELLDDAVAEVIVKIVSNPKFASMMQEKINMKVDTSEIEKEIDNYQKELRKSHSTKFKLIEEIDNLDVEDKHYKRRKQDLDDRLYRMYDKIDELESSLIDAKAKKQTIEAEKLTGDNIYKVLIYFDKLYKVMNDVERRQLISALISEIQVYEEKQSNGQWLKSITFKLPITEENLNIGLDNDEQV

SEQ ID NO: 44427 - DNA, 50 bp, Streptococcus pneumoniae
  source 1..50: mol_type = genomic DNA
ggtttggataatgatgaacaagttgagacggtagcacttttgtccaaact

SEQ ID NO: 44428 - DNA, 40 bp, Streptococcus pneumoniae; identical to SEQ ID NO: 20423
  source 1..40: mol_type = genomic DNA

SEQ ID NO: 44429 - DNA, 50 bp, Streptococcus pneumoniae
  source 1..50: mol_type = genomic DNA
ggtttggataatgatgaacaagttttgacggtagcacttttgtccaaact

SEQ ID NO: 44430 - DNA, 40 bp, Streptococcus pneumoniae; identical to SEQ ID NO: 44415
  source 1..40: mol_type = genomic DNA

SEQ ID NO: 44431 - protein, 417 aa, Streptococcus pneumoniae
MAEIERENIRIQTMEGRIQKAREGKWNGGFAPYGYKLEDGKLFINEEEAVAIRTIFDQYVNTTIGANGISKYLENHGIRKIPRQNGKNPLFDAGLIRKILKNPVYNGKIAFGRRTLEKVHGTRNEYKQVEQDEYLISEGIHEAIVSDEVWQAAQVKLKSQAKKYEHVNKGKDTRTHLLSGIVKCPICGVGMFGNKCIKKKKDGTKYKDFYYYGCKHRQMIRGHKCTFSKQIREELLDDAVAEVIVKIVSNPKFASMMQEKINMKVDTSEIEKEIDNYQKELRKSHSTKFKLIEEIDNLDVEDKHYKRRKQDLDDRLYRMYDKIDELESSLIDAKAKKQTIEAEKLTGDNIYKVLIYFDKLYKVMNDVERRQLISALISEIQVYEEKQSNGQWLKSITFKLPIIEENLNIGLDNDEQV

SEQ ID NO: 44432 - DNA, 50 bp, Streptococcus pneumoniae; identical to SEQ ID NO: 44412
  source 1..50: mol_type = genomic DNA

SEQ ID NO: 44433 - DNA, 40 bp, Streptococcus pneumoniae; identical to SEQ ID NO: 20423
  source 1..40: mol_type = genomic DNA

SEQ ID NO: 44434 - DNA, 50 bp, Streptococcus pneumoniae; identical to SEQ ID NO: 44414
  source 1..50: mol_type = genomic DNA

SEQ ID NO: 44435 - DNA, 40 bp, Streptococcus pneumoniae; identical to SEQ ID NO: 44415
  source 1..40: mol_type = genomic DNA

SEQ ID NO: 44436 - protein, 549 aa, Streptococcus pneumoniae
MSKEKIKVYLYTRVSTSIQIEGYSLGAQKSRMKAFAIYNDYEIVGEYEDAGKSGKSIEGRIQFNRMMEDIKSGKDGVSFVLVFKLSRFARNAADVLSTLQIMQDYGVNLICVEDGIDSSKDAGKLMISVLSAVAEIERENIRIQTMEGCIQKAREGKWNGGFAPYGYKLEDGKLFINEEEAVAIRTIFDQYVNTTIGANGISKYLENHGIRKIPRQNGKNPLFDAGLIRKILKNPVYNGKIAFGRRTLEKVHGTRNEYKQVEQDEYLISEGIHEAIVSDEVWQAAQVKLKSQAKKYERVNKGKDTRTHLLSGIVKCPICGVGMFGNKCIKKKKDGTKYKDFYYYGCKHRQMIRGHECTFSKQIREELLDDAVAEVIVKIVSNPKFASMMQEKINMKVDTSEIEKEIDNYQKELRKSHSTKFKLIEEIDNLDVEDKHYKRRKQDLDDRLCRMYDKIDELESSLIDAKAKKQTIEAEKLTGDNIYKVLIYFDKLYKVMNDVEHRQLISALISEIQVYEEKQSNGQWLKSITFKLPIIEENLNIGLDNDEQV

SEQ ID NO: 44437 - DNA, 50 bp, Streptococcus pneumoniae; identical to SEQ ID NO: 44427
  source 1..50: mol_type = genomic DNA

SEQ ID NO: 44438 - DNA, 40 bp, Streptococcus pneumoniae; identical to SEQ ID NO: 20423
  source 1..40: mol_type = genomic DNA

SEQ ID NO: 44439 - DNA, 50 bp, Streptococcus pneumoniae; identical to SEQ ID NO: 44429
  source 1..50: mol_type = genomic DNA

SEQ ID NO: 44440 - DNA, 40 bp, Streptococcus pneumoniae; identical to SEQ ID NO: 44415
  source 1..40: mol_type = genomic DNA

SEQ ID NO: 44441 - protein, 549 aa, Streptococcus pneumoniae
  SITE 14: note = misc_feature - Xaa can be any naturally occurring amino acid
  SITE 20: note = misc_feature - Xaa can be any naturally occurring amino acid
MSKEKIKVYLYTRXSTSIQXEGYSLEAQKSRMKAFAIYNDYEIVGEYEDAGKSGKSIEGRIQFNRMMEDIKSGKDGVSFVLVFKLSRFARNAADVLSTLQIMQDYGVNLICVEDGIDSSKDAGKLMISVLSAVAEIERENIRIQTMEGRIQKAREGKWNGGFAPYGYKLEDGKLFINEEEAVAIRTIFDQYVNTTIGANGISKYLENHGIRKIPRQNGKNPLFDAGLIRKILKNPVYNGKIAFGRRTLEKVHGTRNEYKQVEQDEYLISEGIHEAIVSDEVWQAAQVKLKSQAKKYEHVNKGKDTRTHLLSGIVKCPICGVGMFGNKCIKKKKDGTKYKDFYYYGYKHRQMIRGHKCTFSKQIREEFLDDAVAEVIVKIVSNPKFASMMQEKINMKVDTSEIEKEIDNYQKELRKSHSTKFKLIEEIDNLDVEDKHYKRRKQDLDDRLYRMYDKIDELESSLIDAKAKKQTIEAEKLTGDNIYKVLIYFDKLYKVMNDVERRQLISALISEIQVYEEKQSNGQWLKSITFKLPIIEENLNIGLDNDEQV

SEQ ID NO: 44442 - DNA, 50 bp, Streptococcus pneumoniae; identical to SEQ ID NO: 44427
  source 1..50: mol_type = genomic DNA

SEQ ID NO: 44443 - DNA, 40 bp, Streptococcus pneumoniae; identical to SEQ ID NO: 20423
  source 1..40: mol_type = genomic DNA

SEQ ID NO: 44444 - DNA, 50 bp, Streptococcus pneumoniae; identical to SEQ ID NO: 44429
  source 1..50: mol_type = genomic DNA

SEQ ID NO: 44445 - DNA, 40 bp, Streptococcus pneumoniae; identical to SEQ ID NO: 44415
  source 1..40: mol_type = genomic DNA

SEQ ID NO: 44446 - protein, 536 aa, Streptococcus pneumoniae
MSKEKIKVYLYTRVSTSIQIEGYSLEAQKSRMKAFAIYNDYEIVGEYEDAGKSGKSIEGRIQFNRMMEDIKSGKDGVSFVLVFKLSRFARNAADVLSTLQIMQDYGVNLICVEDDGIDSSKDAGKLMISVLSAVAEIERENIRIQTMEGRIQKAREGKWNGGFAPYGYKLEDGKLFINEEEAVAIRTIFDQYVNTTIGANGISKYLENHGIRKIPRQNGKNPVYNGKIAFGRRTLEKVHGTRNEYKQVEQDEYLISEGIHEAIVSDEVWQAAQVKLKSQAKKYEHVNKGKDTRTHLLSGIVKCPICGVGMFGNKCIKKKKDGTKYKDFYYYGCKRRQMIRGHKCTFSKQIREELLDDAVAEVIVKIVSNPKFASMMQEKINMKVDTSEIEKEIDNYQKELRKSHSTKFKLIEEIDNLDVEDKHYKRRKQDLDDRLYRMYDKIDELESSLIDAKAKKQTIEAEKLTGDNIYKILIYFDKLYKVMNDVERRQLISALISEIQVYEEKQSNGQWLKSITFKLPIIEENLNIGLDNDEQV

SEQ ID NO: 44447 - DNA, 50 bp, Streptococcus pneumoniae; identical to SEQ ID NO: 44412
  source 1..50: mol_type = genomic DNA

SEQ ID NO: 44448 - DNA, 40 bp, Streptococcus pneumoniae; identical to SEQ ID NO: 20423
  source 1..40: mol_type = genomic DNA

SEQ ID NO: 44449 - DNA, 50 bp, Streptococcus pneumoniae; identical to SEQ ID NO: 44414
  source 1..50: mol_type = genomic DNA

SEQ ID NO: 44450 - DNA, 40 bp, Streptococcus pneumoniae; identical to SEQ ID NO: 44415
  source 1..40: mol_type = genomic DNA

SEQ ID NO: 44451 - protein, 549 aa, Streptococcus pneumoniae
MSKEKIKVYLYTRVSTSIQIEGYSLEAQKSRMKAFAIYNDYEIVGEYEDAGKSGKSIEGRIQFNRMMEDIKSGKDGVSFVLVFKLSRFARNAADVLSTLQIMQDYGVNLICVEDGIDSSKDAGKLMISVLSAVAEIERENIRIQTMEGCIQKAREGKWNGGFAPYGYKLEDGKLFINEEEAVAIRTIFDQYVNTTIGANGISKYLENHGIRKIPRQNGKNPLFDAGLIRKILKNPVYHGKIAFGRRTLEKVHGTRNEYKQVEQDEYLISEGIHEAIVSDEVWQAAQVKLKSQAKKYEHVNKGKDTRTHLLSGIVKCPICGVGMFGNKCIKKKKDGTKYKDFYYYGCKHRQMIRGHKCTFSKQIREELLDDAVAEVIVKIVSNPKFASMMQEKINMKVDTSEIEKEIDNYQKELRKSHSTKFKLIEEIDNLDVEDKHYKRRKQDLDDRLYRMYDKIDELESSLIDAKAKKQTIEAEKLTGDNIYKVLIYFDKLYKVMNDVERRQLISALISEIQVYEEKQSNGQWLKSITFKLPIIEENLNIDLDNDEQV

SEQ ID NO: 44452 - DNA, 50 bp, Streptococcus pneumoniae; identical to SEQ ID NO: 44422
  source 1..50: mol_type = genomic DNA

SEQ ID NO: 44453 - DNA, 40 bp, Streptococcus pneumoniae; identical to SEQ ID NO: 20423
  source 1..40: mol_type = genomic DNA

SEQ ID NO: 44454 - DNA, 50 bp, Streptococcus pneumoniae; identical to SEQ ID NO: 44424
  source 1..50: mol_type = genomic DNA

SEQ ID NO: 44455 - DNA, 40 bp, Streptococcus pneumoniae; identical to SEQ ID NO: 44415
  source 1..40: mol_type = genomic DNA

SEQ ID NO: 44456 - protein, 536 aa, Streptococcus pneumoniae
MSKEKIKVYLYTRVSTSIQIEGYSLEAQKSRMKAFAIYNDYEIVGEYEDAGKSGKSIEGRIQFNRMMEDIKSGKDGVSFVLVFKLSRFARNAADVLSTLQIMQDYGVNLICVEDDGIDSSKDAGKLMISVLSAVAEIERENIRIQTMEGRIQKAREGKWNGGFAPYGYKLEDGKLFINEEEAVAIRTIFDQYVNTTIGANGISKYLENHGIRKIPRQNGKNPVYNGKIAFGRRTLEKVHGTRNEYKQVEQDEYLISEGIHEAIVSDEVWQAAQVKLKSQAKKYEHVNKGKDTRTHLLSGIVKCPICGVGMFGNKCIKKKKDGTKYKDFYYYGCKHRQMIRGHKCTFSKQIREELLDDAVAEVIVKIVSNPKFASMMQEKINMKVDTSEIEKEIDNYQKELRKSHSTKFKLIEEIDNLDVEDKHYKRRKQDLDDRLYRMYDKIDELESSLIDAKAKKQTIEAEKLTGDNIYKILIYFDKLYKVMNDVERRQLISALISEIQVYEEKQSNGQWLKSITFKLPIIEENLNIGLDNDEQV

SEQ ID NO: 44457 - DNA, 50 bp, Streptococcus pneumoniae; identical to SEQ ID NO: 44412
  source 1..50: mol_type = genomic DNA

SEQ ID NO: 44458 - DNA, 40 bp, Streptococcus pneumoniae; identical to SEQ ID NO: 20423
  source 1..40: mol_type = genomic DNA

SEQ ID NO: 44459 - DNA, 50 bp, Streptococcus pneumoniae; identical to SEQ ID NO: 44414
  source 1..50: mol_type = genomic DNA

SEQ ID NO: 44460 - DNA, 40 bp, Streptococcus pneumoniae; identical to SEQ ID NO: 44415
  source 1..40: mol_type = genomic DNA

SEQ ID NO: 44461 - protein, 549 aa, Streptococcus pneumoniae
MSKEKIKVYLYTRVSTSIQIEGYSLEAQKSRMKAFAIYNDYEIVGEYEDAGKSGKSIEGRIQFNRMMEDIKSGKDGVSFVLVFKLSRFARNAADVLSTLQIMQDYGVNLICVEDGIDSSKDAGKLMISVLSAVAEIERENISIQTMEGRIQKAREGKWNGGFAPYGYKLEDGKLFINEEEAVAIRTIFDQYVNTTIGANGISKYLENHGIRKIQRQNGKNPLFDAGLIRKILKNPVYNGKIAFGRRNLEKVHGTRNEYKQVEQDEYLISEGIHEAIVSDEVWQAAQVKLKSQAKKYEHVNKGKDTRTHLLSGIVKCPICGVGMFGNKCIKKKKDGTKYKDFYYYGCNHRQMIRGHKCTFSKQIREELLDDAVAEVIVKIVSNPKFASMMQEKINMKVDTSEIEKEIDNYQKELRKSHSTKFKLIEEIDNLDVEDKHYKRRKQDLDDRLYRMYDKIDELESSLIDAKAKKQTIEAEKLTGDNIYKVLIYFDKLYKVMNDVERRQLISALISEIQVYEEKQSNGQWLKSITFKLPIIEENLNIDLDNDEQV

SEQ ID NO: 44462 - DNA, 50 bp, Streptococcus pneumoniae
  source 1..50: mol_type = genomic DNA
gatttggacaatgacgaacaagttgagacggtagcacttttgtccaaact

SEQ ID NO: 44463 - DNA, 40 bp, Streptococcus pneumoniae; identical to SEQ ID NO: 20423
  source 1..40: mol_type = genomic DNA

SEQ ID NO: 44464 - DNA, 50 bp, Streptococcus pneumoniae
  source 1..50: mol_type = genomic DNA
gatttggacaatgacgaacaagttttgacggtagcacttttgtccaaact

SEQ ID NO: 44465 - DNA, 40 bp, Streptococcus pneumoniae; identical to SEQ ID NO: 44415
  source 1..40: mol_type = genomic DNA

SEQ ID NO: 44466 - protein, 518 aa, Streptococcus pneumoniae
MKAFAIYNDYEIVGEYEDAGKSGKSIEGRIQFNRMMEDIKSGKDGVSFVLVFKLSRFARNAADVLSTLQIMQDYGVNLICVEDGIDSSKDAGKLMISVLSAVAEIERENIRIQTMEGRIQKAREGKWNGGFAPYGYKLEDGKLFINEEEAVAIRTIFDQYVNTTIGANGISKYLENHGIRKIPRQNGKNPLFDAGLIRKILKNPVYNGKIAFGRRTLEKVHGTRNEYKQVEQDEYLISEGIHEAIVSDEVWQAAQVKLKSQAKKYEHVNKGKDTRTHLLSGIVKCPICGVGMFGNKCIKKKKDGTKYKDFYYYGCNHRQMIRGHKCTFSKQIREELLDDAVAEVIVKIVSNPKFASMMQEKINMKVDTSEIEKEIDNYQKELRKSHSTKFKLIEEIDNLDVEDKHYKRRKQDLDDRLYRMYDKVDELESSLIDAKAKKQTIEAEKLTGDNIYKVLIYFDKLYKVMNDVERRQLISALISEIQVYEEKQSNGQWLKSITFKLPIIEENLNIGLDNDEQV

SEQ ID NO: 44467 - DNA, 50 bp, Streptococcus pneumoniae; identical to SEQ ID NO: 44412
  source 1..50: mol_type = genomic DNA

SEQ ID NO: 44468 - DNA, 40 bp, Streptococcus pneumoniae; identical to SEQ ID NO: 20423
  source 1..40: mol_type = genomic DNA

SEQ ID NO: 44469 - DNA, 50 bp, Streptococcus pneumoniae; identical to SEQ ID NO: 44414
  source 1..50: mol_type = genomic DNA

SEQ ID NO: 44470 - DNA, 40 bp, Streptococcus pneumoniae; identical to SEQ ID NO: 44415
  source 1..40: mol_type = genomic DNA

SEQ ID NO: 44471 - protein, 549 aa, Streptococcus pneumoniae
MSKEKIKVYLYTRVSTSIQIEGYSLEAQKSRMKAFAIYNDYEIVGEYEDAGKSGKSIEGRIQFNRMMEDIKSGKDGVSFVLVFKLSRFARNAADVLSTLHIMQDYGVNLICVEDGIDSSKDAGKLMISVLSAVAEIERENIRIQTMEGRIQKAREGKWNGGFAPYGYKLEDGKLFINEEEAVAIRTIFDQYVNTTIGANGISKYLENHGIRKIPRQNGKNPLFDAGLIRKILKNPVYNGKIAFGRRTLEKVHGTRNEYKQVEQDEYLISEGIHEAIVSDEVWQAAQVKLKSQAKKYEHVNKGKDTRTHLLSGIVKCPICGVGMFGNKCIKKKKDGTKYKDFYYYGCNHRQMIRGHKCTFSKQIREELLDDAVAEVIVKIVSNPKFASMMQEKINMKVDTSEIEKEIDNYQKELRKSHSTKFKLIEEIDNLDVEDKHYKRRKQDLDDRLYRMYDKIDELESSLIDAKAKKQTIEAEKLTGDNIYKVLIYFDKLYKVMNDVERRQLISALISEIQVYEEKQSNGQWLKSITFKLPIIEENLNIDLDNDEQV

SEQ ID NO: 44472 - DNA, 50 bp, Streptococcus pneumoniae; identical to SEQ ID NO: 44422
  source 1..50: mol_type = genomic DNA

SEQ ID NO: 44473 - DNA, 40 bp, Streptococcus pneumoniae; identical to SEQ ID NO: 20423
  source 1..40: mol_type = genomic DNA

SEQ ID NO: 44474 - DNA, 50 bp, Streptococcus pneumoniae; identical to SEQ ID NO: 44424
  source 1..50: mol_type = genomic DNA

SEQ ID NO: 44475 - DNA, 40 bp, Streptococcus pneumoniae; identical to SEQ ID NO: 44415
  source 1..40: mol_type = genomic DNA

SEQ ID NO: 44476 - protein, 518 aa, Streptococcus pneumoniae
MKAFAIYNDYEIVGEYEDAGKSGKSIEGRIQFNRMMEDIKSGKDGVSFVLVFKLSRFARNAADVLSTLQIMQDYGVNLICVEDGIDSSKDAGKLMISVLSAVAEIERENIRIQTMEGCIQKAREGKWNGGFAPYGYKLEDGKLFINEEEAVAIRTIFDQYVNTTIGANGISKYLENHGIRKIPRQNGKNPLFDAGLIRKILKNPVYNGKIAFGRRTLEKVHGTRNEYKQVEQDEYLISEGIHEAIVSDEVWQAAQVKLKSQAKKYEHVNKGKDTRTHLLSGIVKCPICGVGMFGNKCIKKKKDGTKYKDFYYYGCKHRQMIRGHKCTFSKQIREELLDDAVAEVIVKIVSNPKFASMMQEKINMKVDTSEIEKEIDNYQKELRKSHSTKFKLIEEIDNLDVEDKHYKRRKQDLDDRLYRMYDKIDELESSLIDAKAKKQTIEAEKLTGDNIYKVLIYFDKLYKVMNDVERRQLISALISEIQVYEEKQSNGQWLKSITFKLPIIEENLNIDLDNDEQV

SEQ ID NO: 44477 - DNA, 50 bp, Streptococcus pneumoniae; identical to SEQ ID NO: 44422
  source 1..50: mol_type = genomic DNA

SEQ ID NO: 44478 - DNA, 40 bp, Streptococcus pneumoniae; identical to SEQ ID NO: 20423
  source 1..40: mol_type = genomic DNA

SEQ ID NO: 44479 - DNA, 50 bp, Streptococcus pneumoniae; identical to SEQ ID NO: 44424
  source 1..50: mol_type = genomic DNA

SEQ ID NO: 44480 - DNA, 40 bp, Streptococcus pneumoniae; identical to SEQ ID NO: 44415
  source 1..40: mol_type = genomic DNA

SEQ ID NO: 44481 - protein, 518 aa, Streptococcus pneumoniae
MKAFAIYNDYEIVGEYEDAGKSGKSIEGRIQFNRMMEDIKSGKDGVSFVLVFKLSRFARNAADVLSTLQIMQDYGVNLICVEDGIDSSKDAGKLMISVLSAVAEIERENIRIQTMEGRIQKAREGKWNGGFAPYGYKLEDGKLFINEEEAVAIRTIFDQYVNTTIGANGISKYLENHGIRKIPRQNGKNPLFDAGLIRKILKNPVYNGKIAFGRRTLEKVHGTRNEYKQVEQDEYLISEGIHEAIVSDEVWQAAQVKLKSQAKKYEHVNKGKDTRTHLLSGIVKCPICGVGMFGNKCIKKKKDGTKYKDFYYYGCKHRQMIRGHKCTFSKQIREELLDDAVAEVIVKIVSNPKFASMMQEKINMKVDTSEIEKEIDNYQKELRKSHSTKFKLIEEIDNLDVEDKHYKRRKQDLDDRLYRMYDKIDELESSLIDAKAKKQTIEAEKLTGDNIYKVLIYFDKLYKVMNDVERRQLISALISEIQVYEEKQSNGQWLKSITFKLPIIEENLNIGLDNDEQV

SEQ ID NO: 44482 - DNA, 50 bp, Streptococcus pneumoniae; identical to SEQ ID NO: 44412
  source 1..50: mol_type = genomic DNA

SEQ ID NO: 44483 - DNA, 40 bp, Streptococcus pneumoniae; identical to SEQ ID NO: 20423
  source 1..40: mol_type = genomic DNA

SEQ ID NO: 44484 - DNA, 50 bp, Streptococcus pneumoniae; identical to SEQ ID NO: 44414
  source 1..50: mol_type = genomic DNA

SEQ ID NO: 44485 - DNA, 40 bp, Streptococcus pneumoniae; identical to SEQ ID NO: 44415
  source 1..40: mol_type = genomic DNA

SEQ ID NO: 44486 - protein, 518 aa, Streptococcus pneumoniae
MKAFAIYNDYEIVGEYEDAGKSGKSIEGRIQFNRMMEDIKSGKDGVSFVLVFKLSRFARNAADVLSTLQIMQDYGVNLICVEDGIDSSKDAGKLMISVLSAVAEIERENIRIQTMEGRIQKAREGKWNGGFAPYGYKLEDGKLFINEEEAVAIRTIFDQYVNTTIGANGISKYLENHGIRKIPRQNGKNPLFDAGLIRKILKNPVYNGKIAFGRRTLEKVHGTRNEYKQVEQDEYLISEGIHEAIVSDEVWQAAQVKLKSQAKKYEHVNKGKDTRTHLLSRIVKCPICGVGMFGNKCIKKKKDGTKYKDFYYYGYKHRQMIRGHKCTFSKQIREELLDDAVAEVIVKIVSNPKFASMMQEKINMKVDTSEIEKEIDNYQKELRKSHSTKFKLIEEIDNLDVEDKHYKRRKQDLDDRLYRMYDKIDELESSLIDAKAKKQTIEAEKLTGDNIYKVLIYFDKLYKVMNDVERRQLISALISEIQVYEEKQSNGQWLKFITFKLPIIEENLNIGLDNDEQV

SEQ ID NO: 44487 - DNA, 50 bp, Streptococcus pneumoniae; identical to SEQ ID NO: 44427
  source 1..50: mol_type = genomic DNA

SEQ ID NO: 44488 - DNA, 40 bp, Streptococcus pneumoniae; identical to SEQ ID NO: 20423
  source 1..40: mol_type = genomic DNA

SEQ ID NO: 44489 - DNA, 50 bp, Streptococcus pneumoniae; identical to SEQ ID NO: 44429
  source 1..50: mol_type = genomic DNA

SEQ ID NO: 44490 - DNA, 40 bp, Streptococcus pneumoniae; identical to SEQ ID NO: 44415
  source 1..40: mol_type = genomic DNA

SEQ ID NO: 44491 - protein, 518 aa, Streptococcus pneumoniae
MKAFAIYNDYEIVGEYEDAGKSGKSIEGRIQFNRMMEDIKSGKDGVSFVLVFKLSRFARNAADVLSTLQIMQDYGVNLICVEDGIDSSKDAGKLMISVLSAVAEIERENIRIQTMEGRSQKAMEGKWNGGFAPYGYKLEDGKLFINEEEAVAIRTIFDQYVNTTIGANGISKYLENHGIRKIPRQNGKNPLFDAGLIRKILKNPVYNGKIAFGRRTLEKVHGTRNEYKQVEQDEYLISEGIHEAIVSDEVWQAAQVKLKSQAKKYEHVNKGKDTRTHLLSGIVKCPICGVGMFGNKCIKKKKDGTKYKDFYYYGCKHRQMIRGHKCTFSKQIREELLDDAVAEVIVKIVSNPKFASMMQEKINMKVDTSEIEKEIDNYQKELRKSHSTKFKLIEEIDNLDVEDKHYKRRKQDLDDRLYRMYDKIDELESSLIDAKAKKQTIEAEKLTGDNIYKVLIYFDKLYKVMNDVERRQLISALISEIQVYEEKQSNGQWLKSITFKLPIIEENLNIDLDNDEQV

SEQ ID NO: 44492 - DNA, 50 bp, Streptococcus pneumoniae; identical to SEQ ID NO: 44422
  source 1..50: mol_type = genomic DNA

SEQ ID NO: 44493 - DNA, 40 bp, Streptococcus pneumoniae; identical to SEQ ID NO: 20423
  source 1..40: mol_type = genomic DNA

SEQ ID NO: 44494 - DNA, 50 bp, Streptococcus pneumoniae; identical to SEQ ID NO: 44424
  source 1..50: mol_type = genomic DNA

SEQ ID NO: 44495 - DNA, 40 bp, Streptococcus pneumoniae; identical to SEQ ID NO: 44415
  source 1..40: mol_type = genomic DNA

SEQ ID NO: 44496 - protein, 518 aa, Streptococcus pneumoniae
MKAFAIYNDYEIVGEYEDAGKSGKSIEGRIQFNRMMEDIKSGKDGVSFVLVFKLSRFARNAADVLSTLQIMQDYGVNLICVEDGIDSSKDAGKLMISVLSAVAEIERENISIQTMEGRIQKAREGKWNGGFAPYGYKLEDGKLFINEEEAVAIRTIFDQYVNTTIGANGISKYLENHGIRKIPRQNGKNPLFDAGLIRKILKNPVYNGKIAFGRRTLEKVHGTRNEYKQVEQDEYLISEGIHEAIVSDEVWQAAQVKLKSQAKKYEHVNKGKDTRTHLLSGIVKCPICGVGMFGNKCIKKKKDGTKYKDFYYYGCNHRQMIRGHKCTFSKQIREELLDDAVAEVIVKIVSNPKFASMMQEKINMKVDTSEIEKEIDNYQKELRKSHSTKFKLIEEIDNLDVEDKHYKRRKQDLDDRLYRMYDKIDELESSLIDAKAKKQTIEAEKLTGDNIYKVLIYFDKLYKVMNDVERRQLISALISEIQVYEEKQSNGQWLKSITFKLPIIEENLNIDLDNDEQV

SEQ ID NO: 44497 - DNA, 50 bp, Streptococcus pneumoniae; identical to SEQ ID NO: 44422
  source 1..50: mol_type = genomic DNA

SEQ ID NO: 44498 - DNA, 40 bp, Streptococcus pneumoniae; identical to SEQ ID NO: 20423
  source 1..40: mol_type = genomic DNA

SEQ ID NO: 44499 - DNA, 50 bp, Streptococcus pneumoniae; identical to SEQ ID NO: 44424
  source 1..50: mol_type = genomic DNA

SEQ ID NO: 44500 - DNA, 40 bp, Streptococcus pneumoniae; identical to SEQ ID NO: 44415
  source 1..40: mol_type = genomic DNA

SEQ ID NO: 44501 - protein, 518 aa, Streptococcus pneumoniae
MKAFAIYNDYEIVGEYEDAGKSGKSIEGRIQFNRMMEDIKSGKDGVSFVLVFKLSRFARNAADVLSTLQIMQDYGVNLICVEDGIDSSKDAGKLMISVLSAVAEIERENIRIQTMEGRSQKAMEGKWNGGFAPYGYKLEDGKLFINEEEAVAIRTIFDQYVNTTIGANGISKYLENHGIRKIPRQNGKNPLFDAGLIRKILKNPVYNGKIAFGRRTLEKVHGTRNEYKQVEQDEYLISEGIHEAIVSDEVWQAAQVKLKSQAKKYEHVNKGKDTRTHLLSGIVKCPICGVGMFGNKCIKKKKDGTKYKDFYYYGYKHRQMIRGHKCTFSKQIREELLDDAVAEVIVKIVSNPKFASMMQEKINMKVDTSEIEKEIDNYQKELRKSHSTKFKLIEEIDNLDVEDKHYKRRKQDLDDRLYRMYDKIDELESSLIDAKAKKQTIEAEKLTGDNIYRVLIYFDKLYKVMNDVERRQLISALISEIQVYEEKQSNGQWLKSITFKLPIIEENLNIDLDNDEQV

SEQ ID NO: 44502 - DNA, 50 bp, Streptococcus pneumoniae; identical to SEQ ID NO: 44422
  source 1..50: mol_type = genomic DNA

SEQ ID NO: 44503 - DNA, 40 bp, Streptococcus pneumoniae; identical to SEQ ID NO: 20423
  source 1..40: mol_type = genomic DNA

SEQ ID NO: 44504 - DNA, 50 bp, Streptococcus pneumoniae; identical to SEQ ID NO: 44424
  source 1..50: mol_type = genomic DNA

SEQ ID NO: 44505 - DNA, 40 bp, Streptococcus pneumoniae; identical to SEQ ID NO: 44415
  source 1..40: mol_type = genomic DNA

SEQ ID NO: 44506 - protein, 518 aa, Streptococcus pneumoniae
MKAFAIYNDYEIVGEYEDAGKSGKSIEGRIQFNRMMEDIKSGKDGVSFVLVFKLSRFARNAADVLSTLQIMQDYGVNLICVEDGIDSSKDAGKLMISVLSAVAEIERENIRIQTMEGCIQKAREGKWNGGFAPYGYKLEDGKLFINEEEAVAIRTIFDQYVNTTIGANGISKYLENHGIRKIPRQNGKNPLFDAGLIRKILKNPVYNGKIAFGRRTLEKVHGTRNEYKQVEQDEYLISEGIHEAIVSDEVWQAAQVKLKSQAKKYEHVNKGKDTRTHLLSGIVKCPICGVGMFGNKCIKKKKDGTKYKDFYYYGCKHRQMIRGHKCTFSKQIREELLDDAVAEVIVKIVSNPKFASMMQEKINMKVDTSEIEKEIDNYQKELRKSHSTKFKLIEEIDNLDVEDKHYKRRKQDLDDRLYRMYDKIDELESSLIDAKAKKQTIEAEKLTGDNIYKVLIYFDKLYKVMNDVERRQLISALISEIQVYEERQSNGQWLKSITFKLPIIEENLNIGLDNDEQV

SEQ ID NO: 44507 - DNA, 50 bp, Streptococcus pneumoniae; identical to SEQ ID NO: 44412
  source 1..50: mol_type = genomic DNA

SEQ ID NO: 44508 - DNA, 40 bp, Streptococcus pneumoniae; identical to SEQ ID NO: 20423
  source 1..40: mol_type = genomic DNA

SEQ ID NO: 44509 - DNA, 50 bp, Streptococcus pneumoniae; identical to SEQ ID NO: 44414
  source 1..50: mol_type = genomic DNA

SEQ ID NO: 44510 - DNA, 40 bp, Streptococcus pneumoniae; identical to SEQ ID NO: 44415
  source 1..40: mol_type = genomic DNA

SEQ ID NO: 44511 - protein, 518 aa, Streptococcus pneumoniae
MKAFAIYNDYEIVGEYEDAGKSGKSIEGRIQFNRMMEDIKSGKDGVSFVLVFKLSRFARNAADVLSTLQIMQDYGVNLICVEDGIDSSKDAGKLMISVLSAVAEIERENIRIQTMEGRIQKAREGKWNGGFAPYGYKLEDGKLFINEEEAVAIRTIFDQYVNTTIGANGISKYLENHGIRKIPRQNGKNPLFDAGLIRKILKNPVYNGKIAFGRRTLEKVHGTRNEYKQVEQDEYLISEGIHEAIVSDEVWQAAQVKLKSQAKKYEHVNKGKDTRTHLLSGIVKCPICGVGMFGNKCIKKKKDGTKYKDFYYYGYKHRQMIRGHKCTFSKQIREELLDDAVAEVIVKIVSNPKFASMMQEKINMKVDTSEIEKEIDNYQKELRKSHSTKFKLIEEIDNLDVEDKHYKRRKQDLDDRLYRMYDKIDELESSLIDAKAKKQTIEAEKLTGDNIYKVLIYFDKLYKVMNDVERRQLISALISEIQVYEEKQSNGQWLKSITFKLPIIEENLNIGLDNDEQV

SEQ ID NO: 44512 - DNA, 50 bp, Streptococcus pneumoniae; identical to SEQ ID NO: 44427
  source 1..50: mol_type = genomic DNA

SEQ ID NO: 44513 - DNA, 40 bp, Streptococcus pneumoniae; identical to SEQ ID NO: 20423
  source 1..40: mol_type = genomic DNA

SEQ ID NO: 44514 - DNA, 50 bp, Streptococcus pneumoniae; identical to SEQ ID NO: 44429
  source 1..50: mol_type = genomic DNA

SEQ ID NO: 44515 - DNA, 40 bp, Streptococcus pneumoniae; identical to SEQ ID NO: 44415
  source 1..40: mol_type = genomic DNA

SEQ ID NO: 44516 - protein, 549 aa, Streptococcus pneumoniae
MSKEKIKVYLYTRVSTSIQIEGYSLEAQKSRMKAFAIYNDYEIVGEYEDAGKSDKSIEGRIQFNRMMEDIKSGKDGVSFVLVFKLSRFARNAADVLSTLHIMQDYGVNLICVEDGIDSSKDAGKLMISVLSAVAEIERENISIQTMEGRIQKAGEGKWNGGFAPYGYKLEDGKLFINEEEAVAIRTIFDQYVNTTIGANGISKYLENHGIRKIPRQNGKNPLFDAGLIRKILKNPVYNGKIAFGRRTLEKVHGTRNEYKQVEQDEYLISEGIHEAIVSDEVWQAAQVKLKSQAKKYEHVNKGKDTRTHLLSGIVKCPICGVGMFGNKCIKKKKDGTKYKDFYYYGCNHRQMIRGNKCTFSKQIREELLDDAVAEVIVKIVSNPKFASMMQEKINMKVDTSEIEKEIDNYQKELRKSHSTKFKLIEEIDNLDVEDKHYKRRKQDLDDRLYRMYDKLDELESSLIDAKAKKQTIEAEKLTGDNIYKVLIYFDKLYKVMNDVERRQLISVLISEIQVYEEKQSNGQWLKSITFKLPIIEENLNIGLDNDEQV

SEQ ID NO: 44517 - DNA, 50 bp, Streptococcus pneumoniae; identical to SEQ ID NO: 44412
  source 1..50: mol_type = genomic DNA

SEQ ID NO: 44518 - DNA, 40 bp, Streptococcus pneumoniae; identical to SEQ ID NO: 20423
  source 1..40: mol_type = genomic DNA

SEQ ID NO: 44519 - DNA, 50 bp, Streptococcus pneumoniae; identical to SEQ ID NO: 44414
  source 1..50: mol_type = genomic DNA

SEQ ID NO: 44520 - DNA, 40 bp, Streptococcus pneumoniae; identical to SEQ ID NO: 44415
  source 1..40: mol_type = genomic DNA

SEQ ID NO: 44521 - protein, 505 aa, Streptococcus pneumoniae
MKAFAIYNDYEIVGEYEDAGKSGKSIEGRIQFNRMMEDIKSGKDGVSFVLVFKLSRFARNAADVLSTLQIMQDYGVNLICVEDDGIDSSKDAGKLMISVLSAVAEIERENIRIQTMEGRIQKAREGKWNGGFAPYGYKLEDGKLFINEEEAVAIRTIFDQYVNTTIGANGISKYLENHGIRKIPRQNGKNPVYNGKIAFGRRTLEKVHGTRNEYKQVEQDEYLISEGIHEAIVSDEVWQAAQVKLKSQAKKYEHVNKGKDTRTHLLSGIVKCPICGVGMFGNKCIKKKKDGTKYKDFYYYGCKHRQMIRGHKCTFSKQIREELLDDAVAEVIVKIVSNPKFASMMQEKINMKVDTSEIEKEIDNYQKELRKSHSTKFKLIEEIDNLDVEDKHYKRRKQDLDDRLYRMYDKIDELESSLIDAKAKKQTIEAEKLTGDNIYKILIYFDKLYKVMNDVERRQLISALISEIQVYEEKQSNGQWLKSITFKLPIIEENLNIGLDNDEQV

SEQ ID NO: 44522 - DNA, 50 bp, Streptococcus pneumoniae; identical to SEQ ID NO: 44412
  source 1..50: mol_type = genomic DNA

SEQ ID NO: 44523 - DNA, 40 bp, Streptococcus pneumoniae; identical to SEQ ID NO: 20423
  source 1..40: mol_type = genomic DNA

SEQ ID NO: 44524 - DNA, 50 bp, Streptococcus pneumoniae; identical to SEQ ID NO: 44414
  source 1..50: mol_type = genomic DNA

SEQ ID NO: 44525 - DNA, 40 bp, Streptococcus pneumoniae; identical to SEQ ID NO: 44415
  source 1..40: mol_type = genomic DNA

SEQ ID NO: 44526 - protein, 549 aa, Streptococcus pneumoniae
MSKEKIKVYLYTRVSTSIQIEGYSLEAQKSRMKAFAIYNDYEIVGEYEDAGKSDKSIEGRIQFNRMMEDIKSGKDGVSFVLVFKLSRFARNAADVLSTLHIMQDYGVNLICVEDGIDSSKDAGKLMISVLSAVAEIERENISIQTMEGRIQKAGEGKWNGGFAPYGYKLEDGKLFINEEEAVAIRTIFDQYVNTTIGANGISKYLENHGIRKIPRQNGKNPLFDAGLIRKILKNPVYNGKIAFGRRTLEKVHGTRNEYKQVEQDEYLISEGIHEAIVSDEVWQAAQVKLKSQAKKYEHVNKGKDTRTHLLSGIVKCPICGVGMFGNKCIKKKKDGTKYKDFYYYGCNHRQMIRGNKCTFSKQIREELLDDAVAEVIVKIVSNPKFASMMQEKINMKVDTSEIEKEIDNYQKELRKSHSTKFKLIEEIDNLDVEDKHYKRRKQDLDDRLYRMYDKLDELESSLIDAKAKKQTIEAEKLTGDNIYKVLIYFDKLYKVMNDVERRQLISALISEIQVYEEKQSNGQWLKSITFKLPIIEENLNIGLDNDEQV

SEQ ID NO: 44527 - DNA, 50 bp, Streptococcus pneumoniae; identical to SEQ ID NO: 44412
  source 1..50: mol_type = genomic DNA

SEQ ID NO: 44528 - DNA, 40 bp, Streptococcus pneumoniae; identical to SEQ ID NO: 20423
  source 1..40: mol_type = genomic DNA

SEQ ID NO: 44529 - DNA, 50 bp, Streptococcus pneumoniae; identical to SEQ ID NO: 44414
  source 1..50: mol_type = genomic DNA

SEQ ID NO: 44530 - DNA, 40 bp, Streptococcus pneumoniae; identical to SEQ ID NO: 44415
  source 1..40: mol_type = genomic DNA

SEQ ID NO: 44531 - protein, 518 aa, Streptococcus pneumoniae
MKAFAIYNDYEIVGEYEDAGKSDKSIEGRIQFNRMMEDIKSGKDGVSFVLVFKLSRFARNAADVLSTLQIMQDYGVNLICVEDGIDSSKDAGKLMISVLSAVAEIERENIRIQTMEGRIQKAREGKWNGGFAPYGYKLEDGKLFINEEEAVAIRTIFDQYVNTTIGANGISKYLENHGIRKIPRQNGKNPLFDAGLIRKILKNPVYNGKIAFGRRTLEKVHGTRNEYKQVEQDEYLISEGIHEAIVSDEVWQAAQVKLKSQAKKYEHVNKGKDTRTHLLSGIVKCPICGVGMFGNKCIKKKKDGTKYKDFYYYGCKHRQMIRGHKCTFSKQIIEELLDDAVAEVIVKIVSNPKFASMMQEKINMKVDTSEIEKEIDNYQKELRKSHSTKFKLIEEIDNLDVEDKHYKRRKQDLDDRLYRMYDKIDELESSLIDAKAKKQTIEAEKLTGDNIYKVLIYFDKLYKVMNDVERRQLISALISEIQVYKEKQSNGQWLKSITFKLPIIEENLNIGLDNDEQV

SEQ ID NO: 44532 - DNA, 50 bp, Streptococcus pneumoniae; identical to SEQ ID NO: 44412
  source 1..50: mol_type = genomic DNA

SEQ ID NO: 44533 - DNA, 40 bp, Streptococcus pneumoniae; identical to SEQ ID NO: 20423
  source 1..40: mol_type = genomic DNA

SEQ ID NO: 44534 - DNA, 50 bp, Streptococcus pneumoniae; identical to SEQ ID NO: 44414
  source 1..50: mol_type = genomic DNA

SEQ ID NO: 44535 - DNA, 40 bp, Streptococcus pneumoniae; identical to SEQ ID NO: 44415
  source 1..40: mol_type = genomic DNA

SEQ ID NO: 44536 - protein, 518 aa, Streptococcus pneumoniae
MKAFAIYNDYEIVGEYEDAGKSGKSIEGRIQFNRMMEDIKSGKDGVSFVLVFKLSRFARNAADVLSTLQIMQDYGVNLICVEDGIDSFKDAGKLMISVLSAVAEIERENIRIQTMEGCIQKAREGKWNGGFAPYGYKLEDGKLFINEEEAVAIRTIFDQYVNTTIGANGISKYLENHGIRKIPRQNGKNPLFDAGLIRKILKNPVYNGKIAFGRRTLEKVHGTRNEYKQVEQDEYLISEGIHEAIVSDEVWQAAQVKLKSQAKKYERVNKGKDTRTHLLSGIVKCPICGVGMFGNKCIKKKKDGTKYKDFYYYGCKHRQMIRGHECTFSKQIREELLDDAVAEVIVKIVSNPKFASMMQEKINMKVDTSEIEKEIDNYQKELRKSHSTKFKLIEEIDNLDVEDKHYKRRKQDLDDRLCRMYDKIDELESSLIDAKAKKQTIEAEKLTGDNIYKVLIYFDKLYKVMNDVEHRQLISALISEIQVYEEKQSNGQWLKSITFKLPIIEENLNIGLDNDEQV

SEQ ID NO: 44537 - DNA, 50 bp, Streptococcus pneumoniae; identical to SEQ ID NO: 44427
  source 1..50: mol_type = genomic DNA

SEQ ID NO: 44538 - DNA, 40 bp, Streptococcus pneumoniae; identical to SEQ ID NO: 20423
  source 1..40: mol_type = genomic DNA

SEQ ID NO: 44539 - DNA, 50 bp, Streptococcus pneumoniae; identical to SEQ ID NO: 44429
  source 1..50: mol_type = genomic DNA

SEQ ID NO: 44540 - DNA, 40 bp, Streptococcus pneumoniae; identical to SEQ ID NO: 44415
  source 1..40: mol_type = genomic DNA

SEQ ID NO: 44541 - protein, 518 aa, Streptococcus pneumoniae
MKAFAIYNDYEIVGEYEDAGKSDKSIEGRIQFNRMMEDIKSGKDGVSFVLVFKLSRFARNAADVLSTLHIMQDYGVNLICVEDGIDSSKDAGKLMISVLSAVAEIERENISIQTMEGRIQKAGEGKWNGGFAPYGYKLEDGKLFINEEEAVAIRTIFDQYVNTTIGANGISKYLENHGIRKIPRQNGKNPLFDAGLIRKILKNPVYNGKIAFGRRTLEKVHGTRNEYKQVEQDEYLISEGIHEAIVSDEVWQAAQVKLKSQAKKYEHVNKGKDTRTHLLSGIVKCPICGVGMFGNKCIKKKKDGTKYKDFYYYGCNHRQMIRGNKCTFSKQIREELLDDAVAEVIVKIVSNPKFASMMQEKINMKVDTSEIEKEIDNYQKELRKSHSTKFKLIEEIDNLDVEDKHYKRRKQDLDDRLYRMYDKLDELESSLIDAKAKKQTIEAEKLTGDNIYKVLIYFDKLYKVMNDVERRQLISALISEIQVYEEKQSNGQWLKSITFKLPIIEENLNIGLDNDEQV

SEQ ID NO: 44542 - DNA, 50 bp, Streptococcus pneumoniae; identical to SEQ ID NO: 44412
  source 1..50: mol_type = genomic DNA

SEQ ID NO: 44543 - DNA, 40 bp, Streptococcus pneumoniae; identical to SEQ ID NO: 20423
  source 1..40: mol_type = genomic DNA

SEQ ID NO: 44544 - DNA, 50 bp, Streptococcus pneumoniae; identical to SEQ ID NO: 44414
  source 1..50: mol_type = genomic DNA

SEQ ID NO: 44545 - DNA, 40 bp, Streptococcus pneumoniae; identical to SEQ ID NO: 44415
  source 1..40: mol_type = genomic DNA

SEQ ID NO: 44546 - protein, 518 aa, Streptococcus pneumoniae
MKAFAIYNDYEIVGEYEDAGKSGKSIEGRIQFNRMMEDIKSGKDGVSFVLVFKLSRFARNAADVLSTLQIMQDYGVNLICVEDGIDSSKDAGKLMISVLSAVAEIERENIRIQTMEGRIQKAREGKWNGGFAPYGYKLEDGKLFINEEEAVAIRTIFDQYVNTTIGANGISKYLENHGIRKIPRQNGKNPLFDAGLIRKILKNPVYNGKIAFGRRTLEKVHGTRNEYKQVEQDEYLISEGIHEAIVSDEVWQAAQVKLKSQAKKYEHVNKGKDTRTHLLSGIVKCPICGVGMFGNKCIKKKKDGTKYKDFYYYGYKHRQMIRGHKCTFSKQIREEFLDDAVAEVIVKIVSNPKFASMMQEKINMKVDTSEIEKEIDNYQKELRKSHSTKFKLIEEIDNLDVEDKHYKRRKQDLDDRLYRMYDKIDELESSLIDAKAKKQTIEAEKLTGDNIYKVLIYFDKLYKVMNDVERRQLISALISEIQVYEEKQSNGQWLKSITFKLPIIEENLNIGLDNDEQV

SEQ ID NO: 44547 - DNA, 50 bp, Streptococcus pneumoniae; identical to SEQ ID NO: 44427
  source 1..50: mol_type = genomic DNA

SEQ ID NO: 44548 - DNA, 40 bp, Streptococcus pneumoniae; identical to SEQ ID NO: 20423
  source 1..40: mol_type = genomic DNA

SEQ ID NO: 44549 - DNA, 50 bp, Streptococcus pneumoniae; identical to SEQ ID NO: 44429
  source 1..50: mol_type = genomic DNA

SEQ ID NO: 44550 - DNA, 40 bp, Streptococcus pneumoniae; identical to SEQ ID NO: 44415
  source 1..40: mol_type = genomic DNA

SEQ ID NO: 44551 - protein, 549 aa, Streptococcus pneumoniae
MSKEKIKVYLYTRVSTSIQIEGYSLEAQKSRMKAFAIYNDYEIVGEYEDAGKSGKSIEGRIQFNRMMEDIKSGKDGVSFVLVFKLSRFARNAADVLSTLQIMQDYGVNLICVEDGIDSSKDAGKLMISVLSAVAEIERENIRIQTMEGCIQKAREGKWNGGFAPYGYKLEDGKLFINEEEAVAIRTIFDQYVNTTIGANGISKYLENHGIRKIPRQNGKNPLFDAGLIRKILKNPVYNGKIAFGRRTLEKVHGTRNEYKQVEQDEYLISEGIHEAIVSDEVWQAAQVKLKSQAKKYEHVNKGKDTRTHLLSGIVKCPICGVGMFGNKCIKKKKDGTKYKDFYYYGCKHRQMIRGHKCTFSKQIREELLDDAVAEVIVKIVSNPKFASMMQEKINMKVDTSEIEKEIDNYQKELRKSHSTKFKLIEEIDNLDVEDKHYKRRKQDLDDRLYRMYDKIDELESSLIDAKAKKQTIEAEKLTGDNIYKVLIYFDKLYKVMNDVERRQLISALISEIQVYEERQSNGQWLKSITFKLPIIEENLNIGLDNDEQV

SEQ ID NO: 44552 - DNA, 50 bp, Streptococcus pneumoniae; identical to SEQ ID NO: 44412
  source 1..50: mol_type = genomic DNA

SEQ ID NO: 44553 - DNA, 40 bp, Streptococcus pneumoniae; identical to SEQ ID NO: 20423
  source 1..40: mol_type = genomic DNA

SEQ ID NO: 44554 - DNA, 50 bp, Streptococcus pneumoniae; identical to SEQ ID NO: 44414
  source 1..50: mol_type = genomic DNA

SEQ ID NO: 44555 - DNA, 40 bp, Streptococcus pneumoniae; identical to SEQ ID NO: 44415
  source 1..40: mol_type = genomic DNA

SEQ ID NO: 44556 - protein, 549 aa, Streptococcus pneumoniae
MSKEKIKVYLYTRVSTSIQIEGYSLEAQKSRMKAFAIYNDYEIVGEYEDAGKSGKSIEGRIQFNRMMEDIKSGKDGVSFVLVFKLSRFARNAADVLSTLQIMQDYGVNLICVEDGIDSSKDAGKLMISVLSAVAEIERENIRIQTMEGRIQKAREGKWNGGFAPYGYKLEDGKLFINEEEAVAIRTIFDQYVNTTIGANGISKYLENHGIRKIPRQNGKNPLFDAGLIRKILKNPVYNGKIAFGRRTLEKVHGTRNEYKQVEQDEYLISEGIHEAIVSDEVWQAAQVKLKSQAKKYEHVNKGKDTRTHLLSGIVKCPICGVGMFGNKCIKKKKDGTKYKDFYYYGCNHRQMIRGHKCTFSKQIREELLDDAVAEVIVKIVSNPKFASMMQEKINMKVDTSEIEKEIDNYQKELRKSHSTKFKLIEEIDNLDVEDKHYKRRKQDLDDRLYRMYDKVDELESSLIDAKAKKQTIEAEKLTGDNIYKVLIYFDKLYKVMNDVERRQLISALISEIQVYEEKQSNGQWLKSITFKLPIIEENLNIGLDNDEQV

SEQ ID NO: 44557 - DNA, 50 bp, Streptococcus pneumoniae; identical to SEQ ID NO: 44412
  source 1..50: mol_type = genomic DNA

SEQ ID NO: 44558 - DNA, 40 bp, Streptococcus pneumoniae; identical to SEQ ID NO: 20423
  source 1..40: mol_type = genomic DNA

SEQ ID NO: 44559 - DNA, 50 bp, Streptococcus pneumoniae; identical to SEQ ID NO: 44414
  source 1..50: mol_type = genomic DNA

SEQ ID NO: 44560 - DNA, 40 bp, Streptococcus pneumoniae; identical to SEQ ID NO: 44415
  source 1..40: mol_type = genomic DNA

SEQ ID NO: 44561 - protein, 518 aa, Streptococcus pneumoniae
MKAFAIYNDYEIVGEYEDAGKSGKSIEGRIQFNRMMEDIKSGKDGVSFVLVFKLSRFARNAADVLSTLQIMQDYGVNLICVEDGIDSSKDAGKLMISVLSAVAEIERENIRIQTMEGCIQKAREGKWNGGFAPYGYKLEDGKLFINEEEAVAIRTIFDQYVNTTIGANGISKYLENHGIRKIPRQNGKNPLFDAGLIRKILKNPVYNGKIAFGRRTLEKVHGTRNEYKQVEQDEYLISEGIHEAIVSDEVWQAAQVKLKSQAKKYEHVNKGKDTRTHLLSGIVKCPICGVGMFGNKCIKKKKDGTKYKDFYYYGCKHRQMIRGHKCTFSKQIREELLDDAVAEVIVKIVSNPKFASMMQEKINMKVDTSEIEKEIDNYQKELRKSHSTKFKLIEEIDNLDVEDKHYKRRKQDLDDRLYRMYDKIDELESSLIDAKAKKQTIEAEKLTGDNIYKVLIYFDKLYKVMNDVERRQLISALISEIQVYEEKQSNGQWLKSITFKLPIIEENLNIGLDNDEQV

SEQ ID NO: 44562 - DNA, 50 bp, Streptococcus pneumoniae; identical to SEQ ID NO: 44412
  source 1..50: mol_type = genomic DNA

SEQ ID NO: 44563 - DNA, 40 bp, Streptococcus pneumoniae; identical to SEQ ID NO: 20423
  source 1..40: mol_type = genomic DNA

SEQ ID NO: 44564 - DNA, 50 bp, Streptococcus pneumoniae; identical to SEQ ID NO: 44414
  source 1..50: mol_type = genomic DNA

SEQ ID NO: 44565 - DNA, 40 bp, Streptococcus pneumoniae; identical to SEQ ID NO: 44415
  source 1..40: mol_type = genomic DNA

SEQ ID NO: 44566 - protein, 549 aa, Streptococcus pneumoniae
MSKEKIKVYLYTRVSTSIQIEGYSLEAQKSRMKAFAIYNDYEIVGEYEDAGKSGKSIEGRIQFNRMMEDIKSGKDGVSFVLVFKLSRFARNAADVLSTLQIMQDYGVNLICVEDGIDSSKDAGKLMISVLSAVAEIERENIRIQTMEDRIQKAREGKWNGGFAPYGYKLEDGKLFINEEEAVAIRTIFDQYVNTTIGANGISKYLENHGIRKIPRQNGKNPLFDAGLIRKILKNPVYNGKIAFGRRTLEKVHGTRNEYKQVEQDEYLISEGIHEAIVSDEVWQAAQVKLKSQAKKYEHVNKGKDTRTHLLSGIVKCPICGVGMFGNKCIKKKKDGTKYKDFYYYGCKHRQMIRGHKCTFSKQIREELLDDAVAEVIVKIVSNPKFASMMQEKINMKVDTSEIEKEIDNYQKELRKSHSTKFKLIEEIDNLDVEDKHYKRRKQDLDDRLYRMYDKIDELESSLIDAKAKKQTIEAEKLTGDNIYKVLIYFDKLYKVMNDVERRQLISALISEIQVYEEKQSNGQWLKSITFKLPIIEENLNIGLDNDEQV

SEQ ID NO: 44567 - DNA, 50 bp, Streptococcus pneumoniae; identical to SEQ ID NO: 44412
  source 1..50: mol_type = genomic DNA

SEQ ID NO: 44568 - DNA, 40 bp, Streptococcus pneumoniae; identical to SEQ ID NO: 20423
  source 1..40: mol_type = genomic DNA

SEQ ID NO: 44569 - DNA, 50 bp, Streptococcus pneumoniae; identical to SEQ ID NO: 44414
  source 1..50: mol_type = genomic DNA

SEQ ID NO: 44570 - DNA, 40 bp, Streptococcus pneumoniae; identical to SEQ ID NO: 44415
  source 1..40: mol_type = genomic DNA

SEQ ID NO: 44571 - protein, 522 aa, Streptococcus pneumoniae
MSKEKIKVYLYTRVSTSIQIEGYSLEAQKSRMKAFAIYNDYEIVGEYEDAGKSGKSIEGRIQFNRMMEDIKSGKDGVSFVLVFKLSRFARNAADVLSTLQIMQDYGVNLICVEDGIDSSKDAGKLMISVLSAVAEIERENIRIQTMEGRSQKAMEGKWNGGFAPYGYKLEDGKLFINEEEAVAIRTIFDQYVNTTIGANGISKYLENHGIRKIPRQNGKNPLFDAGLIRKILKNPVYNGKIAFGRRTLEKVHGTRNEYKQVEQDEYLISEGIHEAIVSDEVWQAAQVKLKSQAKKYEHVNKGKDTRTHLLSGIVKCPICGVGMFGNKCTKKKKDGTKYKDFYYYGCKHRQMIRGHKCTFSKQIREELLDDAVAEVIVKIVSNPKFASMMQEKINMKVDTSEIEKEIDNYQKELRKSHSTKFKLIEEIDNLDVEDKHYKRRKQDLDDRLYRMYDKIDELESSLIDAKAKKQTIEAEKLTGDNIYKVLIYFDKLYKVMNDVERRQLISALISEIQVYEEKQSNG

SEQ ID NO: 44572 - DNA, 50 bp, Streptococcus pneumoniae; identical to SEQ ID NO: 44427
  source 1..50: mol_type = genomic DNA

SEQ ID NO: 44573 - DNA, 40 bp, Streptococcus pneumoniae; identical to SEQ ID NO: 20423
  source 1..40: mol_type = genomic DNA

SEQ ID NO: 44574 - DNA, 50 bp, Streptococcus pneumoniae; identical to SEQ ID NO: 44429
  source 1..50: mol_type = genomic DNA

SEQ ID NO: 44575 - DNA, 40 bp, Streptococcus pneumoniae; identical to SEQ ID NO: 44415
  source 1..40: mol_type = genomic DNA

SEQ ID NO: 44576 - protein, 535 aa, Streptococcus pneumoniae
MSKEKIKVYLYTRVSTSIQIEGYSLEAQKSRMKAFAIYNDYEIVGEYEDAGKSGKSIEGRIQFNRMMEDIKSGKDGVSFVLVFKLSRFARNAADVLSTLQIMQDYGVNLICVEDGIDSSKDAGKLMISVLSAVAEIERENIRIQTMEGRIQKAREGKWNGGFAPYGYKLEDGKLFINEEEAVAIRTIFDQYVNTTIGANGISKYLENHGIRKIPRQNGKNPVYNGKIAFGRRTLEKVHGTRNEYKQVEQDEYLISEGIHEAIVSDEVWQAAQVKLKSQAKKYEHVNKGKDTRTHLLSGIVKCPICGVGMFGNKCIKKKKDGTKYKDFYYYGCKHRQMIRGHKCTFSKQIREELLDDAVAEVIVKIVSNPKFASMMQEKINMKVDTSEIEKEIDNYQKELRKSHSTKFKLIEEIDNLDVEDKHYKRRKQDLDDRLYRMYDKIDELESSLIDAKAKKQTIEAEKLTGDNIYKILIYFDKLYKVMNDVERRQLISALISEIQVYEEKQSNGQWLKSITFKLPIIEENLNIGLDNDEQV

SEQ ID NO: 44577 - DNA, 50 bp, Streptococcus pneumoniae; identical to SEQ ID NO: 44412
  source 1..50: mol_type = genomic DNA

SEQ ID NO: 44578 - DNA, 40 bp, Streptococcus pneumoniae; identical to SEQ ID NO: 20423
  source 1..40: mol_type = genomic DNA

SEQ ID NO: 44579 - DNA, 50 bp, Streptococcus pneumoniae; identical to SEQ ID NO: 44414
  source 1..50: mol_type = genomic DNA

SEQ ID NO: 44580 - DNA, 40 bp, Streptococcus pneumoniae; identical to SEQ ID NO: 44415
  source 1..40: mol_type = genomic DNA

SEQ ID NO: 44581 - protein, 549 aa, Streptococcus pneumoniae
MSKEKIKVYLYTRVSTSIQIEGYSLGAQKSRMKAFAIYNDYEIVGEYEDAGKSGKYIEGRIQFNRMMEDIKSGKDGVSFVLVFKLSRFARNAADVLSTLQIMQDYGVNLICVEDGIDSFKDAGKLMISVLSAVAEIERENIRIQTMEGCIQKAREGKWNGGFAPYGYKLEDGKLFINEEEAVAIRTIFDQYVNTTIGANGISKYLENHGIRKIPRQNGKNPLFDAGLIRKILKNPVYNGKIAFGRRTLEKVHGTRNEYKQVEQDEYLISEGIHEAIVSDEVWQAAQVKLKSQAKKYERVNKGKDTRSHLLSGIVKCPICGVGMFGNKCIKKKKDGTKYKDFYYYGCKHRQMIRGHECTFSKQIREELLDDAVAEVIVKIVSNPKFASMMQEKINMKVDTSEIEKEIDNYQKELRKSHSTKFKLIEEIDNLDVEDKHYKRRKQDLDDRLCRMYDKIDELESSLIDAKAKKQTIEAEKLTGDNIYKVLIYFDKLYKVMNDVEHRQLISALISEIQVYEEKQSNGQWLKSITFKLPIIEENLNIGLDNDEQV

SEQ ID NO: 44582 - DNA, 50 bp, Streptococcus pneumoniae; identical to SEQ ID NO: 44427
  source 1..50: mol_type = genomic DNA

SEQ ID NO: 44583 - DNA, 40 bp, Streptococcus pneumoniae; identical to SEQ ID NO: 20423
  source 1..40: mol_type = genomic DNA

SEQ ID NO: 44584 - DNA, 50 bp, Streptococcus pneumoniae; identical to SEQ ID NO: 44429
  source 1..50: mol_type = genomic DNA

SEQ ID NO: 44585 - DNA, 40 bp, Streptococcus pneumoniae; identical to SEQ ID NO: 44415
  source 1..40: mol_type = genomic DNA

SEQ ID NO: 44586 - protein, 518 aa, Streptococcus pneumoniae
MKAFAIYNDYEIVGEYEDAGKSGKSIEGRIQFNRMMEDIKSGKDGVSFVLVFKLSRFARNAADVLSTLQIMQDYGVNLICVEDGIDSSKDAGKLMISVLSAVAEIERENIRIQTMEDRIQKAREGKWNGGFAPYGYKLEDGKLFINEEEAVAIRTIFDQYVNTTIGANGISKYLENHGIRKIPRQNGKNPLFDAGLIRKILKNPVYNGKIAFGRRTLEKVHGTRNEYKQVEQDEYLISEGIHEAIVSDEVWQAAQVKLKSQAKKYEHVNKGKDTRTHLLSGIVKCPICGVGMFGNKCIKKKKDGTKYKDFYYYGYKHRQMIRGHKCTFSKQIREELLDDAVAEVIVKIVSNPKFASMMQEKINMKVDTSEIEKEIDNYQKELRKSHSTKFKLIEEIDNLDVEDKHYKRRKQDLDDRLYRMYDKIDELESSLIDAKAKKQTIEAEKLTGDNIYKVLIYFDKLYKVMNDVERRQLISALISEIQVYEEKQSNGQWLKSITFKLPIIEENLNIGLDNDEQV

SEQ ID NO: 44587 - DNA, 50 bp, Streptococcus pneumoniae; identical to SEQ ID NO: 44412
  source 1..50: mol_type = genomic DNA

SEQ ID NO: 44588 - DNA, 40 bp, Streptococcus pneumoniae; identical to SEQ ID NO: 20423
  source 1..40: mol_type = genomic DNA

SEQ ID NO: 44589 - DNA, 50 bp, Streptococcus pneumoniae; identical to SEQ ID NO: 44414
  source 1..50: mol_type = genomic DNA

SEQ ID NO: 44590 - DNA, 40 bp, Streptococcus pneumoniae; identical to SEQ ID NO: 44415
  source 1..40: mol_type = genomic DNA

SEQ ID NO: 44591 - protein, 549 aa, Streptococcus pneumoniae; identical to SEQ ID NO: 34131

SEQ ID NO: 44592 - DNA, 50 bp, Streptococcus pneumoniae; identical to SEQ ID NO: 44427
  source 1..50: mol_type = genomic DNA

SEQ ID NO: 44593 - DNA, 40 bp, Streptococcus pneumoniae; identical to SEQ ID NO: 20423
  source 1..40: mol_type = genomic DNA

SEQ ID NO: 44594 - DNA, 50 bp, Streptococcus pneumoniae; identical to SEQ ID NO: 44429
  source 1..50: mol_type = genomic DNA

SEQ ID NO: 44595 - DNA, 40 bp, Streptococcus pneumoniae; identical to SEQ ID NO: 44415
  source 1..40: mol_type = genomic DNA

SEQ ID NO: 44596 - protein, 549 aa, Streptococcus pneumoniae
MSKEKIKVYLYTRVSTSIQIEGYSLEAQKSRMKAFAIYNDYEIVGEYEDAGKSGKSIEGRIQFNRMMEDIKSGKDGVSFVLVFKLSRFARNAADVLSTLQIMQDYGVNLICVEDGIDSSKDAGKLMISVLSAVAEIERENIRIQTMEGCIQKAREGKWNGGFAPYGYKLEDGKLFINEEEAVAIRTIFDQYVNTTIGANGISKYLENHGIRKIPRQNGKNPLFDAGLIRKILKNPVYNGKIAFGRRTLEKVHGTRNEYKQVEQDEYLISEGIHEAIVSDEVWQAAQVKLKSQAKKYEHVNKGKDTRTHLLSGIVKCPICGVGMFGNKCIKKKKDGTKYKEFYYYGCKHRQMIRGHKCTFSKQIREELLDDAVAEVIVKIVSNPKFASMMQEKINMKVDTSEIEKEIDNYQKELRKSHSTKFKLIEEIDNLDVEDKHYKRRKQDLDDRLYRMYDKIDELESSLIDAKAKKQTIEAEKLTGDNIYKVMIYFDKLYKVMNDVERRQLISALISEIQVYEEKQSNGQWLKSITFKLPIIEENLNIGLDNDEQV

SEQ ID NO: 44597 - DNA, 50 bp, Streptococcus pneumoniae; identical to SEQ ID NO: 44412
  source 1..50: mol_type = genomic DNA

SEQ ID NO: 44598 - DNA, 40 bp, Streptococcus pneumoniae; identical to SEQ ID NO: 20423
  source 1..40: mol_type = genomic DNA

SEQ ID NO: 44599 - DNA, 50 bp, Streptococcus pneumoniae; identical to SEQ ID NO: 44414
  source 1..50: mol_type = genomic DNA

SEQ ID NO: 44600 - DNA, 40 bp, Streptococcus pneumoniae; identical to SEQ ID NO: 44415
  source 1..40: mol_type = genomic DNA

SEQ ID NO: 44601 - protein, 549 aa, Streptococcus pneumoniae
MSKEKIKVYLYTRVSTSIQIEGYSLEAQKSRMKAFAIYNDYEIVGEYEDAGKSGKSIEGRIQFNRMMEDIKSGKDGVSFVLVFKLSRFARNVADVLSTLQIMQDYGVNLICVEDGIDSSKDAGKLMISVLSAVAEIERENIRIQTMEGRIQKAREGKWNGGFAPYGYKLEDGKLFINEEEAVAIRTIFDQYVNTTIGANGISKYLENHGIRKIPRQNGKNPLFDAGLIRKILKNPVYNGKIAFGRRTLEKVHGTRNEYKQVEQDEYLISEGIHEAIVSDEVWQAAQVKLKSQAKKYEHVNKGKDTRTHLLSGIVKCPICGVGMFGNKCIKKKKDGTKYKDFYYYGYKHRQMIRGHKCTFSKQIREELLDDAVAEVIVKIVSNPKFASMMQEKINMKVDTSEIEKEIDNYQKELRKSHSTKFKLIEEIDNLDVEDKHYKRRKQDLDDRLYRMYDKIDELESSLIDAKAKKQTIEAEKLTGDNIYKVLIYFDKLYKVMNDVERRQLISALISEIQVYEEKQSNGQWLKSITFKLPIIEENLNIGLDNDEQV

SEQ ID NO: 44602 - DNA, 50 bp, Streptococcus pneumoniae; identical to SEQ ID NO: 44427
  source 1..50: mol_type = genomic DNA

SEQ ID NO: 44603 - DNA, 40 bp, Streptococcus pneumoniae; identical to SEQ ID NO: 20423
  source 1..40: mol_type = genomic DNA

SEQ ID NO: 44604 - DNA, 50 bp, Streptococcus pneumoniae; identical to SEQ ID NO: 44429
  source 1..50: mol_type = genomic DNA

SEQ ID NO: 44605 - DNA, 40 bp, Streptococcus pneumoniae; identical to SEQ ID NO: 44415
  source 1..40: mol_type = genomic DNA

SEQ ID NO: 44606 - protein, 549 aa, Streptococcus pneumoniae
MSKEKIKVYLYTRVSTSIKIEGYSLEAQKSRMKAFAIYNDYEIVGEYEDAGKSGKSIEGRIQFNRMMEDIKSGKDGVSFVLVFKLSRFARNAADVLSTLQIMQDYGVNLICVEDGIDSSKDAGKLMISVLSAVAEIERENISIQTMEGRIQKAREGKWNGGFAPYGYKLEDGKLFINEEEAVAIRTIFDQYVNTTIGANGISKYLENHGIRKIPRQNGKNPLFDAGLIRKILKNPVYNGKIAFGRRTLEKVHGTRNEYKQVEQDEYLISEGIHEAIVSDEVWQAAQVKLKSQAKKYEHVNKGKDTRTHLLSGIVKCPICGVGMFGNKCIKKKKDGTKYKDFYYYGCNHRQMIRGHKCTFSKQIREELLDDAVAEVIVKIVSNPKFASMMQEKINMKVDTSEIEKEIDNYQKELRKSHSTKFKLIEEIDNLDVEDKHYKRRKQDLDDRLYRMYDKIDELESSLIDAKAKKQTIEAEKLTGDNIYKVLIYFDKLYKVMNDVERRQLISALISEIQVYEEKQSNGQWLKSITFKLPIIEENLNIDLDNDEQV

SEQ ID NO: 44607 - DNA, 50 bp, Streptococcus pneumoniae; identical to SEQ ID NO: 44422
  source 1..50: mol_type = genomic DNA

SEQ ID NO: 44608 - DNA, 40 bp, Streptococcus pneumoniae; identical to SEQ ID NO: 20423
  source 1..40: mol_type = genomic DNA

SEQ ID NO: 44609 - DNA, 50 bp, Streptococcus pneumoniae; identical to SEQ ID NO: 44424
  source 1..50: mol_type = genomic DNA

SEQ ID NO: 44610 - DNA, 40 bp, Streptococcus pneumoniae; identical to SEQ ID NO: 44415
  source 1..40: mol_type = genomic DNA

SEQ ID NO: 44611 - protein, 549 aa, Streptococcus pneumoniae
MSKEKIKVYLYIRVSTSIQIEGYSLEAQKSRMKAFAIYNDYEIVGEYEDAGKSGKSIEGRIQFNRMMEDIKSGKDGVSFVLVFKLSRFARNAADVLSTLQIMQDYGVNLICVEDGIDSSKDAGKLMISVLSAVAEIERENIRIQTMEGCIQKAREGKWNGGFAPYGYKLEDGKLFINEEEAVAIRTIFDQYVNTTIGANGISKYLENHGIRKIPRQNGKNPLFDAGLIRKILKNPVYNGKIAFGRRTLEKVHGTRNEYKQVEQDEYLISEGIHEAIVSDEVWQAAQVKLKSQAKKYEHVNKGKDTRTHLLSGIVKCPICGVGMFGNKCIKKKKDGTKYKDFYYYGCKHRQMIRGHKCTFSKQIREELLDDAVAEVIVKIVSNPKFASMMQEKINMKVDTSEIEKEIDNYQKELRKSHSTKFKLIEEIDNLDVEDKHYKRRKQDLDDRLYRMYDKIDELESSLIDAKAKKQTIEAEKLTGDNIYKVLIYFDKLYKVMNDVERRQLISALISEIQVYEEKQSNGQWLKSITFKLPIIEENLNIDLDNDEQV

SEQ ID NO: 44612 - DNA, 50 bp, Streptococcus pneumoniae; identical to SEQ ID NO: 44422
  source 1..50: mol_type = genomic DNA

SEQ ID NO: 44613 - DNA, 40 bp, Streptococcus pneumoniae; identical to SEQ ID NO: 20423
  source 1..40: mol_type = genomic DNA

SEQ ID NO: 44614 - DNA, 50 bp, Streptococcus pneumoniae; identical to SEQ ID NO: 44424
  source 1..50: mol_type = genomic DNA

SEQ ID NO: 44615 - DNA, 40 bp, Streptococcus pneumoniae; identical to SEQ ID NO: 44415
  source 1..40: mol_type = genomic DNA

SEQ ID NO: 44616 - protein, 549 aa, Streptococcus pneumoniae
MSKEKIKVYLYTRVSTSIQIEGYSLEAQKSRMKAFAIYNDYEIVGEYEDAGKSGKSIEGRIQFNRMMEDIKSGKDGVSFVLVFKLSRFARNAADVLSTLQIMQDYGVNLICVEDGIDSSKDAGKLMISVLSAVAEIERENIRIQTMEGRIQKAREGKWNGGFAPYGYKLEDGKLFINEEEAVAIRTIFDQYVNTTIGANGISKYLENHGIRKIPRQNGKNPLFDAGLIRKILKNPVYNGKIAFGRRTLEKVHGTRNEYKQVEQDEYLISEGIHEAIVSDEVWQAAQVKLKSQAKKYEHVNKGKDTRTHLLSGIVKCPICGVGMFGNKCIKKKKDGTKYKDFYYYGYKHRQMIRGHKCTFSKQIREELLDDAVAEVIVKIVSNPKFASMMQEKINMKVDTSEIEKEIDNYQKELRKSHSTKFKLIEEIDNLDVEDKHYKRRKQDLDDRLYRMYDKIDELESSLIDAKAKKQTIEAEKLTGDNIYKVLIYFDKLYKVMNDVERRQLISALISEIQVYEEKQSNGQWLKSITFKLPIIEENLNIGLDNDEQV

SEQ ID NO: 44617 - DNA, 50 bp, Streptococcus pneumoniae; identical to SEQ ID NO: 44427
  source 1..50: mol_type = genomic DNA

SEQ ID NO: 44618 - DNA, 40 bp, Streptococcus pneumoniae; identical to SEQ ID NO: 20423
  source 1..40: mol_type = genomic DNA

SEQ ID NO: 44619 - DNA, 50 bp, Streptococcus pneumoniae; identical to SEQ ID NO: 44429
  source 1..50: mol_type = genomic DNA

SEQ ID NO: 44620 - DNA, 40 bp, Streptococcus pneumoniae; identical to SEQ ID NO: 44415
  source 1..40: mol_type = genomic DNA

SEQ ID NO: 44621 - protein, 549 aa, Streptococcus pneumoniae
MSKEKIKVYLYTRVSTSIQIEGYSLEAQKSRMKAFAIYNDYEIVGEYEDAGKSGKSIEGRIQFNRMMEDIKSGKDGVSFVLVFKLSRFARNAADVLSTLQIMQDYGVNLICVEDGIDSSKDAGKLMISVLSAVAEIERENIRIQTMEGRIQKVREGKWNGGFAPYGYKLEDGKLFINEEEAVAIRTIFDQYVNTTIGANGISKYLENHGIRKIPRQNGKNPLFDAGLIRKILKNPVYNGKIAFARRTLEKVHGTRNEYKQVEQDEYLISEGIHEAIVSDEVWQAAQVKLKSQAKKYEHVNKGKDTRTHLLSGIVKCPICGVGMFGNKCIKKKKDGTKYKDFYYYGCKHRQMIRGHKCTFSKQIREELLDDAVAEVIVKIVSNPKFASMMQEKINIKVDTSEIEKEIDNYQKELRKSHSTKFKLIEEIDNLDVEDKHYKRRKQDLDDRLYRMYDKIDELESSLIDAKAKKQTLEAEKLTGDNIYKVLIYFDKLYKVMNDVERRQLISALISEIQVYEEKQSNGQWLKSITFKLPIIEENLNIGLDNDEQV

SEQ ID NO: 44622 - DNA, 50 bp, Streptococcus pneumoniae; identical to SEQ ID NO: 44412
  source 1..50: mol_type = genomic DNA

SEQ ID NO: 44623 - DNA, 40 bp, Streptococcus pneumoniae; identical to SEQ ID NO: 20423
  source 1..40: mol_type = genomic DNA

SEQ ID NO: 44624 - DNA, 50 bp, Streptococcus pneumoniae; identical to SEQ ID NO: 44414
  source 1..50: mol_type = genomic DNA

SEQ ID NO: 44625 - DNA, 40 bp, Streptococcus pneumoniae; identical to SEQ ID NO: 44415
  source 1..40: mol_type = genomic DNA

SEQ ID NO: 44626 - protein, 549 aa, Streptococcus pneumoniae
MSKEKIKVYLYTRVSTSIQIEGYSLEAQKSRMKAFAIYNDYEIVGEYEDAGKSGKSIEGRIQFNRMMEDIKSGKDGVSFVLVFKLSRFARNAADVLSTLQIMQDYGVNLICVEDGIDSSKDAGKLMISVLSAVAEIERENIRIQTMEGRSQKAMEGKWNGGFAPYGYKLEDGKLFINEEEAVAIRTIFDQYVNTTIGANGISKYLENHGIRKIPRQNGKNPLFDAGLIRKILKNPVYNGKIAFGRRTLEKVHGTRNEYKQVEQDEYLISEGIHEAIVSDEVWQAAQVKLKSQAKKYEHVNKGKDTRTHLLSGIVKCPICGVGMFGNKCIKKKKDGTKYKDFYYYGCKHRQMIRGHKCTFSKQIREELLDDAVAEVIVKIVSNPKFASMMQEKINMKVDTSEIEKEIDNYQKELRKSHSTKFKLIEEIDNLDVEDKHYKRRKQDLDDRLYRMYDKIDELESSLIDAKAKKQTIEAEKLTGDNIYKVLIYFDKLYKVMNDVERRQLISALISEIQVYEEKQSNGQWLKSITFKLPIIEENLNIDLDNDEQV

SEQ ID NO: 44627 - DNA, 50 bp, Streptococcus pneumoniae; identical to SEQ ID NO: 44422
  source 1..50: mol_type = genomic DNA

SEQ ID NO: 44628 - DNA, 40 bp, Streptococcus pneumoniae; identical to SEQ ID NO: 20423
  source 1..40: mol_type = genomic DNA

SEQ ID NO: 44629 - DNA, 50 bp, Streptococcus pneumoniae; identical to SEQ ID NO: 44424
  source 1..50: mol_type = genomic DNA

SEQ ID NO: 44630 - DNA, 40 bp, Streptococcus pneumoniae; identical to SEQ ID NO: 44415
  source 1..40: mol_type = genomic DNA

SEQ ID NO: 44631 - protein, 522 aa, Streptococcus pneumoniae
MSKEKIKVYLYTRVSTSIQIEGYSLEAQKSRMKAFAIYNDYEIVGEYEDAGKSGKSIEGRIQFNRMMEDIKSGKDGVSFVLVFKLSRFARNAADVLSTLQIMQDYGVNLICVEDGIDSSKDAGKLMISVLSAVAEIERENIRIQTMEGRIQKAREGKWNGGFAPYGYKLEDGKLFINEEEAVAIRTIFDQYVNTTIGANGISKYLENHGIRKIPRQNGKNPLFDAGLIRKILKNPVYNGKIAFGRRTLEKVHGTRNEYKQVEQDEYLISEGIHEAIVSDEVWQAAQVKLKSQAKKYEHVNKGKDTRTHLLSGIVKCPICGVGMFGNKCIKKKKDGTKYKDFYYYGCKHRQMIRGHKCTFSKQIREELLDDAVAEVIVKIVSNPKFASMMQEKINMKVDTSEIEKEIDNYQKELRKSHSTKFKLIEEIDNLDVEDKHYKRRKQDLDDRLYRMYDKIDELESSLIDAKAKKQTIEAEKLTGDNIYKVLIYFDKLYKVMNDVERRQLISALISEIQVYEEKQSNG

SEQ ID NO: 44632 - DNA, 50 bp, Streptococcus pneumoniae; identical to SEQ ID NO: 44427
  source 1..50: mol_type = genomic DNA

SEQ ID NO: 44633 - DNA, 40 bp, Streptococcus pneumoniae; identical to SEQ ID NO: 20423
  source 1..40: mol_type = genomic DNA

SEQ ID NO: 44634 - DNA, 50 bp, Streptococcus pneumoniae; identical to SEQ ID NO: 44429
  source 1..50: mol_type = genomic DNA

SEQ ID NO: 44635 - DNA, 40 bp, Streptococcus pneumoniae; identical to SEQ ID NO: 44415
  source 1..40: mol_type = genomic DNA

SEQ ID NO: 44636 - protein, 518 aa, Streptococcus pneumoniae
MKAFAIYNDYEIVGEYEDAGKSGKSIEGRIQFNRMMEDIKSGKDGVSFVLVFKLSRFARNAADVLSTLQIMQDYGVNLICVEDGIDSSKDAGKLMISVLSAVAEIERENIRIQTMEDRIQKAREGKWNGGFAPYGYKLEDGKLFINEEEAVAIRTIFDQYVNTTIGANGISKYLENHGIRKIPRQNGKNPLFDAGLIRKILKNPVYNGKIAFGRRTLEKVHGTRNEYKQVEQDEYLISEGIHEAIVSDEVWQAAQVKLKSQAKKYEHVNKGKDTRTHLLSGIVKCPICGVGMFGNKCIKKKKDGTKYKDFYYYGCKHRQMIRGHECTFSKQIREELLDDAVAEVIVKIVSNPKFASMMQEKINMKVDTSEIEKEIDNYQKELRKSHSTKFKLIEEIDNLDVEDKHYKRRKQDLDDRLCRMYDKIDELESSLIDAKAKKQTIEAEKLTGDNIYKVLIYFDKLYKVMNDVEHRQLISALISEIQVYEEKQSNGQWLKSITFKLPIIEENLNIGLDNDEQV

SEQ ID NO: 44637 - DNA, 50 bp, Streptococcus pneumoniae; identical to SEQ ID NO: 44412
  source 1..50: mol_type = genomic DNA

SEQ ID NO: 44638 - DNA, 40 bp, Streptococcus pneumoniae; identical to SEQ ID NO: 20423
  source 1..40: mol_type = genomic DNA

SEQ ID NO: 44639 - DNA, 50 bp, Streptococcus pneumoniae; identical to SEQ ID NO: 44414
  source 1..50: mol_type = genomic DNA

SEQ ID NO: 44640 - DNA, 40 bp, Streptococcus pneumoniae; identical to SEQ ID NO: 44415
  source 1..40: mol_type = genomic DNA

SEQ ID NO: 44641 - protein, 549 aa, Streptococcus pneumoniae
MSKEKIKVYLYTRVSTSIQIEGYSLEAQKSRMKAFAIYNDYEIVGEYEDAGKSGKSIEGRIQFNRMMEDIKSGKDGVSFVLVFKLSRFARNAADVLSTLQIMQDYGVNLICVENGIDSSKDAGKLMISVLSAVAEIERENIRIQTMEGCIQKAREGKWNGGFAPYGYKLEDGKLFINEEEAVAIRTIFDQYVNTTIGANGISKYLENHGIRKIPRQNGKNPLFDAGLIRKILKNPVYNGKIAFGRRTLEKVHGTRNEYKQVEQDEYLISEGIHEAIVSDEVWQAAQVKLKSQAKKYEHVNKGKDTRTHLLSGIVKCPICGVGMFGNKCIKKKKDGTKYKDFYYYGCKHRQMIRGHKCTFSKQIREELLDDAVAEVIVKIVSNPKFASMMQEKINMKVDTSEIEKEIDNYQKELRKSHSTKFKLIEEIDNLDVEDKHYKRRKQDLDDRLYRMYDKIDELESSLIDAKAKKQTIEAEKLTGDNIYKVLIYFDKLYKVMNDVERRQLISALISEIQVYEEKQSNGQWLKSITFKLPIIEENLNIGLDNDEQV

SEQ ID NO: 44642 - DNA, 50 bp, Streptococcus pneumoniae; identical to SEQ ID NO: 44412
  source 1..50: mol_type = genomic DNA

SEQ ID NO: 44643 - DNA, 40 bp, Streptococcus pneumoniae; identical to SEQ ID NO: 20423
  source 1..40: mol_type = genomic DNA

SEQ ID NO: 44644 - DNA, 50 bp, Streptococcus pneumoniae; identical to SEQ ID NO: 44414
  source 1..50: mol_type = genomic DNA

SEQ ID NO: 44645 - DNA, 40 bp, Streptococcus pneumoniae; identical to SEQ ID NO: 44415
  source 1..40: mol_type = genomic DNA

SEQ ID NO: 44646 - protein, 549 aa, Streptococcus pneumoniae
MSKEKIKVYLYTRVSTSIKIEGYSLEAQKSRMKAFAIYNDYEIVGEYEDAGKSGKSIEGRIQFNRMMEDIKSGKDGVSFVLVFKLSRFARNAADVLSTLQIMQDYGVNLICVEDGIDSSKDAGKLMISVLSAVAEIERENIRIQTMEGRIQKAREGKWNGGFAPYGYKLEDGKLFINEEEAVAIRTIFDQYVNTTIGANGISKYLENHGIRKIPRQNGKNPLFDAGLIRKILKNPVYNGKIAFGRRTLEKVHGTRNEYKQVEQDEYLISEGIHEAIVSDEVWQAAQVKLKSQAKKYEHVNKGKDTRTHLLSGIVKCPICGVGMFGNKCIKKKKDGTKYKDFYYYGCNHRQMIRGHKCTFSKQIREELLDDAVAEVIVKIVSNPKFASMMQEKINMKVDTSEIEKEIDNYQKELRKSHSTKFKLIEEIDNLDVEDKHYKRRKQDLDDRLYRMYDKIDELESSLIDAKAKKQTIEAEKLTGDNIYKVLIYFDKLYKVMNDVERRQLISALISEIQVYEEKQSNGQWLKSITFKLPIIEENLNIDLDNDEQV

SEQ ID NO: 44647 - DNA, 50 bp, Streptococcus pneumoniae; identical to SEQ ID NO: 44422
  source 1..50: mol_type = genomic DNA

SEQ ID NO: 44648 - DNA, 40 bp, Streptococcus pneumoniae; identical to SEQ ID NO: 20423
  source 1..40: mol_type = genomic DNA

SEQ ID NO: 44649 - DNA, 50 bp, Streptococcus pneumoniae; identical to SEQ ID NO: 44424
  source 1..50: mol_type = genomic DNA

SEQ ID NO: 44650 - DNA, 40 bp, Streptococcus pneumoniae; identical to SEQ ID NO: 44415
  source 1..40: mol_type = genomic DNA

SEQ ID NO: 44651 - protein, 549 aa, Streptococcus pneumoniae
MSKEKIKVYLYTRVSTSIQIEGYSLEAQKSRMKAFAIYNDYEIVGEYEDAGKSGKSIEGRIQFNRMMEDIKSGKDGVSFVLVFKLSRFARNAADVLSTLQIMQDYGVNLICVEDGIDSSKDAGKLMISVLSAVAEIERENIRIQTMEGRIQKAREGKWNGGFAPYGYKLEDGKLFINEEEAVAIRTIFDQYVNTTIGANGISKYLENHGIRKIPRQNGKNPLFDAGLIRKILKNPVYNGKIAFGRRTLEKVHGTRNEYKQVEQDEYLISEGIHEAIVSDEVWQAAQVKLKSQAKKYEHVNKGKDTRTHLLSGIVKCPICGVGMFGNKCIKKKKDGTKYKDFYYYGYKHRQMIRGHKCTFSKQIREELLDDAVAEVIVKIVSNPKFASMMQEKINMKVDTSEIEKEIDNYQKELRKSHSTKFKLIEGIDNLDVEDKHYKRRKQDLDDRLYRMYDKIDELESSLIDAKAKKQTIEAEKLTGDNIYKVLIYFDKLYKVMNDVERRQLISALISEIQVYEEKQSNGQWLKSITFKLPIIEENLNIGLDNDEQV

SEQ ID NO: 44652 - DNA, 50 bp, Streptococcus pneumoniae; identical to SEQ ID NO: 44427
  source 1..50: mol_type = genomic DNA

SEQ ID NO: 44653 - DNA, 40 bp, Streptococcus pneumoniae; identical to SEQ ID NO: 20423
  source 1..40: mol_type = genomic DNA

SEQ ID NO: 44654 - DNA, 50 bp, Streptococcus pneumoniae; identical to SEQ ID NO: 44429
  source 1..50: mol_type = genomic DNA

SEQ ID NO: 44655 - DNA, 40 bp, Streptococcus pneumoniae; identical to SEQ ID NO: 44415
  source 1..40: mol_type = genomic DNA

SEQ ID NO: 44656 - protein, 483 aa, Streptococcus pneumoniae
MEDIKSGKDGVSFVLVFKLSRFARNAADVLSTLQIMQDYGVNLICVEDGIDSSKDAGKLMISVLSAVAEIERENIRIQTMEGRSQKAMEGKWNGGFAPYGYKLEDGKLFINEEEAVAIRTIFDQYVNTTIGANGISKYLENHGIRKIPRQNGKNPLFDAGLIRKILKNPVYNGKIAFGRRTLEKVHGTRNEYKQVEQDEYLISEGIHEAIVSDEVWQAAQVKLKSQAKKYEHVNKGKDTRTHLLSGIVKCPICGVGMFGNKCTKKKKDGTKYKDFYYYGCKHRQMIRGHKCTFSKQIREELLDDAVAEVIVKIVSNPKFASMMQEKINMKVDTSEIEKEIDNYQKELRKSHSTKFKLIEEIDNLDVEDKHYKRRKQDLDDRLYRMYDKIDELESSLIDAKAKKQTIEAEKLTGDNIYKVLIYFDKLYKVMNDVERRQLISALISEIQVYEEKQSNGQWLKSITFKLPIIEENLNIDLDNDEQV

SEQ ID NO: 44657 - DNA, 50 bp, Streptococcus pneumoniae; identical to SEQ ID NO: 44422
  source 1..50: mol_type = genomic DNA

SEQ ID NO: 44658 - DNA, 40 bp, Streptococcus pneumoniae; identical to SEQ ID NO: 20423
  source 1..40: mol_type = genomic DNA

SEQ ID NO: 44659 - DNA, 50 bp, Streptococcus pneumoniae; identical to SEQ ID NO: 44424
  source 1..50: mol_type = genomic DNA

SEQ ID NO: 44660 - DNA, 40 bp, Streptococcus pneumoniae; identical to SEQ ID NO: 44415
  source 1..40: mol_type = genomic DNA

SEQ ID NO: 44661 - protein, 549 aa, Streptococcus pneumoniae
MSKEKIKVYLYTRVSTSIKIEGYSLEAQKSRMKAFAIYNDYEIVGEYEDAGKSGKSIEGRIQFNRMMEDIKSGKDGVSFVLVFKLSRFARNAADVLSTLQIMQDYGVNLICVEDGIDSSKDAGKLMISVLSAVAEIERENISIQTMEGRIQKAREGKWNGGFAPYGYKLEDGKLFINEEEAVAIRTIFDQYVNTTIGANGISKYLENHGIRKIPRQNGKNPLFDAGLIRKILKNPVYNGKIAFGRRTLEKVHGTRNEYKQVEQDEYLISEGIHEAIVSDEVWQAAQVKLKSQAKKYEHVNKGKDTRTHLLSGIVKCPICGVGMFGNKCIKKKKDGTKYKDFYYYGCNHRQMIRGHKCTFSKQIREELLDDAVAEVIVKIVSNPKFASMMQEKINMKVDTSEIEKEIDNYQKELRKSHSTKFKLIEEIDNLDVEDKHYKRRKQDLDDRLYRMYDKIDELESSLIDAKAKKQTIEAEKLTGDNIYKVLIYFDKLYKVMNDVERRQLISALISEIQVYEEKQSNGQWLKSITFKLSIIEENLNIDLDNDEQV

SEQ ID NO: 44662 - DNA, 50 bp, Streptococcus pneumoniae; identical to SEQ ID NO: 44422
  source 1..50: mol_type = genomic DNA

SEQ ID NO: 44663 - DNA, 40 bp, Streptococcus pneumoniae; identical to SEQ ID NO: 20423
  source 1..40: mol_type = genomic DNA

SEQ ID NO: 44664 - DNA, 50 bp, Streptococcus pneumoniae; identical to SEQ ID NO: 44424
  source 1..50: mol_type = genomic DNA

SEQ ID NO: 44665 - DNA, 40 bp, Streptococcus pneumoniae; identical to SEQ ID NO: 44415
  source 1..40: mol_type = genomic DNA

SEQ ID NO: 44666 - protein, 549 aa, Streptococcus pneumoniae
MSKEKIKVYLYTRVSTSIQIEGYSLEAQKSRMKAFAIYNDYEIVGEYEDAGKSGKSIEGRIQFNRMMEDIKSGKDGVSFVLVFKLSRFARNAADVLSTLQIMQDYGVNLICVEDGIDSSKDAGKLMISVLSAVAEIERENIRIQTMEGRIQKAREGKWNGGFAPYGYKLEDGKLFINEEEAVAIRTIFDQYVNTTIGANGISKYLENHGIRKIPRQNGKNPLFDAGLIRKILKNPVYNGKIAFGRRTLEKVHGTRNEYKQVEQDEYLISEGIHEAIVSDEVWQAAQVKLKSQAKKYDHVNKGKDTRTHLLSGIVKCPICGVGMFGNKCIKKKKDGTKYKDFYYYGYKHRQMIRGHKCTFSKQIREELLDDAVAEVIVKIVSNPKFASMMQEKINMKVDTSEIEKEIDNYQKELRKSHSTKFKLIEEIDNLDVEDKHYKRRKQDLDDRLYRMYDKIDELESSLIDAKAKKQTIEAEKLTGDNIYKVLIYFDKLYKVMNDVERRQLISALISEIQVYEEKQSNGQWLKSITFKLPIIEENLNIDLDNDEQV

SEQ ID NO: 44667 - DNA, 50 bp, Streptococcus pneumoniae; identical to SEQ ID NO: 44422
  source 1..50: mol_type = genomic DNA

SEQ ID NO: 44668 - DNA, 40 bp, Streptococcus pneumoniae; identical to SEQ ID NO: 20423
  source 1..40: mol_type = genomic DNA

SEQ ID NO: 44669 - DNA, 50 bp, Streptococcus pneumoniae; identical to SEQ ID NO: 44424
  source 1..50: mol_type = genomic DNA

SEQ ID NO: 44670 - DNA, 40 bp, Streptococcus pneumoniae; identical to SEQ ID NO: 44415
  source 1..40: mol_type = genomic DNA

SEQ ID NO: 44671 - protein, 549 aa, Streptococcus pneumoniae
MSKEKIKVYLYTRVSTSIQIEGYSLEAQKSRMKAFAIYNDYEIVGEYEDAGKSGKSIEGRIQFNRMMEDIKSGKDGVSFVLVFKLSRFARNAADVLSTLQIMQDYGVNLICVEDGIDSSKDAGKLMISVLSAVAEIERENIRIQTMEGRIQKAREGKWNGGFAPYGYKLEDGKLFINEEEAVAIRTIFDQYVNTTIGANGISKYLENHGIRKIPRQNGKNPLFDAGLIRKILKNPVYNGKIAFGRRTLEKVHGTRNEYKQVEQDEYLISEGIHEAIVSDEVWQAAQVKLKSQAKKYEHVNKGKDTRTHLLSGIVKCPICGVGMFGNKCIKKKKDGTKYKDFYYYGCKHRQMIRGHKCTFSKQIREELLDDAVAEVIVKIVSNPKFASMMQEKINMKVDTSEIEKEIDNYQKELRKSHSTKFKLIEEIDNLDVEDKHYKRRKQDLDDRLYRMYDKIDELESSLIDAKAKKQTIEAEKLTGDNIYKVLIYFDKLYKVMNDVERRQLISALISEIQVYEEKQSNGQWLKSITFKLPIIEENLNIDLDNDEQV

SEQ ID NO: 44672 - DNA, 50 bp, Streptococcus pneumoniae; identical to SEQ ID NO: 44422
  source 1..50: mol_type = genomic DNA

SEQ ID NO: 44673 - DNA, 40 bp, Streptococcus pneumoniae; identical to SEQ ID NO: 20423
  source 1..40: mol_type = genomic DNA

SEQ ID NO: 44674 - DNA, 50 bp, Streptococcus pneumoniae; identical to SEQ ID NO: 44424
  source 1..50: mol_type = genomic DNA

SEQ ID NO: 44675 - DNA, 40 bp, Streptococcus pneumoniae; identical to SEQ ID NO: 44415
  source 1..40: mol_type = genomic DNA

SEQ ID NO: 44676 - protein, 549 aa, Streptococcus pneumoniae; identical to SEQ ID NO: 44566

SEQ ID NO: 44677 - DNA, 50 bp, Streptococcus pneumoniae; identical to SEQ ID NO: 44427
  source 1..50: mol_type = genomic DNA

SEQ ID NO: 44678 - DNA, 40 bp, Streptococcus pneumoniae; identical to SEQ ID NO: 20423
  source 1..40: mol_type = genomic DNA

SEQ ID NO: 44679 - DNA, 50 bp, Streptococcus pneumoniae; identical to SEQ ID NO: 44429
  source 1..50: mol_type = genomic DNA

SEQ ID NO: 44680 - DNA, 40 bp, Streptococcus pneumoniae; identical to SEQ ID NO: 44415
  source 1..40: mol_type = genomic DNA

SEQ ID NO: 44681 - protein, 549 aa, Streptococcus pneumoniae
MSKEKIKVYLYTRVSTSIQIEGYSLEAQKSRMKAFAIYNDYEIVGEYEDAGKSDKSIEGRIQFNRMMEDIKSGKDGVSFVLVFKLSRFARNAADVLSTLQIMQDYGVNLICVEDGIDSSKDAGKLMISVLSAVAEIERENIRIQTMEGRIQKAREGKWNGGFAPYGYKLEDGKLFINEEEAVAIRTIFDQYVNTTIGANGISKYLENHGIRKIPRQNGKNPLFDAGLIRKILKNPVYNGKIAFGRRTLEKVHGTRNEYKQVEQDEYLISEGIHEAIVSDEVWQAAQVKLKSQAKKYEHVNKGKDTRTHLLSGIVKCPICGVGMFGNKCIKKKKDGTKYKDFYYYGCKHRQMIRGHKCTFSKQIIEELLDDAVAEVIVKIVSNPKFASMMQEKINMKVDTSEIEKEIDNYQKELRKSHSTKFKLIEEIDNLDVEDKHYKRRKQDLDDRLYRMYDKIDELESSLIDAKAKKQTIEAEKLTGDNIYKVLIYFDKLYKVMNDVERRQLISALISEIQVYKEKQSNGQWLKSITFKLPIIEENLNIGLDNDEQV

SEQ ID NO: 44682 - DNA, 50 bp, Streptococcus pneumoniae; identical to SEQ ID NO: 44412
  source 1..50: mol_type = genomic DNA

SEQ ID NO: 44683 - DNA, 40 bp, Streptococcus pneumoniae; identical to SEQ ID NO: 20423
  source 1..40: mol_type = genomic DNA

SEQ ID NO: 44684 - DNA, 50 bp, Streptococcus pneumoniae; identical to SEQ ID NO: 44414
  source 1..50: mol_type = genomic DNA

SEQ ID NO: 44685 - DNA, 40 bp, Streptococcus pneumoniae; identical to SEQ ID NO: 44415
  source 1..40: mol_type = genomic DNA

SEQ ID NO: 44686 - protein, 549 aa, Streptococcus pneumoniae
MSKEKIKVYLYTRVSTSIQIEGYSLEAQKSRMKAFAIYNDYEIVGEYEDAGKSGKSIEGRIQFNRMMEDIKSGKDGVSFVLVFKLSRFARNAADVLSTLQIMQDYGVNLICVEDGIDSSKDAGKLMISVLSAVAEIERENIRIQTMEDRIQKAREGKWNGGFAPYGYKLEDGKLFINEEEAVAIRTIFDQYVNATIGANGISKYLENHGIRKIPRQNGKNPLFDAGLIRKILKNPVYNGKIAFGRRTLEKVHGTRNEYKQVEQDEYLISEGIHEAIVSDEVWQAAQVKLKSQAKKYEHVNKGKDTRTHLLSGIVKCPICGVGMFGNKCIKKKKDGTKYKDFYYYGCNHRQMIRGHKCTFSKQIREELLDDAVAEVIVKIVSNPKFASMMQEKINMKVDTSEIEKEIDNYQKELRKSHSTKFKLIEEIDNLDVEDKHYKRRKQDLDDRLYRMYDKIDELESSLIDAKAKKQTIEAEKLTGDNIYKVLIYFDKLYKVMNDVERRQLISALISEIQVYEEKQSNGQWLKSITFKLPIIEENLNIDLDNDEQV

SEQ ID NO: 44687 - DNA, 50 bp, Streptococcus pneumoniae; identical to SEQ ID NO: 44422
  source 1..50: mol_type = genomic DNA

SEQ ID NO: 44688 - DNA, 40 bp, Streptococcus pneumoniae; identical to SEQ ID NO: 20423
  source 1..40: mol_type = genomic DNA

SEQ ID NO: 44689 - DNA, 50 bp, Streptococcus pneumoniae; identical to SEQ ID NO: 44424
  source 1..50: mol_type = genomic DNA

SEQ ID NO: 44690 - DNA, 40 bp, Streptococcus pneumoniae; identical to SEQ ID NO: 44415
  source 1..40: mol_type = genomic DNA

SEQ ID NO: 44691 - protein, 549 aa, Streptococcus pneumoniae
MSKEKIKVYLYTRVSTSIQIEGYSLGAQKSRMKAFAIYNDYEIVGEYEDAGKSGKSIEGRIQFNRMMEDIKSGKDGVSFVLVFKLSRFARNAADVLSTLQIMQDYGVNLICVEDGIDSFKDAGKLMISVLSAVAEIERENIRIQTMEGCIQKAREGKWNGGFAPYGYKLEDGKLFINEEEAVAIRTIFDQYVNTTIGANGISKYLENHGIRKIPRQNGKNPLFDAGLIRKILKNPVYNGKIAFGRRTLEKVHGTRNEYKQVEQDEYLISEGIHEAIVSDEVWQAAQVKLKSQAKKYERVNKGKDTRTHLLSGIVKCPICGVGMFGNKCIKKKKDGTKYKDFYYYGCKHRQMIRGHECTFSKQIREELLDDAVAEVIVKIVSNPKFASMMQEKINMKVDTSEIEKEIDNYQKELRKSHSTKFKLIEEIDNLDVEDKHYKRRKQDLDDRLCRMYDKIDELESSLIDAKAKKQTIEAEKLTGDNIYKVLIYFDKLYKVMNDVEHRQLISTLISEIQVYEEKQSNGQWLKSITFKLPIIEENLNIGLDNDEQV

SEQ ID NO: 44692 - DNA, 50 bp, Streptococcus pneumoniae; identical to SEQ ID NO: 44427
  source 1..50: mol_type = genomic DNA

SEQ ID NO: 44693 - DNA, 40 bp, Streptococcus pneumoniae; identical to SEQ ID NO: 20423
  source 1..40: mol_type = genomic DNA

SEQ ID NO: 44694 - DNA, 50 bp, Streptococcus pneumoniae; identical to SEQ ID NO: 44429
  source 1..50: mol_type = genomic DNA

SEQ ID NO: 44695 - DNA, 40 bp, Streptococcus pneumoniae; identical to SEQ ID NO: 44415
  source 1..40: mol_type = genomic DNA

SEQ ID NO: 44696 - protein, 549 aa, Streptococcus pneumoniae
MSKEKIKVYLYTRVSTSIQIEGYSLEAQKSRMKAFAIYNDYEIVGEYEDAGKSGKSIEGRIQFNRMMEDIKSGKDGVSFVLVFKLSRFARNAADVLSTLQIMQDYGVNLICVEDGIDSSKDAGKLMISVLSAVAEIERENIRIQTMEDCIQKAREGKWNGGFAPYGYKLEDGKLFINEEEAVAIRTIFDQYVNTTIGANGISKYLENHGIRKIPRQNGKNPLFDAGLIRKILKNPVYNGKIAFGRRTLEKVHGTRNEYKQVEQDEYLISEGIHEAIVSDEVWQAAQVKLKSQAKKYEHVNKGKDTRTHLLSGIVKCPICGVGMFGNKCIKKKKDGTKYKDFYYYGCKHRQMIRGHKCTFSKQIREELLDDAVAEVIVKIVSNPKFASMMQEKINMKVDTSEIEKEIDNYQKELRKSHSTKFKLIEEIDNLDVEDKHYKRRKQDLDDRLYRMYDKIDELESSLIDAKAKKQTIEAEKLTGDNIYKVLIYFDKLYKVMNDVERRQLISALISEIQVYEEKQSNGQWLKSITFKLPIIEENLNIDLDNDEQV

SEQ ID NO: 44697 - DNA, 50 bp, Streptococcus pneumoniae; identical to SEQ ID NO: 44422
  source 1..50: mol_type = genomic DNA

SEQ ID NO: 44698 - DNA, 40 bp, Streptococcus pneumoniae; identical to SEQ ID NO: 20423
  source 1..40: mol_type = genomic DNA

SEQ ID NO: 44699 - DNA, 50 bp, Streptococcus pneumoniae; identical to SEQ ID NO: 44424
  source 1..50: mol_type = genomic DNA

SEQ ID NO: 44700 - DNA, 40 bp, Streptococcus pneumoniae; identical to SEQ ID NO: 44415
  source 1..40: mol_type = genomic DNA

SEQ ID NO: 44701 - protein, 549 aa, Streptococcus pneumoniae
MSKEKIKVYLYTRVSTSIQIEGYSLEAQKSRMKAFAIYNDYEIVGEYEDAGKSGKSIEGRIQFNRMMEDIKSGKDGVSFVLVFKLSRFARNAADVLSTLQIMQDYGVNLICVEDGIDSSKDAGKLMISVLSAVAEIERENIRIQTMEGRIQKAREGKWNGGFAPYGYKLEDGKLFINEEEAVAIRTIFDQYVNTTIGANGISKYLENHGIRKIPRQNGKNPLFDAGLIRKILKNPVYNGKIAFGRRTLEKVHGTRNEYKQVEQDEYLISEGIHEAIVSDEVWQAAQVKLKSQAKKYEHVNKGKDTRTHLLSGIVKCPICGVGMFGNKCIKKKKDGTKYKDFYYYGYKHRQMIRGHKCTFSKQIREELLDDAVAEVIVKIVSNPKFASMMQEKINMKVDTSEIEKEIDNYQKELRKSHSTKFKLIEEIDNLDVEDKHYKRRKQDLDDRLYRMYDKIDELESSLIDAKAKKQTIEAEKLTGDNIYKVLIYFDKLYKVMNDVERIQLISALISEIQVYEEKQSNGQWLKSITFKLPIIEENLNIGLDNDEQV

SEQ ID NO: 44702 - DNA, 50 bp, Streptococcus pneumoniae; identical to SEQ ID NO: 44427
  source 1..50: mol_type = genomic DNA

SEQ ID NO: 44703 - DNA, 40 bp, Streptococcus pneumoniae; identical to SEQ ID NO: 20423
  source 1..40: mol_type = genomic DNA

SEQ ID NO: 44704 - DNA, 50 bp, Streptococcus pneumoniae; identical to SEQ ID NO: 44429
  source 1..50: mol_type = genomic DNA

SEQ ID NO: 44705 - DNA, 40 bp, Streptococcus pneumoniae; identical to SEQ ID NO: 44415
  source 1..40: mol_type = genomic DNA

SEQ ID NO: 44706 - protein, 549 aa, Streptococcus pneumoniae
MSKEKIKVYLYTRVSTSIQIEGYSLEAQKSRMKAFAIYNDYEIVGEYEDAGKSGKSIEGRIQFNRMMEDIKSGKDGVSFVLVFKLSRFARNAADVLSTLQIMQDYGVNLICVEDGIDSSKDAGKLMISVLSAVAEIERENIRIQTMEGRIQKAREGKWNGGFAPYGYKLEDGKLFINEEEAVAIRTIFDQYVNTTIGANGISKYLENHGIRKIPRQNGKNPLFDAGLIRKILKNPVYNGKIAFGRRTLEKVHGTINEYKQVEQDEYLISEGIHEAIVSDEVWQAAQVKLKSQAKKYEHVNKGKDTRTHLLSGIVKCPICGVGMFGNKCIKKKKDGTKYKDFYYYGCNHRQMIRGHKCTFSKQIREELLDDAVAEVIVKIVSNPKFASMMQEKINMKVDTSEIEKEIDNYQKELRKSHSTKFKLIEEIDNLDVEDKHYKRRKQDLDDRLYRMYDKIDELESSLIDAKAKKQTIEAEKLTGDNIYKVLIYFDKLYKVMNDVERRQLISALISEIQVYEEKQSNGQWLKSITFKLPIIEENLNIDLDNDEQV

SEQ ID NO: 44707 - DNA, 50 bp, Streptococcus pneumoniae
  source 1..50: mol_type = genomic DNA
gatttggacaatgatgaacaagttgagccggtagcacttttgtccaaact

SEQ ID NO: 44708 - DNA, 40 bp, Streptococcus pneumoniae; identical to SEQ ID NO: 20423
  source 1..40: mol_type = genomic DNA

SEQ ID NO: 44709 - DNA, 50 bp, Streptococcus pneumoniae
  source 1..50: mol_type = genomic DNA
gatttggacaatgatgaacaagttttgccggtagcacttttgtccaaact

SEQ ID NO: 44710 - DNA, 40 bp, Streptococcus pneumoniae; identical to SEQ ID NO: 44415
  source 1..40: mol_type = genomic DNA

SEQ ID NO: 44711 - protein, 549 aa, Streptococcus pneumoniae
MSKEKIKVYLYTRVSTSIQIEGYSLEAQKSRMKAFAIYNDYEIVGEYEDAGKSGKSIEGRIQFNRMMEDIKSGKDGVSFVLVFKLSRFARNAADVLSTLQIMQDYGVNLICVEDGIDSSKDAGKLMISVLSAVAEIERENIRIQTMEGCIQKAREGKWNGGFAPYGYKLEDGKLFINEEEAVAIRTIFDQYVNTTIGANGISKYLENHGIRKIPRQNGKNPLFDAGLIRKILKNPVYNGKIAFGRRTLEKVHGTRNEYKQVEQDEYLISEGIHEAIVSDEVWQAAQVKLKSQAKKYEHMNKGKDTRTHLLSGIVKCPICGVGMFGNKCIKKKKDGTKYKEFYYYGCKHRQMIRGHKCTFSKQIREELLDDAVAEVIVKIVSNPKFASMMQEKINMKVDTSEIEKEIDNYQKELRKSHSTKFKLIEEIDNLDVEDKHYKRRKQDLDDRLYRMYDKIDELESSLIDAKAKKQTIEAEKLTGDNIYKVMIYFDKLYKVMNDVERRQLISALISEIQVYEEKQSNGQWLKSITFKLPIIEENLNIGLDNDEQV

SEQ ID NO: 44712 - DNA, 50 bp, Streptococcus pneumoniae; identical to SEQ ID NO: 44412
  source 1..50: mol_type = genomic DNA

SEQ ID NO: 44713 - DNA, 40 bp, Streptococcus pneumoniae; identical to SEQ ID NO: 20423
  source 1..40: mol_type = genomic DNA

SEQ ID NO: 44714 - DNA, 50 bp, Streptococcus pneumoniae; identical to SEQ ID NO: 44414
  source 1..50: mol_type = genomic DNA

SEQ ID NO: 44715 - DNA, 40 bp, Streptococcus pneumoniae; identical to SEQ ID NO: 44415
  source 1..40: mol_type = genomic DNA

SEQ ID NO: 44716 - protein, 487 aa, Streptococcus pneumoniae
MSKEKIKVYLYTRVSTSIKIEGYSLEAQKSRMKAFAIYNDYEIVGEYEDAGKSGKSIEGRIQFNRMMEDIKSGKDGVSFVLVFKLSRFARNAADVLSTLQIMQDYGVNLICVEDGIDSSKDAGKLMISVLSAVAEIERENISIQTMEGRIQKAREGKWNGGFAPYGYKLEDGKLFINEEEAVAIRTIFDQYVNTTIGANGISKYLENHGIRKIPRQNGKNPLFDAGLIRKILKNPVYNGKIAFGRRTLEKVHGTRNEYKQVEQDEYLISEGIHEAIVSDEVWQAAQVKLKSQAKKYEHVNKGKDTRTHLLSGIVKCPICGVGMFGNKCIKKKKDGTKYKDFYYYGCNHRQMIRGHKCTFSKQIREELLDDAVAEVIVKIVSNPKFASMMQEKINMKVDTSEIEKEIDNYQKELRKSHSTKFKLIEEIDNLDVEDKHYKRRKQDLDDRLYRMYDKIDELESSLIDAKAKKQTIEAEKLTGDNIYKVLI

SEQ ID NO: 44717 - DNA, 50 bp, Streptococcus pneumoniae
  source 1..50: mol_type = genomic DNA
gatttggacaatgatgaacaagttgagacggtagcacttttgtctaaact

SEQ ID NO: 44718 - DNA, 40 bp, Streptococcus pneumoniae; identical to SEQ ID NO: 20423
  source 1..40: mol_type = genomic DNA

SEQ ID NO: 44719 - DNA, 50 bp, Streptococcus pneumoniae
  source 1..50: mol_type = genomic DNA
gatttggacaatgatgaacaagttttgacggtagcacttttgtctaaact

SEQ ID NO: 44720 - DNA, 40 bp, Streptococcus pneumoniae; identical to SEQ ID NO: 44415
  source 1..40: mol_type = genomic DNA

SEQ ID NO: 44721 - protein, 549 aa, Streptococcus pneumoniae
MSKEKIKVYLYTRVSTSIQIEGYSLEAQKSRMKAFAIYNDYEIVGEYEDAGKSGKSIEGRIQFNRMMEDIKSGKDGVSFVLVFKLSRFARNAADVLSTLQIMQDYGVNLICVEDGIDSSKDAGKLMISVLSAVAEIERENIRIQTMEGRIQKAREGKWNGGFAPYGYKLEDGKLFINEEEAVAIRTIFDQYVNTTIGANGISKYLENHGIRKIPRQNGKNPLFDAGLIRKILKNPVYNGKIAFGRRTLEKVHGTRNEYKQVEQDEYLISEGIHEAIVSDEVWQAAQVKLKSQAKKYEHVNKGKDTRTHLLSGIVKCPICGVGMFGNKCIKKKKDGTKYKDFYYYGYKHRQMIRGHKCTFSKQIREGLLDDAVAEVIVKIVSNPKFASMMQEKINMKVDTSEIEKEIDNYQKELRKSHYTKFKLIEEIDNLDVEDKHYKRRKQDLDDRLYRMYDKIDELESSLIDAKAKKQTIEAEKLTGDNIYKVLIYFDKLYKVMNDVERRQLISALISEIQVYEEKQSNGQWLKSITFKLPIIEENLNIDLDNDEQV

SEQ ID NO: 44722 - DNA, 50 bp, Streptococcus pneumoniae; identical to SEQ ID NO: 44422
  source 1..50: mol_type = genomic DNA

SEQ ID NO: 44723 - DNA, 40 bp, Streptococcus pneumoniae; identical to SEQ ID NO: 20423
  source 1..40: mol_type = genomic DNA

SEQ ID NO: 44724 - DNA, 50 bp, Streptococcus pneumoniae; identical to SEQ ID NO: 44424
  source 1..50: mol_type = genomic DNA

SEQ ID NO: 44725 - DNA, 40 bp, Streptococcus pneumoniae; identical to SEQ ID NO: 44415
  source 1..40: mol_type = genomic DNA

SEQ ID NO: 44726 - protein, 549 aa, Streptococcus pneumoniae
MSKEKIKVYLYTRVSTSIKIEGYSLEAQKSRMKAFAIYNDYEIVGEYEDAGKSGKSIEGRIQFNRMMEDIKSGKDGVSFVLVFKLSRFARNAADVLSTLQIMQDYGVNLICVEDGIDSSKDAGKLMISVLSAVAEIERENISIQTMEGRIQKAREGKWNGGFAPYGYKLEDGKLFINEEEAVAIRTIFDQYVNTTIGANGISKYLENHGIRKIPRQNGKNPLFDAGLIRKILKNPVYNGKIAFGRRTLEKVHGTRNEYKQVEQDEYLISEGIHEAIVSDEVWQAAQVKLKSQAKKYEHVNKGKDTRTHLLSGIVKCPICGVGMFGNKCIKKKKDGTKYKDFYYYGCNHRQMIRGHKCTFSKQIREELLDDAVAEVIVKIVSNPKFASMMQEKINMKVDTSEIEKEIDNYQKELRKSHSTKFKLIEEIDNLDVEDKHYKRRKQDLDDRLYRMYDKIDELESSLIDAKAKKQTIEAEKLTGDNIYKVLIYFDKLYKVMNDVERRQLISALISEIQVYEEKQSNGQWLKSITFKLPIIEENLNIGLDNDEQV

SEQ ID NO: 44727 - DNA, 50 bp, Streptococcus pneumoniae
  source 1..50: mol_type = genomic DNA
ggtttggacaatgatgaacaagttgagacggtagcacttttgtctaaact

SEQ ID NO: 44728 - DNA, 40 bp, Streptococcus pneumoniae; identical to SEQ ID NO: 20423
  source 1..40: mol_type = genomic DNA

SEQ ID NO: 44729 - DNA, 50 bp, Streptococcus pneumoniae
  source 1..50: mol_type = genomic DNA
ggtttggacaatgatgaacaagttttgacggtagcacttttgtctaaact

SEQ ID NO: 44730 - DNA, 40 bp, Streptococcus pneumoniae; identical to SEQ ID NO: 44415
  source 1..40: mol_type = genomic DNA

SEQ ID NO: 44731 - protein, 538 aa, Streptococcus pneumoniae
MSKEKIKVYLYTRVSTSIQIEGYSLEAQKSRMKAFAIYNDYEIVGEYEDAGKSGKSGKSIEGRIQFNRMMEDIKSGKDGVSFVLVFKLSRFARNAADVLSTLQIMQDYGVNLICVEDGIDSSKDAGKLMISVLSAVAEIERENIRIQTMEGRIQKAREGKWNGGFAPYGYKLEDGKLFINEEEAVAIRTIFDQYVNTTIGANGISKYLENHGIRKIPRQNGKNPVYNGKIAFGRRTLEKVHGTRNEYKQVEQDEYLISEGIHEAIVSDEVWQAAQVKLKSQAKKYEHVNKGKDTRTHLLSGIVKCPICGVGMFGNKCIKKKKDGTKYKDFYYYGCKHRQMIRGHKCTFSKQIREELLDDAVAEVIVKIVSNPKFASMMQEKINMKVDTSEIEKEIDNYQKELRKSHSTKFKLIEEIDNLDVEDKHYKRRKQDLDDRLYRMYDKIDELESSLIDAKAKKQTIEAEKLTGDNIYKILIYFDKLYKVMNDVERRQLISALISEIQVYEEKQSNGQWLKSITFKLPIIEENLNIGLDNDEQV

SEQ ID NO: 44732 - DNA, 50 bp, Streptococcus pneumoniae; identical to SEQ ID NO: 44412
  source 1..50: mol_type = genomic DNA

SEQ ID NO: 44733 - DNA, 40 bp, Streptococcus pneumoniae; identical to SEQ ID NO: 20423
  source 1..40: mol_type = genomic DNA

SEQ ID NO: 44734 - DNA, 50 bp, Streptococcus pneumoniae; identical to SEQ ID NO: 44414
  source 1..50: mol_type = genomic DNA

SEQ ID NO: 44735 - DNA, 40 bp, Streptococcus pneumoniae; identical to SEQ ID NO: 44415
  source 1..40: mol_type = genomic DNA

SEQ ID NO: 44736 - protein, 549 aa, Streptococcus pneumoniae
MSKEKIKVYLYTRVSTSIQIEGYSLEAQKSRMKAFAIYNDYEIVGEYEDAGKSGKSIEGRIQFNRMMEDIKSGKDGVSFVLVFKLSRFARNAADVLSTLQIMQDYGVNLICVEDGIDSSKDAGKLMISVLSAVAEIERENIRIQTMEGCIQKAREGKWNGGFAPYGYKLEDGKLFINEEEAVAIRTIFDQYVNTTIGANGISKYLENHGIRKIPRQNGKNPLFDAGLIRKILKNPVYNGKIAFGRRTLEKVHGTRNEYKQVEQDEYLISEGIHEAIVSDEVWQAAQVKLKSQAKKYEHVNKGKDTRTHLLSGIVKCPICGVGMFGNKCIKKKKDGTKYKDFYYYGCKHRQMIRGHKCTFSKQIREELLDDAVAEVIVKIVSNPKFASMMQEKINIKVDTSEIEKEIDNYQKELRKSHSTKFKLIEEIDNLDVEDKHYKRRKQDLDDRLYRMYDKIDELESSLIDAKAKKQTIEAEKLTGDNIYKVLIYFDKLYKVMNDVERRQLISALISEIQVYEEKQSNGQWLKSITFKLPIIEENLNIDLDNDEQV

SEQ ID NO: 44737 - DNA, 50 bp, Streptococcus pneumoniae; identical to SEQ ID NO: 44422
  source 1..50: mol_type = genomic DNA

SEQ ID NO: 44738 - DNA, 40 bp, Streptococcus pneumoniae; identical to SEQ ID NO: 20423
  source 1..40: mol_type = genomic DNA

SEQ ID NO: 44739 - DNA, 50 bp, Streptococcus pneumoniae; identical to SEQ ID NO: 44424
  source 1..50: mol_type = genomic DNA

SEQ ID NO: 44740 - DNA, 40 bp, Streptococcus pneumoniae; identical to SEQ ID NO: 44415
  source 1..40: mol_type = genomic DNA

SEQ ID NO: 44741 - protein, 549 aa, Streptococcus pneumoniae
MSKEKIKVYLYTRVSTSIKIEGYSLEAQKSRMKAFAIYNDYEIVGEYEDAGKSGKSIEGRIQFNRMMEDIKSGKDGVFFVLVFKLSRFARNAADVLSTLQIMQDYGVNLICVEDGIDSSKDAGKLMISVLSAVAEIERENISIQTMEGRIQKAREGKWNGGFAPYGYKLEDGKLFINEEEAVAIRTIFDQYVNTTIGANGISKYLENHGIRKIPRQNGKNPLFDAGLIRKILKNPVYNGKIAFGRRTLEKVHGTRNEYKQVEQDEYLISEGIHEAIVSDEVWQAAQVKLKSQAKKYEHVNKGKDTRTHLLSGIVKCPICGVGMFGNKCIKKKKDGTKYKDFYYYGCNHRQMIRGHKCTFSKQIREELLDDAVAEVIVKIVSNPKFASMMQEKINMKVDTSEIEKEIDNYQKELRKSHSTKFKLIEEIDNLDVEDKHYKRRKQDLDDRLYRMYDKIDELESSLIDAKAKKQTIEAEKLTGDNIYKVLIYFDKLYKVMNDVERRQLISALISEIQVYEEKQSNGQWLKSITFKLPIIEENLNIDLDNDEQV

SEQ ID NO: 44742 - DNA, 50 bp, Streptococcus pneumoniae; identical to SEQ ID NO: 44422
  source 1..50: mol_type = genomic DNA

SEQ ID NO: 44743 - DNA, 40 bp, Streptococcus pneumoniae; identical to SEQ ID NO: 20423
  source 1..40: mol_type = genomic DNA

SEQ ID NO: 44744 - DNA, 50 bp, Streptococcus pneumoniae; identical to SEQ ID NO: 44424
  source 1..50: mol_type = genomic DNA

SEQ ID NO: 44745 - DNA, 40 bp, Streptococcus pneumoniae; identical to SEQ ID NO: 44415
  source 1..40: mol_type = genomic DNA

SEQ ID NO: 44746 - protein, 549 aa, Streptococcus pneumoniae; identical to SEQ ID NO: 20426

SEQ ID NO: 44747 - DNA, 50 bp, Streptococcus pneumoniae; identical to SEQ ID NO: 44412
  source 1..50: mol_type = genomic DNA

SEQ ID NO: 44748 - DNA, 40 bp, Streptococcus pneumoniae; identical to SEQ ID NO: 20423
  source 1..40: mol_type = genomic DNA

SEQ ID NO: 44749 - DNA, 50 bp, Streptococcus pneumoniae; identical to SEQ ID NO: 44414
  source 1..50: mol_type = genomic DNA

SEQ ID NO: 44750 - DNA, 40 bp, Streptococcus pneumoniae; identical to SEQ ID NO: 44415
  source 1..40: mol_type = genomic DNA

SEQ ID NO: 44751 - protein, 549 aa, Streptococcus pneumoniae
MSKEKIKVYLYTRVSTSIQIEGYSLEAQKSRMKAFAIYNDYEIVGEYEDAGKSGKSIEGRIQFNRMMEDIKSGKDGVSFVLVFKLSRFARNAADVLSTLQIMQDYGVNLICVEDGIDSSKDAGKLMISVLSAVAEIERENIRIQTMEGRSQKAMEGKWNGGFAPYGYKLEDGKLFINEEEAVAIRTIFDQYVNTTIGANGISKYLENHGIRKIPRQNGKNPLFDAGLIRKILKNPVYNGKIAFGRRTLEKVHGTRNEYKQVEQDEYLISEGIHEAIVSDEVWQAAQVKLKSQAKKYEHVNKGKDTRTYLLSGIVKCPICGVGMFGNKCTKKKKDGTKYKDFYYYGCKHRQMIRGHKCTFSKQIREELLDDAVAEVIVKIVSNPKFASMMQEKINMKVDTSEIEKEIDNYQKELRKSHSTKFKLIEEIDNLDVEDKHYKRRKQDLDDRLYRMYDKIDELESSLIDAKAKKQTIEAEKLTGDNIYKVLIYFDKLYKVMNDVERRQLISALISEIQVYEEKQSNGQWLKSITFKLPIIEENLNIDLDNDEQV

SEQ ID NO: 44752 - DNA, 50 bp, Streptococcus pneumoniae; identical to SEQ ID NO: 44422
  source 1..50: mol_type = genomic DNA

SEQ ID NO: 44753 - DNA, 40 bp, Streptococcus pneumoniae; identical to SEQ ID NO: 20423
  source 1..40: mol_type = genomic DNA

SEQ ID NO: 44754 - DNA, 50 bp, Streptococcus pneumoniae; identical to SEQ ID NO: 44424
  source 1..50: mol_type = genomic DNA

SEQ ID NO: 44755 - DNA, 40 bp, Streptococcus pneumoniae; identical to SEQ ID NO: 44415
  source 1..40: mol_type = genomic DNA

SEQ ID NO: 44756 - protein, 549 aa, Streptococcus pneumoniae
MSKEKIKVYLYTRVSTSIQIEGYSLEAQKSRMKAFAIYNDYEIVGEYEDAGKSGKSIEGRIQFNRMMEDIKSGKDGVSFVLVFKLSRFARNAADVLSTLQIMQDYGVNLICVEDGIDSSKDAGKLMISVLSAVAEIERENIRIQTMEGCIQKAREGKWNGGFAPYGYKLEDGKLFINEEEAVAIRTIFDQYVNTTIGANGISKYLENHGIRKIPRQNGKNPLFDAGLIRKILKNPVYNGKIAFGRRTLEKVHGTRNEYKQVEQDEYLISEGIHEAIVSDEVWQAAQVKLKSQAKKYEHVNKGKDTRTHLLSGIVKCPICGVGMFGNKCIKKKKDGTKYKDFYYYGCKHRQMIRGHKCTFSKQIREELLDDAVAEVIVKIVSNPKFASMMQEKINMKVDTSEIEKEIDNYQKELRKSHSTKFKLIEEIDNLDVEDKHYKRRKQDLDDRLYRMYDKIDELESSLIDAKAKKQTIEAEKLTGDNIYKVLIYFDKLYKVMNDVERRQLISALISEIQVYEEKQSNGQWLKSITFKLPIIEENLNIDLDNDEQV

SEQ ID NO: 44757 - DNA, 50 bp, Streptococcus pneumoniae; identical to SEQ ID NO: 44422
  source 1..50: mol_type = genomic DNA

SEQ ID NO: 44758 - DNA, 40 bp, Streptococcus pneumoniae; identical to SEQ ID NO: 20423
  source 1..40: mol_type = genomic DNA

SEQ ID NO: 44759 - DNA, 50 bp, Streptococcus pneumoniae; identical to SEQ ID NO: 44424
  source 1..50: mol_type = genomic DNA

SEQ ID NO: 44760 - DNA, 40 bp, Streptococcus pneumoniae; identical to SEQ ID NO: 44415
  source 1..40: mol_type = genomic DNA

SEQ ID NO: 44761 - protein, 417 aa, Streptococcus pneumoniae
MAEIERENIRIQTMEGRIQKAREGKWNGGFAPYGYKLEDGKLFINEEEAVAIRTIFDQYVNTTIGANGISKYLENHGIRKIPRQNGKNPLFDAGLIRKILKNPVYNGKIAFGRRTLEKVHGTRNEYKQVEQDEYLISEGIHEAIVSDEVWQAAQVKLKSQAKKYEHVNKGKDTRTHLLSGIVKCPICGVGMFGNKCIKKKKDGTKYKDFYYYGCKHRQMIRGHKCTFSKQIREELLDDAVAEVIVKIVSNPKFASMMQEKINMKVDTSEIEKEIDNYQKELRKSHSTKFKLIEEIDNLDVEDKHYKRRKQDLDDRLYRMYDKIDELESSLIDAKAKKQTIEAEKLTGDNIYKVLIYFDKLYKVMNDVERRQLISALISEIQVYEEKQSNGQWLKSITFKLPIIEENLNIDLDNDEQV

SEQ ID NO: 44762 - DNA, 50 bp, Streptococcus pneumoniae; identical to SEQ ID NO: 44422
  source 1..50: mol_type = genomic DNA

SEQ ID NO: 44763 - DNA, 40 bp, Streptococcus pneumoniae; identical to SEQ ID NO: 20423
  source 1..40: mol_type = genomic DNA

SEQ ID NO: 44764 - DNA, 50 bp, Streptococcus pneumoniae; identical to SEQ ID NO: 44424
  source 1..50: mol_type = genomic DNA

SEQ ID NO: 44765 - DNA, 40 bp, Streptococcus pneumoniae; identical to SEQ ID NO: 44415
  source 1..40: mol_type = genomic DNA

SEQ ID NO: 44766 - protein, 549 aa, Streptococcus pneumoniae
MSKEKIKVYLYTRVSTSIQIEGYSLEAQKSRMKAFAIYNDYEIVGEYEDAGKSGKSIEGRIQFNRMMEDIKSGKDGVSFVLVFKLSRFARNAADILSTLQIMQDYGVNLICVEDGIDSSKDAGKLMISVLSAVAEIERENIRIQTMEGRIQKAREGKWNGGFAPYGYKLEDGKLFINEEEAVAIRTIFDQYVNTTIGANGISKYLENHGIRKIPRQNGKNPLFDAGLIRKILKNPVYNGKIAFGRRTLEKVHGTRNEYKQVEQDEYLISEGIHEAIVSDEVWQAAQVKLKSQAKKYEHVNKGKDTRTHLLSGIVKCPICGVGMFGNKCIKKKKDGTKYKDFYYYGYKHRQMIRGHKCTFSKQIREEFLDDAVAEVIVKIVSNPKFASMMQEKINMKVDTSEIEKEIDNYQKELRKSHSTKFKLIEEIDNLDVEDKHYKRRKQDLDDRLYRMYDKIDELESSLIDAKAKKQTIEAEKLTGDNIYKVLIYFDKLYKVMNDVERRQLISALISEIQVYEEKQSNGQWLKSITFKLPIIEENLNIGLDNDEQV

SEQ ID NO: 44767 - DNA, 50 bp, Streptococcus pneumoniae; identical to SEQ ID NO: 44427
  source 1..50: mol_type = genomic DNA

SEQ ID NO: 44768 - DNA, 40 bp, Streptococcus pneumoniae; identical to SEQ ID NO: 20423
  source 1..40: mol_type = genomic DNA

SEQ ID NO: 44769 - DNA, 50 bp, Streptococcus pneumoniae; identical to SEQ ID NO: 44429
  source 1..50: mol_type = genomic DNA

SEQ ID NO: 44770 - DNA, 40 bp, Streptococcus pneumoniae; identical to SEQ ID NO: 44415
  source 1..40: mol_type = genomic DNA

SEQ ID NO: 44771 - protein, 549 aa, Streptococcus pneumoniae
MSKEKIKVYLYTRVSTSIQIEGYSLEAQKSRMKAFAIYNDYGIVGEYEDAGKSGKSIEGRIQFNRMMEDIKSGKDGVSFVLVFKLSRFARNAADVLSTLQIMQDYGVNLICVEDGIDSSKDAGKLMISVLSAVAEIERENIRIQTMEGRIQKAREGKWNGGFAPYGYKLEDGKLFINEEEAVAIRTIFDQYVNTTIGANGISKYLENHGIRKIPRQNGKNPLFDAGLIRKILKNPVYNGKIAFGRRTLEKVHGTRNEYKQVEQDEYLISEGIHEAIVSDEVWQAAQVKLKSQAKKYEHVNKGKDTRTHLLSGTVKCPICGVGMFGNKCIKKKKDGTKYKDFYYYGCKHRQMIRGHKCTFSKQIREELLDDAVAEVIVKIVSNPKFASMMQEKINMKVDTSEIEKEIDNYQKELRKSHSTKFKLIEEIDNLDVEDKHYKRRKQDLDDRLYRMYDKIDELESSLIDAKAKKQTIEAEKLTGDNIYKVLIYFDKLYKVMNDVERRQLISALISEIQVYEEKQSNGQWLKSITFKLPIIEENLNIGLDNDEQV

SEQ ID NO: 44772 - DNA, 50 bp, Streptococcus pneumoniae; identical to SEQ ID NO: 44412
  source 1..50: mol_type = genomic DNA

SEQ ID NO: 44773 - DNA, 40 bp, Streptococcus pneumoniae; identical to SEQ ID NO: 20423
  source 1..40: mol_type = genomic DNA

SEQ ID NO: 44774 - DNA, 50 bp, Streptococcus pneumoniae; identical to SEQ ID NO: 44414
  source 1..50: mol_type = genomic DNA

SEQ ID NO: 44775 - DNA, 40 bp, Streptococcus pneumoniae; identical to SEQ ID NO: 44415
  source 1..40: mol_type = genomic DNA

SEQ ID NO: 44776 - protein, 549 aa, Streptococcus pneumoniae
MSKEKIKVYLYTRVSTSIQIEGYSLGAQKSRMKAFAIYNDYEIVGEYEDAGKSGKSIEGRIQFNRMMEDIKSGKDGVSFVLVFKLSRFARNAADVLSTLQIMQDYGVNLICVEDGIDSFKDAGKLMISVLSAVAEIERENIRIQTMEGCIQKAREGKWNGGFAPYGYKLEDGKLFINEEEAVAIRTIFDQYVNTTIGVNGISKYLENHGIRKIPRQNGKNPLFDAGLIRKILKNPVYNGKIAFGRRTLEKVHGTRNEYKQVEQDEYLISEGIHEAIVSDEVWQAAQVKLKSQAKKYERVNKGKDTRTHLLSGIVKCPICGVGMFGNKCIKKKKDGTKYKDFYYYGCKHRQMIRGHECTFSKQIREELLDDAVAEVIVKIVSNPKFASMMQEKINMKVDTSEIEKEIDNYQKELRKSHSTKFKLIEEIDNLDVEDKHYKRRKQDLDDRLCRMYDKIDELESSLIDAKAKKQTIEAEKLTGDNIYKVLIYFDKLYKVMNDVEHRQLISALISEIQVYEEKQSNGQWLKSITFKLPIIEENLNIGLDNDEQV

SEQ ID NO: 44777 - DNA, 50 bp, Streptococcus pneumoniae; identical to SEQ ID NO: 44427
  source 1..50: mol_type = genomic DNA

SEQ ID NO: 44778 - DNA, 40 bp, Streptococcus pneumoniae; identical to SEQ ID NO: 20423
  source 1..40: mol_type = genomic DNA

SEQ ID NO: 44779 - DNA, 50 bp, Streptococcus pneumoniae; identical to SEQ ID NO: 44429
  source 1..50: mol_type = genomic DNA

SEQ ID NO: 44780 - DNA, 40 bp, Streptococcus pneumoniae; identical to SEQ ID NO: 44415
  source 1..40: mol_type = genomic DNA

SEQ ID NO: 44781 - protein, 549 aa, Streptococcus pneumoniae
MSKEKIKVYLYTRVSTSIQIEGYSLEAQKSRMKAFAIYNDYEIVGEYEDAGKSGKSIEGRIQFNRMMEDIKSGKDGVSFVLVFKLSRFARNAADVLSTLQIMQDYGVNLICVEDGIDSSKDAGKLMISVLSAVAEIERENIRIQTMEGRIQKAREGKWNGGFAPYGYKLEDGKLFINEEEAVAIRTIFDQYVNTTIGANGISKYLENHGIRKIPRQNGKNPLFDAGLIRNILKNPVYNGKIAFGRRTLEKVHGTRNEYKQVEQDEYLISEGIHEAIVSDEVWQAAQVKLKSQAKKYEHVNKGKDTRTHLLSGIVKCPICGVGMFGNKCIKKKKDGTKYKDFYYYGCKHRQMIRGHKCTFSKQIREELLDDAVAEVIVKIVSNPKFASMMQEKINMKVDTSEIEKEIDNYQKELRKSHSTKFKLIEEIDNLDVEDKHYKRRKQDLDDRLYRMYDKIDELESSLIDAKAKKQTIEAEKLTGDNIYKVLIYFDKLYKVMNDVERRQLISALISEIQVYEEKQSNGQWLKSITFKLPIIEENLNIGLDNDEQV

SEQ ID NO: 44782 - DNA, 50 bp, Streptococcus pneumoniae; identical to SEQ ID NO: 44412
  source 1..50: mol_type = genomic DNA

SEQ ID NO: 44783 - DNA, 40 bp, Streptococcus pneumoniae; identical to SEQ ID NO: 20423
  source 1..40: mol_type = genomic DNA

SEQ ID NO: 44784 - DNA, 50 bp, Streptococcus pneumoniae; identical to SEQ ID NO: 44414
  source 1..50: mol_type = genomic DNA

SEQ ID NO: 44785 - DNA, 40 bp, Streptococcus pneumoniae; identical to SEQ ID NO: 44415
  source 1..40: mol_type = genomic DNA

SEQ ID NO: 44786 - protein, 549 aa, Streptococcus pneumoniae
MSKEKIKVYLYTRVSTSIQIEGYSLEAQKSRMKAFAIYNDYEIVGEYEDAGKSGKSIEGRIQFNRMMEDIKSGKDGVSFVLVFKLSRFARNAADVLSTLQIMQDYGVNLICVEDGIDSSKDAGKLMISVLSAVAEIERENIRIQTMEGRSQKAMEGKWNGGFAPYGYKLEDGKLFINEEEAVAIRTIFDQYVNTTIGANGISKYLENHGIRKIPRQNGKNPLFDAGLIRKILKNPVYNGKIAFGRRTLEKVHGTRNEYKQVEQDEYLISEGIHEAIVSDEVWQAAQVKLKSQAKKYEHVNKGKDTRTHLLSGIVKCPICGVGMFGNKCTKKKKDGTKYKDFYYYGCKHRQMIRGHKCTFSKQIREELLDDAVAEVIVKIVSNPKFASMMQEKINMKVDTSEIEKEIDNYQKELRKSHSTKFKLIEEIDNLDVEDKHYKRRKQDLDDRLYRMYDKIDELESSLIDAKAKKQTIEAEKLTGDNIYKVLIYFDKLYKVMNDVERRQLISALISEIQVYEEKQSNGQWLKSITFKLPIIEENLNIDLDNDEQV

SEQ ID NO: 44787 - DNA, 50 bp, Streptococcus pneumoniae; identical to SEQ ID NO: 44422
  source 1..50: mol_type = genomic DNA

SEQ ID NO: 44788 - DNA, 40 bp, Streptococcus pneumoniae; identical to SEQ ID NO: 20423
  source 1..40: mol_type = genomic DNA

SEQ ID NO: 44789 - DNA, 50 bp, Streptococcus pneumoniae; identical to SEQ ID NO: 44424
  source 1..50: mol_type = genomic DNA

SEQ ID NO: 44790 - DNA, 40 bp, Streptococcus pneumoniae; identical to SEQ ID NO: 44415
  source 1..40: mol_type = genomic DNA

SEQ ID NO: 44791 - protein, 549 aa, Streptococcus pneumoniae
MSKEKIKVYLYTRVSTSIQIEGYSLEAQKSRMKAFAIYNDYEIVGEYEDAGKSGKSIEGRIQFNRMMEDIKSGKDGVSFVLVFKLSRFARNAADVLSTLHIMQDYGVNLICVEDGIDSSKDAGKLMISVLSAVAEIERENISIQTMEGRIQKAREGKWNGGFAPYGYKLEDGKLFINEEEAVAIRTIFDQYVNTTIGANGISKYLENHGIRKIPRQNGKNPLFDAGLIRKILKNPVYNGKIAFGRRTLEKVHGTRNEYKQVEQDEYLISEGIHEAIVSDEVWQAAQVKLKSQAKKYEHVNKGKDTRTHLLSGIVKCPICGVGMFGNKCIKKKKDGTKYKDFYYYGCNHRQMIRGHKCTFSKQIREELLDDAVAEVIVKIVSNPKFASMMQEKINMKVDTSEIEKEIDNYQKELRKSHSTKFKLIEEIDNLDVEDKHYKRRKQDLDDRLYRMYDKIDELESSLIDAKAKKQTIEAEKLTGDNIYKVLIYFDKLYKVMNDVERRQLISALISEIQVYEEKQSNGQWLKSITFKLPIIEENLNIDLDNDEQV

SEQ ID NO: 44792 - DNA, 50 bp, Streptococcus pneumoniae; identical to SEQ ID NO: 44422
  source 1..50: mol_type = genomic DNA

SEQ ID NO: 44793 - DNA, 40 bp, Streptococcus pneumoniae; identical to SEQ ID NO: 20423
  source 1..40: mol_type = genomic DNA

SEQ ID NO: 44794 - DNA, 50 bp, Streptococcus pneumoniae; identical to SEQ ID NO: 44424
  source 1..50: mol_type = genomic DNA

SEQ ID NO: 44795 - DNA, 40 bp, Streptococcus pneumoniae; identical to SEQ ID NO: 44415
  source 1..40: mol_type = genomic DNA

SEQ ID NO: 44796 - protein, 535 aa, Streptococcus pneumoniae
MSKEKIKVYLYTRVSTSIQIEGYSLEAQKSRMKAFAIYNDYEIVGEYEDAGKSGKSIEGRIQFNRMMEDIKSGKDGVSFVLVFKLSRFARNAADVLSTLQIMQDYGVNLICVEDGIDSSKDAGKLMISVLSAVAEIERENIRIQTMEGRIQKAREGKWNGGFAPYGYKLEDGKLFINEEEAVAIRTIFDQYVNTTIGANGISKYLENHGIRKIPRQNGKNPVYNGKIAFGRRTLEKVHGTRNEYKQVEQDEYLISEGIHEAIVSDEVWQAAQVKLKSQAKRYEHVNKGKDTRTHLLSGIVKCPICGVGMFGNKCIKKKKDGTKYKDFYYYGCKHRQMIRGHKCTFSKQIREELLDDAVAEVIVKIVSNPKFASMMQEKINMKVDTSEIEKEIDNYQKELRKSHSTKFKLIEEIDNLDVEDKHYKRRKQDLDDRLYRMYDKIDELESSLIDAKAKKQTIEAEKLTGDNIYKVLIYFDKLYKVMNDVERRQLISALISEIQVYEERQSNGQWLKSITFKLPIIEENLNIGLDNDEQV

SEQ ID NO: 44797 - DNA, 50 bp, Streptococcus pneumoniae; identical to SEQ ID NO: 44412
  source 1..50: mol_type = genomic DNA

SEQ ID NO: 44798 - DNA, 40 bp, Streptococcus pneumoniae; identical to SEQ ID NO: 20423
  source 1..40: mol_type = genomic DNA

SEQ ID NO: 44799 - DNA, 50 bp, Streptococcus pneumoniae; identical to SEQ ID NO: 44414
  source 1..50: mol_type = genomic DNA

SEQ ID NO: 44800 - DNA, 40 bp, Streptococcus pneumoniae; identical to SEQ ID NO: 44415
  source 1..40: mol_type = genomic DNA

SEQ ID NO: 44801 - protein, 549 aa, Streptococcus pneumoniae; identical to SEQ ID NO: 44616

SEQ ID NO: 44802 - DNA, 50 bp, Streptococcus pneumoniae; identical to SEQ ID NO: 44412
  source 1..50: mol_type = genomic DNA

SEQ ID NO: 44803 - DNA, 40 bp, Streptococcus pneumoniae; identical to SEQ ID NO: 20423
  source 1..40: mol_type = genomic DNA

SEQ ID NO: 44804 - DNA, 50 bp, Streptococcus pneumoniae; identical to SEQ ID NO: 44414
  source 1..50: mol_type = genomic DNA

SEQ ID NO: 44805 - DNA, 40 bp, Streptococcus pneumoniae; identical to SEQ ID NO: 44415
  source 1..40: mol_type = genomic DNA

SEQ ID NO: 44806 - protein, 549 aa, Streptococcus pneumoniae
MSKEKIKVYLYTRVSTSIQIEGYSLEAQKSRMKAFAIYNDYEIVGEYEDAGKSGKSIEGRIQFNRMMEDIKSGKDGVSFVLVFKLSRFARNAADVLSTLQIMQDYGVNLICVEDGIDSSKDAGKLMISVLSAVAEIERENIRIQTMEGCIQKAREGKWNGGFAPYGYKLEDGKLFINEEEAVAIRTIFDQYVNTTIGANGISKYLENHGIRKIPRQNGKNPLFDAGLIRKILKNPVYNGKIAFGRRTLEKVHGTRNEYKQVEQNEYLISEGIHEAIVSDEVWQAAQVKLKSQAKKYEHVNKGKDTRTHLLSGIVKCPICGVGMFGNKCIKKKKDGTKYKEFYYYGCKHRQMIRGHKCTFSKQIREELLDDAVAEVIVKIVSNPKFASMMQEKINMKVDTSEIEKEIDNYQKELRKSHSTKFKLIEEIDNLDVEDKHYKRRKQDLDDRLYRMYDKIDELESSLIDAKAKKQTIEAEKLTGDNIYKVLIYFDKLYKVMNDVERRQLISALISEIQVYEEKQSNGQWLKSITFKLPIIEENLNIGLDNDEQV

SEQ ID NO: 44807 - DNA, 50 bp, Streptococcus pneumoniae; identical to SEQ ID NO: 44412
  source 1..50: mol_type = genomic DNA

SEQ ID NO: 44808 - DNA, 40 bp, Streptococcus pneumoniae; identical to SEQ ID NO: 20423
  source 1..40: mol_type = genomic DNA

SEQ ID NO: 44809 - DNA, 50 bp, Streptococcus pneumoniae; identical to SEQ ID NO: 44414
  source 1..50: mol_type = genomic DNA

SEQ ID NO: 44810 - DNA, 40 bp, Streptococcus pneumoniae; identical to SEQ ID NO: 44415
  source 1..40: mol_type = genomic DNA

SEQ ID NO: 44811 - protein, 549 aa, Streptococcus pneumoniae
MSKEKIKVYLYTRVSTSIQIEGYSLEAQKSRMKAFAIYNDYEIVGEYEDAGKSGKSIEGRIQFNRMMEDIKSGKDGVSFVLVFKLSRFARNAADVLSTLQIMQDYGVNLICVEDGIDSSKDAGKLMISVLSAVAEIERENIRIQTMEGRIQKAREGKWNGGFAPYGYKLEDGKLFINEEEAVAIRTIFDQYVNTTIGANGISKYLENHGIRKIPRQNGKNPLFDAGLIRKILKNPVYNGKIAFGRRTLEKVHGTRNEYKQVEQDEYLISEGIHEAIVSDEVWQAAQVKLKSQAKKYEHVNKGKDTRTHLLSGIVKCPICGVGMFGNKCIKKKKDGTKYKDFYYYGYKHRQMIRGHKCTFSKQIREELLDDAVAEVIVKIVSNPKFASMMQEKINMKVYTSEIEKEIDNYQKELRKSHSTKFKLIEEIDNLDVEDKHYKRRKQDLDDRLYRMYDKIDELESSLIDAKAKKQTIEAEKLTGDNIYKVLIYFDKLYKVMNDVERRQLISALISEIQVYEEKQSNGQWLKSITFKLPIIEENLNIDLDNDEQV

SEQ ID NO: 44812 - DNA, 50 bp, Streptococcus pneumoniae; identical to SEQ ID NO: 44422
  source 1..50: mol_type = genomic DNA

SEQ ID NO: 44813 - DNA, 40 bp, Streptococcus pneumoniae; identical to SEQ ID NO: 20423
  source 1..40: mol_type = genomic DNA

SEQ ID NO: 44814 - DNA, 50 bp, Streptococcus pneumoniae; identical to SEQ ID NO: 44424
  source 1..50: mol_type = genomic DNA

SEQ ID NO: 44815 - DNA, 40 bp, Streptococcus pneumoniae; identical to SEQ ID NO: 44415
  source 1..40: mol_type = genomic DNA

SEQ ID NO: 44816 - protein, 549 aa, Streptococcus pneumoniae
MSKEKIKVYLYTRVSTSIQIEGYSLEAQKSRMKAFAIYNDYEIVGEYEDAGKSGKSIEGRIQFNRMMEDIKSGKDGVSFVLVFKLSRFARNAADVLSTLQIMQDYGVNLICVEDGIDSSKDAGKLMISVLSAVAEIERENIRIQTMEGRIKKAREGKWNGGFAPYGYKLEDGKLFINEEEAVAIRTIFDQYVNTTIGANGISKYLENHGIRKIPRQNGKNPLFDAGLIRKILKNPVYNGKIAFGRRTLEKVHGTRNEYKQVEQDEYLISEGIHEAIVSDEVWQAAQVKLKSQAKKYEHVNKGKDTRTHLLSGIVKCPICGVGMFGNKCIKKKKDGTKYKDFYYYGCNHRQMIRGHKCTFSKQIREELLDDAVAEVIVKIVSNPKFASMMQEKINMKVDTSEIEKEIDNYQKELRKSHSTKFKLIEEIDNLDVEDKHYKRRKQDLDDRLYRMYDKIDELESSLIDAKAKKQTIEAEKLTGDNIYKVLIYFDKLYKVMNDVERRQLISALISEIQVYEEKQSNGQWLKSITFKLPIIEENLNIDLDNDEQV

SEQ ID NO: 44817 - DNA, 50 bp, Streptococcus pneumoniae; identical to SEQ ID NO: 44422
  source 1..50: mol_type = genomic DNA

SEQ ID NO: 44818 - DNA, 40 bp, Streptococcus pneumoniae; identical to SEQ ID NO: 20423
  source 1..40: mol_type = genomic DNA

SEQ ID NO: 44819 - DNA, 50 bp, Streptococcus pneumoniae; identical to SEQ ID NO: 44424
  source 1..50: mol_type = genomic DNA

SEQ ID NO: 44820 - DNA, 40 bp, Streptococcus pneumoniae; identical to SEQ ID NO: 44415
  source 1..40: mol_type = genomic DNA

SEQ ID NO: 44821 - protein, 549 aa, Streptococcus pneumoniae
MSKEKIKVYLYTRVSTSIQIEGYSLEAQKSRMKAFAIYNDYEIVGEYEDAGKSGKSIEGRIQFNRMMEDIKSGKDGVSFVLVFKLSRFARNAADVLSTLQIMQDYGVNLICVEDGIDSSKDAGKLMISVLSAVAEIERENIRIQTMEGRIQKAREGKWNGGFAPYGYKLEDGKLFINEEEAVAIRTIFDQYVNTTIGANGISKYLENHGIRKIPRQNGKNPLFDAGLIRKILKNPVYNGKIAFGRRTLEKVHGTRNEYKQVEQDEYLISEGIHEAIVSDEVWQAAQVKLKSQAKKYEHVNKGKDTRTHLLSGIVKCPICGVGMFGNKCIKKKKDGTKYKDFYYYGCNHRQMIRGHKCTFSKQIREELLDDAVAEVIVKIVSNPKFASMMQEKINMKVDTSEIEKEIDNYQKELRKSHSTKFKLIEEIDNLDVEDKHYKRRKQDLDDRLYRMYDKIDELESSLIDAKAKKQTIEAEKLTGDNIYKVLIYFDKLYKVMNDVERRQLISALISEIQVYEEKQSNGQWLKSITFKLPIIEENLNIDLDNDEQV

SEQ ID NO: 44822 - DNA, 50 bp, Streptococcus pneumoniae; identical to SEQ ID NO: 44422
  source 1..50: mol_type = genomic DNA

SEQ ID NO: 44823 - DNA, 40 bp, Streptococcus pneumoniae; identical to SEQ ID NO: 20423
  source 1..40: mol_type = genomic DNA

SEQ ID NO: 44824 - DNA, 50 bp, Streptococcus pneumoniae; identical to SEQ ID NO: 44424
  source 1..50: mol_type = genomic DNA

SEQ ID NO: 44825 - DNA, 40 bp, Streptococcus pneumoniae; identical to SEQ ID NO: 44415
  source 1..40: mol_type = genomic DNA

SEQ ID NO: 44826 - protein, 549 aa, Streptococcus pneumoniae
MSKEKIKVYLYTRVSTSIQIEGYSLEAQKSRMKAFAIYNDYEIVGEYEDAGKSGKSIEGRIQFNRMMEDIKSGKDGVSFVLVFKLSRFARNAADVLSTLHIMQDYGVNLICVEDGIDSSKDAGKLMISVLSAVAEIERENISIQTMEGRIQKAREGKWNGGFAPYGYKLEDGKLFINEEEAVAIRTIFDQYVNTTIGANGISKYLENHGIRKIPRQNGKNPLFDAGLIRKILKNPVYNGKIAFGRRTLEKVHGTRNEYKQVEQDEYLISEGIHEAIVSDEVWQAAQVKLKSQAKKYEHVNKGKDTRTHLLSGIVKCPICGVGMFGNKCTKKKKDGTKYKDFYYYGCKHRQMIRGHKCTFSKQIREELLDDAVVEVIVKIVSNPKFASMMQEKINMKVDTSEIEKEIDNYQKELRKSHSTKFKLIEEIDNLDVEDKHYKRRKQDLDDRLYRMYDKIDELESSLIDAKAKKQTIEAEKLTGDNIYKVLIYFDKLYKVMNDVERRQLISALISEIQVYEEKQSNGQWLKSITFKLPIIEENLNIDLDNDEQV

SEQ ID NO: 44827 - DNA, 50 bp, Streptococcus pneumoniae; identical to SEQ ID NO: 44422
  source 1..50: mol_type = genomic DNA

SEQ ID NO: 44828 - DNA, 40 bp, Streptococcus pneumoniae; identical to SEQ ID NO: 20423
  source 1..40: mol_type = genomic DNA

SEQ ID NO: 44829 - DNA, 50 bp, Streptococcus pneumoniae; identical to SEQ ID NO: 44424
  source 1..50: mol_type = genomic DNA

SEQ ID NO: 44830 - DNA, 40 bp, Streptococcus pneumoniae; identical to SEQ ID NO: 44415
  source 1..40: mol_type = genomic DNA

SEQ ID NO: 44831 - protein, 549 aa, Streptococcus pneumoniae
MSKEKIKVYLYTRVSTSIQIEGYSLEAQKSRMKAFAIYNDYEIVGEYEDAGKSGKSIEGRIQFNRMMEDIKSGKDGVSFVLVFKLSRFARNAADVLSTLQIMQDYGVNLICVEDGIDSSKDAGKLMISILSAVAEIERENIRIQTMEGRSQKAMEGKWNGGFAPYGYKLEDGKLFINEEEAVAIRTIFDQYVNTTIGANGISKYLENHGIRKIPRQNGKNPLFDAGLIRKILKNPVYNGKIAFGRRTLEKVHGTRNEYKQVEQDEYLISEGIHEAIVSDEVWQAAQVKLKSQAKKYEHVNKGKDTRTHLLSGIVKCPICGVGMFGNKCTKKKKDGTKYKDFYYYGCKHRQMIRGHKCTFSKQIREELLDDAVAEVIVKIVSNPKFASMMQEKINMKVDTSEIEKEIDNYQKELRKSHSTKFKLIEEIDNLDVEDKHYKRRKQDLDDRLYRMYDKIDELESSLIDAKAKKQTIEAEKLTGDNIYKVLIYFDKLYKVMNDVERRQLISALISEIQVYEEKQSNGQWLKSITFKLPIIEENLNIDLDNDEQV

SEQ ID NO: 44832 - DNA, 50 bp, Streptococcus pneumoniae; identical to SEQ ID NO: 44422
  source 1..50: mol_type = genomic DNA

SEQ ID NO: 44833 - DNA, 40 bp, Streptococcus pneumoniae; identical to SEQ ID NO: 20423
  source 1..40: mol_type = genomic DNA

SEQ ID NO: 44834 - DNA, 50 bp, Streptococcus pneumoniae; identical to SEQ ID NO: 44424
  source 1..50: mol_type = genomic DNA

SEQ ID NO: 44835 - DNA, 40 bp, Streptococcus pneumoniae; identical to SEQ ID NO: 44415
  source 1..40: mol_type = genomic DNA

SEQ ID NO: 44836 - protein, 549 aa, Streptococcus pneumoniae
MSKEKIKVYLYTRVSTSIQIEGYSLEAQKSRMKAFAIYNDYEIVGEYEDAGKSGKSIEGRIQFNRMMEDIKSGKDGVSFVLVFKLSRFARNAADVLSTLQIMQDYEVNLICVEDGIDSSKDAGKLMISVLSAVAEIERENIRIQTMEGRIQKAREGKWNGGFAPYGYKLEDGKLFINEEEAVAIRTIFDQYVNTTIGANGISKYLENHGIRKIPRQNGKNPLFDAGLIRKILKNPVYNGKIAFGRRTLEKVHGTRNEYKQVEQDEYLISEGIHEAIVSDEVWQAAQVKLKSQAKKYEHVNKGKDTRTHLLSGIVKCPICGVGMFGNKCIKKKKDGTKYKDFYYYGYKHRQMIRGHKCTFSKQIREELLDDAVAEVIVKIVSNPKFASMMQEKINMKVDTSEIEKEIDNYQKELRKSHSTKFKLIEEIDNLDVEDKHYKRRKQDLDDRLYRMYDKIDELESSLIDAKAKKQTIEAEKLTGDNIYKVLIYFDKLYKVMNDVERRQLISALISEIQVYEEKQSNGQWLKSITFKLPIIEENLNIGLDNDEQV

SEQ ID NO: 44837 - DNA, 50 bp, Streptococcus pneumoniae; identical to SEQ ID NO: 44412
  source 1..50: mol_type = genomic DNA

SEQ ID NO: 44838 - DNA, 40 bp, Streptococcus pneumoniae; identical to SEQ ID NO: 20423
  source 1..40: mol_type = genomic DNA

SEQ ID NO: 44839 - DNA, 50 bp, Streptococcus pneumoniae; identical to SEQ ID NO: 44414
  source 1..50: mol_type = genomic DNA

SEQ ID NO: 44840 - DNA, 40 bp, Streptococcus pneumoniae; identical to SEQ ID NO: 44415
  source 1..40: mol_type = genomic DNA

SEQ ID NO: 44841 - protein, 549 aa, Streptococcus pneumoniae
MSKEKIKVYLYTRVSTSIQIEGYSLEAQKSRMKAFAIYNDYEIVGEYEDAGKSGKSIEGRIQFNRMMEDIKSGKDGVSFVLVFKLSRFARNAADVLSTLQIMQDYGVNLICVEDGIDSSKDAGKLMISVLSAVAEIERENIRIQTMEGCIQKAREGKWNGGFAPYGYKLEDGKLFINEEEAVAIRTIFDQYVNTTIGANGISKYLENHGIRKIPRQNGKNPLFDAGLIRKILKNPVYNGKIAFGRRTLEKVHGTRNEYKQVEQDEYLISEGIHEAIVSDEVWQAAQVKLKSQAKEYEHVNKGKDTRTHLLSGIVKCPICGVGMFGNKCIKKKKDGTKYKDFYYYGCKHRQMIRGHKCTFSKQIREELLDDAVAEVIVKIVSNPKFASMMQEKINIKVDTSEIEKEIDNYQKELRKSHSTKFKLIEEIDNLDVEDKHYKRRKQDLDDRLYRMYDKIDELESSLIDAKAKKQTIEAEKLTGDNIYKVLIYFDKLYKVMNDVERRQLISALISEIQVYEEKQSNGQWLKSITFKLPIIEENLNIDLDNDEQV

SEQ ID NO: 44842 - DNA, 50 bp, Streptococcus pneumoniae; identical to SEQ ID NO: 44422
  source 1..50: mol_type = genomic DNA

SEQ ID NO: 44843 - DNA, 40 bp, Streptococcus pneumoniae; identical to SEQ ID NO: 20423
  source 1..40: mol_type = genomic DNA

SEQ ID NO: 44844 - DNA, 50 bp, Streptococcus pneumoniae; identical to SEQ ID NO: 44424
  source 1..50: mol_type = genomic DNA

SEQ ID NO: 44845 - DNA, 40 bp, Streptococcus pneumoniae; identical to SEQ ID NO: 44415
  source 1..40: mol_type = genomic DNA

SEQ ID NO: 44846 - protein, 518 aa, Streptococcus pneumoniae
MKAFAIYNDYEIVGEYEDAGKSGKSIEGRIQFNRMMEDIKSGKDGVSFVLVFKLSRFARNAADVLSTLQIMQDYGVNLICVEDGIDSSKDAGKLMISVLSAVAEIERENIRIQTMEGCIQKAREGKWNGGFAPYGYKLEDGKLFINEEEAVAIRTIFDQYVNTTIGANGISKYLENHGIRKIPRQNGKNPLFDAGLIRNILKNPVYNGKIAFGRRTLEKVHGTRNEYKQVEQDEYLISEGIHEAIVSDEVWQAAQVKLKSQAKKYEHVNKGKDTRTHLLSGIVKCPICGVGMFGNKCIKKKKDGTKYKDFYYYGCKHRQMIRGHKCTFSKQIREELLDDAVAEVIVKIVSNPKFASMMQEKINMKVDTSEIEKEIDNYQKELRKSHSTKFKLIEEIDNLDVEDKHYKRRKQDLDDRLYRMYDKIDELESSLIDAKAKKQTIEAEKLTGDNIYKVLIYFDKLYKVMNDVERRQLISALISEIQVYEEKQSNGQWLKSITFKLPIIEENLNIDLDNDEQV

SEQ ID NO: 44847 - DNA, 50 bp, Streptococcus pneumoniae; identical to SEQ ID NO: 44422
  source 1..50: mol_type = genomic DNA

SEQ ID NO: 44848 - DNA, 40 bp, Streptococcus pneumoniae; identical to SEQ ID NO: 20423
  source 1..40: mol_type = genomic DNA

SEQ ID NO: 44849 - DNA, 50 bp, Streptococcus pneumoniae; identical to SEQ ID NO: 44424
  source 1..50: mol_type = genomic DNA

SEQ ID NO: 44850 - DNA, 40 bp, Streptococcus pneumoniae; identical to SEQ ID NO: 44415
  source 1..40: mol_type = genomic DNA

SEQ ID NO: 44851 - protein, 549 aa, Streptococcus pneumoniae
MSKEKIKVYLYTRVSTSIQIEGYSLEAQKSRMKAFAIYNDYEIVGEYEDAGKSGKSIEGRIQFNRMMEDIKSGKDGVSFVLVFKLSRFARNAADVLSTLQIMQDYGVNLICVEDGIDSSKDAGKLMISVLSAVAEIERENIRIQTMEGCIQKAREGKWNGGFAPYGYKLEDGKLFINEEEAVAIRTIFDQYVNTTIGANGISKYLENHGIRKIPRQNGKNPLFDAGLIRKILKNPVYNGKIAFGRRTLEKVHGTRNEYKQVEQDEYLISEGIHEAIVSDEVWQAAQVKLKSQAKKYEHVNKGKDTRTHLLSGIVKCPICGVGMFGNKCIKKKKDGTKYKEFYYYGCKHRQMIRGHKCTFSKQIREELLDDAVAEVIVKIVSNPKFASMMQEKINMKVDTSEIEKEIDNYQKELRKSHSTKFKLIEEIDNLDVEDKHYKRRKQDLDDRLYRMYDKIDELESSLIDAKAKKQTIEAEKLTGDNIYKVLIYFDKLYKVMNDVERRQLISALISEIQVYEEKQSNGQWLKSITFKLPIIEENLNIGLDNDEQV

SEQ ID NO: 44852 - DNA, 50 bp, Streptococcus pneumoniae; identical to SEQ ID NO: 44412
  source 1..50: mol_type = genomic DNA

SEQ ID NO: 44853 - DNA, 40 bp, Streptococcus pneumoniae; identical to SEQ ID NO: 20423
  source 1..40: mol_type = genomic DNA

SEQ ID NO: 44854 - DNA, 50 bp, Streptococcus pneumoniae; identical to SEQ ID NO: 44414
  source 1..50: mol_type = genomic DNA

SEQ ID NO: 44855 - DNA, 40 bp, Streptococcus pneumoniae; identical to SEQ ID NO: 44415
  source 1..40: mol_type = genomic DNA

SEQ ID NO: 44856 - protein, 549 aa, Streptococcus pneumoniae
MSKEKIKVYLYIRVSTSIQIEGYSLEAQKSRMKAFAIYNDYEIVGEYEDAGKSGKSIEGRIQFNRMMEDIKSGKDGVSFVLVFKLSRFARNAADVLSTLQIMQDYGVNLICVEDGIDSSKDAGKLMISVLSAVAEIERENIRIQTMEGRIQKAREGKWNGGFAPYGYKLEDGKLFINEEEAVAIRTIFDQYVNTTIGANGISKYLENHGIRKIPRQNGKNPLFDAGLIRKILKNPVYNGKIAFGRRTLEKVHGTRNEYKQVEQDEYLISEGIHEAIVSDEVWQAAQVKLKSQAKKYEHVNKGKDTRTHLLSGIVKCPICGVGMFGNKCIKKKKDGTKYKDFYYYGYKHRQMIRGHKCTFSKQIREELLDDAVAEVIVKIVSNPKFASMMQEKINMKVDTSEIEKEIDNYQKELRKSHSTKFKLIEEIDNLDVEDKHYKRRKQDLDDRLYRMYDKIDELESSLIDAKAKKQTIEAEKLTGDNIYKVLIYFDKLYKVMNDVERRQLISALISEIQVYEEKQSNGQWLKSITFKLPIIEENLNIDLDNDEQV

SEQ ID NO: 44857 - DNA, 50 bp, Streptococcus pneumoniae; identical to SEQ ID NO: 44422
  source 1..50: mol_type = genomic DNA

SEQ ID NO: 44858 - DNA, 40 bp, Streptococcus pneumoniae; identical to SEQ ID NO: 20423
  source 1..40: mol_type = genomic DNA; mol_type = genomic DNA

SEQ ID NO: 44859 - DNA, 50 bp, Streptococcus pneumoniae; identical to SEQ ID NO: 44424
  source 1..50: mol_type = genomic DNA; mol_type = genomic DNA

SEQ ID NO: 44860 - DNA, 40 bp, Streptococcus pneumoniae; identical to SEQ ID NO: 44415
  source 1..40: mol_type = genomic DNA; mol_type = genomic DNA

SEQ ID NO: 44861 - protein, 549 aa, Streptococcus pneumoniae
MSKEKIKVYLYTRVSTSIQIEGYSLEAQKSRMKAFAIYNDYEIVGEYEDAGKSGKSIEGRIQFNRMMEDIKSGKDGVSFVLVFKLSRFARNAADVLSTLQIMQDYGVNLICVEDGIDSSKDAGKLMISVLSAVAEIEIENIRIQTMEGRIQKVREGKWNGGFAPYGYKLEDGKLFINEEEAVAIRTIFDQYVNTTIGANGISKYLENHGIRKIPRQNGKNPLFDAGLIRKILKNPVYNGKIAFGRRTLEKVHGTRNEYKQVEQDEYLISEGIHEAIVSDEVWQAAQVKLKSQAKKYEHVNKGKDTRTHLLSGIVKCPICGVGMFGNKCIKKKKDGTKYKDFYYYGCKHRQMIRGHKCTFSKQIREELLDDAVAEVIVKIVSNPKFASMMQEKINMKVDTSEIEKEIDNYQKELRKSHSTKFKLIEEIDNLDVEDKHYKRRKQDLDDRLYRMYDKIDELESSLIDAKAKKQTIEAEKLTGDNIYKVLIYFDKLYKVMNDVERRQLISALISEIQVYEEKQSNGQWLKSITFKLPIIEENLNIDLDNDEQV

SEQ ID NO: 44862 - DNA, 50 bp, Streptococcus pneumoniae; identical to SEQ ID NO: 44462
  source 1..50: mol_type = genomic DNA; mol_type = genomic DNA

SEQ ID NO: 44863 - DNA, 40 bp, Streptococcus pneumoniae; identical to SEQ ID NO: 20423
  source 1..40: mol_type = genomic DNA; mol_type = genomic DNA

SEQ ID NO: 44864 - DNA, 50 bp, Streptococcus pneumoniae; identical to SEQ ID NO: 44464
  source 1..50: mol_type = genomic DNA; mol_type = genomic DNA

SEQ ID NO: 44865 - DNA, 40 bp, Streptococcus pneumoniae; identical to SEQ ID NO: 44415
  source 1..40: mol_type = genomic DNA; mol_type = genomic DNA

SEQ ID NO: 44866 - protein, 549 aa, Streptococcus pneumoniae
MSKEKIKVYLYTRVSTSIQIEGYSLEAQKSRMKAFAIYNDYEIVGEYEDAGKSGKSIEGRIQFNRMMEDIKSGKDGVSFVLVFKLSRFARNAADVLSTLQIMQDYGVNLICVEDGIDSSKDAGKLMISVLSAVAEIERENIRIQTMEGRIQKAREGKWNGGFAPYGYKLEDGKLFINEEEAVAIRTIFDQYVNTTIGANGISKYLENHGIRKIPRQNGKNPLFDAGLIRKILKNPVYNGKIAFGRRTLEKVHGTRNEYKQVEQDEYLISEGIHEAIVSDEVWQAAQVKLKSQAKKYEHVNKGKDTRTHLLSRIVKCPICGVGMFGNKCIKKKKDGTKYKDFYYYGYKHRQMIRGHKCTFSKQIREELLDDAVAEVIVKIVSNPKFASMMQEKINMKVDTSEIEKEIDNYQKELRKSHSTKFKLIEEIDNLDVEDKHYKRRKQDLDDRLYRMYDKIDELESSLIDAKAKKQTIEAEKLTGDNIYKVLIYFDKLYKVMNDVERRQLISALISEIQVYEEKQSNGQWLKSITFKLPIIEENLNIGLDNDEQV

SEQ ID NO: 44867 - DNA, 50 bp, Streptococcus pneumoniae; identical to SEQ ID NO: 44427
  source 1..50: mol_type = genomic DNA

SEQ ID NO: 44868 - DNA, 40 bp, Streptococcus pneumoniae; identical to SEQ ID NO: 20423
  source 1..40: mol_type = genomic DNA; mol_type = genomic DNA

SEQ ID NO: 44869 - DNA, 50 bp, Streptococcus pneumoniae; identical to SEQ ID NO: 44429
  source 1..50: mol_type = genomic DNA; mol_type = genomic DNA

SEQ ID NO: 44870 - DNA, 40 bp, Streptococcus pneumoniae; identical to SEQ ID NO: 44415
  source 1..40: mol_type = genomic DNA; mol_type = genomic DNA

SEQ ID NO: 44871 - protein, 470 aa, Streptococcus pneumoniae
MEDIKSGKDGVSFVLVFKLSRFARNAADVLSTLQIMQDYGVNLICVEDDGIDSSKDAGKLMISVLSAVAEIERENIRIQTMEGRIQKAREGKWNGGFAPYGYKLEDGKLFINEEEAVAIRTIFDQYVNTTIGANGISKYLENHGIRKIPRQNGKNPVYNGKIAFGRRTLEKVHGTRNEYKQVEQDEYLISEGIHEAIVSDEVWQAAQVKLKSQAKKYEHVNKGKDTRTHLLSGIVKCPICGVGMFGNKCIKKKKDGTKYKDFYYYGCKHRQMIRGHKCTFSKQIREELLDDAVAEVIVKIVSNPKFASMMQEKINMKVDTSEIEKEIDNYQKELRKSHSTKFKLIEEIDNLDVEDKHYKRRKQDLDDRLYRMYDKIDELESSLIDAKAKKQTIEAEKLTGDNIYKILIYFDKLYKVMNDVERRQLISALISEIQVYEEKQSNGQWLKSITFKLPIIEENLNIGLDNDEQV

SEQ ID NO: 44872 - DNA, 50 bp, Streptococcus pneumoniae; identical to SEQ ID NO: 44412
  source 1..50: mol_type = genomic DNA; mol_type = genomic DNA

SEQ ID NO: 44873 - DNA, 40 bp, Streptococcus pneumoniae; identical to SEQ ID NO: 20423
  source 1..40: mol_type = genomic DNA; mol_type = genomic DNA

SEQ ID NO: 44874 - DNA, 50 bp, Streptococcus pneumoniae; identical to SEQ ID NO: 44414
  source 1..50: mol_type = genomic DNA; mol_type = genomic DNA

SEQ ID NO: 44875 - DNA, 40 bp, Streptococcus pneumoniae; identical to SEQ ID NO: 44415
  source 1..40: mol_type = genomic DNA; mol_type = genomic DNA

SEQ ID NO: 44876 - protein, 549 aa, Streptococcus pneumoniae
MSKEKIKVYLYTRVSTSIQIEGYSLEAQKSRMKAFAIYNDYEIVGEYEDAGKSGKSIEGRIQFNRMMEDIKSGKDGVSFVLVFKLSRFARNAADVLSTLQIMQDYGVNLICVEDGIDSSKDAGKLMISVLSAVAEIERENIRIQTMEGRIQKAREGKWNGGFAPYGYKLEDGKLFINEEEAVAIRTIFDQYVNTTIGANGISKYLENHGIRKIPRQNGKNPLFDAGLIRKILKNPVYNGKIAFGRRTLEKVHGTRNEYKQVEQDEYLISEGIHEAIVSDEVWQAAQVKLKSQAKKYEHVNKGKDTRTHLLSGIVKCPICGVGMFGNKCIKKKKDGTKYKDFYYYGYKHRQMIRGHKCTFSKQIREEFLDDAVAEVIVKIVSNPKFASMMQEKINMKVDTSEIEKEIDNYQKELRKSHSTKFKLIEEIDNLDVEDKHYKRRKQDLDDRLYRMYDKIDELESSLIDAKAKKQTIEAEKLTGDNIYKVLIYFDKLYKVMNDVERRQLISALISEIQVYEEKQSNGQWLKSITFKLPIIEENLNIGLDNDEQV

SEQ ID NO: 44877 - DNA, 50 bp, Streptococcus pneumoniae; identical to SEQ ID NO: 44427
  source 1..50: mol_type = genomic DNA

SEQ ID NO: 44878 - DNA, 40 bp, Streptococcus pneumoniae; identical to SEQ ID NO: 20423
  source 1..40: mol_type = genomic DNA

SEQ ID NO: 44879 - DNA, 50 bp, Streptococcus pneumoniae; identical to SEQ ID NO: 44429
  source 1..50: mol_type = genomic DNA

SEQ ID NO: 44880 - DNA, 40 bp, Streptococcus pneumoniae; identical to SEQ ID NO: 44415
  source 1..40: mol_type = genomic DNA

SEQ ID NO: 44881 - protein, 549 aa, Streptococcus pneumoniae
MSKEKIKVYLYTRVSTSIQIEGYSLEAQKSRMKAFAIYNDYEIVGEYEDAGKSGKSIEGRIQFNRMMEDIKSGKDGVSFVLVFKLSRFARNAADVLSTLQIMQDYGVNLICVEDGIDSSKDAGKLMISVLSAVAEIERENIRIQTMEGRSQKAMEGKWNGGFAPYGYKLEDGKLFINEEEAVAIRTIFDQYVNTTIGANGISKYLENHGIRKIPRQNGKNPLFDAGLIRKILKNPVYNGKIAFGRRTLEKVHGTRNEYKQVEQDEYLISEGIHEAIVSDEVWQAAQVKLKSQAKKYEHVNKGKDTRTHLLSGIVKCPICGVGMFGNKCIKKKKDGTKYKDFYYYGYKHRQMIRGHKCTFSKQIREELLDDAVAEVIVKIVSNPKFASMMQEKINMKVDTSEIEKEIDNYQKELRKSHSTKFKLIEEIDNLDVEDKHYKRRKQDLDDRLYRMYDKIDELESSLIDAKAKKQTIEAEKLTGDNIYRVLIYFDKLYKVMNDVERRQLISALISEIQVYEEKQSNGQWLKSITFKLPIIEENLNIDLDNDEQV

SEQ ID NO: 44882 - DNA, 50 bp, Streptococcus pneumoniae; identical to SEQ ID NO: 44422
  source 1..50: mol_type = genomic DNA

SEQ ID NO: 44883 - DNA, 40 bp, Streptococcus pneumoniae; identical to SEQ ID NO: 20423
  source 1..40: mol_type = genomic DNA

SEQ ID NO: 44884 - DNA, 50 bp, Streptococcus pneumoniae; identical to SEQ ID NO: 44424
  source 1..50: mol_type = genomic DNA

SEQ ID NO: 44885 - DNA, 40 bp, Streptococcus pneumoniae; identical to SEQ ID NO: 44415
  source 1..40: mol_type = genomic DNA

SEQ ID NO: 44886 - protein, 536 aa, Streptococcus pneumoniae
MSKEKIKVYLYTRVSTSIQIEGYSLEAQKSRMKAFAIYNDYEIVGEYEDAGKSGKSIEGRIQFNRMMEDIKSGKDGVSFVLVFKLSRFARNAADVLSTLQIMQDYGVNLICVEDDGIDSSKDAGKLMISVLSAVAEIERENIRIQTMEGRIQKAREGKWNGGFAPYGYKLEDGKLFINEEEAVAIRTIFDQYVNTTIGANGISKYLENHGIRKIPRQNGKNPVYNGKIVFGRRTLEKVHGTRNEYKQVEQDEYLISEGIHEAIVSDEVWQAAQVKLKSQAKKYEHVNKGKDTRTHLLSGIVKCPICGVGMFGNKCIKKKKDGTKYKDFYYYGCKHRQMIRGHKCTFSKQIREELLDDAVAEVIVKIVSNPKFASMMQEKINMKVDTSEIEKEIDNYQKELRKSHSTKFKLIEEIDNLDVEDKHYKRRKQDLDDRLYRMYDKIDELESSLIDAKAKKQTIEAEKLTGDNIYKILIYFDKLYKVMNDVERRQLISALISEIQVYEEKQSNGQWLKSITFKLPIIEENLNIGLDNDEQV

SEQ ID NO: 44887 - DNA, 50 bp, Streptococcus pneumoniae; identical to SEQ ID NO: 44412
  source 1..50: mol_type = genomic DNA

SEQ ID NO: 44888 - DNA, 40 bp, Streptococcus pneumoniae; identical to SEQ ID NO: 20423
  source 1..40: mol_type = genomic DNA

SEQ ID NO: 44889 - DNA, 50 bp, Streptococcus pneumoniae; identical to SEQ ID NO: 44414
  source 1..50: mol_type = genomic DNA

SEQ ID NO: 44890 - DNA, 40 bp, Streptococcus pneumoniae; identical to SEQ ID NO: 44415
  source 1..40: mol_type = genomic DNA

SEQ ID NO: 44891 - protein, 549 aa, Streptococcus pneumoniae
MSKEKIKVYLYTRVSTSIQIEGYSLEAQKSRMKAFAIYNDYEIVGEYEDAGKSGKSIEGRIQFNRMMEDIKSGKDGVSFVLVFKLSRFARNAADVLSTLQIMQDYGVNLICVEDGIDSSKDAGKLMISVLSAVAEIERENIRIQTMEDCIQKAREGKWNGGFAPYGYKLEDGKLFINEEEAVAIRTIFDQYVNTTIGPNGISKYLENHGIRKIPRQNGKNPLFDAGLIRKILKNPVYNGKIAFGRRTLEKVHGTRNEYKQVEQDEYLISEGIHEAIVSDEVWQAAQVKLKSQAKKYEHVNKGKDTRTHLLSGIVKCPICGVGMFGNKCIKKKKDGTKYKDFYYYGCKHRQMIRGHKCTFSKQIREELLDDAVAEVIVKIVSNPKFASMMQEKINMKVDTSEIEKEIDNYQKELRKSHSTKFKLIEEIDNLDVEDKHYKRRKQDLDDRLYRMYDKIDELESSLIDAKAKKQTIEAEKLTGDNIYKVLIYFDKLYKVMNDVERRQLISALISEIQVYEEKQSNGQWLKSITFKLPIIEENLNIDLDNDEQV

SEQ ID NO: 44892 - DNA, 50 bp, Streptococcus pneumoniae; identical to SEQ ID NO: 44422
  source 1..50: mol_type = genomic DNA

SEQ ID NO: 44893 - DNA, 40 bp, Streptococcus pneumoniae; identical to SEQ ID NO: 20423
  source 1..40: mol_type = genomic DNA

SEQ ID NO: 44894 - DNA, 50 bp, Streptococcus pneumoniae; identical to SEQ ID NO: 44424
  source 1..50: mol_type = genomic DNA

SEQ ID NO: 44895 - DNA, 40 bp, Streptococcus pneumoniae; identical to SEQ ID NO: 44415
  source 1..40: mol_type = genomic DNA

SEQ ID NO: 44896 - protein, 502 aa, Streptococcus pneumoniae
MSKEKIKVYLYTRVSTSIQIEGYSLEAQKSRMKAFAIYNDYEIVGEYEDAGKSGKSIEGRIQFNRMMEDIKSGKDGVSFVLVFKLSRFERNAADVLSTLQVMQDYGVNLICVEDGIDSSKDAGKLMISVLSAVAEIERKNIRIQTMEGRIQKAREGKWNGGFAPYGYKLEDGKLFINEEEAVAIRTIFDQYVNTTIGANGISKYLENHGIRKIPRQNGKNPLFDAGLIRKILKNPVYNGKIAFGRRTLEKVHGTRNEYKQVEQDEYLISEGIHEAIVSDEVWQAAQVKLKSQAKKYEHVNKGKDTRTHLLSGIVKCPICGVGMFGNKCIKKKKDGTKYKDFYYYGCKHRQMIRGHKCTFSKQIREELLDDAVAEVIVKIVSNPKFASMMQEKINMKVDTSEIEKEIDNYQKELRKSHSTKFKLIEEIDNLDVEDKHYKRRKQDLDDRLYRMYDKIDELESSLIDAKAKKQTIEAEKLTGDNIYKVLIYFDKLYKVMNDVERR

SEQ ID NO: 44897 - DNA, 50 bp, Streptococcus pneumoniae; identical to SEQ ID NO: 44412
  source 1..50: mol_type = genomic DNA

SEQ ID NO: 44898 - DNA, 40 bp, Streptococcus pneumoniae; identical to SEQ ID NO: 20423
  source 1..40: mol_type = genomic DNA

SEQ ID NO: 44899 - DNA, 50 bp, Streptococcus pneumoniae; identical to SEQ ID NO: 44414
  source 1..50: mol_type = genomic DNA

SEQ ID NO: 44900 - DNA, 40 bp, Streptococcus pneumoniae; identical to SEQ ID NO: 44415
  source 1..40: mol_type = genomic DNA

SEQ ID NO: 44901 - protein, 549 aa, Streptococcus pneumoniae
MSKEKIKVYLYTRVSTSIQIEGYSLEAQKSRMKAFAIYNDYEIVGEYEDAGKSGKSIEGRIQFNRMMEDIKSGKDGVSFVLVFKLSRFARNAADVLSTLQIMQDYGVNLICVEDGIDSSKDAGKLMISVLSAVAEIERENIRIQTMEGRIQKVREGKWNGGFAPYGYKLEYGKLFINEEEAVAIRTIFDQYVNTTIGANGISKYLENHGIRKIPRQNGKNPLFDAGLIRKILKNPVYNGKIAFARRTLEKVHGTRNEYKQVEQDEYLISEGIHEAIVSDEVWQAAQVKLKSQAKKYEHVNKGKDTRTHLLSGIVKCPICGVGMFGNKCIKKKKDGTKYKDFYYYGCKHRQMIRGHKCTFSKQIREELLDDAVAEVIVKIVSNPKFASMMQEKINIKVDTSEIEKEIDNYQKELRKSHSTKFKLIEEIDNLDVEDKHYKRRKQDLDDRLYRMYDKIDELESSLIDAKAKKQTLEAEKLTGDNIYKVLIYFDKLYKVMNDVERRQLISALISEIQVYEEKQSNGQWLKSITFKLPIIEENLNIGLDNDEQV

SEQ ID NO: 44902 - DNA, 50 bp, Streptococcus pneumoniae; identical to SEQ ID NO: 44412
  source 1..50: mol_type = genomic DNA

SEQ ID NO: 44903 - DNA, 40 bp, Streptococcus pneumoniae; identical to SEQ ID NO: 20423
  source 1..40: mol_type = genomic DNA

SEQ ID NO: 44904 - DNA, 50 bp, Streptococcus pneumoniae; identical to SEQ ID NO: 44414
  source 1..50: mol_type = genomic DNA

SEQ ID NO: 44905 - DNA, 40 bp, Streptococcus pneumoniae; identical to SEQ ID NO: 44415
  source 1..40: mol_type = genomic DNA

SEQ ID NO: 44906 - protein, 549 aa, Streptococcus pneumoniae
MSKEKIKVYLYTRVSTSIQIEGYSLEAQKSRMKAFAIYNDYEIVGEYEDAGKSGKYIEGRIQFNRMMEDIKSGKDGVSFVLVFKLSRFARNAADVLSTLQIMQDYGVNLICVEDGIDSFKDAGKLMISVLSAVAEIERENIRIQTMEGCIQKAREGKWNGGFAPYGYKLEDGKLFINEEEAVAIRTIFDQYVNTTIGANGISKYLENHGIRKIPRQNGKNPLFDAGLIRKILKNPVYNGKIAFGRRTLEKVHGIRNEYKQVEQDEYLISEGIHEAIVSDEVWQAAQVKLKSQAKKYERVNKGKDTRSHLLSGIVKCPICGVGMFGNKCIKKKKDGTKYKDFYYYGCKHRQMIRGHECTFSKQIREELLDDAVAEVIVKIVSNPKFASMMQEKINMKVDTSEIEKEIDNYQKELRKSHSTKFKLIEEIDNLDVEDKHYKRRKQDLDDRLCRMYDKIDELESSLIDAKAKKQTIEAEKLTGDNIYKVLIYFDKLYKVMNDVEHRQLISALISEIQVYEEKQSNGQWLKSITFKLPIIEENLNIGLDNDEQV

SEQ ID NO: 44907 - DNA, 50 bp, Streptococcus pneumoniae; identical to SEQ ID NO: 44427
  source 1..50: mol_type = genomic DNA

SEQ ID NO: 44908 - DNA, 40 bp, Streptococcus pneumoniae; identical to SEQ ID NO: 20423
  source 1..40: mol_type = genomic DNA

SEQ ID NO: 44909 - DNA, 50 bp, Streptococcus pneumoniae; identical to SEQ ID NO: 44429
  source 1..50: mol_type = genomic DNA

SEQ ID NO: 44910 - DNA, 40 bp, Streptococcus pneumoniae; identical to SEQ ID NO: 44415
  source 1..40: mol_type = genomic DNA

SEQ ID NO: 44911 - protein, 549 aa, Streptococcus pneumoniae
MSKEKIKVYLYTRVSTSIQIEGYSLEAQKSRMKAFAIYNDYEIVGEYEDAGKSGKSIEGRIQFNRMMEDIKSGKDGVSFVLVFKLSRFARNAADVLSTLQIMQDYGVNLICVEDGIDSSKDAGKLMISVLSAVAEIERENIRIQTMEGRIQKAREGKWNGGFAPYGYKLEDGKLFINEEEAVAIRTIFDQYVNTTIGANGISKYLENHGIRKIPRQNGKNPLFDAGLIRKILKNPVYNGKIAFGRRTLEKVHGTRNEYKQVEQDEYLISEGIHEAIVSDEVWQAAQVKLKSQAKKYEHVNKGKDTRTHLLSGIVKCPICGVGMFGNKCIKKKKDGTKYKDFYYYGYKHRQMIRGHKCTFSKQIREELLDDAVAEVIVKIVSNPKFASMMQEKINMKVDTSEIEKEIDNYQKELRKSHYTKFKLIEEIDNLDVEDKHYKRRKQDLDDRLYRMYDKIDELESSLIDAKAKKQTIEAEKLTGDNIYKVLIYFDKLYKVMNDVERRQLISALISEIQVYEEKQSNGQWLKSITFKLPIIEENLNIDLDNDEQV

SEQ ID NO: 44912 - DNA, 50 bp, Streptococcus pneumoniae; identical to SEQ ID NO: 44422
  source 1..50: mol_type = genomic DNA

SEQ ID NO: 44913 - DNA, 40 bp, Streptococcus pneumoniae; identical to SEQ ID NO: 20423
  source 1..40: mol_type = genomic DNA

SEQ ID NO: 44914 - DNA, 50 bp, Streptococcus pneumoniae; identical to SEQ ID NO: 44424
  source 1..50: mol_type = genomic DNA

SEQ ID NO: 44915 - DNA, 40 bp, Streptococcus pneumoniae; identical to SEQ ID NO: 44415
  source 1..40: mol_type = genomic DNA

SEQ ID NO: 44916 - protein, 554 aa, Burkholderia glumae
MAAKARVYSYLRFSDPKQAAGGSVDRQLEYAARWAAERELLLDASLSLRDEGLSAYHQRHVKQGALGVFLRAVEDGHVPPGSVLIVEGLDRLSRAEPLQAQAQLAQIVNAGITVVTASDGREYNRERLKAQPMDLVYSLLVMIRAHEESDTKSKRVKAAIRRQCQGWIAGTWRAPVRVGKDPQWVREVDGRFELIPERAAAIRVVVDMYKKGHGAVRTLRDLHERGMTITNAGLPKATQIYKLLANRMLIGEKTVELDGEQFRLEGYYPPVLSPAEFADLRNAAGERGRRKGKGEIPGVVTGLGITYCGYCGAAVVGQNIMNRRRMENGLPYPGHRRLHCVTYSSSAGCKVSGSCSVAPVEHALMLYCSDQMNLTRLLEGDSGMTALNAELARARAAVADLERQIGRVTDALLTDEEQAPAALLKRMRDMEAELERERHRCGALELRVHAAASAEAPAAADAWSALVRGVEELDYDARMQARQLVADTFSRIVVFQSGFYPETDDGLIGLMLIAKRGSTRLLHVDRRTGEWRSAEDVEIVGDLPLPNPGSIQIQ

SEQ ID NO: 44917 - DNA, 50 bp, Burkholderia glumae
  source 1..50: mol_type = genomic DNA
cgtatatttttaatatcctacgggcagccgagggatactatacctatacg

SEQ ID NO: 44918 - DNA, 40 bp, Burkholderia glumae
  source 1..40: mol_type = genomic DNA
atcgacaagggctttcgggcagccgagactgacaaatcct

SEQ ID NO: 44919 - DNA, 50 bp, Burkholderia glumae
  source 1..50: mol_type = genomic DNA
cgtatatttttaatatcctacgggacgccgagggatactatacctatacg

SEQ ID NO: 44920 - DNA, 40 bp, Burkholderia glumae
  source 1..40: mol_type = genomic DNA
atcgaccagggctctcgggacgcagggcctgagagagaca

SEQ ID NO: 44921 - protein, 537 aa, Roseburia hominis; identical to SEQ ID NO: 22536

SEQ ID NO: 44922 - DNA, 50 bp, Roseburia hominis; identical to SEQ ID NO: 43082
  source 1..50: mol_type = genomic DNA

SEQ ID NO: 44923 - DNA, 40 bp, Roseburia hominis
  source 1..40: mol_type = genomic DNA
aagaattcatccgtttcaggatggcaacggacgtgtcggc

SEQ ID NO: 44924 - DNA, 50 bp, Roseburia hominis; identical to SEQ ID NO: 43082
  source 1..50: mol_type = genomic DNA

SEQ ID NO: 44925 - DNA, 40 bp, Roseburia hominis
  source 1..40: mol_type = genomic DNA
aagaattcatctgtttgtggataggaacgggggtgggggt

SEQ ID NO: 44926 - protein, 523 aa, Pseudomonas coronafaciens
MSSPSMRKRPEDCSDGLIAAAEYVRMSTDHQRYSTENQSASIHAYALSHGMDIVKTYRDEGKSGLDIGGRDALRRLLDDVQAGNIQFQVILVYDVSRWGRFQNTDESAHYEYLCTSSGIQVVYCAEPFENDGSPMATIYKGIKRSMAGEYSRELSQKVFAGQCRLVEKGFHQGGPAGYGLRRALIDEKNEFKAELSRGQQKSIQTDRVILIPGPEAEIVVVQNIYHQFIHSGMNEREIADALNADGVLTDFDRPWSRGSVHEVLTNEKYIGNNVYNKTSSKLRKRISRNPPDKWIRCDGAFQGIISPEVFTCAREIILQRSHRLDDAQMLELLRALLQKAGSLSGMLIDEQDNMPSSTVYISRFGGLLRAYTLIGYAPDRDYRYLDINRSLRQLHPQVFEAVIKHLENAGASVEISAQNDVLTINDEWTASVVIARCHSTPAGTLRWKLRFDISLAPDITIAVRMEQANLQVRDYYLVPLIDMGAWPQKMAEENSPLIDSYCFATLDVLDGLAARCSLKEACR

SEQ ID NO: 44927 - DNA, 50 bp, Pseudomonas coronafaciens
  source 1..50: mol_type = genomic DNA
cacttaatgtgcccatcgacacagctattgtcggcgggcaacatgaatgt

SEQ ID NO: 44928 - DNA, 40 bp, Pseudomonas coronafaciens
  source 1..40: mol_type = genomic DNA
ttctgagagttaacaatcgctatcagaagtccaggttaga

SEQ ID NO: 44929 - DNA, 50 bp, Pseudomonas coronafaciens
  source 1..50: mol_type = genomic DNA
cacttaatgtgcccatcgacacagtgattgtcggcgggcaacatgaatgt

SEQ ID NO: 44930 - DNA, 40 bp, Pseudomonas coronafaciens
  source 1..40: mol_type = genomic DNA
ttatcagaatcagcaatcttgattggaagcccaggttaaa

SEQ ID NO: 44931 - protein, 528 aa, Streptomyces thermoviolaceus
MNSTPTTAPAGACAIYVRRSHVDRAGSDRNGRSLAEQEAECRALADRLGLEVVAVYSEKEGTGASRRSRKPRPAWTAALADLDDGSKFQTLIVWALDRADRRGAVEIGRLLDAHADGSRRVVGVDGTDTSDTRRRLEMIIRAEVAREEAEHIAERVTRAKRFARSDGRWLGGPPPYGTRVVEGRIEPDPETGPIARKYIADKLLAGETLWAVVKGLNADDIPAPRGGKWAVGTVAALVRAPGWAGLQSVRERTASGNWRHIAEVYYEDGVPVTIGQGIVTPNERSLILAKLASRSIETTFRRADGAVAHRGKRGVTSLLGDLLRCATCGGRTAVSGNPNHKSYRCGNSARGKGCPGFTAPVKGANDAVAFAFLSKLAALDPGDELLEAVADAWVARVNPETVSARAAALADLEAARADIARVRRLVAAGTFDEEDAADVMPRMRAAVKAAEERLAAIPEPTADVSPLLDMVQSVEAWDMLELGEQRELLALAIKEVRVSPAKGRGYRFDPASRLTIVWADGTTAAPVG

SEQ ID NO: 44932 - DNA, 50 bp, Streptomyces thermoviolaceus
  source 1..50: mol_type = genomic DNA
ggtcgtgtcttgatcgttgatttctgcggcctcatgatggaggcatgaac

SEQ ID NO: 44933 - DNA, 40 bp, Streptomyces thermoviolaceus
  source 1..40: mol_type = genomic DNA
catcgtcgtcctcgatttttggacattttgttgtatcaac

SEQ ID NO: 44934 - DNA, 50 bp, Streptomyces thermoviolaceus
  source 1..50: mol_type = genomic DNA
ggtcgtgtcttgatcgttgatttcttcggcctcatgatggaggcatgaac

SEQ ID NO: 44935 - DNA, 40 bp, Streptomyces thermoviolaceus
  source 1..40: mol_type = genomic DNA
taacttcatcctctgctttttaactttttgttgtatctac

SEQ ID NO: 44936 - protein, 506 aa, Escherichia coli; identical to SEQ ID NO: 40316

SEQ ID NO: 44937 - DNA, 50 bp, Escherichia coli; identical to SEQ ID NO: 36192
  source 1..50: mol_type = genomic DNA

SEQ ID NO: 44938 - DNA, 40 bp, Escherichia coli; identical to SEQ ID NO: 31613
  source 1..40: mol_type = genomic DNA

SEQ ID NO: 44939 - DNA, 50 bp, Escherichia coli
  source 1..50: mol_type = genomic DNA
aaaccgaatagactttattcaaggtacattgtattgtagctattcggcat

SEQ ID NO: 44940 - DNA, 40 bp, Escherichia coli
  source 1..40: mol_type = genomic DNA
ggggggagggaaagcaagatacagtgtagttatctttatt

SEQ ID NO: 44941 - protein, 505 aa, Aeromonas sp ASNIH7
MKAWLYARFSSNQQADGDSINRQVKAAQQWCDANGVELQQTSFRDLGVSGWKSIKRPMFEQLIKAMSEGKIPRGSYVLFESTDRLSRRGWRHTQELIRTITCVYDCKLVILDKGQVYTKENVNDVVQNIMLMVAADMAEKESQRKSDLVAAAYKSKRQDGDVSRWPYWIDKTDKGFVLNENAETIRLIIELRLKGVGALGVASELNRRGIKSSRGGNWGHTSIRVVLSNSALYGTKDFYSMKTIKQFDEHGEEIRVTDNQLVSSVPDVFPSLCDFTTWQQIQIKGEKPGRKGQSSPFHNMLFCKCGAGLSVQLGSAGERYRKCSRAKVGACDQRAIRNFDETLIECLGRITYESCDTQKDELPELQARLAKLEGVKDALMAAGAVEALVDVYKDIAKAKDAVANAQKIAVVPTMKVKEVFSGSVDEQRIALKRVINRVVVNRNKNNASVKVYLTNGHIKIFGLNIGIKKQSGLNEISSITDTKSFLGEIKMIMSDGENAIYCDDE

SEQ ID NO: 44942 - DNA, 50 bp, Aeromonas sp ASNIH7
  source 1..50: mol_type = genomic DNA
gtcatgcattattgacactgtaacttgttcatgtgtacaatctgcaagtc

SEQ ID NO: 44943 - DNA, 40 bp, Aeromonas sp ASNIH7
  source 1..40: mol_type = genomic DNA
caccgtgttccagtgctgcttgttcatgtgccagcccggt

SEQ ID NO: 44944 - DNA, 50 bp, Aeromonas sp ASNIH7
  source 1..50: mol_type = genomic DNA
gtcatgcattattgacactgtaacgtgttcatgtgtacaatctgcaagtc

SEQ ID NO: 44945 - DNA, 40 bp, Aeromonas sp ASNIH7
  source 1..40: mol_type = genomic DNA
caccgtggtccagagctgggtgttggagccccagcagggt

SEQ ID NO: 44946 - protein, 461 aa, Agreia bicolorata
MSTVIYARQSLDKDGQGTAVERQLVECRALASSHGLTVSREFVDNDVSASKGVRPEFTKLISLIQTGDVETIIVWHTDRLYRRVIDLIEIIETAEKNALRMLTVKAGEIDLSNPAGRMYAGMLATAARYEVEQKGVRQVASNIQRAKKGSWQFSNRPYGYERVNGKVQIVEDEAAVIREAYERYLAGETYYAIADNFNVRSIPTTNGGPWTVSQLRARLANPAYAGIRLYRGEEVSEGDWEPLITRENWEQFKSAKQRRKTPHTWSNRTKYLLSGLALCGVCGGRMMARPDYPRPKNGVAQPAKIAYACTANWCVQRNQARVDELVESVIIARLSLPDASKLIRPKIDIQPMLAKSDELRQRRDDLALALAEGLLTIAAVREASGGLTKQIDALQRQISAADGDSKLVNLIQAEDVADHWRSKLTLAQRRGIIGTLTSITIKKQKNTRVFDPEDVAIEWLS

SEQ ID NO: 44947 - DNA, 50 bp, Agreia bicolorata
  source 1..50: mol_type = genomic DNA
tacccttttttatatcgggttgcgagaccggcctgcgcaagagtagggta

SEQ ID NO: 44948 - DNA, 40 bp, Agreia bicolorata
  source 1..40: mol_type = genomic DNA
accccagatgatgatgacgagaccggcggtcatcaacgtg

SEQ ID NO: 44949 - DNA, 50 bp, Agreia bicolorata
  source 1..50: mol_type = genomic DNA
tacccttttttatatcgggttgcgtgaccggcctgcgcaagagtagggta

SEQ ID NO: 44950 - DNA, 40 bp, Agreia bicolorata
  source 1..40: mol_type = genomic DNA
accccagattctgatgaggtgacctgtggtccacaaatta

SEQ ID NO: 44951 - protein, 493 aa, Faecalibacterium prausnitzii
MTAVIYARYSSDNQREESIEGQIRECTAYAEKNGITVIKHYIDRAFSAKTDNRPEFQQMVKDSGKKLFDVVLVWKFDRFARNRFDSANYKMILKKNGVHLISVMEPIAEGSQGILVETLLEGMAEYYSAELSEKVIRGQTENALKGKCTGGTGTIGYKIDDDKFYHLDPLTAPLVLEAFQQYDNGDKMVEIVNFLNDKGVRNMLGGKMTHSSVNTMLKNRRYIGELSFRDIVVPDAIPVIVPKDLFDRVQKRLDKNKRAPACGKADEEYLLTTKLFCGKCGALMFGESGTSATGRTYYYYKCANVKRRKGCNKKTVQKDWLEDLVVRETMELIQDDAVIDKIVQLVMDVQNQENTTIPLLEKQLREVNKKLDNLMKAIEDGLYTRTTKERLEALEIQKDELTEKIADEKLKKPSFNEDFIRFWLLKFRKFDISQKKQRKALIEIFVNAIFLYDDRMLITFNYKDGTQTVRFEDTLTADSAEEKSSDLSSSAGP

SEQ ID NO: 44952 - DNA, 50 bp, Faecalibacterium prausnitzii
  source 1..50: mol_type = genomic DNA
agttcggatttgtccagctctgctggaccaaacaaaaataatccgaactt

SEQ ID NO: 44953 - DNA, 40 bp, Faecalibacterium prausnitzii
  source 1..40: mol_type = genomic DNA
agttcgattctcgccactcggaccataaatccaacgattt

SEQ ID NO: 44954 - DNA, 50 bp, Faecalibacterium prausnitzii
  source 1..50: mol_type = genomic DNA
agttcggatttgtccagctctgctcaaccaaacaaaaataatccgaactt

SEQ ID NO: 44955 - DNA, 40 bp, Faecalibacterium prausnitzii
  source 1..40: mol_type = genomic DNA
tgttgtattttccccgctccaaccatgaaatcaaccattt

SEQ ID NO: 44956 - protein, 507 aa, Escherichia coli
MKRAISYIRFSSEKQSRGDSLRRQSKMVNDWLKAHPEYYLDQDLSFRDLGVSGFTGKHLKGGLGDFLTAIEKGLVKAGDTLLIESLDRLSRQNVDRASELLRNILRSGVDVVTLSDGEHYTRESLKDPLALIKSILIMQRAHEESLRKAERIQAAWDAKKEAAKAGIKISRRCPAWLKLNDDRKSFSVIPEKVETVKRCFQLRLEGKSIWEIVRTLNAEGHQTLNQYKAGKFGQTSVQDLLKNRSVIGYFTPKGCEEISGYYPAIIDETTFYKVQQLSHYRYGRKPVSDKPLSVNLFKGVIRCSECGHALIITGFSDTRNGIYRCPLRNENRCSAKGLSRKQTDGTLLTLLSRLDRFDSDMTNTLDTLKLHREHISSNIEKLVQLSLEIEDLSAITIKLKQLKGELSQVDADIEKETQRLKSIDVGCLSDCDLTTKAGRIEAQLIIKSAVKEVVLNTAKRRCKVTFHNGRAITLPITENPSKDVTEAIQSLSEVTERGLIDVDVVAI

SEQ ID NO: 44957 - DNA, 50 bp, Escherichia coli
  source 1..50: mol_type = genomic DNA
tagtgcatttagaccttgatgatttttattagacacgtttaaatacacca

SEQ ID NO: 44958 - DNA, 40 bp, Escherichia coli
  source 1..40: mol_type = genomic DNA
cggcgttaatcgggtgattttagacagccacccggttcat

SEQ ID NO: 44959 - DNA, 50 bp, Escherichia coli
  source 1..50: mol_type = genomic DNA
tagtgcatttagaccttgatgattaatattagacacgtttaaatacacca

SEQ ID NO: 44960 - DNA, 40 bp, Escherichia coli
  source 1..40: mol_type = genomic DNA
cagcttgtctctgatgattaaagactgccacctggtttat

SEQ ID NO: 44961 - protein, 483 aa, Priestia megaterium
MRTAVYVRVSTEEQAKEGYSIRAQTERLKAYCLSQGWEIVDFYIDDGQSAKDMERTNLKRMIQHIEQGLIECVLVYKLDRLTRSVLDLYKLLEIFDAHGCKFKSATEVYDTTTAMGRMFITIVAALAQWERENLSERVRMGMEQKAREGQWVINMAPFGYELDKKNKSLIINEKEAAIVNRIFNMYLSGKGMKKIATELNAVNIPTKTGNTWSDNKIGYILKNPTYVGTIRYNYRVHNDQYFEVENAVPAIIDRATFEKVQNVATARKKVHPKAATSEFIFSGTIKCAKCGAPFSGKYGYSKRGEKIHRPRSYYCSKQILGLCTQRNISERFIEHHFLKYLQDIEINQDEIKNVKPDNEQKNIEQQILFLEKDLRAIEQRRKKWQYAWVNNMIDDEDFAARMEEESQTEVKIQEELNNIKPAANSMDPVEFKIILKDIRTNWSTLTAIEKKMMLQLLVNKIVVDKISPKPKVDSVEIVEIEFN

SEQ ID NO: 44962 - DNA, 50 bp, Priestia megaterium
  source 1..50: mol_type = genomic DNA
cattgtcctattatcaaaacagaatgttctgtcatgataataggacgctt

SEQ ID NO: 44963 - DNA, 40 bp, Priestia megaterium
  source 1..40: mol_type = genomic DNA
catcgttgtcaaaaccaagtgtccggtaagtgctgctctc

SEQ ID NO: 44964 - DNA, 50 bp, Priestia megaterium
  source 1..50: mol_type = genomic DNA
cattgtcctattatcaaaacagaagtttctgtcatgataataggacgctt

SEQ ID NO: 44965 - DNA, 40 bp, Priestia megaterium
  source 1..40: mol_type = genomic DNA
tatctttctcaaaaccagggttttgggagctgctgcactc

SEQ ID NO: 44966 - protein, 506 aa, Streptococcus intermedius; identical to SEQ ID NO: 14476

SEQ ID NO: 44967 - DNA, 50 bp, Streptococcus intermedius; identical to SEQ ID NO: 14477
  source 1..50: mol_type = genomic DNA

SEQ ID NO: 44968 - DNA, 40 bp, Streptococcus intermedius
  source 1..40: mol_type = genomic DNA
ggtaggacataccggctctggaaaatcttctatcatgaac

SEQ ID NO: 44969 - DNA, 50 bp, Streptococcus intermedius; identical to SEQ ID NO: 14479
  source 1..50: mol_type = genomic DNA

SEQ ID NO: 44970 - DNA, 40 bp, Streptococcus intermedius
  source 1..40: mol_type = genomic DNA
aatgggaaataccgcctctgcaaattcacacatcatgaac

SEQ ID NO: 44971 - protein, 681 aa, Streptomyces albulus
MVASTQVRRSKNPPPSTENVERETTAPVSGNPPVPSTHPQANSSASAQAARSAQGPLPNKTVKADGVAGLALGAEGNSPVPTPEVKRHPAVSTLVTSGAGNRRSPVGNVESNATAGAVFAEPLRGVRCIRLSVRTDETTSPERQREADDIAAAALGIDFGEGDALREAVDLDVSASKIGPFDRPQLGGWLTRPDAFDALVFWRFDRAIRSMGDMHELAKWAREHRKMIVFAEGIGGGRLVFDFRNPMDPMSELMMLMLAFAAQVESQSISDRVTGAQAAMRKMALRWRGGGRPPYGYLPAPMPKEHGGIGWTLVPDPDAVRVIERIIAALLEGKSPHAIALMLNADWVLSPSEHWKAYKARTKSTTDADSEADAPKKKPVQWRSQHIVTMLTSPALLGWKMHKGKPVRDDQGNPVMATETPIVTREEFDQISALLAPKPTAEKAPTRKDSVALLLRVIHCTGCGSRMYLNKSSGAYGCSSYKYGTYCPAPVTIRGTWVDEYVTAEFLRLVGPVQFTRVTEIPGYDPQPEIDATVAEMEEHDAQKDRRQSQAGMAAWQRRADALDARLTELESREKTEPRREIVPTGRTFADEWHTADTAGKRAMLIEAGARLDVKRGTKGGWRTLDLRRVEFAITGDLDPCIEEAAATADHLAAESNPDHAPTPGASAHRNLNPGVLTTAA

SEQ ID NO: 44972 - DNA, 50 bp, Streptomyces albulus
  source 1..50: mol_type = genomic DNA
aagtacccgttatgagcttcgggaagccccgaagctccagagtcatagtt

SEQ ID NO: 44973 - DNA, 40 bp, Streptomyces albulus
  source 1..40: mol_type = genomic DNA
gcaacccccacggcgggaaagccgacaacgtgggaagcaa

SEQ ID NO: 44974 - DNA, 50 bp, Streptomyces albulus
  source 1..50: mol_type = genomic DNA
aagtacccgttatgagcttcgggaacccccgaagctccagagtcatagtt

SEQ ID NO: 44975 - DNA, 40 bp, Streptomyces albulus
  source 1..40: mol_type = genomic DNA
gaaaaaacaaaggctgaaaaccagacaacctgggaagcaa

SEQ ID NO: 44976 - protein, 590 aa, Streptococcus agalactiae
MKRDVKVIKGDTTLKRTASGCVERSIKRVAAYCRVSTDTEDQINSYNSQVEHYTDFIKQNNEWTLAGIYADEAITGTQVDRRIDFQRLINDCMNGDIDMVITKSISRFARNTLDTLKYVRKLKEYNVAVFFEEENINTLTMDGELLLTILSSVAQQEVENISANVKKGLRMKMERGEMVGFQGCLGYDYDPETKSISVNEKEAEIVRYIFRRYLEGVGGMVISRELEEQGYLSPRGHKRWTETTVLGIIKNEKYKGDLLMGKTFTVDPISKRRLDNFGEQDKFYIENHHEPIISEEDFEKAQGIRLRRAKNRNTVANNGGKREKYSRKYAFSSMLECGFCGHMLSRRNWHSSSEYTKVIWQCVNATKNGKKYCPHSKGIEEEAIEKAFMESYRQVCHNNVEITNEFLKTVEEELKDNSLAKDLKKISNQLDKILKKEKDLVELRLNEAISMEIYQEKYNEIAISKEKLLEEKRTLEVTLTDEKALKKRLEGFKKLLESNKYLEEFDRTVFESIVDKIVIGGTNDDGDIDPAMITIIYKTGKKDSQNGRLFKSRRKNAKVVEENDGDKLYSQSSNEVNKLCSYSTDNTCGV

SEQ ID NO: 44977 - DNA, 50 bp, Streptococcus agalactiae
  source 1..50: mol_type = genomic DNA
tgtgttcctattcaacagacaacacatgtagagtgcatagcgttgataca

SEQ ID NO: 44978 - DNA, 40 bp, Streptococcus agalactiae
  source 1..40: mol_type = genomic DNA
cttattcccaatgacacatcatgtggagtgtgtggctctg

SEQ ID NO: 44979 - DNA, 50 bp, Streptococcus agalactiae
  source 1..50: mol_type = genomic DNA
tgtgttcctattcaacagacaacatttgtagagtgcatagcgttgataca

SEQ ID NO: 44980 - DNA, 40 bp, Streptococcus agalactiae
  source 1..40: mol_type = genomic DNA
cttattcccaatcacacattttgagcacttccttactctc

SEQ ID NO: 44981 - protein, 587 aa, Streptococcus agalactiae
MKKDVKVIKGDTTLKRTASGCVERSIKRVAAYCRVSTDTEDQINSYNSQVEHYTEFIQKNNEWTLAGIYADEAITGTQVDRRIDFQRLINDCINGDIDMIITKSISRFARNTLDTLKYVRKLKEFNVAVFFEEENINTLTMDGELLLTILSSVAQQEVENISANVKKGLRMKMERGEMVGFQGCLGYDYDPETKSISINEKEAEIVRYIFRRYIEGVGGMVISRELEEQGYLSPRGNKRWTETTVLGIIKNEKYKGDLMMGKTYTVDPISKRRLDNYGEQDKFYIENHHEPIISEEDFEKAQGIRLRRSKNRNTVANNGGKREKYSRKYAFSSMLECGFCGHNLSRRNWHSSSEYTKVIWQCVNATKNGKKYCPHSKGIEEEAIEKAFMESYRQVCHNNVEITNEFLKTVEEELKDNSLAKDLKKINNQLDKILKKEKDLVELRLNESISMDIYQDKYNEIAISKEKLLAEKRTLEVTLTDEKALKKRLEGFKKLLESNKYLEEFDRAVFESIVDKIIIGGTNDEGEIDPAMITIIYKTGKKDSQDGRLFKSRRKNAKEVDEKTDNKLYPQSSDEVNNLCSYPMDNT

SEQ ID NO: 44982 - DNA, 50 bp, Streptococcus agalactiae
  source 1..50: mol_type = genomic DNA
tgtgttcctatcctatggacaacacacgtcgagtgcatagcgttgataca

SEQ ID NO: 44983 - DNA, 40 bp, Streptococcus agalactiae; identical to SEQ ID NO: 44978
  source 1..40: mol_type = genomic DNA

SEQ ID NO: 44984 - DNA, 50 bp, Streptococcus agalactiae
  source 1..50: mol_type = genomic DNA
tgtgttcctatcctatggacaacattcgtcgagtgcatagcgttgataca

SEQ ID NO: 44985 - DNA, 40 bp, Streptococcus agalactiae; identical to SEQ ID NO: 44980
  source 1..40: mol_type = genomic DNA

SEQ ID NO: 44986 - protein, 493 aa, Bacillus mycoides
MKGAVILAYAVYVRVSSDKDEQVSSVENQIDICRYWLENNGFEWDEDAVYFDDGISGTAWLERHAMQLILNKARKKELDTVIFKSIHRLARDLKDALEIKEILLGHGVRLITLEEGYDSHYEGKNDMKFEMYAMFAAQLPKTLSVSTTAALAAKVRRGGYTGGFVPYGYEIIDDKYAINEEEAALVREMFELYAQGFGYIKIANTINDKGARTRKGEPWTYSTLCKMIKNPTYKGTYTMQKYTTVKVNGKKKKVINPKEKWVIFKNHHPAIISHELWDKVNDKDPNKFQKKRRISTTNELRGITFCAHCGTAMTKKNNVRVNKNGTIKEYSYMMCDWSRATARRECVKHVPIHYKDLRALVLDKLKEKESVLEKEFFSDENQLQVKLRKLNRDIKDLKFKKERLLDLYLEGERIDKDTFTVRNKKIEKEIELKELEIRKANNIEIQMKEKQEVRDAFALLEESKDLHGVFQKLIKRIEVAQDGAIDIYYRFVE

SEQ ID NO: 44987 - DNA, 50 bp, Bacillus mycoides
  source 1..50: mol_type = genomic DNA
cgtatgccttattgacataccgcgagcgcggtgtataattagggtataaa

SEQ ID NO: 44988 - DNA, 40 bp, Bacillus mycoides
  source 1..40: mol_type = genomic DNA
tgtagcgtttgagggagcgagcgctgttggtaaaagtaca

SEQ ID NO: 44989 - DNA, 50 bp, Bacillus mycoides
  source 1..50: mol_type = genomic DNA
cgtatgccttattgacataccgcgtacgcggtgtataattagggtataaa

SEQ ID NO: 44990 - DNA, 40 bp, Bacillus mycoides
  source 1..40: mol_type = genomic DNA
tgttgcttttgaggaagcttactgtgttggtggaataaca

SEQ ID NO: 44991 - protein, 493 aa, Bacillus mycoides
MKGVVILAHAVYVRVSSDKDEQVSSVENQIDICRYWLENNGFEWDEDAVYFDDGISGTAWLERHAMQLILNKARKKELDTVIFKSIHRLARDLKDALEIKEILLGHGVRLITLEEGYDSHYEGKNDMKFEMYAMFAAQLPKTLSVSTTAALAAKVRRGGYTGGFVPYGYEIIDDKYAINEEEAALVREIFELYAQGFGYIKIANTINDKGMRTRKGAPWTYSTLCKMIKNPTYKGIYTMQKYTTVKVNGKKKKVINPKEKWVIFEDHHPAIISHELWDKVNDKDPNKFQKKRRISTTNELRGITFCAHCGTAMTKKNNVRVNKNGTIKEYSYMMCDWSRATARRECVKHVPIHYKDLRALVLDKLKEKESVLEKEFYSDENQLQVKLRKLNRDIKDLKFKKERLLDLYLEGERIDKDTFTVRNKKIEKELELKELEIRKANNIEVQMKEKQEVRDAFALLEESKDLHGVFQKLIKRIEVAQDGATDIYYRFVE

SEQ ID NO: 44992 - DNA, 50 bp, Bacillus mycoides
  source 1..50: mol_type = genomic DNA
tgtatgccttattgacataccgcgagcgcggtgtataattagggtataaa

SEQ ID NO: 44993 - DNA, 40 bp, Bacillus mycoides; identical to SEQ ID NO: 44988
  source 1..40: mol_type = genomic DNA

SEQ ID NO: 44994 - DNA, 50 bp, Bacillus mycoides
  source 1..50: mol_type = genomic DNA
tgtatgccttattgacataccgcgtacgcggtgtataattagggtataaa

SEQ ID NO: 44995 - DNA, 40 bp, Bacillus mycoides; identical to SEQ ID NO: 44990
  source 1..40: mol_type = genomic DNA

SEQ ID NO: 44996 - protein, 474 aa, Streptomyces sp CMB-StM0423
MSERPVDVYARISKAPDGSLDKTDRQIADCRAELERRGLTLGKVHEDPNKSAWRENVRRQGWEALLNRFESGVISGVVVWNVDRLLRQPRDLQKLIDMAKEQGFTVYSCFGDYDLSNPDHLLHLRIKTDFAAHESASNQRRTKRGLLAARTRGKMHTGPRAFGWPAAVKEDEEPTAPELVAVERKAIAEATRRYLDGDPLGSIATDFNARGIRTATGGQWTGVTVKQMLKRPRNAGLVEYGGQVVAELDGEEAIVDRATFDLLTARLALARSGRPSPDQRLLTHIAYCGNCGYWLNSRTRSGKYYADGKVRIHYHCPANRGCAKVSIAQPALDKELKDFTIARLSDPRHAAQIQVRAQASRELERRVSEINDLQDELDDRLTSGQITMERFDKMNARLTRQLEELEEGLAAVRVPEADLSMPEARSAVLRRWEDAGVPERRGMVRAALGDKKLIIDPVSGHWRKAKITDRIRIE

SEQ ID NO: 44997 - DNA, 50 bp, Streptomyces sp CMB-StM0423
  source 1..50: mol_type = genomic DNA
tgtagcgacattcgcgtactgaccgtggtcagtctatgattgccgctaca

SEQ ID NO: 44998 - DNA, 40 bp, Streptomyces sp CMB-StM0423
  source 1..40: mol_type = genomic DNA
gaacgagacgatggtgaccgtggtggggaacgccgcgacg

SEQ ID NO: 44999 - DNA, 50 bp, Streptomyces sp CMB-StM0423
  source 1..50: mol_type = genomic DNA
tgtagcgacattcgcgtactgacccgggtcagtctatgattgccgctaca

SEQ ID NO: 45000 - DNA, 40 bp, Streptomyces sp CMB-StM0423
  source 1..40: mol_type = genomic DNA
gacctagcaggtggtgccccgtgtgaggaacgctgcaacg

SEQ ID NO: 45001 - protein, 550 aa, Streptococcus equi
MSKEKIKVYLYTRVSTSIQIDGYSLEAQKSRMKAFALYNDYEIVGEYEDAGKSGKSIEGRVQFTRMMKDIKTGKDGVSFVLVFKLSRFARNAADVLSTLQTMQDFGVNLICVEDGIDSSKDAGKLMISVLSAVAEIERENIRVQTMEGRIQKAREGKWNGGFAPYGYQLIDGKLIINEEEAIAIRTIFDQYVNTAIGANGLSKYLENHGIRKIPRQNGKNPLFDAGLIRKILKNPVYNGKIAFGRRILEKVHGTRNEYKQVEQDEYLIAEGIHEAIISDELWQAAQVKLKSQAKKYEHVNKGKDIRTHLLSRIVKCPVCGAGMFGNKCIKKKKDGTKYKDFYYYGCKHRQMMRGHKCTFSKQIREELLDDAVAEVIIKIVSNPKFASMMQEKINMKVDTSEIEKEIDNYQKELRKSHSTKFKLIEEIDNLDVDDKHYKRRKQDLDDRLYRMYDKIEELESLLIDAKAKKQTIEAEKLTGDNIYKVLIYFDKLYNVMNDVERRQLITALISEIQIYEEKQPNGQWLKSITFKLPIIDEDLNISLDNDEQVE

SEQ ID NO: 45002 - DNA, 50 bp, Streptococcus equi
  source 1..50: mol_type = genomic DNA
agtttggacaatgatgagcaagttgagacggtagcattattgtccaaact

SEQ ID NO: 45003 - DNA, 40 bp, Streptococcus equi
  source 1..40: mol_type = genomic DNA
tccaatgacacatcatgtcgagtgcatagcgttgatacaa

SEQ ID NO: 45004 - DNA, 50 bp, Streptococcus equi
  source 1..50: mol_type = genomic DNA
agtttggacaatgatgagcaagttatgacggtagcattattgtccaaact

SEQ ID NO: 45005 - DNA, 40 bp, Streptococcus equi
  source 1..40: mol_type = genomic DNA
tttaatgacaaacaatgtcatatccatatctttgataaaa

SEQ ID NO: 45006 - protein, 550 aa, Streptococcus equi
MSKEKIKVYLYTRVSTSIQIDGYSLEAQKSRMKAFALYNDYEIVGEYEDAGKSGKSIEGRIQFNRMMEDIKSGKDGVSFVLVFKLSRFARNAADVLSTLQTMQDFGVNLICVEDGIDSSKDAGKLMISVLSAVAEIERENIRVQTMEGRIQKAREGKWNGGFAPYGYQLVDGKLFINEEEAVAIRTIFDQYVNTTIGANGLSKYLENHGIRKIPRQNGKNPLFDAGLIRKILKNPVYNGKIAFGRRTLEKVHGTRNEYKQVEQDEYLIAEGIHEAIISDELWQAAQVKLKSQAKKYEHVNKGKDIRTHLLSGIVKCPVCGVGMFGNKCIKKRKDGTKYKDFYYYGCKHRQMMRGHKCTFSKQIREELLDDAVAEVIIKIVSNPKFASMMQEKINMKVDTSEIEKEIDNYQKELRKSHSTKFKLIEEIDNLDADDKHYKRRKQDLDDRLYRMYDKIEELESFLIDAKAKKQTIEAEKLTGDNIYKVLIYFDKLYKVMNDVERRQLITALISEIQIYEEKQPNGQWLKSITFKLPIIDEDLNIGLDNDEQVE

SEQ ID NO: 45007 - DNA, 50 bp, Streptococcus equi
  source 1..50: mol_type = genomic DNA
ggtttggacaatgatgaacaagttgagacggtggaattattgtccaaact

SEQ ID NO: 45008 - DNA, 40 bp, Streptococcus equi; identical to SEQ ID NO: 45003
  source 1..40: mol_type = genomic DNA

SEQ ID NO: 45009 - DNA, 50 bp, Streptococcus equi
  source 1..50: mol_type = genomic DNA
ggtttggacaatgatgaacaagttatgacggtggaattattgtccaaact

SEQ ID NO: 45010 - DNA, 40 bp, Streptococcus equi; identical to SEQ ID NO: 45005
  source 1..40: mol_type = genomic DNA

SEQ ID NO: 45011 - protein, 533 aa, Pseudomonas aeruginosa
MTKKCFPYVRFSSTRQEDGSTRTRQNGLIEAFVAKHGLEVDRHLEDAGTSAFHSKHAGSEGVLGQFLKEVRKGEIEKGSYLLIENFDRLSRDKIVRSNKIFTDLLFSGIKIVILDKNKVYDADNLDFGDWITALVEFERANAESQRKSDFSSKAWKLNRDKMHNGEIVTKKVPTWLKVENNTFIIDEVKIDRIRTLFRLSLSKGLQEATKEYNTLYGEKLAIHQAQYLLGNRKLIGEHQPQKIHYNENGRLIRKDEGNPIPDYYPQAIDEDLFLKVQSVITSRKPFSGRYSAQRYNVFRDLIFCRFCGGTIRYMNKGERDYFICTNSMTGKCGLKGQQSIRGKKVFGRFFKFTNGINIGTLLEENTNADEIKNELMKLQNQKTKISNRLDDFKSQIKKMIMEGETIPETYNEIIVDLENSIIKLDNEIEIRNKELNKIISSFKSFYDLKEIDIEKIIYDKSQEAIEKRVQYNNELKNIIKKIQIDYLNDILHVEFSNGVNRHILNDELANEYNKDEIENSWASVVKSIAQKTN

SEQ ID NO: 45012 - DNA, 50 bp, Pseudomonas aeruginosa
  source 1..50: mol_type = genomic DNA
accttttgcagagcatacccaaccatgctatgttattagttccactctcc

SEQ ID NO: 45013 - DNA, 40 bp, Pseudomonas aeruginosa
  source 1..40: mol_type = genomic DNA
catagcagtagatgcagacatgctcgcaaccacggtaggg

SEQ ID NO: 45014 - DNA, 50 bp, Pseudomonas aeruginosa
  source 1..50: mol_type = genomic DNA
accttttgcagagcatacccaacctggctatgttattagttccactctcc

SEQ ID NO: 45015 - DNA, 40 bp, Pseudomonas aeruginosa
  source 1..40: mol_type = genomic DNA
actagcagtagatgcaaagtggctggtgaccagggtcggc

SEQ ID NO: 45016 - protein, 518 aa, Mordavella massiliensis
MKKCIAVYLRLSLEDVDKRTNQAKDESNSIAAQRQLIQRHIALNPYLSGLPQMEFCDDGFSGTNFQRPDFQRMIDLIRDGKIQIVIVKDLSRFGRDYLEVGDYLEHIFPFLGVRMISINDHYDSEQNLGNTAGMDVAFRNLIYDYYSKDLSKKVKTAMRVKQRDGGYVSCCLYGYRVLPQEKHKMVIDPETAPIVRRVFEEIIAGKSTSQVARELNAEGVPTPLEYKGVRRKNQSDKKPLWTHQRILEMLRNIKYTGCMVNHTRESRKIRDKAQYRVPKEEWIIHENAHEAIVSMEEFEAAKDALRKVRPYKKKTERDVYPFYCAHCGRKLQKTFGNDVHFYCATPYWNEEEHSCKEVRWDKTRIEEVVLEALKAQIAMMTVQSRGKSKAVQPKGTMLRQKLKILTGELKSGDSQKVQSYLDYREGRITREDFIALRAQREQRARELQEEIARTEAEYQEYLDAEEQAKKERAITRKTDSLDEESLREIMYDAVKRVNFVDGQNIEIVWKFDDLFRTA

SEQ ID NO: 45017 - DNA, 50 bp, Mordavella massiliensis; identical to SEQ ID NO: 42942
  source 1..50: mol_type = genomic DNA

SEQ ID NO: 45018 - DNA, 40 bp, Mordavella massiliensis
  source 1..40: mol_type = genomic DNA
gggaatagtcaggaggatcgatgatctgggaagagtggtg

SEQ ID NO: 45019 - DNA, 50 bp, Mordavella massiliensis
  source 1..50: mol_type = genomic DNA
ttttgcacttacttgacacaatcaatctaaccagttataataagggcaac

SEQ ID NO: 45020 - DNA, 40 bp, Mordavella massiliensis
  source 1..40: mol_type = genomic DNA
aggctgaggcaggagaatcattgaactgggaagactgagg

SEQ ID NO: 45021 - protein, 521 aa, Pseudomonas monteilii; identical to SEQ ID NO: 2931

SEQ ID NO: 45022 - DNA, 50 bp, Pseudomonas monteilii; identical to SEQ ID NO: 2932
  source 1..50: mol_type = genomic DNA

SEQ ID NO: 45023 - DNA, 40 bp, Pseudomonas monteilii; identical to SEQ ID NO: 27348
  source 1..40: mol_type = genomic DNA

SEQ ID NO: 45024 - DNA, 50 bp, Pseudomonas monteilii
  source 1..50: mol_type = genomic DNA
caatactattttgcagctttcacttagcaataagctgcaatcctgtatac

SEQ ID NO: 45025 - DNA, 40 bp, Pseudomonas monteilii
  source 1..40: mol_type = genomic DNA
gaatctgactcctttcacttagcataaggcattcgagatt

SEQ ID NO: 45026 - protein, 617 aa, Sphingomonas taxi
MRVIPYLRWSSDKQNSGSTIPRQTQTITAYAAEKGWQLPPAEEWLRDEGVSGFKGHNLAITGELGKFTDKICREGGRDVVLLVEQLDRLSRKTSGEVLEWFFKVTNAGLTVAVCDNKIIVDQASLRNQNDQLRALLNDSERANHESARKVVLLQQAWAAIRDGMDVSVERPGTAIEVDYLASASNPVDVGIDITIKTRRSTDTYELSTLADGFTPTAGDFLEIKTLLGRVARKVHTSSTCPAWLELSPCRRFFEPNPARVGVVERIFTLYASGVAKVAIARILNGDSVPTFRGGDGWGASSVKALIDSRAVIGEYQHKSRAQDRTFGDPIPNYFPAIISNQLWQEAHAPRSGHKREGRGRSILVRNLFADIARCESCGAKMYFLRKPRKKSGTDDAYLQCATYFMNKTNADGSPRCTDKMMWHYRPIVDALLDTLLASALDDQHFSNDAEIAAINARMADQRRVVEDLGTQLDNMAGNMAGSLSERLRVRFDALEKQEADAKTDLVNLEEQMAIARGKVDPAIHVKRVAAIRGEIDQDNDDGLKARITIKNALNGLIAKMQFDAGAGFVNIALLASQRYIAIGSDGQVAVDMDLTGREPTAAEKPFLDAYKRRKANA

SEQ ID NO: 45027 - DNA, 50 bp, Sphingomonas taxi
  source 1..50: mol_type = genomic DNA
ggcgttagaaaaaaacatcgcgttgaggatggatgtctttttctaacgac

SEQ ID NO: 45028 - DNA, 40 bp, Sphingomonas taxi
  source 1..40: mol_type = genomic DNA
gtgggaagggcaccgggtcgaagacgtgtgcacccccgag

SEQ ID NO: 45029 - DNA, 50 bp, Sphingomonas taxi
  source 1..50: mol_type = genomic DNA
ggcgttagaaaaaaacatcgcgttccggatggatgtctttttctaacgac

SEQ ID NO: 45030 - DNA, 40 bp, Sphingomonas taxi
  source 1..40: mol_type = genomic DNA
gtggcaaagtcaccgggcccctgacctgtgcttccccgca

SEQ ID NO: 45031 - protein, 537 aa, Schaedlerella arabinosiphila
MSAEKQDFYYLRLSKEDGDIEEGSAEESCSITSQRDCIKRYLQEHCFQADEFEEIADDGYSGTSMNRPGMRRLLNLVENSKVRTIIVRDLSRFARNYLEAGHYLEFVFPAYGVRFISINDQFDSEQLGENTAGLELAIKNLLNQMYSKDISRKIKSSVDLKKLSGEYVYGTAPYGYKKGEKKNTIVIDKEAAEIVKSIFEWAAAGITITQIARKLNEAQVVTPSVYLASVRGKYKTRAVWTFESVRNILANRIYTGDTVPFKSHVVRVGSDRVKQIPEELQQVIPNTHEAVISRELFYQARTVIKSKKKSKASPRPNPFKSLLVCGCCGNRLSKSKPQNKNWICVTHRYNPGSDCEKVRFREDKLTEIVLRAINVRCKLLDAKIKKMKEVSHSAKSHEQILQTECRTLRKQIDGLQALKMQHYESYVEGQLSKENFLIKKREISTKEEDLKIQLSVAEHKQMEQAEKIKASATQMETSKKIIEYQEITELTPQLMKELVKKIIIRPDGSIHIEWNFCDEIGEVIPFHSNLALEEKTI

SEQ ID NO: 45032 - DNA, 50 bp, Schaedlerella arabinosiphila
  source 1..50: mol_type = genomic DNA
gttgtcctttacttgacacactcatgtgagtgagttataataaggacaac

SEQ ID NO: 45033 - DNA, 40 bp, Schaedlerella arabinosiphila
  source 1..40: mol_type = genomic DNA
ggagggattatccagggaatgagcggttcgccgatcctcc

SEQ ID NO: 45034 - DNA, 50 bp, Schaedlerella arabinosiphila
  source 1..50: mol_type = genomic DNA
gttgtcctttacttgacacactcaactgagtgagttataataaggacaac

SEQ ID NO: 45035 - DNA, 40 bp, Schaedlerella arabinosiphila
  source 1..40: mol_type = genomic DNA
agagggagtctccagagaaacagaggcttgctaatcctca

SEQ ID NO: 45036 - protein, 532 aa, Streptomyces griseofuscus
MDRAVRSMADMADLGRYAKKHGKRLIFASGPGGGRLELDFSSPMSELIMLILAFAAQLEGQTIMERNRGAAAHLQALGRWAGGIIPYGTIPVRKTFSDGNEGWWLGRDVDLTWNYVTEMVDKALAGRGYSYIRDHLNEQRIITPKNHRARLATPPRKHDPESRWSDTTVRDILRSQVLRGYQTREDGSVVRDAEGNPVRAGEALVEDDVWFALQSKLDELSQTKSQATKRKDGHPLLGVLKCDECGANAYHFANVSSQKMRRYGTAFVTQIRSSALSFVTDDDAETMVIRVPGNADALADQVFKDAKLRDRVVVAYGADALALPVGKMSYAVLVALWDALQLGPGLEHVQKPRKRHLFHCQGKVHAPGVKSPSIDFNDTLRWVDEEFMRRLGRLRRTEVITTGGVDNRAAIKELESDIAALVEQLAKLRGAAADMVGRQLNGLSDKLEELSKVPFIPPQRQTVRLDRTWGDDWVAASRETRLDMLRSAGVEVFMRCATHRGQPVGERLRMEIGKHVTPEQDALDDVVYQESF

SEQ ID NO: 45037 - DNA, 50 bp, Streptomyces griseofuscus
  source 1..50: mol_type = genomic DNA
ttgtatgagtctccgcgacttgcgaacgcaggccgcggaaagtagggtcc

SEQ ID NO: 45038 - DNA, 40 bp, Streptomyces griseofuscus
  source 1..40: mol_type = genomic DNA
aagcctcacccgcgtggcgaacgcaggccgcgtgaggctt

SEQ ID NO: 45039 - DNA, 50 bp, Streptomyces griseofuscus
  source 1..50: mol_type = genomic DNA
ttgtatgagtctccgcgacttgcggccgcaggccgcggaaagtagggtcc

SEQ ID NO: 45040 - DNA, 40 bp, Streptomyces griseofuscus
  source 1..40: mol_type = genomic DNA
aggcctcccacccgcggcggccgcgggcagcatgtggcgt

SEQ ID NO: 45041 - protein, 485 aa, Flavonifractor plautii
MKAVIYARYSSDSQREESIEGQLRECKEYAERNGITVLSTYIDRALSAKTDNRPDFQRMIKDSANGLFDIVLVWKLDRFARNRYDSAHYKAILKKNGVKVVSAKEAIAEDSTGILLESLLEGYAEFYSVELSEKIHRGQKENALKGLNNGGGIPLGYVLGSDKRLAVDPMTAPVVLEIFTRYADGETVRAIVESLNERGLQTKHNKPYSLGSFNAILKNRKYIGEYRYQDVVIPGGVPAIVPQELFDRVQARIARNKRAPAMSKADEAFLLTTKLFCGKCGRLMVGESGTSHTGKKHYYYKCGSAKRKTGCTKKAVKKDWIENLVVERTMQMIFDDTTLDAIASMVLDVQARENTSLPVLKAQLAQTEQGIQNMLNAIQQGIFTVSTKQRLEELEATKEQLTVSILQEELQKPHLSREQILFFLQRFRAVDPTKQEQRQRLIDSFVNAVYVYDDKIILTFNYQDGTETITLDDINGSDLEASAPP

SEQ ID NO: 45042 - DNA, 50 bp, Flavonifractor plautii
  source 1..50: mol_type = genomic DNA
aacggttcggatttggaagcaagcgctccaccaaatcaagataatccgaa

SEQ ID NO: 45043 - DNA, 40 bp, Flavonifractor plautii
  source 1..40: mol_type = genomic DNA
gggggttcgactccccccgcctccaccagaaaagaaagac

SEQ ID NO: 45044 - DNA, 50 bp, Flavonifractor plautii
  source 1..50: mol_type = genomic DNA
aacggttcggatttggaagcaagccctccaccaaatcaagataatccgaa

SEQ ID NO: 45045 - DNA, 40 bp, Flavonifractor plautii; identical to SEQ ID NO: 14035
  source 1..40: mol_type = genomic DNA

SEQ ID NO: 45046 - protein, 485 aa, Flavonifractor plautii; identical to SEQ ID NO: 45041

SEQ ID NO: 45047 - DNA, 50 bp, Flavonifractor plautii
  source 1..50: mol_type = genomic DNA
aacggttcggatttggaagcaagcgctccaccattgagcgcatatccgaa

SEQ ID NO: 45048 - DNA, 40 bp, Flavonifractor plautii; identical to SEQ ID NO: 45043
  source 1..40: mol_type = genomic DNA

SEQ ID NO: 45049 - DNA, 50 bp, Flavonifractor plautii
  source 1..50: mol_type = genomic DNA
aacggttcggatttggaagcaagccctccaccattgagcgcatatccgaa

SEQ ID NO: 45050 - DNA, 40 bp, Flavonifractor plautii; identical to SEQ ID NO: 14035
  source 1..40: mol_type = genomic DNA

SEQ ID NO: 45051 - protein, 540 aa, Enterocloster bolteae
MKQPYNTTIYNTALYMRLSRDDENYGDSVSIETQRTILQQYAKEQGLHVVGEYVDDGWSGTNFERPDFQRMMDDVDAGKVNCIVTKDLSRFGREHVMMDYYLEFLFPEKRVRYIAVAENEDTEKGLSDFVPFKNLFNEWFAKDTSRKVKAAFKAKFATGQRIGAYAPIGYRKHPEIKNKLIIDEETRWIVEKIFDLAIHGRGAASITRILIMEKVPTPGFINFQRDGTFANIYAGAPEKKSYAWTIAQVKSIMKDETYIGHTIHYRETNISFKNKRRVRKPQSEWMRVENTQEPIISEQVFRQVQEQIANRRRKCKDGTTQIFSGLVKCADCGWSLSYGENRQNSKPYGHYHCSKYGQGTRQCSMHYIRYDVLYAYVLSRLQYWSGLVQHDEERLLKRLLNATDKGQAAARKKQAAELKKAEKRKAEVDTLFARMYEDWAAGRITEYNFSMLSGKYQSEQAELDEKIERLQSAIATESQNAADAEKWIALMKECVNPTELTAELLNTLIEKIVVHEAVKGEDGSREQEVEIFYRFIGKID

SEQ ID NO: 45052 - DNA, 50 bp, Enterocloster bolteae; identical to SEQ ID NO: 35647
  source 1..50: mol_type = genomic DNA

SEQ ID NO: 45053 - DNA, 40 bp, Enterocloster bolteae
  source 1..40: mol_type = genomic DNA
cgtttctcagggtgatgagggagaatcccaccttgtcaaa

SEQ ID NO: 45054 - DNA, 50 bp, Enterocloster bolteae
  source 1..50: mol_type = genomic DNA
caatatctttaactatgtgataccaagggttcacttagataaagatacca

SEQ ID NO: 45055 - DNA, 40 bp, Enterocloster bolteae
  source 1..40: mol_type = genomic DNA
tctttctaaggctgatgaaaaagtcttccaccttgtaaat

SEQ ID NO: 45056 - protein, 566 aa, Erysipelotrichaceae bacterium
MKKSNELPKSIIYSRYSSTNQREESIDSQIRIINTFAKSKYNIIKTYIDSAQSATTDNRESFQQMINDVKSGNLPDVKFLLVSKRDRFARNRYDMAYYKNILAKAGISIVSATEHLDDSPESVILESVLDGMSEYYSLNLGRECIKGLKENAYTCRTTGSTPPLGLKVNKDTLKFEIDEPNADAIRLLFKRFVEDGWSYQLICDELNAKGFRTTRGNLFNSKSTLIDYLNNEKYVGRLTYLKSKKDPLTGKRTCKRNYNRDEIIVVENAIPAIIDEETFNRAQEILKYRKRNASSFRTTNKMNMLVGKVICGKCGSHMNINTRKSGKNKEYYSTYRCSAKKEKMAKRCDNRELSATHLERYVISQLMFYLKQDTIVDRITDMLNEVLEHEFDSHDSEISQVNQQLMNVDVKIKNTTNAIAEGGVSLPSLVESLRALEDDKAMLKKRLHEINSAVPVFKKIDRNEVLELIEKAKEYMLSENDELIRSVINLFIEKINVGENGVEIIYYLHPFSYISHELWKTYVTRQELISYKGFSPKIMKGRWSRKAIISLSESKPTLARLISLVA

SEQ ID NO: 45057 - DNA, 50 bp, Erysipelotrichaceae bacterium
  source 1..50: mol_type = genomic DNA
attgtgatttctaaaacacccacctcatctgctccaataaaaaacacgta

SEQ ID NO: 45058 - DNA, 40 bp, Erysipelotrichaceae bacterium
  source 1..40: mol_type = genomic DNA
tacgggggttcaattcccctcatctgctccatagaacgct

SEQ ID NO: 45059 - DNA, 50 bp, Erysipelotrichaceae bacterium
  source 1..50: mol_type = genomic DNA
attgtgatttctaaaacacccaccaaatctgctccaataaaaaacacgta

SEQ ID NO: 45060 - DNA, 40 bp, Erysipelotrichaceae bacterium
  source 1..40: mol_type = genomic DNA
tttggggcagcatttccccaaatgtgcttcatagtacact

SEQ ID NO: 45061 - protein, 475 aa, Streptococcus pneumoniae; identical to SEQ ID NO: 1481

SEQ ID NO: 45062 - DNA, 50 bp, Streptococcus pneumoniae
  source 1..50: mol_type = genomic DNA
ttctgtattttagtcaaagtaattaagataagttagaattagtaacagta

SEQ ID NO: 45063 - DNA, 40 bp, Streptococcus pneumoniae
  source 1..40: mol_type = genomic DNA
agacgttaaacgtccaatcatgataactttattatacata

SEQ ID NO: 45064 - DNA, 50 bp, Streptococcus pneumoniae
  source 1..50: mol_type = genomic DNA
ttctgtattttagtcaaagtaattgagataagttagaattagtaacagta

SEQ ID NO: 45065 - DNA, 40 bp, Streptococcus pneumoniae
  source 1..40: mol_type = genomic DNA
agactttaatgatccccttgagatgactttattatagaaa

SEQ ID NO: 45066 - protein, 475 aa, Streptococcus pneumoniae; identical to SEQ ID NO: 1481

SEQ ID NO: 45067 - DNA, 50 bp, Streptococcus pneumoniae; identical to SEQ ID NO: 42337
  source 1..50: mol_type = genomic DNA

SEQ ID NO: 45068 - DNA, 40 bp, Streptococcus pneumoniae
  source 1..40: mol_type = genomic DNA
agacgttaaacgtccaatcaagataactttattatacata

SEQ ID NO: 45069 - DNA, 50 bp, Streptococcus pneumoniae
  source 1..50: mol_type = genomic DNA
ttctgtattttagtcaaagtaattgagataagttagagttagtaacagta

SEQ ID NO: 45070 - DNA, 40 bp, Streptococcus pneumoniae; identical to SEQ ID NO: 45065
  source 1..40: mol_type = genomic DNA

SEQ ID NO: 45071 - protein, 475 aa, Streptococcus pneumoniae; identical to SEQ ID NO: 1516

SEQ ID NO: 45072 - DNA, 50 bp, Streptococcus pneumoniae; identical to SEQ ID NO: 42337
  source 1..50: mol_type = genomic DNA

SEQ ID NO: 45073 - DNA, 40 bp, Streptococcus pneumoniae; identical to SEQ ID NO: 45068
  source 1..40: mol_type = genomic DNA

SEQ ID NO: 45074 - DNA, 50 bp, Streptococcus pneumoniae; identical to SEQ ID NO: 45069
  source 1..50: mol_type = genomic DNA

SEQ ID NO: 45075 - DNA, 40 bp, Streptococcus pneumoniae; identical to SEQ ID NO: 45065
  source 1..40: mol_type = genomic DNA

SEQ ID NO: 45076 - protein, 475 aa, Streptococcus pneumoniae; identical to SEQ ID NO: 1481

SEQ ID NO: 45077 - DNA, 50 bp, Streptococcus pneumoniae; identical to SEQ ID NO: 37457
  source 1..50: mol_type = genomic DNA

SEQ ID NO: 45078 - DNA, 40 bp, Streptococcus pneumoniae; identical to SEQ ID NO: 45068
  source 1..40: mol_type = genomic DNA

SEQ ID NO: 45079 - DNA, 50 bp, Streptococcus pneumoniae; identical to SEQ ID NO: 45069
  source 1..50: mol_type = genomic DNA

SEQ ID NO: 45080 - DNA, 40 bp, Streptococcus pneumoniae; identical to SEQ ID NO: 45065
  source 1..40: mol_type = genomic DNA

SEQ ID NO: 45081 - protein, 475 aa, Streptococcus pneumoniae; identical to SEQ ID NO: 1511

SEQ ID NO: 45082 - DNA, 50 bp, Streptococcus pneumoniae; identical to SEQ ID NO: 37457
  source 1..50: mol_type = genomic DNA

SEQ ID NO: 45083 - DNA, 40 bp, Streptococcus pneumoniae; identical to SEQ ID NO: 45068
  source 1..40: mol_type = genomic DNA

SEQ ID NO: 45084 - DNA, 50 bp, Streptococcus pneumoniae; identical to SEQ ID NO: 45069
  source 1..50: mol_type = genomic DNA

SEQ ID NO: 45085 - DNA, 40 bp, Streptococcus pneumoniae; identical to SEQ ID NO: 45065
  source 1..40: mol_type = genomic DNA

SEQ ID NO: 45086 - protein, 475 aa, Streptococcus pneumoniae; identical to SEQ ID NO: 7956

SEQ ID NO: 45087 - DNA, 50 bp, Streptococcus pneumoniae; identical to SEQ ID NO: 37457
  source 1..50: mol_type = genomic DNA

SEQ ID NO: 45088 - DNA, 40 bp, Streptococcus pneumoniae; identical to SEQ ID NO: 45068
  source 1..40: mol_type = genomic DNA

SEQ ID NO: 45089 - DNA, 50 bp, Streptococcus pneumoniae; identical to SEQ ID NO: 45069
  source 1..50: mol_type = genomic DNA

SEQ ID NO: 45090 - DNA, 40 bp, Streptococcus pneumoniae; identical to SEQ ID NO: 45065
  source 1..40: mol_type = genomic DNA

SEQ ID NO: 45091 - protein, 475 aa, Streptococcus pneumoniae; identical to SEQ ID NO: 1521

SEQ ID NO: 45092 - DNA, 50 bp, Streptococcus pneumoniae; identical to SEQ ID NO: 37457
  source 1..50: mol_type = genomic DNA

SEQ ID NO: 45093 - DNA, 40 bp, Streptococcus pneumoniae; identical to SEQ ID NO: 45068
  source 1..40: mol_type = genomic DNA

SEQ ID NO: 45094 - DNA, 50 bp, Streptococcus pneumoniae; identical to SEQ ID NO: 45069
  source 1..50: mol_type = genomic DNA

SEQ ID NO: 45095 - DNA, 40 bp, Streptococcus pneumoniae; identical to SEQ ID NO: 45065
  source 1..40: mol_type = genomic DNA

SEQ ID NO: 45096 - protein, 475 aa, Streptococcus pneumoniae; identical to SEQ ID NO: 37456

SEQ ID NO: 45097 - DNA, 50 bp, Streptococcus pneumoniae; identical to SEQ ID NO: 37457
  source 1..50: mol_type = genomic DNA

SEQ ID NO: 45098 - DNA, 40 bp, Streptococcus pneumoniae; identical to SEQ ID NO: 45068
  source 1..40: mol_type = genomic DNA

SEQ ID NO: 45099 - DNA, 50 bp, Streptococcus pneumoniae; identical to SEQ ID NO: 45069
  source 1..50: mol_type = genomic DNA

SEQ ID NO: 45100 - DNA, 40 bp, Streptococcus pneumoniae; identical to SEQ ID NO: 45065
  source 1..40: mol_type = genomic DNA

SEQ ID NO: 45101 - protein, 478 aa, Micrococcus luteus
MTKRKATAAIYVRISRDADGRAAGVERQEADCRALAERMGLTLHPRVFKDNDIGASSRSRKARPAFRELLEAVEAGEVQTILAYSNSRITRRPMEWEDLIRLSESHGLQVHTVVSSSARFDTADGRMILRVLAANDAAEADRISERVTRAKQQRLEEGAFRGGPRPFGYEADGMTIRETEAQALREAAGRIIAGESLRSVTADLRDRGFKGTRRADSGLQPVQLRRILLRPRNAGLVEHYGKVTGPAAWPAILSEDEWQAVRSVLTDPARKTNHGSNRVKHLGSSLFHCGVCGDHVRASAASRGYRVYRCKTGAHVSRAQEPIDHFIREVMAARLRADPDVLRREDDADDTAPNEIRRELSTLRARRAQLANDYADGLLDGSQVKAAGARIDAKIEAAAAELARLTSASVLSGLADAEDAGNAFLTAPIGVQRAIVDALATVTIYPAGKKGRPAGWQTGDHYLDLETVQITWKGSDDD

SEQ ID NO: 45102 - DNA, 50 bp, Micrococcus luteus
  source 1..50: mol_type = genomic DNA
gggcgtcttagttgtactaatgccctggcaagaggttagactagacacat

SEQ ID NO: 45103 - DNA, 40 bp, Micrococcus luteus
  source 1..40: mol_type = genomic DNA
gcggggcgcctgccacgacctggcgatcgtcctggcggcc

SEQ ID NO: 45104 - DNA, 50 bp, Micrococcus luteus
  source 1..50: mol_type = genomic DNA
gggcgtcttagttgtactaatgcctaggcaagaggttagactagacacat

SEQ ID NO: 45105 - DNA, 40 bp, Micrococcus luteus
  source 1..40: mol_type = genomic DNA
gcgggccggccgccacgagtacgcgctgcccctggcgccc

SEQ ID NO: 45106 - protein, 576 aa, Lysinibacillus sp YS11
MNDLFSLENKYRKNANANIITDEFGNKKISVGVLDRVSTDTQAIEGDSLEMQRELAQDYAKSINGEIYKFYTEEGISASKTRIEKRPKIQELIQDIQNGNVNYVVAYKRDRIFRNAQEYMWFIQFLVDHNCEIYLTARDEQQIDLSAFKIAGASKLMEVMMAMISEMESETTSSRVSDTMINLAKKGEYTGGSTPIGYRRENGKFVPIEGVKELFHKIENLYLRGYGKFSIARWLNGGVVKGLQTLDDPIPKPIEHKSSETWNHRNIETILFNPIYTGHFSYQSKKNIDLDRMISKSELIEPIRTEERQREISLFKIQKTSNSKPPRAYNTPFLLSGLLYCSECGEKMITSTTQPKGSKKTHSYYRCASKAKQYLKGKCSSNNYSKETIEAMAIKLAIIQIRRFLESDTLSNIKLKQEVDKSLYAEKADTIQNKIKSCEKKMNRYDSLIEKLDDSNDEGDIELQRHYMKKQKELLIIINDLKIEHEEISIKSEEDKIDKFNIDDLAKLANEFINHVENKPVGEQKRMLERLFSKFYVDKNGNIKLMIKVGLTDDLLKEVESNEDDTDVISFSPSGS

SEQ ID NO: 45107 - DNA, 50 bp, Lysinibacillus sp YS11
  source 1..50: mol_type = genomic DNA
gttatatcttttagccctagcggctctcctatgattataaaagatataaa

SEQ ID NO: 45108 - DNA, 40 bp, Lysinibacillus sp YS11
  source 1..40: mol_type = genomic DNA
ttttttactcatcataggctctccgcctgtaatgctgagc

SEQ ID NO: 45109 - DNA, 50 bp, Lysinibacillus sp YS11
  source 1..50: mol_type = genomic DNA
gttatatcttttagccctagcggcattcctatgattataaaagatataaa

SEQ ID NO: 45110 - DNA, 40 bp, Lysinibacillus sp YS11
  source 1..40: mol_type = genomic DNA
ttttttgcacataataggcattcaacttattatgataagc

SEQ ID NO: 45111 - protein, 554 aa, Clostridium botulinum
MIAAIYARKSMETDKGESIENQIHLCKEFGTRAGATEFLYYKDEGFSGGNTNRPKFKEMIQAAKSNKFSMLICYRLDRISRNVADFSSTLEILQKHNIDFVSIKEHFDTSTPIGRAMVYIASVFAQLERETIAERIRDNMFELAKTGRWLGGTTPLGFKSEAINYIDFNGKNKKMYKLIEIPEEIELIKLIFNLYLEKKGFPSVANYLCSHKYKGKNGGEFSQGTIKQIIENPVYTYADEKIYKYFKDKGAILCGNFDGKHGVITYNKREQGKKANPISEWIVSVGKHKGIISSDVWIKCQNINSLNSKKSSPRSATGNKFLLSGLLVCNECGSTMGSWSRNNPKSGKYEKYYRCNLKNRASNRCSSKMLNAYKAEDLVLSSIKGVTLNDLIEAYDDIINNKNALSSIKEKQNKLSKEIENNNKIIHGLIRKLALLDDDPTIISEFKKEINNLNKQNTSSKKEINSLEKSIKNTNSNANSIDEINSKIKNFKTLCDSTTDTEKLRSYLLEIINYIVWDSKTSTLKINLFNASSHVPIGGIRRQKDNLSFGNSSR

SEQ ID NO: 45112 - DNA, 50 bp, Clostridium botulinum
  source 1..50: mol_type = genomic DNA
acttgtcttttggtaatagttccagatgctcgtatgttcaaaacacaagt

SEQ ID NO: 45113 - DNA, 40 bp, Clostridium botulinum
  source 1..40: mol_type = genomic DNA
ttccaccggtcaaggtgctgataaaaccatgcaacaagtt

SEQ ID NO: 45114 - DNA, 50 bp, Clostridium botulinum
  source 1..50: mol_type = genomic DNA
acttgtcttttggtaatagttccatatgctcgtatgttcaaaacacaagt

SEQ ID NO: 45115 - DNA, 40 bp, Clostridium botulinum; identical to SEQ ID NO: 14075
  source 1..40: mol_type = genomic DNA

SEQ ID NO: 45116 - protein, 554 aa, Clostridium haemolyticum
MIAAIYARKSMETDKGESIENQIHLCKEFGTHAGATDFLYYKDEGFSGGNTNRPKFKEMIQAAKSNKFSMLICYRLDRISRNVADFSSTLETLQKHNIDFVSIKEHFDTSTPIGRAMVYIASVFAQLERETIAERIRDNMFELAKTGRWLGGTTPLGFKSEAINYIDFNGKNKKMYKLIEIPEEINLVKLIFNLYLEKKGFPSVANYLCSHKYKGKNGGEFSQGTIKQIIENPVYTYADEKIYKYFKDKGAILCGNFDENHGVITYNKKEKGKKTNPINEWIISVGKHKGIISSDVWIKCQNINSLNSKKSSPRSATGNKFLLSGLLVCNECGSTMGSWSRNNPKSGKYEKYYRCNLKNRASNRCSSKMLNAYKAEDLVLSSIKGVTLNDLIEAYDDIINNKNSLTSIKEKQNKLSKEIENNNKIIHGLIRKLALLDDDPTIISEFKKEINNLNKQNTSLKKEVNSLEKSIKNTNSNANSIDEINSKIKNFKTLCDSTTDTEKLRSYLLEIINYIVWDSKTSTLKINLFNASSNVPVGGIRRQKYNLSFGNSSR

SEQ ID NO: 45117 - DNA, 50 bp, Clostridium haemolyticum
  source 1..50: mol_type = genomic DNA
acttgtcttttggtaatagttccagatgctcctatgttgaaaacacaagt

SEQ ID NO: 45118 - DNA, 40 bp, Clostridium haemolyticum
  source 1..40: mol_type = genomic DNA
ttccactggtcaaggtgctgataaaactatgcaacaagtt

SEQ ID NO: 45119 - DNA, 50 bp, Clostridium haemolyticum
  source 1..50: mol_type = genomic DNA
acttgtcttttggtaatagttccatatgctcctatgttgaaaacacaagt

SEQ ID NO: 45120 - DNA, 40 bp, Clostridium haemolyticum; identical to SEQ ID NO: 14075
  source 1..40: mol_type = genomic DNA

SEQ ID NO: 45121 - protein, 540 aa, Clostridium innocuum
MKQPYNTTIYNTALYLRLSRDDELQGESGSIQTQRMMLRQYAAEHGLTVVDEYIDDGWSGTNFERPSFQRMIDDIEDGKINCVVTKDLSRLGRNYILTGQYTEIYFPSKGVRYIAINDNVDTINGESELAPFLNILNEMHARQTSKKVKAAMHTRFANGAHYGAYAPLGYVKDPDKKGHLLIDPETRWIVEKIFDLAVHGRGAASITRILVEEKVPTPGWLNYERYGTFANIYAGAPAEKAYAWTIAQVKSILKEETYIGHSIHNKQSNISFKNKKKVRKPQEEWYRVENTHEAIISEEVFQKVQELIASRRRKRRNGTTQIFAGLIKCADCGWSLAYGENKQNKNPYGYYHCSKNGQGLRQCSMHYIRYDVLYAYVLARLQYWSMLAQKDEDKLLKRLLNASDRERNSAKKKQAAELKKAEKRKAEVDGLFAKMYEDWSAGRITEYNFNMLSEKYQNEQKELETKIRQLHETMEAAVQTAADAEKWIALMKQYVNPVALTAELLNTLIEKITVHEAVKGEDGSREQEVEIYYRFIGKID

SEQ ID NO: 45122 - DNA, 50 bp, Clostridium innocuum; identical to SEQ ID NO: 3657
  source 1..50: mol_type = genomic DNA

SEQ ID NO: 45123 - DNA, 40 bp, Clostridium innocuum; identical to SEQ ID NO: 32748
  source 1..40: mol_type = genomic DNA

SEQ ID NO: 45124 - DNA, 50 bp, Clostridium innocuum; identical to SEQ ID NO: 3659
  source 1..50: mol_type = genomic DNA

SEQ ID NO: 45125 - DNA, 40 bp, Clostridium innocuum
  source 1..40: mol_type = genomic DNA
gagttccaactgggaaagttttactgccaagcagggaacc

SEQ ID NO: 45126 - protein, 583 aa, Citrobacter freundii
MKKLYSYIRWSSQKQTVGTSLARQTEAARNYATENGLEYAEIRDAGISAFKGKNITHGALGSFIQAVKDGVIEKDSTIFIENLDRLTRSGVGTAQKLLLDLLDLGLTVVTGMDQRVYTMESANENPTDMLISLLMFSRANEESKTKQNRTNNTARALVARFKQGQPTNIKNMSNDPWWFDSSGSKYEAVKPHPVHWVAAQKAVELFLMGWGCFRVTAYLNSHLDLYPAPKPTKRQIDQGVKKWAVPNLVTMRKNPALMGVKKLTIEGYEHKLDGYYPALVTPEQFARIQDIRTGNKFVQGEQKKMISLLSGLGVLKCGLCGGPMIAYSREGRLRYVCSNGKIQKSSCKVWSVNGSIVENLTARALVYGYTHSILLGNTKTEDLTPLIESKETELGLVKKQLTNQAQAISTIGPIQELIEQVAVLSQREQSLLLELDSLKQKLALQGSENELDELIIKTLSLFSDELLGDVTHTDRMQIREVVRKCLPEITISKLKDKALRIDFRFHDYSYMTFQGVMQGKEKSYTLTRTPHDQLYTKIAAVFSDVLETSLDATDIDGYMAASDRMVAALGLPEPLGRDFFSKR

SEQ ID NO: 45127 - DNA, 50 bp, Citrobacter freundii; identical to SEQ ID NO: 37612
  source 1..50: mol_type = genomic DNA

SEQ ID NO: 45128 - DNA, 40 bp, Citrobacter freundii
  source 1..40: mol_type = genomic DNA
aagagtgtgcattaatggcaagaccgaaatgatgattctc

SEQ ID NO: 45129 - DNA, 50 bp, Citrobacter freundii; identical to SEQ ID NO: 42274
  source 1..50: mol_type = genomic DNA

SEQ ID NO: 45130 - DNA, 40 bp, Citrobacter freundii
  source 1..40: mol_type = genomic DNA
gagagtatgcatgaatgtccagttggaaatgttaattctt

SEQ ID NO: 45131 - protein, 583 aa, Citrobacter freundii; identical to SEQ ID NO: 37621

SEQ ID NO: 45132 - DNA, 50 bp, Citrobacter freundii; identical to SEQ ID NO: 37612
  source 1..50: mol_type = genomic DNA

SEQ ID NO: 45133 - DNA, 40 bp, Citrobacter freundii; identical to SEQ ID NO: 45128
  source 1..40: mol_type = genomic DNA

SEQ ID NO: 45134 - DNA, 50 bp, Citrobacter freundii; identical to SEQ ID NO: 42274
  source 1..50: mol_type = genomic DNA

SEQ ID NO: 45135 - DNA, 40 bp, Citrobacter freundii; identical to SEQ ID NO: 45130
  source 1..40: mol_type = genomic DNA

SEQ ID NO: 45136 - protein, 583 aa, Citrobacter freundii; identical to SEQ ID NO: 37611

SEQ ID NO: 45137 - DNA, 50 bp, Citrobacter freundii; identical to SEQ ID NO: 37612
  source 1..50: mol_type = genomic DNA

SEQ ID NO: 45138 - DNA, 40 bp, Citrobacter freundii; identical to SEQ ID NO: 45128
  source 1..40: mol_type = genomic DNA

SEQ ID NO: 45139 - DNA, 50 bp, Citrobacter freundii; identical to SEQ ID NO: 42274
  source 1..50: mol_type = genomic DNA

SEQ ID NO: 45140 - DNA, 40 bp, Citrobacter freundii; identical to SEQ ID NO: 45130
  source 1..40: mol_type = genomic DNA

SEQ ID NO: 45141 - protein, 583 aa, Citrobacter freundii
MKKLYSYIRWSSQKQTVGTSLARQTEAARKYATENGLEYAEIRDAGISAFKGKNITHGALGSFIQAVKDGVIEKDSTIFIENLDRLTRSGVGTAQKLLLDLLDLGLTVVTGMDQRVYTMESANENPTDMLISLLMFSRANEESKTKQNRTNNTARTLVARFKQGQPTNIKNMSNDPWWFDASGSKYEAVKPHPVHWVAAQKAVELFLMGWGCFRVTAYLNSHLDLYPAPKPTKRKIEQGVKKWAVPNLVTMRKNPALMGVKKLTIEGYEHKLDGYYPALVTPEQFARIQDIRTGNKFVQGEQKKMISLLSGLGVLKCGLCGGPMIAYSREGRLRYVCSNGKIQKSSCKVWSVNGSIVENLTARALVYGYTHSILLGNTKAEDLTPLIESKETELGLVKKQLTNQAQAISTIGPIQELIEQVAVLSQREQSLLLELDSLKQKLALQGSENELDELIIKTLSLFSDELLGDVTHTDRMQIREVVRKCLPEITISKLEDKALRIDFRFHDYSHMIFQGVMQGNEKSYMLTRTPHDQLYTKIAAIFSGVLETSLDASDIDGYMTASDRMVAALGLPEPLGRDFFSKR

SEQ ID NO: 45142 - DNA, 50 bp, Citrobacter freundii
  source 1..50: mol_type = genomic DNA
attcgcatcaatcataattatggcaagccataatttaaatagatgccaat

SEQ ID NO: 45143 - DNA, 40 bp, Citrobacter freundii; identical to SEQ ID NO: 45128
  source 1..40: mol_type = genomic DNA

SEQ ID NO: 45144 - DNA, 50 bp, Citrobacter freundii
  source 1..50: mol_type = genomic DNA
attcgcatcaatcataattatggccagccataatttaaatagatgccaat

SEQ ID NO: 45145 - DNA, 40 bp, Citrobacter freundii; identical to SEQ ID NO: 45130
  source 1..40: mol_type = genomic DNA

SEQ ID NO: 45146 - protein, 583 aa, Citrobacter freundii
MKKLYSYIRWSSQKQTVGTSLARQTEAARNYATENGLEYAEIRDAGISAFKGKNITHGALGSFIQAVKDGVIEKDSTIFIENLDRLTRSGVGTAQKLLLDLLDLGLTVVTGMDQRVYTMESANENPTDMLISLLMFSRANEESKTKQNRTNNTARALVARFKQGQPTNIKNMSNDPWWFDSSGSKYEAVKPHPVHWVAAQKAVELFLMGWGCFRVTAYLNSHLNLYPAPKPTKRQIDQGVKKWAVPNLVTMRKNPALMGVKKLTIEGYEHKLDGYYPALVTPEQFARIQDIRTGNKFVQGEQKKMISLLSGLGVLKCGLCGGPMIAYSREGRLRYVCSNGKIQKSSCKVWSVNGSIVENLTARALVYGYTHSILLGNTKTEDLTPLIESKETELGLVKKQLTNQAQAISTIGPIQELIEQVAVLSQREQSLLLELDSLKQKLALQGSENELDELIIKTLSLFSDELLGDVTHTDRMQIREVVRKCLPEITISKLKDKALRIDFRFHDYSHMTFQGVMQGKEKSYTLTRTPHDQLYTKIAAVFSDVLETSLDATDIDGYMAASDRMVAALGLPEPLGRDFFSKR

SEQ ID NO: 45147 - DNA, 50 bp, Citrobacter freundii; identical to SEQ ID NO: 37612
  source 1..50: mol_type = genomic DNA

SEQ ID NO: 45148 - DNA, 40 bp, Citrobacter freundii; identical to SEQ ID NO: 45128
  source 1..40: mol_type = genomic DNA

SEQ ID NO: 45149 - DNA, 50 bp, Citrobacter freundii; identical to SEQ ID NO: 42274
  source 1..50: mol_type = genomic DNA

SEQ ID NO: 45150 - DNA, 40 bp, Citrobacter freundii; identical to SEQ ID NO: 45130
  source 1..40: mol_type = genomic DNA

SEQ ID NO: 45151 - protein, 583 aa, Citrobacter freundii
MKKLYSYIRWSSQKQTVGTSLARQTEAARNYATENGLEYAEIRDAGISAFKGKNITHGALGSFIQAVKDGVIEKDSTIFIENLDRLTRSGVGTAQKLLLDLLDLGLTVVTGMDQRVYTMESANENPTDMLISLLMFSRANEESKTKQNRTNNTARALVARFKQGQPTNIKNMSNDPWWFDSSGSKYEAVKPHPVHWVAAQKAVELFLMGWGCFRVTAYLNSHLDLYPAPKPTKRQIDQGVKKWAVPNLVTMRKNPALMGVKKLTIEGYEHKLDGYYPALVTPEQFARIQDIRTGNKFVQGEQKKMISLLSGLGVLKCGLCGGPMIAYSREGRLRYVCSNGKIQKSSCKVWSVNGSIVENLTARALVYGYTHSILLGNTKTEDLTPLIESKETELGLVKKQLTNQAQAISTIGPIQELIEQVAVLSQREQSLLLELDSLKQKLALQGSENKLDELIIKTLSLFSDELLGDVTHTDRMQIREVVRKCLPEITISKLKDKALRIDFRFHDYSHMTFQGVMQGKEKSYTLTRTPHDQLYTKIAAVFSDVLETSLDATDIDGYMAASDRMVAALGLPEPLGRDFFSKR

SEQ ID NO: 45152 - DNA, 50 bp, Citrobacter freundii; identical to SEQ ID NO: 37612
  source 1..50: mol_type = genomic DNA

SEQ ID NO: 45153 - DNA, 40 bp, Citrobacter freundii; identical to SEQ ID NO: 45128
  source 1..40: mol_type = genomic DNA

SEQ ID NO: 45154 - DNA, 50 bp, Citrobacter freundii; identical to SEQ ID NO: 42274
  source 1..50: mol_type = genomic DNA

SEQ ID NO: 45155 - DNA, 40 bp, Citrobacter freundii; identical to SEQ ID NO: 45130
  source 1..40: mol_type = genomic DNA

SEQ ID NO: 45156 - protein, 633 aa, Roseburia hominis
MAGIRTENKIYEVGIYCRLSKDDGTDNESASIATQKSILTDYVKRQGWHLAKTYVDDGYSGTNFQRPSFQNMIKDIENGLINCVITKDLSRLGRNYLDCGLYLEVFFPEHNVRYIAVNDGVDTLNKSAMDITPFRNILNEMYSADVSVKIKSAYRARFQQGKFMGTTAPYGYVKDPADHNHLLIDDKVAHVVREIFDLALAGNGIAKIRKHINKQHILRPAAYAVEQGATGYERYFEDNEENRYIWSENSVRGILRSPIYAGNLAGYKRIAANMKSKKRPSKLPEEWEVIPDTHEGIVTQEEFDTVQQLMTSRRREQNAGGFENIFSGVIKCADCGYAMRAASANRRKRPDIIDCVQYTCNNYGRYGNVMCTAHSIEARDLFNAVLADINRFADMAVNDEKAVRAIERRLTETDQSRAKSLEKEKKKLNKRLAELDRLFSSLYEDKVMERITERNFEMMSGKYQKEQLEIEARLKEVTETLNDSYEKSQGVRDFLSLIRNYQGLKELDATIINALIDKILVSEREKLADGTVRQEIKIYYKFIGFVGELHITPTKRWTALKPKNCTVCGVEYVPSSGISKYCPACAKRIQREKSNESKRRSRERNRRACIELSAKNDRLTLNSRKVVFYDREI

SEQ ID NO: 45157 - DNA, 50 bp, Roseburia hominis
  source 1..50: mol_type = genomic DNA
aaaggcgaatcacacaagccagcgttgcttcggatatggaatacttaaag

SEQ ID NO: 45158 - DNA, 40 bp, Roseburia hominis
  source 1..40: mol_type = genomic DNA
gaggactgttataaagagcttaccgtctggaggacaatat

SEQ ID NO: 45159 - DNA, 50 bp, Roseburia hominis
  source 1..50: mol_type = genomic DNA
aaaggcgaatcacacaagccagcgtcgcttcggatatggaatacttaaag

SEQ ID NO: 45160 - DNA, 40 bp, Roseburia hominis
  source 1..40: mol_type = genomic DNA
gagctctgttatgaagggctctgcctctgaaggacgttat

SEQ ID NO: 45161 - protein, 469 aa, Ruminococcus bromii
MLADIEAGKVGTVIVKDMSRLGRNYLQVGFYTEMLFPQKGVRFIAVNDNVDSASEGMDNDFTPLRNLFNEWLVRDTSKKIKAVKKSKGMSGKPVTSKPVYGYVMDEDENFIIDEEAAPVVQQIYQLCLAGNGPTKIARMLTEQQIPTPGTLEYQRTGSTRRYHPGYECKWATNTVVHILENREYTGCLVNFKTEKPSYKVKHSIENPVEKQAIFENHHEPIIDKETWERVQELRKQRKRPNRYDEVGLFSGILFCADCGHVLYQQRYQNKDRKQDCYICGSYKKRTRNCTAHFIRTDLLTAGVLANLRQVTEYAAKHESRFVKLLVQQNEIGGKRKTAAAIKQLEQAQERISEISRIIKRLYEDNVNGKISDERFMELSADYEAEQAELKKRAAALQAELDKSQAATVNAEKFMGIVRKHLAFEELTPTLLREMIEKIVVHECSYDENGTRRQDIEIYYSFVGKIDLPE

SEQ ID NO: 45162 - DNA, 50 bp, Ruminococcus bromii; identical to SEQ ID NO: 13577
  source 1..50: mol_type = genomic DNA

SEQ ID NO: 45163 - DNA, 40 bp, Ruminococcus bromii
  source 1..40: mol_type = genomic DNA
atattactactcccgacggaaagcggatgggatataaaac

SEQ ID NO: 45164 - DNA, 50 bp, Ruminococcus bromii; identical to SEQ ID NO: 35759
  source 1..50: mol_type = genomic DNA

SEQ ID NO: 45165 - DNA, 40 bp, Ruminococcus bromii
  source 1..40: mol_type = genomic DNA
atattacaactacctacaggtagaagatgggaagataaac

SEQ ID NO: 45166 - protein, 576 aa, Faecalibacterium sp An121
MVTNEKSYVNIEPCTMGLSADQHVKEDVMLDQQKITILYCRLSNEDALDGESNSIQNQRELLTRYAQDHGYTNLKVLVDDGYTGTNFNRPGVKEGLELVKQGEVGCWIVKDMSRFGRDYLTVGQYTEIIFPSYDVRFIAVNDGVDSNRGDSEGITAIRNLFNEWYPRDTSKKVRVSLRQRGTSGKHMGKPPYGYRRDPEDKEQWILDEDAAPVVKRIFDLTIAGKGPSQIARILERDEVLTAKALYARRKGKPLPDQPYHWGEQSIVGILERMEYTGCVCNFKTYSKSYKLKKRIPNKQEDMFILPDTQEAIVSQEQWDRVQELRQNKRRPTKAERQGFFAGLLYCADCGSKLHFATSKSFEGKQDHYVCAKYKSGRGTCSAHYIREETLRDAVLERIRAVNEYIRKDAEGFQEEWLQCRRADQERGIREDKKRLAQAKKRLADLDVLISRCYEDSVLGNLSMERYKKMSADYEAEQERLKLEIEVTEEWVQQQEEMDTNLDSFIALTEKYVDVPELTQTIVNEYIKKIVVFPPDKSSGKRRQKIKIYFNFLDEVEIPALEQSVTLEQTCGRRKTA

SEQ ID NO: 45167 - DNA, 50 bp, Faecalibacterium sp An121
  source 1..50: mol_type = genomic DNA
atagttacttgtcactattagcccttggcttgatagtgataaggaactaa

SEQ ID NO: 45168 - DNA, 40 bp, Faecalibacterium sp An121
  source 1..40: mol_type = genomic DNA
gcagaaacgccagaaacccttggccttggtgtccttgcgg

SEQ ID NO: 45169 - DNA, 50 bp, Faecalibacterium sp An121
  source 1..50: mol_type = genomic DNA
atagttacttgtcactattagccctgggcttgatagtgataaggaactaa

SEQ ID NO: 45170 - DNA, 40 bp, Faecalibacterium sp An121
  source 1..40: mol_type = genomic DNA
tcagggacttgagcatccctggactttggtgtccttgcgg

SEQ ID NO: 45171 - protein, 547 aa, Vibrio mediterranei
MLAYSYKRFSSKHQAQGNSIERQTKLAEDYCAKHQLELSTLSFEDLGVSAWTQANTKEDAGLGQFLSALENEVIKTPCYLLVESLDRLSRAKIKVAMNQLWRITDYDVTVVTLLDQKKYTKDMDFTDFLMAGLIMERSHEESLTKSMRLKAAWAKKRSRQDMHSKAPFWLDRVKGDPDRPDGYYLNKHQATVERIFEMASDGLGHYTITGILNKEQIPSPTGRDWNGSSVSNLLRYRQVIGEYQPCTVENKIATPIGEPIKDYYPSAISEELFNKVQLGINQRLKKYKTHRGGSTTTHRNVLRDVGKCSCGKYLSLVKKRSRYYLQCIGNRSSVCSIRAIQMDAFEKFLRQYFISPMFHNQWVSADQANLDIEREINRLRLEQEESNKALQGLLSVIESNPNPLILQKVSELSASVKERSDTIAEFEDSKGSGNKRQSLEETVKLLDLAFSPEDNSEIIKARVKLKQLLNACFDYFEMTRVDSDNGKVLWYSIELGFKGDSFKYKSIDAPTALQNAKRREIWFVPSSKEKIVLTEEQKAQVIEQHKI

SEQ ID NO: 45172 - DNA, 50 bp, Vibrio mediterranei
  source 1..50: mol_type = genomic DNA
tgtggttctagtatgtaatagatgttattgtcttggatactagaccccct

SEQ ID NO: 45173 - DNA, 40 bp, Vibrio mediterranei
  source 1..40: mol_type = genomic DNA
atggatagcagaggaaaccttgttaacattctgtccaccg

SEQ ID NO: 45174 - DNA, 50 bp, Vibrio mediterranei
  source 1..50: mol_type = genomic DNA
tgtggttctagtatgtaatagatggtattgtcttggatactagaccccct

SEQ ID NO: 45175 - DNA, 40 bp, Vibrio mediterranei
  source 1..40: mol_type = genomic DNA
attagtagcagaagatactgtgttaacatcctgtcccaca

SEQ ID NO: 45176 - protein, 550 aa, Acidovorax avenae
MRFSDPSQAAGHSRERQEAYASKWAAEHGLQLDNKLTMLDEGLSAYHQRHVTSGALGAFLAGVQAGRIEAGSVLVVEGLDRLSRAEPIQAQAQLAQIVNAGITVVTASDGKAYSRERLKANPMDLVYSLLLMIRAHEESDTKSKRVKASIRWLCEGWQAGTYRGRIRQGHDPEWLREVPGGPNNGWELVPERVAAVRRAVALYVQGAGGLRIMQVLDAEGLQLYTTSKNHAPQFYRLIKMPQLVGNVSVRVDGEEFLLEGYYPGVLSRAEWEELCRVRAQSGRRRVKGDLPHVITGIGITTCGYCGRAMCGQNLASKKRLPDGRIRDGYRRLLCGSNASYGDGCSVKASTSVAPIERALMKYCSDIINLQALFGAEGIDAPRARAASARAKVAEINAQLEKVTDAMLATSSEGTPQVFARRARALEKDLHDAESALRDAELELGKISRRDLRGADQAWRDLAAGVEAQDVEARLRARQLVADTFERIVIYARGIRPDPAASGRDYCIDVVLVGRGGNSRLLQIDREGNLLQAEDFAHLQAIEVEPPRHST

SEQ ID NO: 45177 - DNA, 50 bp, Acidovorax avenae; identical to SEQ ID NO: 19132
  source 1..50: mol_type = genomic DNA

SEQ ID NO: 45178 - DNA, 40 bp, Acidovorax avenae
  source 1..40: mol_type = genomic DNA
atccgtgagggccttcgggcagccgaggctcacgaacccg

SEQ ID NO: 45179 - DNA, 50 bp, Acidovorax avenae
  source 1..50: mol_type = genomic DNA
gagataaataggttggcttttgggcccccaaggcttaccatacctatacg

SEQ ID NO: 45180 - DNA, 40 bp, Acidovorax avenae
  source 1..40: mol_type = genomic DNA
aaccgtcggtgccggcgggcccccgaagctcccgatcccg

SEQ ID NO: 45181 - protein, 440 aa, Colwellia sp
MALSAYHGKQLNGDLGLFLEAVKADVYPVGTVLLVEAIDRLGRTDTSQMIHILTGIINAGISIVTLEDGMTYNVHALNGGALYTFSGKIQQAHDYSEKLSKRIKASWNIKKKNAKEHGIRPIFGFPFWLDKAGELKPECQPLLEQMFTDYLSGLGQTRIAERLRFDESGLLPAITAKTVKKTLANEMVIGLWNEAEVFPKAISPTLFYQVQEELKKRSFTPVVTPRALFFSGIAKCECGTNLTFATDFKRGYTNSRCNKRTRRKESCDNSRSIAYKVFEYIHEQCSDNWKYLLLERQQQTDNDSELQALDGLITALEAKVNKVLDILIETPSQRLQKRLTDIESELEKQIKQRHTLTVETTLAPDFITTGEQELLNDEALLSSTLIKCNYEITSHKDGTLAVNFDDVQYKYEVLKGFKKNGVSAYKTRLINHSLNYCTWL

SEQ ID NO: 45182 - DNA, 50 bp, Colwellia sp
  source 1..50: mol_type = genomic DNA
ccatttaataatgattacccactataaggctatagacccacattgtataa

SEQ ID NO: 45183 - DNA, 40 bp, Colwellia sp
  source 1..40: mol_type = genomic DNA
cactatctatgctcaccttcaagcctcggggttgattaat

SEQ ID NO: 45184 - DNA, 50 bp, Colwellia sp
  source 1..50: mol_type = genomic DNA
ccatttaataatgattacccactagcaggctatagacccacattgtataa

SEQ ID NO: 45185 - DNA, 40 bp, Colwellia sp
  source 1..40: mol_type = genomic DNA
ccctttctaaccttcccttgcagtcacgtggatgattaat

SEQ ID NO: 45186 - protein, 515 aa, Bacillus anthracis
MKTAIYLRKSRADLEAEARGEGETLAKHRTTLLKIAKEMNLNVLSVREEIVSGESLVKRPEMLALLEEIEDNKYDVVLCMDMDRLGRGGMKEQGIILETFKRSNTKIMTPRKTYDLNDEWDEEYSEFEAFMARKELKIITRRMQRGRVASVEAGNYLGTHAPFGYDIHRLNKRERTLTINPEEASVVRMIFDWYANEDMGANAIRSKLNDLGYKSKLGNEWNPYSILDILKNNVYIGKVTWQKRKEVKRPDAVKRSCARQNKSDWIIADGKHEPIIPESLFEQVQEKLNSRYHIPYNTNGIKNSLAGIIKCAKCGYSMVQRYPKHRKETMDCKHRGCENKSSYTELIEKRLLEALKEWYINYKADFEKHKQDDKLKETQVIQMNEAALRKLEKELVDVQKQKNNLHDLLERGVYTVDMFLERSNVVSDRITEITSTMENLKKEIKTEIKKEKVKKDTIPQVEHVLDLYFKTDDPKKKNSLLKSVLEKAVYKKEKWQRLDDFELVLYPKLPQDGDI

SEQ ID NO: 45187 - DNA, 50 bp, Bacillus anthracis
  source 1..50: mol_type = genomic DNA
tgtcgtcaccttattggtgtaattaggttgacgccaacagggtgataaca

SEQ ID NO: 45188 - DNA, 40 bp, Bacillus anthracis
  source 1..40: mol_type = genomic DNA
tgtggccattaggcgcatgaggtttaccccatttaatcct

SEQ ID NO: 45189 - DNA, 50 bp, Bacillus anthracis
  source 1..50: mol_type = genomic DNA
tgtcgtcaccttattggtgtaattgtgttgacgccaacagggtgataaca

SEQ ID NO: 45190 - DNA, 40 bp, Bacillus anthracis
  source 1..40: mol_type = genomic DNA
tgaggctattaggtgcatggtgtttagaatatttatactt

SEQ ID NO: 45191 - protein, 537 aa, Enterococcus faecalis; identical to SEQ ID NO: 36661

SEQ ID NO: 45192 - DNA, 50 bp, Enterococcus faecalis
  source 1..50: mol_type = genomic DNA
ttacgtccatttgacatatcatcgtctgacgaaaagacgaatagacgtag

SEQ ID NO: 45193 - DNA, 40 bp, Enterococcus faecalis
  source 1..40: mol_type = genomic DNA
ctacaccagaagcaccaactccgttaatcaccacacgtaa

SEQ ID NO: 45194 - DNA, 50 bp, Enterococcus faecalis
  source 1..50: mol_type = genomic DNA
ttacgtccatttgacatatcatcgcttgacgaaaagacgaatagacgtag

SEQ ID NO: 45195 - DNA, 40 bp, Enterococcus faecalis
  source 1..40: mol_type = genomic DNA
ctacatcaggagtacccaccttgtcactcaccagacctat

SEQ ID NO: 45196 - protein, 479 aa, Microbispora rosea
MKPQRAVLLLRISDDKSGDAAGVGRQEEDGRRLAVRLGWGIGHIIVENDTSAFKRRKIRLPDGTTALRTVRPGFRRGLDLLASGEADGLLAYDLDRVARDPRDLEDLIDVVESRTPRVPVESVSGSLRLANDADVTMARVMVAVANKASRDTARRVSRKHEQLAEQGRPGGGGIRAFGYERDGVTIRESEAEVVRWMAQAVLDGQSLNGISRELQARGVSTVRGGEWNIRSVWSTLTGPKIAGLRKFRGEIVGKGTWPAILDMDTWERVRQRISDRALGTSNKLVRWLTGSLWCPLCGGRLIGNSVTSTRRNVGPIYWCSTERGGCGKISVRASHAESEVERRLLDYLERPEVFQALASAASGDSMEQLRAEVAEDEQQLKDLARMWATKQITLGEYSEARRIIDQRIKDARMYLVASAPRLLRSLLAGDARAGWVEMEPVDRRDVLAAVIPDGFWVFPAEKRRVFDPNRIRLRQVSEE

SEQ ID NO: 45197 - DNA, 50 bp, Microbispora rosea
  source 1..50: mol_type = genomic DNA
acacgtcacacggacggtttcggggaccctaagcggatgagtcacgtgta

SEQ ID NO: 45198 - DNA, 40 bp, Microbispora rosea
  source 1..40: mol_type = genomic DNA
ggaggtcccaggcatcggagacaggaagttcgccgagatg

SEQ ID NO: 45199 - DNA, 50 bp, Microbispora rosea
  source 1..50: mol_type = genomic DNA
acacgtcacacggacggtttcgggcaccctaagcggatgagtcacgtgta

SEQ ID NO: 45200 - DNA, 40 bp, Microbispora rosea
  source 1..40: mol_type = genomic DNA
gtaggtcccaggaataggacaaaggacatcagcttagatg

SEQ ID NO: 45201 - protein, 484 aa, Collinsella stercoris
MVRNRAAIYARFSSHNQRSESIEIQVENSRRYCEQEGLQVVREYCDYAQTGRNVDRAEFQRMMRDAKLGLFDYVVIYKVTRIMRNRDEMALARIMLRKSGVEILYAGEEIASGSSGVLQLGMLEVLAEWESAIDSERIRDGIQKNAQRCMANGRTLYGWDIVEGRYVVNEREAAVMRRMKNMLFSGSSVADIVRAVSAERSKRGAKFTNDTVSKLLRRVQNAGVYKYAGNEVEGGMPALWPQREQYMINSILDDRHRPRRKIDSAREFPLTGKLYCSTCGAPMFGTSGTSKNGSAYHYYKCRECRRTVRRDLIEGAVADMTYEAVKRNDVRTRIAETLAGYEAEQGSDEKPESYFIKKEIRRIDTTFERIWHAIEDGIAPPGGKERIEELNRQKSELEARLCAIEKSESCEVSVDDVLLWLDSLANDTTPLEILNEWVRFVDIDGKDISVYFMFDDLPDDFNPTKKKAEHPCYQRCSTNSLMVE

SEQ ID NO: 45202 - DNA, 50 bp, Collinsella stercoris
  source 1..50: mol_type = genomic DNA
aaggtgttcgactaattctcttatggtggagctaatgagaaaaacggcga

SEQ ID NO: 45203 - DNA, 40 bp, Collinsella stercoris
  source 1..40: mol_type = genomic DNA
ccggccttcgttctcatatggtggaggttagggggatcga

SEQ ID NO: 45204 - DNA, 50 bp, Collinsella stercoris; identical to SEQ ID NO: 45202
  source 1..50: mol_type = genomic DNA

SEQ ID NO: 45205 - DNA, 40 bp, Collinsella stercoris
  source 1..40: mol_type = genomic DNA
tcttgctgtgtcctcacatggtggaggtcagggggataga

SEQ ID NO: 45206 - protein, 535 aa, Bacteroides pectinophilus
MNSYDISFRPEEVIQYLRKSRSDDPNMTIEEVLEKHEHMLRDFAVNHFGAPVPDCNVYREVASSETIDGRPEMLRLLRAIESPDIRAVLVVDVQRLSRGDLEDAGRLMKLLRYTNTQVITPMKTYDLRDEWDRDIFERELKRGNEYLEYFKKIQARGRLQSVQEGNYLGSKPPYGYDRAVIRIGKKNCPTLAVNKEQADVVRLIYELYVNKDWGAQRIANHLDSLGIHPLHNAHWNPAVIKDILRNYHYIGKVVWNRRKTITVVDNQEVYKTRPWNENMLIFDGRHEAIISEELFHAALARQGRSHRCRPDTRVSNVFASILHCSCGYSMSLRHDGRGSLRLSCDDQRHCKSGSIGYEELIDYICKVLTAYIDDFKIKVKHDNANEVDIHRALVTDLEARLTALEAKEVKQWEVYSMEGMPRAIFDKLNKHVKEDKAEVERALKQARKDSPDPVDYRERIAKFGDALNALQNPAASAEIKNQYLKAIINDMIYTRPGAVRLTADNCSDYGINYRDMAKRGGWYSPPFRLEIKFRF

SEQ ID NO: 45207 - DNA, 50 bp, Bacteroides pectinophilus
  source 1..50: mol_type = genomic DNA
cacagttatcattgtggcgccggttcttccgtgcctcgatgttatatgtg

SEQ ID NO: 45208 - DNA, 40 bp, Bacteroides pectinophilus
  source 1..40: mol_type = genomic DNA
catctcgaggtgtgcaagttcttccgtgcctatatcagtc

SEQ ID NO: 45209 - DNA, 50 bp, Bacteroides pectinophilus
  source 1..50: mol_type = genomic DNA
cacagttatcattgtggcgccggtacttccgtgcctcgatgttatatgtg

SEQ ID NO: 45210 - DNA, 40 bp, Bacteroides pectinophilus
  source 1..40: mol_type = genomic DNA
catctccaggtcagcacggacctccgtgccttttgcagcc

SEQ ID NO: 45211 - protein, 525 aa, Bifidobacterium bifidum
MARKKKFAPNDNNLAIAYYRFSSHSQNDASIDQQRELAHDWADAHGFKIVKEYEDAAISGTTENRPGFQMMLSEVAKIRPHTLIMWKTDRLGRDKYVLAMAKKKIRDAGCEIHLLAEHIPTEGPEGVLIEGLMEAMAEYYSRQLSQNIQRGMDYNAQHALYNGHKLFGYDVDRSTKKYIPDPNTAPFVQWAFREYASGRPLKAIADKMNAQGLRTPRNAKFSVNMLNKMLKNRAYIGEYHHGDIVVAGGMPVLVDEATFDRAQRRFAENKRKGSQRAHGMGGSDAPRYWLTGKLYCGECGSTMQGVSGTSKTGRTYYYYYCSAQRRKECHLHKARKRDLEDMVLFALHNIVDDEENVTALALDAAEYYEKSHDDTAYLEALEAKRREVEKSLANLVKVIEKGVVSDTVTQRLTQLEEQKSALNDAIGTENVRVSLCEDRHSIQAYFDKFLHADVNDPEIRDQVFEYFVDKVYLYDDKLVVSVWFSEDDKQEITWRDWFSLDEYWTDESPFVKGEAAEFDCFPLGS

SEQ ID NO: 45212 - DNA, 50 bp, Bifidobacterium bifidum
  source 1..50: mol_type = genomic DNA
agttcgactgcttccccctcggctccaccagaagaggaagcgtcgaactc

SEQ ID NO: 45213 - DNA, 40 bp, Bifidobacterium bifidum; identical to SEQ ID NO: 32563
  source 1..40: mol_type = genomic DNA

SEQ ID NO: 45214 - DNA, 50 bp, Bifidobacterium bifidum
  source 1..50: mol_type = genomic DNA
agttcgactgcttccccctcggctttaccagaagaggaagcgtcgaactc

SEQ ID NO: 45215 - DNA, 40 bp, Bifidobacterium bifidum
  source 1..40: mol_type = genomic DNA
agttccaatctccttagctttgcagaactgaaaggcacct

SEQ ID NO: 45216 - protein, 525 aa, Bifidobacterium bifidum
MARKKKFAPNDNNLAIAYYRFSSHSQNEASIDQQRELAHEWADAHGFKIVQEYEDAAISGTTDARPGFQQMLSEVAKIRPHTLIMWKTDRLGRDKYVLAMAKKKIRDAGCEIHLLAEHIPTEGPEGVLIEGLMEAMAEYYSRQLSQNIQRGMDYNAQHALYNGHKLFGYDVDRSTKKYIPDPNTAPFVQWAFKEYASGKPLKAIAEEMNAQGLRTPRNAKFSVNMLNKMLKNRAYIGEYHHGDIVVAGGMPVLVDEATFDRAQRRFAENKRKGSQRAHGMGGSDAPRYWLTGKLYCGECGSTMQGVSGTSKTGRTYYYYYCSAQRRKECHLHKARKRDLEDMVLFALHNIVDDEENVTALALDAAEYYEKSHDDTAYLEALEAKRREVEKSLANLVKVIEKGVVSDTVTQRLTQLEEQKSALNDAIGTENVRVSLCEDRHSIQAYFDKFLHADVNDPEIRDQVFEYFVDKVYLYDDKLVVSVWFSEDDKQEITWRDWFSLDEYWTDESPFVKGEAAEFDCFPLGS

SEQ ID NO: 45217 - DNA, 50 bp, Bifidobacterium bifidum; identical to SEQ ID NO: 45212
  source 1..50: mol_type = genomic DNA

SEQ ID NO: 45218 - DNA, 40 bp, Bifidobacterium bifidum; identical to SEQ ID NO: 32563
  source 1..40: mol_type = genomic DNA

SEQ ID NO: 45219 - DNA, 50 bp, Bifidobacterium bifidum; identical to SEQ ID NO: 45214
  source 1..50: mol_type = genomic DNA

SEQ ID NO: 45220 - DNA, 40 bp, Bifidobacterium bifidum; identical to SEQ ID NO: 45215
  source 1..40: mol_type = genomic DNA

SEQ ID NO: 45221 - protein, 525 aa, Bifidobacterium bifidum
MARKKKFAPNDNNLAIAYYRFSSHSQNDASIDQQRELAHEWADAHGFKIVQEYEDAAISGTTDARPGFQQMLSEVAKIRPHTLIMWKTDRLGRDKYVLAMAKKKIRDAGCEIHLLAENIPTEGPEGVLIEGLMEAMAEYYSRQLSQNIQRGMDYNAQHALYNGHKLFGYDVDRSTKKYIPDPNTAPFVQWAFGEYASGKPLKTIAEEMNAQGLRTPRNAKFSVNMLNKMLKNRAYIGEYHHGDITVEGGMPVLVDEATFDRAQRRFAENKRKGSQRAHGMDDAEAPRYWLTGKLYCGECGSTMQGVSGTSKTGRTYYYYYCSAQRRKECHLHKARKQDLEDMVLFALHNIVDDEENVTALALDAAEYYEKSHDDTAYLEALEAKRREVEKSLANLVKVIEKGVVSDTVTQRLAQLEEQKSALNDAIGTENVRASLCEDRHSIQAYFDKFLHADVNDPEIRDQVFEYFVDKVYLYDDKLVVSMWFSEDDKQEITWRDWFSLDEYWTDESPFVKGGGVEFDCFPLGS

SEQ ID NO: 45222 - DNA, 50 bp, Bifidobacterium bifidum; identical to SEQ ID NO: 19387
  source 1..50: mol_type = genomic DNA

SEQ ID NO: 45223 - DNA, 40 bp, Bifidobacterium bifidum
  source 1..40: mol_type = genomic DNA
ggttcgaatccccttagctccacagaacagaacgcccctc

SEQ ID NO: 45224 - DNA, 50 bp, Bifidobacterium bifidum
  source 1..50: mol_type = genomic DNA
agttcgactgcttccccctcggctttaccaaaagaggaagcgtcgaactc

SEQ ID NO: 45225 - DNA, 40 bp, Bifidobacterium bifidum; identical to SEQ ID NO: 45215
  source 1..40: mol_type = genomic DNA

SEQ ID NO: 45226 - protein, 491 aa, Corynebacterium striatum
MADTTTQRAAIYARISLDKQEEAGVKRQIHLATKQAEADEAKVVATYVDNNISAFSGEFRPEYDKLIHAIENREIDVVYVYALDRLTRRTKDTLALFELCEKHNVTVKANRGYNIDPSDPASRLTIVILGLIAEQESIDRAARIRAAYEDRARTGRPKTGGRRMFGYEADAVTVIDEEAQAILDAAAMIIAGKTLRETVREIFHARELTATSGRSMTAPTLRDILLNPRVRGLSTFNPTDPDTGLRLVKDRQIVGKGTWPAIIDEVTGEKLDAVLRDPSRRRSHSGNAPRYFLASVLTCTCGDPMYSRSRKNKDGSPRRFYTCKRSEPGGTHVSIGAEVDDLIEAVILKRMEQPDAVDALRNALTPEDDALTERLQELAGQRNVLLAKREQFEEVAINEEIDMSTFARMSKKIESQIAAIDKEVRKLTASHDADPLAVELADGPDFAEWWGSASVEDRRRLTRLLMEIRILPGKAGAKQFDPHRVKIAWRQ

SEQ ID NO: 45227 - DNA, 50 bp, Corynebacterium striatum
  source 1..50: mol_type = genomic DNA
cgtacccacaagccgtgttcatgtaatccagaatgtggctttggggtacg

SEQ ID NO: 45228 - DNA, 40 bp, Corynebacterium striatum
  source 1..40: mol_type = genomic DNA
cggcgcgacgggtagtggaaagtccgagctcctgcgcacg

SEQ ID NO: 45229 - DNA, 50 bp, Corynebacterium striatum
  source 1..50: mol_type = genomic DNA
cgtacccacaagccgtgttcatgtgctccagaatgtggctttggggtacg

SEQ ID NO: 45230 - DNA, 40 bp, Corynebacterium striatum
  source 1..40: mol_type = genomic DNA
cggcgcggccggaggggcagcttcccagcccctgcgcgcg

SEQ ID NO: 45231 - protein, 601 aa, Photobacterium gaetbulicola
MNEQLPVSRPKAYSYLRFSTLRQKDGDSTRRQLELAREYAYRHDLSLQDTTIEDLGVSAFRGRNNREGALGEFLEAVREGHIERDSWLLVESVDRLSRQAVEDAYQLISGILALGITVVTLQDEQVYKQGKLDLGKLMILLVKAQTAFEESEKKSIRTAAAWKAARDDLANGKKIKNARIPSWVLWNDDKTDFLINEPVAKTVRYIFELSINGFASGIIAKRLNAEGYSMLTGKLPKWSAANVLAVQQDRGYIGEFTPMKKNPETGKREPIADPAANYYPVLINPEHFYEVQRQLKGRQRSSGSYRKGKMTNLFTGLIKCGCCGSAMAVHQKNKKADVKKYGQYYYLSCSRKTEKSCTSKPLNYRRLERLLVSSFTFLPSILDGNQNNNTQLSDARLEVIRLEQSQKEVQNKSDRLMAVLMERDSNELLLKQLDKLTEEQRTIDNDLKQAIANVEQLTGTLAYTDSKYNDIFTELNSFEAIGYVDWRTRFNTQLRRILLKIVVTTNDSYCDDGVTITCFDNQHYPIASLYGRRSLKKLFGISNNYDIFFAASDNDTAPLDLIGTNARRDNFAIAKSEDEIDQELFDSILEFTKGTSGFDLP

SEQ ID NO: 45232 - DNA, 50 bp, Photobacterium gaetbulicola
  source 1..50: mol_type = genomic DNA
tacggcactacctacaagattgtctcgcagttctttaggggagtgccgta

SEQ ID NO: 45233 - DNA, 40 bp, Photobacterium gaetbulicola
  source 1..40: mol_type = genomic DNA
cttcatcttcttgatggtatcgcagtttttgatgccgtaa

SEQ ID NO: 45234 - DNA, 50 bp, Photobacterium gaetbulicola
  source 1..50: mol_type = genomic DNA
tacggcactacctacaagattgtcgagcagttctttaggggagtgccgta

SEQ ID NO: 45235 - DNA, 40 bp, Photobacterium gaetbulicola
  source 1..40: mol_type = genomic DNA
attcatcttcttgatcgtagaaatgtttttgatacacata

SEQ ID NO: 45236 - protein, 490 aa, Megasphaera micronuciformis
MSKIAVIYARYSSDRQREESIEGQIRECKAYAKKNGITVIRVYCDRAMTGKTDKRPEFQAMIKDAKKQDFDYVLVYKLNRFARSRYDSARYKNVLKQHGIRVISAMENIAEDSSGILLESVIEGLAEYYSAELAENVLRGMTENALECKWPGGIVPLGFKLDKDKHLVIDDDKAFIVREIFQSIIDGKRTSTIIDELNARHLKTAAGKPFRKNSLEKILKNERYTGTFVWKDIHKENAIPAIITNDMFNAVQKILKNRKKTRSRVCSDNYLISGRLFCGLCHEKMIGMSGRSVTGLPYYYYACSNRRNRIGKCHTKNIRADKLEELVVDTTINILSDDTAIEYIAKQAIAAQEENRAQSSIPAIKEEIKELSKKLKNCVQAVENGIMSQTIAENIPMYEKRLVELNSELSDELEKDNDLKVDEDMIRFFFERLVQRTKKETKFKSLLLSTMVRCVVIYDDYIEIQYNYKKELPILTNPVRINSSILFAVV

SEQ ID NO: 45237 - DNA, 50 bp, Megasphaera micronuciformis
  source 1..50: mol_type = genomic DNA
ataaatagttcgattttgttcgctgtggtggaatgtagcgacctacaatc

SEQ ID NO: 45238 - DNA, 40 bp, Megasphaera micronuciformis
  source 1..40: mol_type = genomic DNA
tagttcgcttttgcattctctggtgggcgatgacaggatc

SEQ ID NO: 45239 - DNA, 50 bp, Megasphaera micronuciformis
  source 1..50: mol_type = genomic DNA
ataaatagttcgattttgttcgctttggtggaatgtagcgacctacaatc

SEQ ID NO: 45240 - DNA, 40 bp, Megasphaera micronuciformis
  source 1..40: mol_type = genomic DNA
tagctcactcttgaattcttttctgagcgaagccaggaac

SEQ ID NO: 45241 - protein, 556 aa, Bradyrhizobium ottawaense
MDAPPYTEAQTKAYSYVRFSTPSQAAGASLQRQSEKAAKYALEHGLTLDTELNMTDLGVSAFRGKNARTGALGEFLEAVRKGYVERGSYLLIENMDRLSRADIITAQALFSQLIVSGITVVTLTNFEAYSLARLEREPEALLLVVLELIRANKESVRKAQLIGDAKARKKKRLAEHGLEGKPYTRQTPAWIRWSEDDQRYTLIKERADLVREMFKRMDAGDGLERIARDFNQRGVPTWGRSGKQRTADHWRTSYIRKVLTSTAPIGTFTPHTTTHDEVTRARRDEPMAPVENLFPAAVDADTYWRVHRKLSTTAARGRNARQAPKSIVAGIVFCATCGHAVTRVAKGQYVYLVCSRANMRADGHPYQAVRYDTVEKALRENARRLVKDAPRGKSTAALEKLIERTQAEADGMETLASDLLQLIAEERGTPEATAASRKLREVEQRLKSLKKELRDLRAQRDTLTTASVKDRLKAVERALSGNTDTVEINGVLRDAIRRVVLDPEQGHLWVRWHHSDEVQDVPCATRHMSWEDFRETKPPMRALFPDHTHPTNTKEG

SEQ ID NO: 45242 - DNA, 50 bp, Bradyrhizobium ottawaense
  source 1..50: mol_type = genomic DNA
tgtcattgacgacctgcctttgcgattgcagagtgtgaatgccaacgcta

SEQ ID NO: 45243 - DNA, 40 bp, Bradyrhizobium ottawaense
  source 1..40: mol_type = genomic DNA
gggcttgccggccttcgccatcgtcggcctgccggacaag

SEQ ID NO: 45244 - DNA, 50 bp, Bradyrhizobium ottawaense
  source 1..50: mol_type = genomic DNA
tgtcattgacgacctgcctttgcgcctgcagagtgtgaatgccaacgcta

SEQ ID NO: 45245 - DNA, 40 bp, Bradyrhizobium ottawaense
  source 1..40: mol_type = genomic DNA
agggtggccggccttcgtcccctcaggccagcagggcaag

SEQ ID NO: 45246 - protein, 513 aa, Bacteroides dorei; identical to SEQ ID NO: 41806

SEQ ID NO: 45247 - DNA, 50 bp, Bacteroides dorei; identical to SEQ ID NO: 40042
  source 1..50: mol_type = genomic DNA

SEQ ID NO: 45248 - DNA, 40 bp, Bacteroides dorei; identical to SEQ ID NO: 29673
  source 1..40: mol_type = genomic DNA

SEQ ID NO: 45249 - DNA, 50 bp, Bacteroides dorei
  source 1..50: mol_type = genomic DNA
ttttgctcgtttgtcgccttctgttggctacactatcgaattatcgaaca

SEQ ID NO: 45250 - DNA, 40 bp, Bacteroides dorei
  source 1..40: mol_type = genomic DNA
ctcataaactttacggtattgggatgtggtgagtagaacg

SEQ ID NO: 45251 - protein, 480 aa, Brevibacillus thermoruber
MRIAAYIRVSTDEQADKGNSLQEQQERLTAYCKVMGWTSPTFYVDDGYSAKNLQRPAIQRLLDDVKANKIDVVLTSKLDRFCRNLLDLLQTVNLLEDHNCTFVSATESFDTSTAVGKMVLQLLGAFAEFERERISERVRDNMMSLKKNTGKAMTKPCFGYDVINGHYAINEKEAEYVRLMFDLAEQGNGYRMIAKILNEKGVTTKQGKMWDQVSVKRLLNNETLAGTMIYNKRKSKNNKTVLRDPSEWLVKENNHPAIIPLERFERVKAIMRSRSYANKHADSETYLFTGLLKCKHCGRNMKGSTSRHKTKYNEYTYYRYVCSSYVLGYGCKYHAAHRDDLEQVIIDQIKGLASGSIKELDYVVAASPTAEDEIKDLKARLARVDRRMQKQIEAYENDLISAQDLKAARERVENERNALTEQIKKLESQKGDIKALQQTAINMLPDITGADRGKAKAALRQLIHRIDIENSELASIIWKC

SEQ ID NO: 45252 - DNA, 50 bp, Brevibacillus thermoruber
  source 1..50: mol_type = genomic DNA
tttgtgcctcgaagtatgattggttctcctattgtacttcgaggcacgat

SEQ ID NO: 45253 - DNA, 40 bp, Brevibacillus thermoruber
  source 1..40: mol_type = genomic DNA
gtacaggtcggcaatcgggtcgcccttggcctggatgtac

SEQ ID NO: 45254 - DNA, 50 bp, Brevibacillus thermoruber
  source 1..50: mol_type = genomic DNA
tttgtgcctcgaagtatgattggtgctcctattgtacttcgaggcacgat

SEQ ID NO: 45255 - DNA, 40 bp, Brevibacillus thermoruber
  source 1..40: mol_type = genomic DNA
gcacagctcggggaacggggcggcctgggcctgcgtggac

SEQ ID NO: 45256 - protein, 565 aa, Mogibacterium sp
MYDQSNTAAVLQFPYAVMSTEAVTALYCRLSRDDELQGDSNSIINQKKILQKYALDHGWKNIRFYIDDGISGTTFNRPGFQEMIADIEAGIVKRVIIKDMSRLGRDYLQVGMYTEIMFPEHDVHFIAVNDGVDSKQGDNEFTPFRNIINEWYAKDTSKKIRAVMKVKGNAGEHLTTNAPYGYMKDPANPKQWVRDNDAANVVYDIGLYVMDGYGPSQIARLLKQRKILTPAAYYESKGINCNVKPQDDPYGWNASTVAHILDRWREYLGHTVNFKTTKKSYKSKKKIQNPESEWVIFENTHEPIWTESIADAVRLARQTRRRPTKMGEMGMFSGMMFCADCGSIMYQCRATGFRREQEYYLCAGYRKSRDICGSTHSIRTVILEELILQNLCKVVSYAREQEDQFVKMVMDMDEKERSKGLAKKKKLLTDAEKRISELDRIFKHLYEDNITGKLTDERFKKLSADYEAEQAALQTQANSLREEIQEEESKCANVERFLSIVRKYTEIPELTPHILHEFVEKIVVHAATDPHSKTNRKQEVDIYYKGIGILEMSRVFDIRQNEETA

SEQ ID NO: 45257 - DNA, 50 bp, Mogibacterium sp
  source 1..50: mol_type = genomic DNA
atgttttcttattgggacaccccgtgtgtgcgtacctaataagaaaacaa

SEQ ID NO: 45258 - DNA, 40 bp, Mogibacterium sp
  source 1..40: mol_type = genomic DNA
acaaagtaaaaggaagcggtgagtccgcttccttttactt

SEQ ID NO: 45259 - DNA, 50 bp, Mogibacterium sp
  source 1..50: mol_type = genomic DNA
atgttttcttattgggacaccccggttgtgcgtacctaataagaaaacaa

SEQ ID NO: 45260 - DNA, 40 bp, Mogibacterium sp
  source 1..40: mol_type = genomic DNA
gtaaagtaagaagatgccggtagtacacttgctttttctt

SEQ ID NO: 45261 - protein, 514 aa, Escherichia coli
MRKVYSYIRFSSTKQAFGDSHRRQSKAIQDWLASHPDHILDESLSFEDLGRSAFHGDHLKEGGALRAFLEAVKQGLIPPDSVLLVESLDRVSRQSISHAQETIRAILEQGITVVTLSDGETYNRQSLDDSLALIRMIILQERSHNESVIKSDRIKKVWSHKRQQFEQDGTKITGNCPGWLKLNSDGKSFSLIPHHVETIHRIFDEKLSGKSLHAIARDLNLENIPTITNKKVDTGWTPTRVRDLLLKESLIGVAYGVSDYFPPAISKEKFHAVQMIRGQGKGKKPTSRQPSSIDILKGICKCAECGSTLRQRNTKKTPEGRYPRGYLECRNRQLGRCNSKAFNRSLIEDILIQKVFPTLQYLSLKSNGDNISVTTLKADITSLEKGINNLISLAERGLGDLDTLAQRITNNRVELESKKKDLRQAEAIQSLRSDNDIQDSDRKTVEGRIKLQLAIKSFIKEMIFDYYKQEITIRLLNGKSFSGISVARENKDFDHSSVFEVLQKSLLDIDEVHL

SEQ ID NO: 45262 - DNA, 50 bp, Escherichia coli
  source 1..50: mol_type = genomic DNA
agggtgtataagaaagtgaagattatgattttcacttcctaaaacacccc

SEQ ID NO: 45263 - DNA, 40 bp, Escherichia coli; identical to SEQ ID NO: 6368
  source 1..40: mol_type = genomic DNA

SEQ ID NO: 45264 - DNA, 50 bp, Escherichia coli
  source 1..50: mol_type = genomic DNA
agggtgtataagaaagtgaagattctgattttcacttcctaaaacacccc

SEQ ID NO: 45265 - DNA, 40 bp, Escherichia coli
  source 1..40: mol_type = genomic DNA
gtgaacatggcgtaaaactcttcgtgtggatctgcacttt

SEQ ID NO: 45266 - protein, 514 aa, Escherichia coli; identical to SEQ ID NO: 27786

SEQ ID NO: 45267 - DNA, 50 bp, Escherichia coli; identical to SEQ ID NO: 45262
  source 1..50: mol_type = genomic DNA

SEQ ID NO: 45268 - DNA, 40 bp, Escherichia coli; identical to SEQ ID NO: 6378
  source 1..40: mol_type = genomic DNA

SEQ ID NO: 45269 - DNA, 50 bp, Escherichia coli
  source 1..50: mol_type = genomic DNA
agggtgtataagaaagtgaagattaggattttcacttcctaaaacacccc

SEQ ID NO: 45270 - DNA, 40 bp, Escherichia coli
  source 1..40: mol_type = genomic DNA
aaagtgcagatccacacgaagagttttacgccatgttcac

SEQ ID NO: 45271 - protein, 514 aa, Escherichia coli; identical to SEQ ID NO: 45261

SEQ ID NO: 45272 - DNA, 50 bp, Escherichia coli; identical to SEQ ID NO: 45262
  source 1..50: mol_type = genomic DNA

SEQ ID NO: 45273 - DNA, 40 bp, Escherichia coli; identical to SEQ ID NO: 6378
  source 1..40: mol_type = genomic DNA

SEQ ID NO: 45274 - DNA, 50 bp, Escherichia coli; identical to SEQ ID NO: 45269
  source 1..50: mol_type = genomic DNA

SEQ ID NO: 45275 - DNA, 40 bp, Escherichia coli; identical to SEQ ID NO: 45270
  source 1..40: mol_type = genomic DNA

SEQ ID NO: 45276 - protein, 514 aa, Escherichia coli
MRKVYSYIRFSSTKQAFGDSHRRQSKAIQDWLASHPDHILDESLSFEDLGRSAFHGDHLKEGGALRAFLEAVKQGLIPPDSVLLVESLDRVSRQSISHAQETIRAILEQGITVVTLSDGETYNRQSLDDSLALIRMIILQERSHNESVIKSDRIKKVWSHKRQQFEQDGTKITGNCPGWLKLNSDGKSFSLIPHHVETIHRIFDEKLSGKSLHAIARDLNLENIPTITNKKVDTGWTPTRVRDLLLKESLIGVAYGVSDYFPPAISKEKFHAVQMIRGQGKGKKPTSRQPSSIDILKGICKCAECGSTLRQRNTKKTPEGRYPRGYLECRNRQLGRCNSKAFNRSLIEDILIQKVFPTLQYLSLKSNGDNISVTTLKADITSLEKGINNLISLAERGLGDLDTLAQRITNNRVELESKKKDLRQAEAIQSLRSDNDIQDSDRKTVEGRIKLQLAIKSFVKEIIFDYYKQEITIRLLNGKSFSGISVARENKDFDHSSVFEVLQKSLLDIDEVHL

SEQ ID NO: 45277 - DNA, 50 bp, Escherichia coli; identical to SEQ ID NO: 45262
  source 1..50: mol_type = genomic DNA

SEQ ID NO: 45278 - DNA, 40 bp, Escherichia coli; identical to SEQ ID NO: 6368
  source 1..40: mol_type = genomic DNA

SEQ ID NO: 45279 - DNA, 50 bp, Escherichia coli; identical to SEQ ID NO: 45264
  source 1..50: mol_type = genomic DNA

SEQ ID NO: 45280 - DNA, 40 bp, Escherichia coli; identical to SEQ ID NO: 45265
  source 1..40: mol_type = genomic DNA

SEQ ID NO: 45281 - protein, 514 aa, Escherichia coli
MRKVYSYIRFSSTKQAFGDSHRRQSKAIQDWLASHPDHILDESLSFEDLGRSAFHGDHLKEGGALRAFLEAVKQGLIPPDSVLLVESLDRVSRQSISHAQETIRAILEQGITVVTLSDGETYNRQSLDDSLALIRMIILQERSHNESVIKSDRIKKVWSHKRQQFEQDGTKITGNCPGWLKLNSDGKSFSLIPHHVETIHRIFDEKLSGKSLHAIARDLNLENIPTITNKKVDTGWTPTRVRDLLLKESLIGVAYGVSDYFPSAISKEKFHAVQMIRGQGKGKKPTSRQPSSIDILKGICKCAECGSTLRQRNTKKTPEGRYPRGYLECRNRQLGRCNSKAFNRSLIEDILIQKVFPTLQYLSLKSNGDNISVTTLKADITSLEKGINNLISLAERGLGDLDTLAQRITNNRVELESKKKDLRQAEAIQSLRSDNDIQDSDRKTVEGRIKLQLAIKSFIKEMIFDYYKQEITIRLLNGKSFSGISVARENKDFDHSSVFEVLQKSLLDIDEVHL

SEQ ID NO: 45282 - DNA, 50 bp, Escherichia coli; identical to SEQ ID NO: 45262
  source 1..50: mol_type = genomic DNA

SEQ ID NO: 45283 - DNA, 40 bp, Escherichia coli; identical to SEQ ID NO: 6368
  source 1..40: mol_type = genomic DNA

SEQ ID NO: 45284 - DNA, 50 bp, Escherichia coli; identical to SEQ ID NO: 45264
  source 1..50: mol_type = genomic DNA

SEQ ID NO: 45285 - DNA, 40 bp, Escherichia coli; identical to SEQ ID NO: 45265
  source 1..40: mol_type = genomic DNA

SEQ ID NO: 45286 - protein, 514 aa, Escherichia coli; identical to SEQ ID NO: 45276

SEQ ID NO: 45287 - DNA, 50 bp, Escherichia coli; identical to SEQ ID NO: 45262
  source 1..50: mol_type = genomic DNA

SEQ ID NO: 45288 - DNA, 40 bp, Escherichia coli; identical to SEQ ID NO: 6378
  source 1..40: mol_type = genomic DNA

SEQ ID NO: 45289 - DNA, 50 bp, Escherichia coli; identical to SEQ ID NO: 45269
  source 1..50: mol_type = genomic DNA

SEQ ID NO: 45290 - DNA, 40 bp, Escherichia coli; identical to SEQ ID NO: 45270
  source 1..40: mol_type = genomic DNA

SEQ ID NO: 45291 - protein, 461 aa, Staphylococcus felis
MKVAIYTRVSTHEQSLHGFSIEEQERKLKQFCEFNDWNVYKVYTDAGYSGAKRERPALNQLIQDVDKLDLVLVYKLDRLTRSVRDLLDILEVLEKNDVSFRSATEVYDTSTAMGRLFVTLVGAMAEWERTTIQERTFMGRRAAAQKGLVKTTPPFYYDRVDDKFVPNEYSKVLRFAVDEIKKGTSLREITIKLNNSNYKAPIGNRWHRSVLRNALKSPVARGHYCFSDVFIENTHDPIITDAEYEEIKERISERTNSVVVRHISAFRGKLVCPTCGNRCTLNTNKHVTQKKGTWYSKHYYCDRCKYDKSVENFSFSEEEALKQFYTYISNFDLTNYEVEVNEEKEQKIEIDIDKINEERKRYHILFAKGLMREDELTPLIKELDDIVEVYNKQSKEKQNKVYDYNQIKNFKYSLIEGWERMSLELKAEFIKRAIKRIEIEYIKGIRGKKPNSLKILDVEFY

SEQ ID NO: 45292 - DNA, 50 bp, Staphylococcus felis
  source 1..50: mol_type = genomic DNA
aattgggggtatgttttatctatcagtgttcctattacacacccccaatc

SEQ ID NO: 45293 - DNA, 40 bp, Staphylococcus felis
  source 1..40: mol_type = genomic DNA
taagggaggcgttccgatcagtgttcctaacccaccaatt

SEQ ID NO: 45294 - DNA, 50 bp, Staphylococcus felis
  source 1..50: mol_type = genomic DNA
aattgggggtatgttttatctatcggtgttcctattacacacccccaatc

SEQ ID NO: 45295 - DNA, 40 bp, Staphylococcus felis
  source 1..40: mol_type = genomic DNA
aaagggaagtgttcagataggtgttcctacctcacccctc

SEQ ID NO: 45296 - protein, 497 aa, Corynebacterium glucuronolyticum
MGYDGHMATITTRRAAIYARISLDKQEEAGVKRQIHLATKQAEADEAEVVATYVDNNISAFSGEYRPDYDKLIHAIENREIDVVYVYALDRLTRRTKDTLALFELCEKHSVTVKANRGYNIDPSDPASRLTIVILGLIAEQESIDRAARIRAAYEDRARTGRPKTGGRRMFGYEADAVTVIDEEADAILDAAAMVIAGKTLRETVRDVFDARGLTATSGRPMTAPTLRDILLNPRVRGLSTFNPTDPETGHRLVKDRRIIGKGSWPAIIDEATGEKLDAVLYDPARRSSHVGNAPRYFLASVLTCTCGEPMYARSRKNKNGEPRRYYACKRSEPGGTHVSIGAEVDDLIEAVILKRMEQPDAVAVLQNTLTPEDNTLTERLQDLTGQRNALLAKRGQIEEAAINEDVDMSTFARMSKKIEAQISGIDEDIRELTKNLDADPLAVELADGPDFAEWWGGASVEDKRRLARLLMDIHILPGRPGAKVFDPHRVKITWKR

SEQ ID NO: 45297 - DNA, 50 bp, Corynebacterium glucuronolyticum
  source 1..50: mol_type = genomic DNA
agtacccactaaccacattcgtttaatgcagacttagggaatggggtacg

SEQ ID NO: 45298 - DNA, 40 bp, Corynebacterium glucuronolyticum
  source 1..40: mol_type = genomic DNA
tggggcgacaggatccggaaaatcagaactactgaagacc

SEQ ID NO: 45299 - DNA, 50 bp, Corynebacterium glucuronolyticum
  source 1..50: mol_type = genomic DNA
agtacccactaaccacattcgttttatgcagacttagggaatggggtacg

SEQ ID NO: 45300 - DNA, 40 bp, Corynebacterium glucuronolyticum
  source 1..40: mol_type = genomic DNA
tgggtggacaggatatgaataatcagaactccggcagtgc

SEQ ID NO: 45301 - protein, 524 aa, Salinispora tropica
MSKQTPPAGYARVSLFLPGAVSDEAQKSECNAEAARRGLSEPVWYVDVDRTASDERKPRPAFDQLMADVKAGKVKVIISRSSDRFVRRPRELESIIDVLSPRHVPVYFTRDSDYDLSTAGGRETARIKASIARGEVERMSERMKSSAEERARRGVPRKGNRPFGYTFANKSDGTLTFTQVGPEAEAIRWAFDYVMSGGTLAGVAREWTGRGFTTAHGKVGRNWSWLGVKQAVLNPAVGGFRYYQPTSVLTIGEARKVPWECDFIPGNWKDDSILSGQEWRDLRTVLTSTRQKAGNRKRHLGSGIYLCGLCDDGTTLKSARRGGELMYRCREKSHLNVPGQNLDAFILEMVRRALVDRDIFEASFGTSSAVDAAALDQQRKEAQKQLDQLEEAYAGKRVSISVFERTSRRLEAEITDLDDRLSVINAEKSRIVRLMSFEEVDRALEDADLTQRRQLVADIYPKVIIRAPGKGRAFNPEYHVRMIDRAGREWPTWLHEWSQNRQLNSARALVEARHQVGPASGNPT

SEQ ID NO: 45302 - DNA, 50 bp, Salinispora tropica
  source 1..50: mol_type = genomic DNA
atcgaatctctgtcgatgagtatgtcattgctcagcgataaagaaaaaag

SEQ ID NO: 45303 - DNA, 40 bp, Salinispora tropica
  source 1..40: mol_type = genomic DNA
gtacgcccacttgtagagatccatgttggcgtgcaggcag

SEQ ID NO: 45304 - DNA, 50 bp, Salinispora tropica
  source 1..50: mol_type = genomic DNA
atcgaatctctgtcgatgagtatgcgattgctcagcgataaagaaaaaag

SEQ ID NO: 45305 - DNA, 40 bp, Salinispora tropica
  source 1..40: mol_type = genomic DNA
gtactaccagtgacagagacgcatggtggcttccaggctg

SEQ ID NO: 45306 - protein, 493 aa, Terrisporobacter glycolicus
MKTCIYLRKSRADIEAEKEGEYETLHRHKTTLLKVAKERKLNIVDIKEELVSGEYVEHRPRMMELLEEVKNKKYDAVLVMDLDRLGRGNMQDQGLILDTFKTSKTKIITPRKIYNLDDEFDEEYSEFEAFMARKELKLINRRLQRGRAKSIEEGKYISPDAPYGYEFKYDDRGKKYLAINEEQAAAVKLVFSMYLENKGATKIANKLNALGYETNNHIEFKAKAVRDILSNITYCGYVKWKTIDRKNHSRLRPDGEQIIAKGHHEPIIDEFTFNKVQEIRKGKYISPSKNKVSNPLAGIVICKKCGHNIIQKISRGKTYLWCRHCDNKSSSLDYVEDAIINSLQGWLENYKIKIDLKDDTEEIDQIKFELKKLQRELKEAEKQKGKLYDFLERGIYDDKTFLERSNVLESRIDDLKNQISECNLSIISYKDNLQAKKQIIPSLEKVLYNYSRSNDAKEQNLLLKSVLDKVLYEKAKDASKDEFILEVHPKLPK

SEQ ID NO: 45307 - DNA, 50 bp, Terrisporobacter glycolicus
  source 1..50: mol_type = genomic DNA
ttcagctatagtagtacacctaactgattaccagttctagtgtagctgta

SEQ ID NO: 45308 - DNA, 40 bp, Terrisporobacter glycolicus
  source 1..40: mol_type = genomic DNA
ggttaatactcctgctaactggctaccaggaactccagtt

SEQ ID NO: 45309 - DNA, 50 bp, Terrisporobacter glycolicus
  source 1..50: mol_type = genomic DNA
ttcagctatagtagtacacctaacagattaccagttctagtgtagctgta

SEQ ID NO: 45310 - DNA, 40 bp, Terrisporobacter glycolicus
  source 1..40: mol_type = genomic DNA
ggttatttctcctgctaatagggtaccctgctctccaggc

SEQ ID NO: 45311 - protein, 490 aa, Streptomyces mobaraensis
MPIAPEYLHLVYPGPFLAYLYGRNSVDPKKKGRSVQDQLHAGRRLCETYGWPIVGVFDKDVGRSASRHARRTRSDFEAMLEGIEAGKCRIVVAFEASRYYRDLEVYVRLRNACAANGVLLCYDGTIYDLSKREDRKATAQDALQAEDEVEGIRERNLRTMRSIAEKGRPHGRPLYGYTRRYDPDTGDLVDQFPDPVQGPVVTDIFKRVASLESSYSIVRDLNKRGDTGRIWEERHISQLVRNPSYFGRRIFQGRDFGPATWEPLVDEETWYAVQAILRRPGRNTTDDRTVKHLLSYIGLCGECSGAVKLKILKCRGYLAYQCSERFDTVIRKEKLDAYVEEAVIAWLGSAEAVAAFQPADASASAASLRKLENLKNQLNEARQAAARFDENGVPLLSIVSLAALEAQLVPMITQVENEEAPSPTPPLVRGLVGHPNVEEAWSRLLLPQQREVIRKVVTVRLFRARSRGVRTIEPGRIKLAFVGQPGFTSD

SEQ ID NO: 45312 - DNA, 50 bp, Streptomyces mobaraensis
  source 1..50: mol_type = genomic DNA
catctgtctgaaaaatattgtcaccggacatcttccttcgcggatagtac

SEQ ID NO: 45313 - DNA, 40 bp, Streptomyces mobaraensis
  source 1..40: mol_type = genomic DNA
aggatggtcaggttgcttccggagacggcgaggaggtggg

SEQ ID NO: 45314 - DNA, 50 bp, Streptomyces mobaraensis
  source 1..50: mol_type = genomic DNA
catctgtctgaaaaatattgtcactggacatcttccttcgcggatagtac

SEQ ID NO: 45315 - DNA, 40 bp, Streptomyces mobaraensis
  source 1..40: mol_type = genomic DNA
aggatggtgagggtgatggtggagatggtgaggatgatgg

SEQ ID NO: 45316 - protein, 548 aa, Mycobacterium chimaera
MSLRFAFYGRVSTEDAQDPEASRSWQKRRAMDLITPHGGVLTADYFDVGQSRSLPWKRRPEASRLLADVACSDRSFDAVVIGEPARAFYGPQFALTFPVLTHYGVGLWVPEVGGAVDPGSEAHDLVMTLFGGMSKGERARIQMRVRTAMSALAQDTARYLGGRPPYGYRLVDAGSHPNLAKANLGQRLHRLEPDPATSSVVERIYRMYADGAGLRYIAQRLTDDGVPSPSQYDPARNRHRDPRGWSHSAIRAILDNPTYLGVRVWGKQEKYEVLVNPDDVAAGYETRMRWRDQADWIAPDRRTHEALIPDDLAQAVRLRTQARRGPGLVCSRESAVPYALRGMLYCAVCGRRMQGAARVGKRATRILYRCELGRSRSVPAELTDHPRTVYLREDAVTPRLDEWIASLADPEDLARGQEVDPAAGAGYAALQRQLSEANGKVAALITAVESGVAVEDLTAALRRRTAERDELMALLERAERPRAMSAAQISELVEELGGLSAVLGEATGAERAQVYASLGLRLDYDPHLRRVKATADLSRVAGCVRGGT

SEQ ID NO: 45317 - DNA, 50 bp, Mycobacterium chimaera
  source 1..50: mol_type = genomic DNA
cgtgtcgccggatgtgtccgaggggggacttggccacttacgacacgggt

SEQ ID NO: 45318 - DNA, 40 bp, Mycobacterium chimaera
  source 1..40: mol_type = genomic DNA
tcagtcgtgtgtccgaggggggacttgaacccccacgccc

SEQ ID NO: 45319 - DNA, 50 bp, Mycobacterium chimaera
  source 1..50: mol_type = genomic DNA
cgtgtcgccggatgtgtccgagggtggacttggccacttacgacacgggt

SEQ ID NO: 45320 - DNA, 40 bp, Mycobacterium chimaera
  source 1..40: mol_type = genomic DNA
ttcatcgtgttgcccaggttggtcttgaacccccaagctc

SEQ ID NO: 45321 - protein, 548 aa, Mycobacterium chimaera; identical to SEQ ID NO: 9226

SEQ ID NO: 45322 - DNA, 50 bp, Mycobacterium chimaera; identical to SEQ ID NO: 9227
  source 1..50: mol_type = genomic DNA

SEQ ID NO: 45323 - DNA, 40 bp, Mycobacterium chimaera; identical to SEQ ID NO: 45318
  source 1..40: mol_type = genomic DNA

SEQ ID NO: 45324 - DNA, 50 bp, Mycobacterium chimaera; identical to SEQ ID NO: 9229
  source 1..50: mol_type = genomic DNA

SEQ ID NO: 45325 - DNA, 40 bp, Mycobacterium chimaera; identical to SEQ ID NO: 45320
  source 1..40: mol_type = genomic DNA

SEQ ID NO: 45326 - protein, 548 aa, Mycobacterium intracellulare
MSLRFAFYGRVSTEDAQDPEASRSWQKRRAIDLIAPHGGVLAADYFDVGQSRSLPWKRRPEASRLLGDVACRDRNFDAVVIGEPARAFYGPQFALTFPILTHYGVGLWVPEVGGAVDPGSEAHDLVMTLFGGMSKGERARIQMRVRTAMSALAQDTSRYLGGRPPYGYRLVDAGPHPNPAKANLGQRLHRLEPDPATSPVIERIYRMYADGAGLRYIAQQLTDDGVPSPSQYDPARNRHRDPRGWSHSAIRAILDNPAYRGIRVWGKQEKYEVLVSPDDVAAGYETRMRWRDQADWIAPDRRTHEALIPDELVQAVRLRTQARRGPGLVCSRESTVPYALRGLLFCAACGRRMQGAARVGKRTTRILYRCELGKSRSVPVDLSDHPRTVYLREDEVTARLDEWIATLADPEDLARGQDVDPAGGTGYAALQRQLREANAKVAALVTAVESGVAVEDLTAALRRRTAERDELKARLEQAERPRLMSAAQISELVEELGGLSAVLGAATGAERAEVYATLGLRLDYDPHLRQVKATADLSRVAGCVRGGT

SEQ ID NO: 45327 - DNA, 50 bp, Mycobacterium intracellulare
  source 1..50: mol_type = genomic DNA
cgtgtcgccggctgtgtccgaggggggacttggccacgtgcgacacgagt

SEQ ID NO: 45328 - DNA, 40 bp, Mycobacterium intracellulare; identical to SEQ ID NO: 45318
  source 1..40: mol_type = genomic DNA

SEQ ID NO: 45329 - DNA, 50 bp, Mycobacterium intracellulare
  source 1..50: mol_type = genomic DNA
cgtgtcgccggctgtgtccgagggtggacttggccacgtgcgacacgagt

SEQ ID NO: 45330 - DNA, 40 bp, Mycobacterium intracellulare; identical to SEQ ID NO: 45320
  source 1..40: mol_type = genomic DNA

SEQ ID NO: 45331 - protein, 548 aa, Mycobacterium intracellulare
MSLRFAFYGRVSTEDAQDPEASRSWQKRRAMDLIAPHGGVLAVDYFDVGQSRSLPWKRRPEASRLLADVACRDRNFDAVVIGEPARAFYGPQFALTFPVLTHYGVGLWVPEVGGAVDPGSEAHDLVMTLFGGMSKGERARIQIRVRTAMSALAQDTSRYLGGRPPYGYRLVDAGPHPNPAKANLGQRLHRLEPDPATSSVVERIYRMYADGAGLRYIAQQLTDDGVPSPSQYDPARNRHRDPRGWSHSAIRAILDNPTYTGVRVWGKQEKYEVLVNPDDVAAGYETRMRWRDQSDWIAPDRRTHEALVTDDLAQAVRLRVEARRGPGLVCSRESTVPYALRGLLFCAACGRRMQGAARVGKRTTRILYRCELGKSRSVPIDLSDHPRTVYLREDAVTSRLDEWIASLADPEDLARGQEVDPVAGAGYAALQRQLGEANGKIAALVTAVESGVAVEDLTAALRRRTAERDELKARLEQAERPRVMSAAQISELVEELGGLSAVLGAATGLERAEVYASLGLRLDYDPHLRQIKATADLSRVAGCVRGGT

SEQ ID NO: 45332 - DNA, 50 bp, Mycobacterium intracellulare
  source 1..50: mol_type = genomic DNA
cgtgtcgccggatgtgtccgaggggggacttggccacttacgacacaggt

SEQ ID NO: 45333 - DNA, 40 bp, Mycobacterium intracellulare; identical to SEQ ID NO: 45318
  source 1..40: mol_type = genomic DNA

SEQ ID NO: 45334 - DNA, 50 bp, Mycobacterium intracellulare
  source 1..50: mol_type = genomic DNA
cgtgtcgccggatgtgtccgagggtggacttggccacttacgacacaggt

SEQ ID NO: 45335 - DNA, 40 bp, Mycobacterium intracellulare; identical to SEQ ID NO: 45320
  source 1..40: mol_type = genomic DNA

SEQ ID NO: 45336 - protein, 563 aa, Enterocloster bolteae
MARKSRVITETQKQENAKSFVWKIGIYIRLSKEDLRNNDESESVTNQRKINLEFVEEKFCNEKYIIYDIYVDDGRSGTTEDTRPDFQRLSKDIREGNVNCVICKTLARAFRNYADQGKFLEQYLPTYGCRFIAFGNPYVDTFANPDCMQNMEIPINGLMNDRYAARTSEDVRKTFRTKRNNGEFIGAFAPYGYLKNPENKSAFIIDEEAAEIVKEIFEKYLDGISKLSIVRYLNDHSIPCPTVYKQKKLGMKYQNPHSDPTKNPLWSERTVGEILKNRMYCGDMVQGRYRIKSYKVHIQEQVPEDEWFIKENTHEPIIDRETFDKVQRLLQKDTRTSPKKNTLYLFSGFLRCADCKKAMVRSEVKGHVYYYCSTYKSRSKNACTKHTIQHKRLETAVLFAIQQYVYLAIDYTKAIEQINRAPIVKSEDKKLLEAITQKERELTKVIRYKQAIYQDWKDNEISQNDYRRMREDYEEQEKEISAIIKKLQDERAEQENGVDTENPFLVAFRKYENITTLSREVLIELVDSITVYEGGNISIVLRFADELRRVQDFIEVNTHSEAV

SEQ ID NO: 45337 - DNA, 50 bp, Enterocloster bolteae
  source 1..50: mol_type = genomic DNA
ggttttcttattattcatggtgccaccgggccaatcataataagaaaacg

SEQ ID NO: 45338 - DNA, 40 bp, Enterocloster bolteae
  source 1..40: mol_type = genomic DNA
acagggttacgtaggtcccaccggacccactggcccgacc

SEQ ID NO: 45339 - DNA, 50 bp, Enterocloster bolteae
  source 1..50: mol_type = genomic DNA
ggttttcttattattcatggtgccagcgggccaatcataataagaaaacg

SEQ ID NO: 45340 - DNA, 40 bp, Enterocloster bolteae
  source 1..40: mol_type = genomic DNA
gcagggctgggtagggcccagcggaccccacgggccgccc

SEQ ID NO: 45341 - protein, 575 aa, Roseburia hominis; identical to SEQ ID NO: 3726

SEQ ID NO: 45342 - DNA, 50 bp, Roseburia hominis; identical to SEQ ID NO: 277
  source 1..50: mol_type = genomic DNA

SEQ ID NO: 45343 - DNA, 40 bp, Roseburia hominis
  source 1..40: mol_type = genomic DNA
ctgcaagcgccgcaaagccttcctgctccgccgtttttgc

SEQ ID NO: 45344 - DNA, 50 bp, Roseburia hominis; identical to SEQ ID NO: 2839
  source 1..50: mol_type = genomic DNA

SEQ ID NO: 45345 - DNA, 40 bp, Roseburia hominis
  source 1..40: mol_type = genomic DNA
atgcaagccctgcacagcctgcctgttccgccggtctcca

SEQ ID NO: 45346 - protein, 459 aa, Paracoccus yeei
MNTHSTPPLEPLTALIYCRVSSTKQKLEGSGLASQEHRCRQYADGKGYAVEAVFPDDSSGGGDFMKRPGMRAMLAYLDAQKGTPYVVIFDDLKRFARDTEFHIKLRREFAQRGARIECLNFNLEDTPEGRFIETIIAAQGQLEREQNRRQVVQKMKARVEKGYYVFHPPVGYRYARNCEHGKLLVPDEPVASIVREVLQGFASGRFTSQSEVMRFLEAKPEFLKSRQTGEVRLTTVRELLARPTYAGYVEAPNWGISLRKGFHEPLIDLATHERIQARLRGSAVAPARKDINEDFPLRGFVLCDDCDQPMTSCWSKGRNKHYAYYLCDTPNCASHRRSIPRADIEDGAEAILRCMRPARQFFALARAMFTDIWNARQAEAQRARAALSDQIRDIEKQIEGLLDRIMEGASPTVAAAYEQRIEKLERRKLVLADQAVNAAPPEDRLEELIEPALTFLSNL

SEQ ID NO: 45347 - DNA, 50 bp, Paracoccus yeei
  source 1..50: mol_type = genomic DNA
tttgcaacaaaagtgcggattggtggacctgaccccagaagagtcgaacc

SEQ ID NO: 45348 - DNA, 40 bp, Paracoccus yeei
  source 1..40: mol_type = genomic DNA
cgggaaaggatgatttggtggagccaaggggagtcgaacc

SEQ ID NO: 45349 - DNA, 50 bp, Paracoccus yeei
  source 1..50: mol_type = genomic DNA
tttgcaacaaaagtgcggattggtaaacctgaccccagaagagtcgaacc

SEQ ID NO: 45350 - DNA, 40 bp, Paracoccus yeei
  source 1..40: mol_type = genomic DNA
ttggaaaggatgacttggaaaagtcaagtggaaacgaatt

SEQ ID NO: 45351 - protein, 587 aa, Klebsiella variicola; identical to SEQ ID NO: 17391

SEQ ID NO: 45352 - DNA, 50 bp, Klebsiella variicola
  source 1..50: mol_type = genomic DNA
caatctttttcttggtgtttcgggcaccctaatgataaaaatccaatctt

SEQ ID NO: 45353 - DNA, 40 bp, Klebsiella variicola; identical to SEQ ID NO: 5513
  source 1..40: mol_type = genomic DNA

SEQ ID NO: 45354 - DNA, 50 bp, Klebsiella variicola
  source 1..50: mol_type = genomic DNA
caatctttttcttggtgtttcgggggccctaatgataaaaatccaatctt

SEQ ID NO: 45355 - DNA, 40 bp, Klebsiella variicola
  source 1..40: mol_type = genomic DNA
gtccactagaattatttggggactgaggaagaagaagccg

SEQ ID NO: 45356 - protein, 549 aa, Anaerococcus octavius; identical to SEQ ID NO: 12611

SEQ ID NO: 45357 - DNA, 50 bp, Anaerococcus octavius; identical to SEQ ID NO: 12612
  source 1..50: mol_type = genomic DNA

SEQ ID NO: 45358 - DNA, 40 bp, Anaerococcus octavius
  source 1..40: mol_type = genomic DNA
tcctcagactatgcatgtggagactatagcgttgatacaa

SEQ ID NO: 45359 - DNA, 50 bp, Anaerococcus octavius; identical to SEQ ID NO: 12612
  source 1..50: mol_type = genomic DNA

SEQ ID NO: 45360 - DNA, 40 bp, Anaerococcus octavius
  source 1..40: mol_type = genomic DNA
tccccagagcatacatgtggagacaattaagttgatccca

SEQ ID NO: 45361 - protein, 551 aa, Pseudoflavonifractor phocaeensis
MKKEKIKVYTYTRVSTAMQIDGYSLDAQKSRMKAFAEFNDYEIAHEYEDAGKSGKSIEGRTQFNQMMEDIKTGKDGVSFVLVFKLSRFGRNAADVLSTLQVMQDFGVNLICVEDGIDSSKDAGKLMISVLSAVAEIERENIRVQTMEGRIQKAREGKWNGGFAPYGYKLVDGKLEINEEEAPAIRTIYEQYVTTDSGANGIAKYLENHGISKVQRQNGKNPLFDARLIRMILKNPVYCGKIAYGRRKTEKVHGTRNEYRLVEQENFLLVDGLHEAIIPEDVWQAAQVKLAAQAKRYEHVNKGKNECTHLLSGIVKCPICGVGMYGNKCVKRKADGSKYKDFYYYGCKHRSMTRGHKCDYKKQIRKELLDDAVAEVICKLVSNPKFAAMMQEKINMKVDTTAIEQEISNYEKQLRQAYSTKSKLIEEIDSLDPDDRHYSRRKSDLDDRLYGMYDKIEELESLLIAARAKKQAIEAEKLTGDNIYKVLIYFDQLYGKMNDREKRQLIEELISEIQIYPERQPNGQWLKSIKFRLPIIEEDMNISLDNEQQVET

SEQ ID NO: 45362 - DNA, 50 bp, Pseudoflavonifractor phocaeensis
  source 1..50: mol_type = genomic DNA
agtttggacaacgaacagcaagttgagacggtagtacttttgtccaaact

SEQ ID NO: 45363 - DNA, 40 bp, Pseudoflavonifractor phocaeensis
  source 1..40: mol_type = genomic DNA
cccccgcgccgcccacgtggaaacggtggtcagtttggtc

SEQ ID NO: 45364 - DNA, 50 bp, Pseudoflavonifractor phocaeensis
  source 1..50: mol_type = genomic DNA
agtttggacaacgaacagcaagttgcgacggtagtacttttgtccaaact

SEQ ID NO: 45365 - DNA, 40 bp, Pseudoflavonifractor phocaeensis
  source 1..40: mol_type = genomic DNA
ccccagcggggcccaggaggcaggggtggtcagtggggcc

SEQ ID NO: 45366 - protein, 535 aa, Pseudomonas weihenstephanensis
MPYAVGYTRFSSTKQGKGTSLARQQELIAEWIENNPSYKLYPKKFEDLGRSASKGDHLKHGFGQLLEAINQGEIKEGDVILVEAIDRIGRLQEMEMISLINQIVSAKVQIITLQDNCTYGPIIKSEQIWSLVGKVQQAYMYSASLSERIKKSYRAREKLAANGIIPKRRTPIWLDSNGIIKDEIALAMKGAFEDALAGIGERRILKRLISMHITFAKINPSTIRRWLTNRIAIGYWKEWKIYPPIVSEELFYQVQQRFSDEYKPATAARTHFLSGLIKCGECGANMQVKINKHSPFTMRCTTRCAYGDLRCQNNKSFPVPILLHICNDTATLAVETAMKNLELSTSRKKLIVIEGQLRNISEKIQTLVTSLMKYGQVPEIDVQIAALTKERKNLERDKIFIIDDSTEKNSTYNMAWDYQYELIADHPMRLNALLQSAAFNIKCYTNGRIEASTKGNEFSKCTYEGYDRKKQAYRISTAAQIHHITNREGTLTKERLELFKNMLAIQRSQGINTLAPVETSPKEQAMYDFYTSISN

SEQ ID NO: 45367 - DNA, 50 bp, Pseudomonas weihenstephanensis
  source 1..50: mol_type = genomic DNA
cgtagttgtattgccgcctttttctctctaatatctgcattaccgctacg

SEQ ID NO: 45368 - DNA, 40 bp, Pseudomonas weihenstephanensis
  source 1..40: mol_type = genomic DNA
ggtactggccgctttgaattcgcaatttttgtggtcgatc

SEQ ID NO: 45369 - DNA, 50 bp, Pseudomonas weihenstephanensis
  source 1..50: mol_type = genomic DNA
cgtagttgtattgccgcctttttctgtctaatatctgcattaccgctacg

SEQ ID NO: 45370 - DNA, 40 bp, Pseudomonas weihenstephanensis
  source 1..40: mol_type = genomic DNA
ggaactgtacgcttttaaatggtaaattttgtggtacatg

SEQ ID NO: 45371 - protein, 523 aa, Agrobacterium tumefaciens
MKRAAIYARYSTDLQNDKSVEDQIRLCEAHAQRIGAQIVKTFHDRAKSGASMFGRAGLSQLMQDAENGTFEVLISESPDRVSRDIADLAHIHKTLKFRGVEMNCVNGGVMDTMQIGMYGVVGQMQREEGAKKVKRGMVGVVRSGRHAGGRAYGYEPVPGKPGELRIVPDEAQIIVRIFKQYAGGTSPRTIAGALNEEGIAPPRGDKWNASTINGSGTRGYGILRNPIYDGRMIWNRVRMVKDPSTGRRVSRTNDASEHETIDVPHLRIVDEWLFQKVAERKAATGGEHKMMQPRSKRLLSGLLRCGACGGGMVIVGPDRGGNRIQCSTYRESGTCDNRRRFYIDRIEEQVIDSLRMAFADTSVIEAYVKTYEEELKRRRGNAFKSRAAAQRGLNDAKDGITKIVEKISKGLIEDDEAAVLLAGLREERNKFQAILDSIEEPANVIELQPKALLRFRSSIESLAKILRSSDGNVPMELGETFRQLVAAVVVEPTPAGEAYSVSLKAYLSSLMHSELSVIKLVAG

SEQ ID NO: 45372 - DNA, 50 bp, Agrobacterium tumefaciens
  source 1..50: mol_type = genomic DNA
gtcggtgataaagttggtagcgggagaccgtctcaatctctatcacctac

SEQ ID NO: 45373 - DNA, 40 bp, Agrobacterium tumefaciens
  source 1..40: mol_type = genomic DNA
ttaaaaaaatggtagcgggagagggacttgaacccccgac

SEQ ID NO: 45374 - DNA, 50 bp, Agrobacterium tumefaciens
  source 1..50: mol_type = genomic DNA
gtcggtgataaagttggtagcgggacaccgtctcaatctctatcacctac

SEQ ID NO: 45375 - DNA, 40 bp, Agrobacterium tumefaciens
  source 1..40: mol_type = genomic DNA
ctcaagacaaggtggcgggacggggatttgaacccaggac

SEQ ID NO: 45376 - protein, 473 aa, Micromonospora aurantiaca
MPADRPLRAAIYCRISLARFDDTLKVDDQERVCRELAAARGWTVAAHHVFKDNSKSAWRRDRKRPGWDAMLAAVKGGEVGAIVVYHGDRLVRQMSDLEALIDLADTKGIRLASPTGERDLDNADDRYILRIEAAGNTREVDATSRRLKRHYDRLAEKGIVRLGGRGGRAFGFEPDGLTVRETDAEVVREVARRILSGEPVGAIARALNDRGVTTTTGGPWDHGALKKLMLRPRLAGLVARHGRIVGSAAWPAILDRSTWETVCATLERKAAAFDYTTNARRYLLTGIARCGTCTEPLVVRHNTRPGLTGYGCINRDCERKVHRAIHHLDPYVTGAVIALLNDPKVREAMQPAAAVDTAPLVAQLEAQQASRQRWLLAAAENPELGPDVLAVTVRRIDQLIAELREQITAAQRPTVLDGLWGIDKAGWGELGLARQRGAVAALLRITVFASGRRGPGFDPKTVRLDPAWLDAQP

SEQ ID NO: 45377 - DNA, 50 bp, Micromonospora aurantiaca
  source 1..50: mol_type = genomic DNA
gtacgtcattcgacggatatgaggcccgccaagtccgccggataacgtac

SEQ ID NO: 45378 - DNA, 40 bp, Micromonospora aurantiaca
  source 1..40: mol_type = genomic DNA
cacgggcggcaacatggagccgggtgaggcgcggatggac

SEQ ID NO: 45379 - DNA, 50 bp, Micromonospora aurantiaca
  source 1..50: mol_type = genomic DNA
gtacgtcattcgacggatatgaggctcgccaagtccgccggataacgtac

SEQ ID NO: 45380 - DNA, 40 bp, Micromonospora aurantiaca
  source 1..40: mol_type = genomic DNA
gacagacggccacatcgggctgggtgaggagcgggtggga

SEQ ID NO: 45381 - protein, 589 aa, Klebsiella aerogenes
MSAYVTIPRNTLLPAKHNVMNRPRLYSYIRYSSERQGKGNSLERQKSYIAKMAKQIAEEYKLEVFEEYQDLGVSAYKGKNLQEGALSDFIAQVKSGVIPKGSFLLIESLDRFSRQNAMQAVNLFTGLLLNGITVITGIDRQVYKHTDANNDTFQQLMFSVMLFSRANEESSTKSQRTIASALSKIERHQQRKPGDPVIAIKELGSDKWWTDSSSGYVNPHPVLFPIAKEIIQLKQDGWSNRMILQHLKNSYDGPIIGNKKSKGIWNMQHCSRILEPAIYGRKVITINNAEYILDDYYPAIISKDEYEALKLQVGNKGFAPNRESNPEIPLLSGIGILYCAHCSCYMVKAKSTLKNHPHAYRYQCASRDLRQDCNKWGFRASTLERTILQLIADRVFLPTKSQPSGLEGKIADIQSQIENYVLAIGSAKSPEIINNITSKIDQLEQEKQRLVVAKRLYDESIVQMNTEGWDKFREFDINDALAPLRAKIRASIKTVVMRVDCFRIDKKHNLFTITYRDQQKQRVVIENNSGWRKGKVYVEVQTINNTQLIESEGFILHDHIDILINRDKFMMEVKKRLENPRTLIDELTE

SEQ ID NO: 45382 - DNA, 50 bp, Klebsiella aerogenes
  source 1..50: mol_type = genomic DNA
gattatacctattacacttcagtgaatactaaggtaaactacatcccatt

SEQ ID NO: 45383 - DNA, 40 bp, Klebsiella aerogenes
  source 1..40: mol_type = genomic DNA
acttggcgtcaccatcggcaacaccgacggcaatattatc

SEQ ID NO: 45384 - DNA, 50 bp, Klebsiella aerogenes
  source 1..50: mol_type = genomic DNA
gattatacctattacacttcagtgactactaaggtaaactacatcccatt

SEQ ID NO: 45385 - DNA, 40 bp, Klebsiella aerogenes
  source 1..40: mol_type = genomic DNA
acatggcatcaccatcgtcacgcccgaccgcaagtttctg

SEQ ID NO: 45386 - protein, 561 aa, Mycobacterium avium
MYHMAKRALLVIRLSRVTLETTSPERQLADCQQLCAQRGYTVAGTAEDLDVSGSVDPFDRKKRPNLAQWLHDRRDEFDVIVVYRVDRLTRSVRHLQQLVAWAEDHDKLVVSATEPHFDMSTPFAAVLIALLGTVAQMELEAISERNRSAAQHNIKAGKYRGSKPPWGYVPQRDDEGVWRLVQDPDQVQVIHDVVARVLDGEPIQRIANDLTNRGIPTPKDAFAMSQGRPSKGLAWNMTTLKRSLKSEAMLGHVTTAEGKSVRGDDGSPLIRATPILEREVFDRVQVELTARARTGQPTERSTSLLLRVVYCGLPKCGEPAYRYSGGSSGKAARYRCSTLPRSNTDPRIVNCGNRTFAVAEADQLVEGIILRLLGESERLERVWDSGSDHSAELAELDATLADLTDQLGLGVFTRGTPQRARLDARIAALAARQAELSAEAVKPAGWTWNGTGQRFADWWEAQDVTARNVWLRSMNVRLTFDRERFYLDLGNLEQLTEQMIAKGPVAEWQKTFATMHETGIAGVEVNGQDYVIHFKNGETVATTVLTDEQEAAAAEFYGWKV

SEQ ID NO: 45387 - DNA, 50 bp, Mycobacterium avium
  source 1..50: mol_type = genomic DNA
tgtggtacatgctcgacaattgcggtctcggtggtgcaagatgtaccaca

SEQ ID NO: 45388 - DNA, 40 bp, Mycobacterium avium
  source 1..40: mol_type = genomic DNA
gggcttgtcgacgatcgccgtctcggtggtcagcaccatg

SEQ ID NO: 45389 - DNA, 50 bp, Mycobacterium avium
  source 1..50: mol_type = genomic DNA
tgtggtacatgctcgacaattgcggcctcggtggtgcaagatgtaccaca

SEQ ID NO: 45390 - DNA, 40 bp, Mycobacterium avium
  source 1..40: mol_type = genomic DNA
gggctcgtgcgccgccgccgcctcggtggtcaaccccacg

SEQ ID NO: 45391 - protein, 473 aa, Mycolicibacterium mageritense
MSKNVVPAAIYVRISQDRTGAGLGVDRQEQDCRKLAETLGWHVVQVFCDNDISAYSGKRRPQYEALLNAIESGAVKGVLAWHPDRLHRSVLELEHYVAVSRKHGIDTHTVQAGHWDLSTPSGRAIAITLSAWGQHESEHKGERIRRARQQQAKAGGFHGGIRPFGFEPDGITIRADEAAELAKAVEQIVSGVSLRAIVRDFNARGVPTVTGRARWTAVALSDTIRRPRTAGLSSYKGEIVGKAQWPAIVPEETWRAACAILTDPARRTNAGRGPGVRWLGSGLYHCGVCGEAELRVSSSTAKRRAYRCRSRDRKDSGGHVSREATALDGFVEAVMVERLSRPGLVHEAIAEESTTNVVELRAEADALRLRQEQLAEAFAEGDITRAALTAGSKRIEERAAQVAAQLAMIGGKSPLDALAHAEPADMAAAWAALTLGQKRAIIDYLCTVTVLPLGRSRGHLGFDPAGVRIDWKR

SEQ ID NO: 45392 - DNA, 50 bp, Mycolicibacterium mageritense
  source 1..50: mol_type = genomic DNA
ccgtgtctttagtgtgatgccgtgtttacggcaccatatttatgacacac

SEQ ID NO: 45393 - DNA, 40 bp, Mycolicibacterium mageritense
  source 1..40: mol_type = genomic DNA
cgcggtcaacagcgtggtcttgcctgccccggtgccgccc

SEQ ID NO: 45394 - DNA, 50 bp, Mycolicibacterium mageritense
  source 1..50: mol_type = genomic DNA
ccgtgtctttagtgtgatgccgtgtctacggcaccatatttatgacacac

SEQ ID NO: 45395 - DNA, 40 bp, Mycolicibacterium mageritense
  source 1..40: mol_type = genomic DNA
cagggtctacatctccgtctcacctcccccgatgccgccc

SEQ ID NO: 45396 - protein, 476 aa, Candidatus Dormibacteraeota bacterium
MTMQAKTKPVRAAIYTRISHDPQGGRLGVRRQEEDCRAYVEQRGWELAGTYEDDDLSAFSGKARPAYRRLVEDIEARRIEAVVAWHPDRLHRHPLELEEFIELLERAGVHVETVRAGAIDLSSPTGRAVARTLGAWARYESEHKSERLRRKHLELAMAGKDAGGGRPFGYEEDRTTARRSEAAFICEAADRILLGESLRSVCRDWTERDIRTAKGRYWQPVTLRNILVSARISGRREHFQLDGSRTRIGRITSIATWPGIIDVEKSDRLRALLGDPGRRQNGVTLTSAKHLLAGIAKCSLCGGSMLTRYYARSGERGLGCVRIQGTERCGKTFILAEPTEQLVSEALLRRVEGGVLASTLAKSDDRQLTDELLAVESSLASLAEDWAADRISRAEWSAARPVLAERHKLLTRRVQVHHRTQFMDDIPDPLRDAWSNLPLHRRRAILTVLVEAVVIRPGVRGLNRFDPRRIEVCWKA

SEQ ID NO: 45397 - DNA, 50 bp, Candidatus Dormibacteraeota bacterium
  source 1..50: mol_type = genomic DNA
aactgctatatcgtgacttacgcctcagcgtgccttacggagtagcatat

SEQ ID NO: 45398 - DNA, 40 bp, Candidatus Dormibacteraeota bacterium
  source 1..40: mol_type = genomic DNA
gaccgcgaggaaggcattgtcggcgtggatcgtgaccatc

SEQ ID NO: 45399 - DNA, 50 bp, Candidatus Dormibacteraeota bacterium
  source 1..50: mol_type = genomic DNA
aactgctatatcgtgacttacgccgtagcgtgccttacggagtagcatat

SEQ ID NO: 45400 - DNA, 40 bp, Candidatus Dormibacteraeota bacterium
  source 1..40: mol_type = genomic DNA
ggcagagaggacgccagaggtggtgtggagcgtgtccatc

SEQ ID NO: 45401 - protein, 522 aa, Mycobacteroides abscessus
MTDSPARAIVGARVSIFTDGKESQITQRTKGTAYAESQGWTVVGAFEDLDVSAIKKSPWDRPDLKQWLTDRADDWDALVFAKTDRVFRSAADCVKLSEWCRDHNKILVLVDDGIKLDYYHPDSEQDAFAGAMSKVFLILASVFAEIEGQRFVQRALDRVTQYRHQPRWAYGVPPYGFQVVDRPEGGKTLGHDLEAQQVLKGIATRLLSGDSLTRIAAELNETGVLSPADRLRQRAGKELRGSSWTVITVQTILTNPATQGIKTAKGKPVLDAGGEPVRVGPPSFDPETWGRIRSELAQRSQSGQQRRHSDNPLLGVAKCGVCGKNMRHFQRTKGGRHYRYYICGSTPKACPGVLINADTAELAVEASFLDVHTNRRIKERVWRAGSDHSSELDQTTNTIKALWEDRALGLFTTPEDQDMFRSQMAALVAKRDALALTPVIKAGWVDVETEQTYGAAWPDATPVERRKMLTDAGMKLTVYRANKYETYTDLDKALGDGSVGEDLHNEIEARAAEQRQRWGIPG

SEQ ID NO: 45402 - DNA, 50 bp, Mycobacteroides abscessus
  source 1..50: mol_type = genomic DNA
tgtttacggagtggccgaaagtggtcgcacttctgtacactccgtaacca

SEQ ID NO: 45403 - DNA, 40 bp, Mycobacteroides abscessus
  source 1..40: mol_type = genomic DNA
cggcacggtgtgaaagtggtcgtagacccacaccgagtcc

SEQ ID NO: 45404 - DNA, 50 bp, Mycobacteroides abscessus
  source 1..50: mol_type = genomic DNA
tgtttacggagtggccgaaagtgggggcacttctgtacactccgtaacca

SEQ ID NO: 45405 - DNA, 40 bp, Mycobacteroides abscessus
  source 1..40: mol_type = genomic DNA
cggcacagggtggaaggtgggggtgacccacgcccagacc

SEQ ID NO: 45406 - protein, 522 aa, Mycobacteroides abscessus
MATSPVRAVVGARVSIFTDGKESQITQRTKGTAYAESQGWTVVGTFEDLDVSAIKQSPWDRPDLRQWLTDRADDWDALIFAKTDRVFRSAADCVKLSEWCRDHKKILVLVDDGIKLDYFHPDSQQDAFAGAMSKVFLILASVFAEIEGQRFVQRALDRVTQYRHQPRWAYGVPPYGFQVVDRPEGGKALGHDLEAQRVLEGIATQLLSGDSLTRITSELNDAGVPSPADRLRQRAGKELRGSRWTVITVQTILTNPATQGIKTAKGKPVLDAGGEPVRVGPASFDPETWGRIHSELAQRSQSGQQRRHSDNPLLGVAKCGVCGKNMRHFQRTKGERHYRYYICGSTPKACPGVLINADNAELAVETSFLDVHTNRRIKERVWRAGSDHSAELEQTTDTIKALWEDRALGLFTTPEDQDMFRSQMAALVAKRDALAQTPVIKAGWIDVETEQTYGAVWPDATPVERRKMLTDAGMKLTVYRANQYETYVNLDKAIGEGAVGEALHNELEARAADERRRFGIPD

SEQ ID NO: 45407 - DNA, 50 bp, Mycobacteroides abscessus
  source 1..50: mol_type = genomic DNA
gcacttcggagtggatataagtacgaccactactatacactccgcaacca

SEQ ID NO: 45408 - DNA, 40 bp, Mycobacteroides abscessus; identical to SEQ ID NO: 23988
  source 1..40: mol_type = genomic DNA

SEQ ID NO: 45409 - DNA, 50 bp, Mycobacteroides abscessus
  source 1..50: mol_type = genomic DNA
gcacttcggagtggatataagtacccccactactatacactccgcaacca

SEQ ID NO: 45410 - DNA, 40 bp, Mycobacteroides abscessus
  source 1..40: mol_type = genomic DNA
ggtctgggcgtgggtcacccccaccttccaccctgtgccg

SEQ ID NO: 45411 - protein, 522 aa, Mycobacteroides abscessus
MATSLVRAVVGARVSIFTDGKESQITQRTKGTAYAESQGWTVVGAFEDLDVSAIKQSPWDRPDLKQWLTDRADDWDALVFAKTDRVFRSAADCVKLSEWCRDHKKILVLVDDGIKLDYFHPDSQQDAFAGAMSKVFLILASVFAEIEGQRFVQRALDRVTQYRHQPRWAYGVPPYGFQVVDRPEGGKTLGHDLEAQQVLQGIATRLLSGDSLTRITADLNETGVLSPADRLRQRTGKELRGSRWTVITVQTILTNPATQGIKTAKGKPVLDAGGEPVRVGPPSFDSETWGRIHSELAQRSQSGQQRRHSDNPLLGVAKCGVCGKNMRHFQRTKGGRHYRYYICGSTPKACPGVLINADNAELAVETSFLDVHTNRRIKERVWRAGSDHSAELEQTTNTITALWEDRALGLFTTPEDQDMFRSQMSALVAKRDALAQTPVIKAGWVEVETEQTYGAVWPDATPVERRKMLTDAGMKLTVYRANKYETYVDLDKAIGEGSVGEELHSELEARAAEERRRWGMPD

SEQ ID NO: 45412 - DNA, 50 bp, Mycobacteroides abscessus
  source 1..50: mol_type = genomic DNA
gcacttcggagtagatataagtacgaccactactatacactccgcaacca

SEQ ID NO: 45413 - DNA, 40 bp, Mycobacteroides abscessus; identical to SEQ ID NO: 23988
  source 1..40: mol_type = genomic DNA

SEQ ID NO: 45414 - DNA, 50 bp, Mycobacteroides abscessus
  source 1..50: mol_type = genomic DNA
gcacttcggagtagatataagtacccccactactatacactccgcaacca

SEQ ID NO: 45415 - DNA, 40 bp, Mycobacteroides abscessus; identical to SEQ ID NO: 45410
  source 1..40: mol_type = genomic DNA

SEQ ID NO: 45416 - protein, 522 aa, Mycobacteroides abscessus
MATSLVRAVVGARVSIFTDGKESQITQRTKGTAYAESQGWTVVGAFEDLDVSAIKQSPWDRPDLKQWLTDRADDWDALVFAKTDRVFRSAADCVKLSEWCRDHKKILVLVDDGIKLDYFHPDSQQDAFAGAMSKVFLILASVFAEIEGQRFVQRALDRVTQYRHQPRWAYGVPPYGFQVVDRPEGGKTLGHDLEAQQVLQGIATRLLSGDSLTRITADLNETGVLSPADRLRQRTGKELRGSRWTVITVQTILTNPATQGIKTAKGKPVLDAGGEPVRVGPPSFDSETWGRIHSELAQRSQSGQQRRHSDNPLLGVAKCGVCGKNMRHFQRTKGGRHYRYYICGSTPKACPGVLINADNAELAVETSFLDVHTNRRIKERVWRAGSDHSAELEQTTNTITALWEDRALGLFTTPEDQDMFRSQMAALVAKRDALAQTPVIKAGWVDVETEQTYGAVWPDATPVERRKMLTDAGMKLTVYRANKYETYVDLDKAIGEGSVGEELHSELEARAAEERRRWGMPD

SEQ ID NO: 45417 - DNA, 50 bp, Mycobacteroides abscessus; identical to SEQ ID NO: 45412
  source 1..50: mol_type = genomic DNA

SEQ ID NO: 45418 - DNA, 40 bp, Mycobacteroides abscessus; identical to SEQ ID NO: 23988
  source 1..40: mol_type = genomic DNA

SEQ ID NO: 45419 - DNA, 50 bp, Mycobacteroides abscessus; identical to SEQ ID NO: 45414
  source 1..50: mol_type = genomic DNA

SEQ ID NO: 45420 - DNA, 40 bp, Mycobacteroides abscessus; identical to SEQ ID NO: 45410
  source 1..40: mol_type = genomic DNA

SEQ ID NO: 45421 - protein, 522 aa, Mycobacteroides abscessus
MATSLVRAVVGARVSIFTDGKESQITQRTKGTAYAESQGWTVVGAFEDLDVSAIKQSPWDRPDLKQWLTDRADDWDALVFAKTDRVFRSAADCVKLSEWCRDHKKILVLVDDGIKLDYFHPDSQQDAFAGAMSKVFLILASVFAEIEGQRFVQRALDRVTQYRHQPRWAYGVPPYGFQVVDRPEGGKTLGHDLEAQQVLQGIATRLLSGDSLTRITADLNETGVLSPADRLRQRTGKELRGSRWTVITVQTILTNPATQGIKTAKGKPVLDAGGEPVRVGPPSFDSETWGRIHSELAQRSQSGQQRRHSDNPLLGVAKCGVCGKNMRHFQRTKGGRHYRYYICGSTPKACPGVLINADNAELAVETSFLDVHTNRRIKERVWRAGSDHSAELEQTTNTITALWEDRALGLFTTPEDQDMFRSQMSALVAKRDALAQTPVIKAGWVDVETEQTYGAVWPDATPVERRKMLTDAGMKLTVYRANKYETYVDLDKAIGEGSVGEELHSELEARAAEERRRWGMPD

SEQ ID NO: 45422 - DNA, 50 bp, Mycobacteroides abscessus; identical to SEQ ID NO: 45412
  source 1..50: mol_type = genomic DNA

SEQ ID NO: 45423 - DNA, 40 bp, Mycobacteroides abscessus; identical to SEQ ID NO: 23988
  source 1..40: mol_type = genomic DNA

SEQ ID NO: 45424 - DNA, 50 bp, Mycobacteroides abscessus; identical to SEQ ID NO: 45414
  source 1..50: mol_type = genomic DNA

SEQ ID NO: 45425 - DNA, 40 bp, Mycobacteroides abscessus; identical to SEQ ID NO: 45410
  source 1..40: mol_type = genomic DNA

SEQ ID NO: 45426 - protein, 522 aa, Mycobacteroides abscessus
MATSLVRAVVGARVSIFTDGKESQITQRTKGTAYAESQGWTVVGAFEDLDVSAIKQSPWDRPDLKQWLTDRADDWDALVFAKTDRVFRSAADCVKLSEWCRDHKKILVLVDDGIKLDYFHPDSQQDAFAGAMSKVFLILASVFAEIEGQRFVQRALDRVTQYRHQPRWAYGVPPYGFQVVDRPEGGKTLGHDLEAQQVLQGIATRLLSGDSLTRITAELNETGVLSPADRLRQRTGKELRGSRWTVITVQTILTNPATQGIKTAKGKPVLDAGGEPVRVGPPSFDSETWGRIHSELAQRSQSGQQRRHSDNPLLGVAKCGVCGKNMRHFQRTKGGRHYRYYICGSTPKACPGVLINADNAELAVETSFLDVHTNRRIKERVWRAGSDHSAELEQTTNTITALWEDRALGLFTTPEDQDMFRSQMAALVAKRDALAQTPVIKAGWVDVETEQTYGAVWPDATPVERRKMLTDAGMKLTVYRANKYETYVDLDKAIGEGSVGEHLHSELEARAAEERRRWGMPD

SEQ ID NO: 45427 - DNA, 50 bp, Mycobacteroides abscessus; identical to SEQ ID NO: 45412
  source 1..50: mol_type = genomic DNA

SEQ ID NO: 45428 - DNA, 40 bp, Mycobacteroides abscessus; identical to SEQ ID NO: 23988
  source 1..40: mol_type = genomic DNA

SEQ ID NO: 45429 - DNA, 50 bp, Mycobacteroides abscessus; identical to SEQ ID NO: 45414
  source 1..50: mol_type = genomic DNA

SEQ ID NO: 45430 - DNA, 40 bp, Mycobacteroides abscessus; identical to SEQ ID NO: 45410
  source 1..40: mol_type = genomic DNA

SEQ ID NO: 45431 - protein, 522 aa, Mycobacteroides abscessus
MATSPVRAVVGARVSIFTDGKESQITQRTKGTAYAESQGWTVVGTFEDLDVSAIKQSPWDRPDLRQWLTDRADDWDALIFAKTDRVFRSAADCVKLSEWCRDHKKILVLVDDGIKLDYFHPDSQQDAFAGAMSKVFLILASVFAEIEGQRFVQRALDRVTQYRHQPRWAYGVPPYGFQVVDRPEGGKALGHDLEAQRVLEGIATQLLSGDSLTRITSELNDAGVPSPADRLRQRAGKELRGSRWTVITVQTILTNPATQGIKTAKGKPVLDAGGEPVRVGPASFDPETWGRIHSELAQRSQSGQQRRHSDNPLLGVAKCGVCGKNMRHFQRTKGERHYRYYICGSTPKACPGVLINADNAEQAVETSFLAVHTNRRIKERVWRAGSDHSAELEQTTNTIKALWEDRALGLFTTPEDQDMFRSQMAALVAKRDALAQTPVIKAGWIDVETEQTYGAVWPDATPVERRKMLTDAGMKLTVYRANQYETYVNLDKAIGEGAVGEELHNELEARAADERRRFGIPD

SEQ ID NO: 45432 - DNA, 50 bp, Mycobacteroides abscessus; identical to SEQ ID NO: 45407
  source 1..50: mol_type = genomic DNA

SEQ ID NO: 45433 - DNA, 40 bp, Mycobacteroides abscessus; identical to SEQ ID NO: 23988
  source 1..40: mol_type = genomic DNA

SEQ ID NO: 45434 - DNA, 50 bp, Mycobacteroides abscessus; identical to SEQ ID NO: 45409
  source 1..50: mol_type = genomic DNA

SEQ ID NO: 45435 - DNA, 40 bp, Mycobacteroides abscessus; identical to SEQ ID NO: 45410
  source 1..40: mol_type = genomic DNA

SEQ ID NO: 45436 - protein, 522 aa, Mycobacteroides abscessus
MATSLVRAVVGARVSIFTDGKESQITQRTKGTAYAESQGWTVVGAFEDLDVSAIKQSPWDRPDLKQWLTDRADDWDALVFAKTDRVFRSAADCVKLSEWCRDHKKILVLVDDGIKLDYFHPDSQQDAFAGAMSKVFLILASVFAEIEGQRFVQRALDRVTQYRHQPRWAYGVPPYGFQVVDRPEGGKTLGHDLEAQQVLQGIATRLLSGDSLTRITADLNETGVLSPADRLRQRTGKELRGSRWTVITVQTILTNPATQGIKTAKGKPVLDAGGEPVRVGPPSFDSETWGRIHSELAQRSQSGQQRRHSDNPLLGVAKCGVCGKNMRHFQRTKGGRHYRYYICGSTPKACPGVLINADNAELAVETSFLDVHTNRRIKERVWRAGSDHSAELEQTTNTITALWEDRALGLFTTPEDQDMFRSQMAALVAKRDALAQTPVIKAGWVDVETEQTYGAVWPDATPVERRKMLTDAGMKLTVYRANKYETYVDLDKAIGEGSVGEELHSELEARAADERRRFGIPD

SEQ ID NO: 45437 - DNA, 50 bp, Mycobacteroides abscessus; identical to SEQ ID NO: 45412
  source 1..50: mol_type = genomic DNA

SEQ ID NO: 45438 - DNA, 40 bp, Mycobacteroides abscessus; identical to SEQ ID NO: 23988
  source 1..40: mol_type = genomic DNA

SEQ ID NO: 45439 - DNA, 50 bp, Mycobacteroides abscessus; identical to SEQ ID NO: 45414
  source 1..50: mol_type = genomic DNA

SEQ ID NO: 45440 - DNA, 40 bp, Mycobacteroides abscessus; identical to SEQ ID NO: 45410
  source 1..40: mol_type = genomic DNA

SEQ ID NO: 45441 - protein, 522 aa, Mycobacteroides abscessus
MATSLVRAVVGARVSIFTDGKESQITQRTKGTSYAESQGWTVVGAFEDLDVSAIKQSPWDRPDLKQWLTDRADDWDALVFAKTDRVFRSAADCVKLSEWCRDHKKILVLVDDGIKLDYFHPDSQQDAFAGAMSKVFLILASVFAEIEGQRFVQRALDRVTQYRHQPRWAYGVPPYGFQVVDRPEGGKTLGHDLEAQQVLQGIATRLLSGDSLTRITADLNETGVLSPADRLRQRTGKELRGSSWTVITVQTILTNPATQGIKTAKGKPVLDAGGEPVRVGPPSFDSETWGRIHSELAQRSQSGQQRRHSDNPLLGVAKCGVCGKNMRHFQRTKGGRHYRYYICGSTPKACPGVLINADNAELAVETSFLDVHTNRRIKERVWRAGSDHSAELEQTTNTITALWEDRALGLFTTPEDQDMFRSQMAALVAKRDALAQTPVIKAGWIDVETEQTYGAVWPDATPVERRKMLTDAGMKLTVYRANKYETYVDLDKAIGEGAVGEELHSELEARAAEERRRWGMPD

SEQ ID NO: 45442 - DNA, 50 bp, Mycobacteroides abscessus; identical to SEQ ID NO: 45412
  source 1..50: mol_type = genomic DNA

SEQ ID NO: 45443 - DNA, 40 bp, Mycobacteroides abscessus; identical to SEQ ID NO: 23988
  source 1..40: mol_type = genomic DNA

SEQ ID NO: 45444 - DNA, 50 bp, Mycobacteroides abscessus; identical to SEQ ID NO: 45414
  source 1..50: mol_type = genomic DNA

SEQ ID NO: 45445 - DNA, 40 bp, Mycobacteroides abscessus; identical to SEQ ID NO: 45410
  source 1..40: mol_type = genomic DNA

SEQ ID NO: 45446 - protein, 522 aa, Mycobacteroides abscessus
MTTSLVRAVVGARVSIFTDGKESQITQRTKGTAYAESQGWTVVGAFEDLDVSAIKKSPWDRPDLKQWLTDRADDWDALVFAKTDRVFRSAADCVKLSEWCRDHKKILVLVDDGIKLDYFHPDSQQDAFAGAMSKVFLILASVFAEIEGQRFVQRALDRVTQYRHQPRWAYGVPPYGFQVVDRPEGGKTLGHDLEAQQVLQGIATRLLGGDSLTRITADLNETGVLSPADRLRQRTGKELRGSRWTVITVQTILTNPATQGIKTAKGKPVLDAGGEPVRVGPPSFDSETWGRIHSELAQRSQSGQQRRHSDNPLLGVAKCGVCGKNMRHFQRTKGGRHYRYYICGSTPKACPGVLINADNAELAVETSFLDVHTNRRIKERVWRAGSDHSSELEQTTNTITALWEDRALGLFTTPEDQDMFRSQMAALVAKRDALAQTPVIKAGWVDVETEQTYGAVWPDATPVERRKMLTDAGMKLTVYRANKYETYVDLDKAIGEGSVGEHLHSELEARAAEERRRWGMPD

SEQ ID NO: 45447 - DNA, 50 bp, Mycobacteroides abscessus; identical to SEQ ID NO: 45412
  source 1..50: mol_type = genomic DNA

SEQ ID NO: 45448 - DNA, 40 bp, Mycobacteroides abscessus; identical to SEQ ID NO: 23988
  source 1..40: mol_type = genomic DNA

SEQ ID NO: 45449 - DNA, 50 bp, Mycobacteroides abscessus; identical to SEQ ID NO: 45414
  source 1..50: mol_type = genomic DNA

SEQ ID NO: 45450 - DNA, 40 bp, Mycobacteroides abscessus; identical to SEQ ID NO: 45410
  source 1..40: mol_type = genomic DNA

SEQ ID NO: 45451 - protein, 522 aa, Mycobacteroides abscessus
MTTSLVRAVVGARVSIFTDGKESQITQRTKGTAYAESQGWTVVGAFEDLDVSAIKKSPWDRPDLKQWLTDRADDWDALVFAKTDRVFRSAADCVKLSEWCRDHKKILVLVDDGIKLDYFHPDSQQDAFAGAMSKVFLILASVFAEIEGQRFVQRALDRVTQYRHQPRWAYGVPPYGFQVVDRPEGGKTLGHDLEAQQVLQGIATRLLSGDSLTRITADLNETGVLSPADRLRQRTGKELRGSRWTVITVQTILTNPATQGIKTAKGKPVLDAGGEPVRVGPPSFDSETWGRIHSELAQRSQSGQQRRHSDNPLLGVAKCGVCGKNMRHFQRTKGGRHYRYYICGSTPKACPGVLINADNAELAVETSFLDVHTNRRIKERVWRAGSDHSAELEQTTNTITALWEDRALGLFTTPEDQDMFRSQMAALVAKRDALAQTPVIKAGWVDVETEQTYGAVWPDATPVERRKMLTDAGMKLTVYRANKYETYVDLDKAIGEGSVGEELHSELEARAAEERRRWGMPD

SEQ ID NO: 45452 - DNA, 50 bp, Mycobacteroides abscessus; identical to SEQ ID NO: 45412
  source 1..50: mol_type = genomic DNA

SEQ ID NO: 45453 - DNA, 40 bp, Mycobacteroides abscessus; identical to SEQ ID NO: 23988
  source 1..40: mol_type = genomic DNA

SEQ ID NO: 45454 - DNA, 50 bp, Mycobacteroides abscessus; identical to SEQ ID NO: 45414
  source 1..50: mol_type = genomic DNA

SEQ ID NO: 45455 - DNA, 40 bp, Mycobacteroides abscessus; identical to SEQ ID NO: 45410
  source 1..40: mol_type = genomic DNA

SEQ ID NO: 45456 - protein, 522 aa, Mycobacteroides abscessus
MTANSTRAIVGARVSIFTDGKESQITQRTKGTAYAESQGWTVVGAFEDLDVSAIKQSPWDRPDLKQWLTDRADDWDALVFAKTDRVFRSAADCVKLSEWCRDHKKILVLVDDGIKLDYYHPDSQQDAFAGAMSKVFLILASVFAEIEGQRFVQRALDRVTQYRHQPRWAYGVPPYGFQVVDRPEGGKTLGHDLEAQQVLQGIATRLLGGDSLTRITADLNETGVLSPADRLRQRAGKELRGSRWTVITVQTILTNPATQGIKTAKGKPVLDAGGEPVRVGPPSFDSETWGRIHSELAQRSQSGQQRRHSDNPLLGVAKCGACGKNMRHFQRTKGGRHYRYYICGSTPKACPGVLINADNAELAVETSFLDVHTNRRIKERVWRAGSDHSAELEQTTNTIKALWEDRALGLFTTPEDQDMFRSQIAALVAKRDALALTPVIKAGWVDVETEQTYGAAWPDATPVERRKMLTDAGMKLTVYRANEYETCVDLDKAIGEGSVGEELHNELEARAADERRRCGIPD

SEQ ID NO: 45457 - DNA, 50 bp, Mycobacteroides abscessus
  source 1..50: mol_type = genomic DNA
tttttacggagtggctgaaagtggtcgcacttctgtacacttcgtaacca

SEQ ID NO: 45458 - DNA, 40 bp, Mycobacteroides abscessus; identical to SEQ ID NO: 45403
  source 1..40: mol_type = genomic DNA

SEQ ID NO: 45459 - DNA, 50 bp, Mycobacteroides abscessus
  source 1..50: mol_type = genomic DNA
tttttacggagtggctgaaagtgggggcacttctgtacacttcgtaacca

SEQ ID NO: 45460 - DNA, 40 bp, Mycobacteroides abscessus; identical to SEQ ID NO: 45405
  source 1..40: mol_type = genomic DNA

SEQ ID NO: 45461 - protein, 512 aa, Brevibacterium antiquum
MAELVWGGYARISEDPRDERSGVRRQREDIDAEIVRRGGESLDEARFYLENDTSAYKRKRVTITDEYGEQRQAYRVIRPVWAQALRDLRAGVITALAVYDLDRLARDPRDLEDAIEVVQHHGSLIISATSAGTDLMSDSGRAMARVMVTMAQKSSADTARRVARAHLESAHEGRPVGGSRPFGFLADKVTHCPVEAPLVRKAAQDIIDGASIRGIAEEWAAAGIKTVRGGAWNRSVIRHMLSNPRLAGWRVHQGKIATDRDGKPVRLVQPQTLAVVGEDGKPARAKNPRAGEPVEPLLDQDTFDRLQEALVRPDNRKVKPRRGARRYLLSGLVRCAVCHRQMYGNRWGETGGEMRFYYVCQGGADDKHAVSVSGHGTDAFLERVVLDRLAVEDMERPAPEFSGDGRLAQVKEAITELMSVHRTGLLSGSVVFPQVQQLQEEQERLEAERGEFIRATAGPTTARVTPEVWAGMSTDKRRAIVETLIEAVLIHPGRQRQNKLDYDRIEVVWRQD

SEQ ID NO: 45462 - DNA, 50 bp, Brevibacterium antiquum
  source 1..50: mol_type = genomic DNA
ccccatggtcagcgcacctgctggtcgcaccacatattttaaccatgtag

SEQ ID NO: 45463 - DNA, 40 bp, Brevibacterium antiquum
  source 1..40: mol_type = genomic DNA
ttccatcggcacctgctggtcgagcagcatgcccgtcagc

SEQ ID NO: 45464 - DNA, 50 bp, Brevibacterium antiquum
  source 1..50: mol_type = genomic DNA
ccccatggtcagcgcacctgctggccgcaccacatattttaaccatgtag

SEQ ID NO: 45465 - DNA, 40 bp, Brevibacterium antiquum
  source 1..40: mol_type = genomic DNA
gtccgtctgcacctgctgacccagctgcctgcctgtgtgc

SEQ ID NO: 45466 - protein, 457 aa, Rhodococcus erythropolis
MRAFIYCRISADRIGAGLGVERQRQDCESLAETLGWTVVDTFIDNDLSAYSGKPRPAYLQMLEAIQAGAATAIVAWHTDRLHRSPAELETFISLCDKHSTIVRTVQAGELDLSSPSGQMTARIVGAVARHEIDHARKRMVAAHAQAAENGRAHGKIPFGYSAVRDDSGAITSRVPDAGEAALVQEAVARILGGEATRAVTQDWTSRGIVTRAGKPWNPRSLREMLMRPTLAGLRSHRGSTSKGSWEPIISEDEHVRLVALYSDPSRRTNRDTRAKHLLSGIALCGLCGSSVQWLSAKGYPNYACTGCTRISRSVKFVDGIVEETLIDLVSNRQYERVTEPVISRQSDVESELAALQARMDTAADMLADGDLDRLGYQRVKSRVEPRLAELKKLMRPVSSSAILDDLRRGEPLQNWSRMTLDARRAAIRLAFGGVVLLKSKGKRRDDTTVLFVPPRDL

SEQ ID NO: 45467 - DNA, 50 bp, Rhodococcus erythropolis
  source 1..50: mol_type = genomic DNA
gaccatgtgttgtgacgcatgaaccagtacaaccgggactccccatgata

SEQ ID NO: 45468 - DNA, 40 bp, Rhodococcus erythropolis
  source 1..40: mol_type = genomic DNA
caccatgatcagcatgaaccagtagagccagcccatcacg

SEQ ID NO: 45469 - DNA, 50 bp, Rhodococcus erythropolis
  source 1..50: mol_type = genomic DNA
gaccatgtgttgtgacgcatgaacatgtacaaccgggactccccatgata

SEQ ID NO: 45470 - DNA, 40 bp, Rhodococcus erythropolis
  source 1..40: mol_type = genomic DNA
cacgatgatcagcaggatcatgaacaccgaccccagcacc

SEQ ID NO: 45471 - protein, 462 aa, Rhodococcus qingshengii
MRAVIYTRVSSDPTGRGRSVTEQESECRAICEREGWTVAEVLTDNDIGASRHSGKDRPAYRKLADTLQRGDVLVTWEASRAQRDLAAYVELRNLCAERDVRWSYSGKLYDLGRGDDRFTTGLDALLAEKEAEQIRERVLRAQRANAEMGLAHGRIPYGYLAVRDNATGKIVERVPHPEQAPIVKEIVARFLAGESLWAITKDLNDREIATPGTSEQWRASILTQMLKRPTYAGLRTHKGAITGPGNWEGLISEADHNKLIAVLTNPARVAHHGTEPKHLLSGIAVCGVCKAPVHRLKNGGYPAYVCSKGRCVGRNIERVDLLVTERIIRRLEDPAMLGTIGVKDDNSQPALDEIARLRASVEEAAASALAGDMTWATVGKVEIMVDEKIKELQKTVQRTVKSPLVAAAVGPQARDVWEEYTIPERRELIRTLVSVVIEPTNRAGRVFDPRSVVVEWDQGYEF

SEQ ID NO: 45472 - DNA, 50 bp, Rhodococcus qingshengii
  source 1..50: mol_type = genomic DNA
cgctatcccttctgcaacctgaaccagtacaagttgatgaacagatagtg

SEQ ID NO: 45473 - DNA, 40 bp, Rhodococcus qingshengii; identical to SEQ ID NO: 45468
  source 1..40: mol_type = genomic DNA

SEQ ID NO: 45474 - DNA, 50 bp, Rhodococcus qingshengii
  source 1..50: mol_type = genomic DNA
cgctatcccttctgcaacctgaacatgtacaagttgatgaacagatagtg

SEQ ID NO: 45475 - DNA, 40 bp, Rhodococcus qingshengii; identical to SEQ ID NO: 45470
  source 1..40: mol_type = genomic DNA

SEQ ID NO: 45476 - protein, 536 aa, Blautia massiliensis; identical to SEQ ID NO: 13136

SEQ ID NO: 45477 - DNA, 50 bp, Blautia massiliensis; identical to SEQ ID NO: 3602
  source 1..50: mol_type = genomic DNA

SEQ ID NO: 45478 - DNA, 40 bp, Blautia massiliensis
  source 1..40: mol_type = genomic DNA
aacggacaatccgggtgcaaagtcacaaggaataaaacag

SEQ ID NO: 45479 - DNA, 50 bp, Blautia massiliensis
  source 1..50: mol_type = genomic DNA
ctacttctttatcacacatcagcaattgctcatgtacggtaaggaagcaa

SEQ ID NO: 45480 - DNA, 40 bp, Blautia massiliensis
  source 1..40: mol_type = genomic DNA
aaagaacattctggctgtaatgtgagaaggaaaaaaagag

SEQ ID NO: 45481 - protein, 463 aa, Parageobacillus thermoglucosidasius
MKVATYVRVSTDEQAKEGFSIPAQRERLRAFCESQGWEIVEEYIEEGWSAKDLDRPQMQRLLKDIKKGNIDIVLVYRLDRLTRSVLDLYLLLQTFEKYNVAFRSATEVYDTSTAMGRLFITLVAALAQWERENLAERVKFGIEQMIDEGKKPGGHSPYGYKFDKDFNCTIIEDEANTVRMIYRMYCDGYGYHSIAKRLNELGIKPRIAKEWNHNSVRDILTNDIYIGTYRWGNKVVLNNHPPIISETLFRKVQKEKEKRRVDRTRVGKFLLTGLLYCGNCNGHKMQGTFDKREQKTYYRCLKCNRITNEKNILEPLLDEIQLLITSKEYFMSKFSDQYDQKEEVDVSALKKELEKIKRQKEKWYDLYMDDRNPIPKEDLFAKINELNKKEEEIYNKLNEVEPEDKEPVEEKYNRLSKMIDFKQQFEQANDFTKKELLFSIFEKIVIYREKGKLKKITLDYTLK

SEQ ID NO: 45482 - DNA, 50 bp, Parageobacillus thermoglucosidasius
  source 1..50: mol_type = genomic DNA
acctgtataagagttaatgttaggcatgtaaagttaactttaaaacaggt

SEQ ID NO: 45483 - DNA, 40 bp, Parageobacillus thermoglucosidasius
  source 1..40: mol_type = genomic DNA
tccggtcattaatttcgcgcagctgacacaaacagacgga

SEQ ID NO: 45484 - DNA, 50 bp, Parageobacillus thermoglucosidasius
  source 1..50: mol_type = genomic DNA
acctgtataagagttaatgttaggagtgtaaagttaactttaaaacaggt

SEQ ID NO: 45485 - DNA, 40 bp, Parageobacillus thermoglucosidasius
  source 1..40: mol_type = genomic DNA
acaggtaattaattcatataggctgacacaatcagaagga

SEQ ID NO: 45486 - protein, 505 aa, Streptomyces roseoverticillatus
MTADEKDERADARLRRALRASQTAGAQRARKVGGRANWQGESAAIYCRISHVNDDDQTGVDRQERICREVAERLGLTVSEDQVFVDNNRSAWQRKRKRPGWEALLAEAGKGRVRHVLTYHPDRLMRQPRDLEELLQIADDHDITLHGQANRRDLSDPDDRFFLRIEVAHACRSSDDTSRRLIDAMVDRAKDGRPHTGRRRYGYDKTGMEIIPEEAAIVREVFTRYLDGESPVQLAKDLYDRGEKTAEGRYWNAPRVRDLLDNRHVAGIRVFRGEEIGDGEWPAIIDRGMWLEVRERRAYRAAARKTSDQAGRFYLLRGIVICTGCSKPMGGAGGKYICNGHTHRLDVPRCNRAVSAPILEDFVTKAAIYLLERLDLANAPTPSTLSEEDQAAIDADRQELEDLKDMWESQELRTREYREMRKKVEARIAEVERKMIVRPAADVLKGLVGPDARESWESLEKAGNHQRMNAVMRFLFEAVKIKEAAKKGRQFDYGRIDIDQSPIWL

SEQ ID NO: 45487 - DNA, 50 bp, Streptomyces roseoverticillatus
  source 1..50: mol_type = genomic DNA
aaggcctacgaacaccgcttgacttgagtcaagcagtgttcataggctct

SEQ ID NO: 45488 - DNA, 40 bp, Streptomyces roseoverticillatus
  source 1..40: mol_type = genomic DNA
gaagcgcgaccggatgacgtggatcaagccctccttcctc

SEQ ID NO: 45489 - DNA, 50 bp, Streptomyces roseoverticillatus
  source 1..50: mol_type = genomic DNA
aaggcctacgaacaccgcttgactttagtcaagcagtgttcataggctct

SEQ ID NO: 45490 - DNA, 40 bp, Streptomyces roseoverticillatus
  source 1..40: mol_type = genomic DNA
gaagcagcattggataatgttgaccatgccctcctttctc

SEQ ID NO: 45491 - protein, 585 aa, Deinococcus actinosclerus
MERTVIYTRVSGKGQDDNYSKGVQFEACESFAGQHNWQIHSHLHDTQSGKDFQSRANFQECIRLVRLGVVQYVTFSVIDRIGRDFQVFESFTKEIYQHGGKIAVAGNNKVYQSYDEFWLECISEVAEAVKERLKIKKRTGDARMKAFLEGSYMKRAPFGYVIETRIKKVNGMKERFNDLEVVKFQAESIERILEKYVETRSIAAVCRFANEEGLHHSIEATGEVKTFWHYQTVRTIIEEADMYAGIPQQVKFRDTPPRKDKETGELKIPKDNPEITYTYPEFISKELAKSVRLARMQGQGRVNETDRPKPFHRLVLCSCGRHAVYETHQTLKLSKFMCSSWSQVKQAKNVRGKEYHANPCKHSISPVFFAGALEAYLEALDPDGFVSTAELALLEVFDTYTGMQGLLNSIDAKKTELSEIKTSLVRRSILLDPENEADKVKLAVFDEEVVKLQGEINQLAEQYRLEEARKAKIETLFNELDITYEVRESFLNQHGDFNMSKMVPKLDKVRESLTALKTALAAEAWDEVSRLMVFLGLRFEADFSEPGKLARRASIKVRFLMEDDIFTPAEGEDGDPSKGDFFGTT

SEQ ID NO: 45492 - DNA, 50 bp, Deinococcus actinosclerus
  source 1..50: mol_type = genomic DNA
taaaggggattttttcggaactaccaatatttccgcacaaaccccactct

SEQ ID NO: 45493 - DNA, 40 bp, Deinococcus actinosclerus
  source 1..40: mol_type = genomic DNA
gaaggggtggcagtactaccacatcttccacattcccttc

SEQ ID NO: 45494 - DNA, 50 bp, Deinococcus actinosclerus
  source 1..50: mol_type = genomic DNA
taaaggggattttttcggaactacctatatttccgcacaaaccccactct

SEQ ID NO: 45495 - DNA, 40 bp, Deinococcus actinosclerus
  source 1..40: mol_type = genomic DNA
gaaggggtggtagtattaccttccctttttcattcctttt

SEQ ID NO: 45496 - protein, 543 aa, Vibrio parahaemolyticus
MTEEKQRFAVTYQRFSSGRQIGNSSLDRQTDTQKAWLRQNPNVTVIDNFVDKAMSGWSGKHLKEGSLGQLMKAIEDGIIQPGTLILVEHFSRLTRQNIDNAEELVKRIWKAGITLVTVRDNTEYPPEAVNNMSLRIRLIVEMEQAFKESEWRSAKVKASYTRREKLAKEEGKAPRIRKPFWLNPDGTLNHLHQAVKDMFNWYLEGLGQQRIVVRLREKYPDTAIQKINPSTVMRWIQSEIVRGYWRGNRVYEPAVDDQLFFDVQAIHKSRLYKNVKPDRQWPLSGLMQCGVCGRGMSIQKSGKSNPVVRCSSKQRDHSCDRKTTFPYFIVHMYMMTHVLQHAIRLHSDKSSNKGLQIELGKVERKLATTRKKLNDEKEFYNKASNEGQNTTMILQLMNETYQKVAELEEQEKSLKASLKQNNHSVSPESRDLVLTPETFNLEMHKLGFKIVVGEQELSTIGFDKPVSKMVYVGYCRKERAYKYADSSSDFIKVWPSSLVTDELLNMQMLKNYINSSSGLRYIWDNLYEDDLEENLAKKLKEKR

SEQ ID NO: 45497 - DNA, 50 bp, Vibrio parahaemolyticus
  source 1..50: mol_type = genomic DNA
aatgtgcacacatattctttaagtgagctgtaggcgtaggtgtgcaaatt

SEQ ID NO: 45498 - DNA, 40 bp, Vibrio parahaemolyticus
  source 1..40: mol_type = genomic DNA
attggatcacttactgtgcgagctgaaagcaggtcagtca

SEQ ID NO: 45499 - DNA, 50 bp, Vibrio parahaemolyticus
  source 1..50: mol_type = genomic DNA
aatgtgcacacatattctttaagtgtgctgtaggcgtaggtgtgcaaatt

SEQ ID NO: 45500 - DNA, 40 bp, Vibrio parahaemolyticus; identical to SEQ ID NO: 14435
  source 1..40: mol_type = genomic DNA

SEQ ID NO: 45501 - protein, 543 aa, Vibrio parahaemolyticus
MIEEKQRFAVTYQRFSSGRQIGNSSLDRQTDTQKAWLRQNPNVTVIDNFVDEAMSGWSGKHLKEGSLGQLMKAIEEGIIQPGTLILVEHFSRLTRQNIDNAEELVKRIWKAGITLVTVRDNTEYPPEAVNNMSLRIRLIVEMEQAFRESEWRSAKVKASYTRREKLAKEEGKAPRIRKPFWLNPDGTLNHLHQAVKDMFNWYLEGLGQQRIVVRLREKYPDTAIQKINPSTVMRWIQSEIVRGYWRGNRVYEPAVDDQLFFDVQTIHKSRLYKNVKPDRQWPLSGLMQCGVCGRGMSIQKSGKSSPVVRCSSKQRDRSCHRKTTFPYFIVHMYMMTHVLHRAIRLHSDKSSNKGLQIDLGKVERKLATNRKKLNDEKEFYNKASNEGQNTTMILQLMNETYQKVAELEEQEKSLKASLKQNNHSVSSESRDLVLTPETFNLEMHKLGFKIVVGEQVLSTIGFDKPVPKLAYAGYCRKKRAYKYATGSSDFLHVWPSSLVTDELLNMQNLKDYINSSNGLRYIWDNLYEDDLEEKLAKKLNKKG

SEQ ID NO: 45502 - DNA, 50 bp, Vibrio parahaemolyticus
  source 1..50: mol_type = genomic DNA
aatgtgcacacatattctttaaatgagctgtaggcgtaagtgtgcaactt

SEQ ID NO: 45503 - DNA, 40 bp, Vibrio parahaemolyticus; identical to SEQ ID NO: 45498
  source 1..40: mol_type = genomic DNA

SEQ ID NO: 45504 - DNA, 50 bp, Vibrio parahaemolyticus
  source 1..50: mol_type = genomic DNA
aatgtgcacacatattctttaaatgtgctgtaggcgtaagtgtgcaactt

SEQ ID NO: 45505 - DNA, 40 bp, Vibrio parahaemolyticus; identical to SEQ ID NO: 14435
  source 1..40: mol_type = genomic DNA

SEQ ID NO: 45506 - protein, 509 aa, Vibrio parahaemolyticus
MAQRKQAISYQRFSSDRQRNNSSLDRQSDSIKSWLKQNPDVDLIDQYVDEAMSGWSGKHIEQGSLGKLLQAIEEGIVRPETLILVEHFSRLSRQNIDKTEELLRKIWQHGITIVTIRDNGLYPPSTINDMPLRIRLIVEIEQAFKESEWRSAKVKGSYVKREKDAKNGLTPRMRRPFWLNKDGTLNDHHEVIKDIFNWYMEGLGQQRIIVKLKEKYQSVPSVQKMNPSTVMRWLTSDVVRGLWRGYKVYDAAVDDTLYFNVQTVHNSRLYHNVKPDRNWPLSGLLQCGVCGRGMSIQKSKGSLPVVRCSSKQRDKSCQRKTTFPYALVHLYMFNTVRKRASRLYTQKTVTKENALRLGQIDNDLVKLRTQLKEEKQLYDEASSEGKNGRLILKIMLETDERIQDLERERDSIQSSIEASNNLFISDDANNLVLTPRNFNLEMHKLGFKIVVGEYSLNTEGLSDKAPEWKYLGYSRKKRAYEWEVLGKKYFMPTGSFNDEVLMLEDKEKI

SEQ ID NO: 45507 - DNA, 50 bp, Vibrio parahaemolyticus
  source 1..50: mol_type = genomic DNA
cacatgcacacctatcactttagtgagctgatagcataggtgtgcagata

SEQ ID NO: 45508 - DNA, 40 bp, Vibrio parahaemolyticus; identical to SEQ ID NO: 45498
  source 1..40: mol_type = genomic DNA

SEQ ID NO: 45509 - DNA, 50 bp, Vibrio parahaemolyticus
  source 1..50: mol_type = genomic DNA
cacatgcacacctatcactttagtgtgctgatagcataggtgtgcagata

SEQ ID NO: 45510 - DNA, 40 bp, Vibrio parahaemolyticus; identical to SEQ ID NO: 14435
  source 1..40: mol_type = genomic DNA

SEQ ID NO: 45511 - protein, 576 aa, Paeniclostridium sordellii
MKKVEIIKANRSLSDRNKNNMRSILRVAAYCRVSTDSDDQLNSYNSQVSYYTDLIRKNNEWDFVDIYADEGITGTQISKRTNFQRLINDCMNGEIDMVITKSISRFARNTLDTLKYVRMLKEKNIAVYFEDEKINTLTMDGELLLVVLSSVAQQEVENISANVKKGLKMKMSRGELVGFQGCLGYDYNVDDKSISINREEAEIVRYIFNRYIEGAGGRLIGNELEQLGYKTKRGSSTWHESTILGIIKNEKYKGDVLLGKTFTLDPISKRRLENYGEEDQFYLREHHEPIVSEEIFDKAQAIRLKRSIPRGSHEVEGFKRQKYSRKYAFSCMLECAFCGGTLTRRSWHSGTNHSKVVWQCVVSTKRGKKYCEHSKGIPEKVIEDAFVESYKKLCGNNKEVLEEFLMRLSNTLNESNVEKEFLEIEKQIDVLDKKRKKLIDMRLEEIIDKESYEEKYDDLTVEIKKLSKKKQTLKASLINENTIKARLKEFRKTLERNEVLEKFDRYVFESIVDKVIVGTTNEDGTVDPYKITFVYKTGFDDKQDGNKFRNNKTLKACSKDKNDNKKECSHAKDDTC

SEQ ID NO: 45512 - DNA, 50 bp, Paeniclostridium sordellii
  source 1..50: mol_type = genomic DNA
ctaaagatgatacatgttgaaactgtagtgtcgctacgtcgaaaataagg

SEQ ID NO: 45513 - DNA, 40 bp, Paeniclostridium sordellii
  source 1..40: mol_type = genomic DNA
cactcctcatgtggagactgtagtaaaattaaagcgtgta

SEQ ID NO: 45514 - DNA, 50 bp, Paeniclostridium sordellii
  source 1..50: mol_type = genomic DNA
ctaaagatgatacatgttgaaactcaagtgtcgctacgtcgaaaataagg

SEQ ID NO: 45515 - DNA, 40 bp, Paeniclostridium sordellii
  source 1..40: mol_type = genomic DNA
cactcctcatgtcatgactcaaataaaatacaactgtgct

SEQ ID NO: 45516 - protein, 576 aa, Paeniclostridium sordellii
MKKVEIIKANRSLSDRNKNNMRSILRVAAYCRVSTDSDDQLNSYNSQVSYYTDLIRKNNEWDFVDIYADEGITGTQISKRTNFQRLINDCMNGEIDMVITKSISRFARNTLDTLKYVRMLKEKNIAVYFEDEKINTLTMDGELLLVVLSSVAQQEVENISANVKKGLKMKMSRGELVGFQGCLGYDYNVDDKSILINREEAEIVRYIFNRYIEGAGGRLIGNELEQLGYKTKRGSSTWHESTILGIIKNEKYKGDVLLGKTFTLDPISKRRLENYGEEDQFYLREHHEPIVSEEIFDKAQAIRLKRSIPRGSHEVEGFKRQKYSRKYAFSCMLECAFCGGTLTRRSWHSGTNHSKVVWQCVVSTKRGKKYCEHSKGIPEKVIEDAFVESYKKLCGNNKEVLEEFLMRLSNTLNESNVEKEFLEIEKQIDVLDKKRKKLIDMRLEEIIDKESYEEKYDDLTVEIKKLSKKKQTLKASLINENTIKARLKEFRKTLERNEVLEKFDRYVFESIVDKVIVGTTNEDGTVDPYKITFVYKTGFDDKQDGNKFRNNKTLKACSKDKNDNKKECSHAKDDTC

SEQ ID NO: 45517 - DNA, 50 bp, Paeniclostridium sordellii; identical to SEQ ID NO: 45512
  source 1..50: mol_type = genomic DNA

SEQ ID NO: 45518 - DNA, 40 bp, Paeniclostridium sordellii; identical to SEQ ID NO: 45513
  source 1..40: mol_type = genomic DNA

SEQ ID NO: 45519 - DNA, 50 bp, Paeniclostridium sordellii; identical to SEQ ID NO: 45514
  source 1..50: mol_type = genomic DNA

SEQ ID NO: 45520 - DNA, 40 bp, Paeniclostridium sordellii; identical to SEQ ID NO: 45515
  source 1..40: mol_type = genomic DNA

SEQ ID NO: 45521 - protein, 535 aa, Qipengyuania citrea
MTDLLPAAGYIRVSTRKQAEAGTSMDEQKTGIAREAERHGYTIVQWYIDGGISGRSANRPEFQRLIADSCSKSRPYVAVFIYNFSRFFRDDYETEGYRRKLEKNGVDLLSATQHITPGPHARLQRAIITAMDAAASDINAEQVTAVMRRNAEDGFWNGSQPPIGYETYTAEVRGKKHKKKLRIVSSEAAIVEYVYGAYVGAGSKASMGIGKLSQHLNDKGLSYRGRKFTPALVHTILTRQTYLGRHYYNVRDSRTGEKRPREEWIEVKVPAIIPEKTFDKVQAILKSRDPKMTPARSHSSPVLLSGIGRCGNPACNGTMMLMNGKGGQYRYYSCSNVRRKKDRSCGGNNVPMGKVDDAVLEVLQKRLLDPARLEKLLAQLLERSAGADAKRKRDIVTLRNERTAAETAIQRLFESIEAGLLDPKDKDLKTRLSGHQSRRAALSEQIDILERQCGDKRGRIDSETIAVFAASLKKKLADPGDPALRKNYVQAFVSEVVMTKEQLTVRGPVASLVQAISTPGAVSAPVRTSMVNWRA

SEQ ID NO: 45522 - DNA, 50 bp, Qipengyuania citrea
  source 1..50: mol_type = genomic DNA
gcgcacttccatggtaaactggcgcgcccgacatgatgatgatgggcact

SEQ ID NO: 45523 - DNA, 40 bp, Qipengyuania citrea
  source 1..40: mol_type = genomic DNA
gccaatcctgaaaatggtgcgcccggcaggactcgaacct

SEQ ID NO: 45524 - DNA, 50 bp, Qipengyuania citrea
  source 1..50: mol_type = genomic DNA
gcgcacttccatggtaaactggcgggcccgacatgatgatgatgggcact

SEQ ID NO: 45525 - DNA, 40 bp, Qipengyuania citrea
  source 1..40: mol_type = genomic DNA
gtcagccctgaatatggtgggcctagttggactggcacct

SEQ ID NO: 45526 - protein, 560 aa, Enterocloster asparagiformis
MPRIRKDKMARSYAEPFWKIGLYIRLSREDDNEDESESVINQEKILRDFVDSYFEPGTYVIVDVFADDGLTGTDTARPNFKRLEGCIVRKEVNCMIIKSLARGFRNLADQQKFLEEFIPINGARFICTGTPFIDTYANPHSASGLEVPIRGMFNEQFAATTSEEIRKTFKMKRERGEFIGAFAPYGYKKDPNDKNSLIVDEEAAEVVKSIYHWFVNEGYSKMGIAKRLNQMGEPNPEAYKKKKGFKYNNPNSDKNDGLWSASTIARILQNEVYTGVMVQGRNRVISYKVHKQINVPEEEWFVVPNTHEAIIDRETFEKAQALHKRDTRTAPGKQEVYLMSGFVRCADCKKAMRRKTARDIAYYSCRSYTDKKICSKHSIRQDKLENAVLAALQMQIALVDRLAEEIERINNAPVINRESKRLSYSLKQAEKQLKQYNDASDSLYLDWKSGEITKEEYRRLKGKIAEQIQQLEANISYLKEEMQVMADGIGTDDPYLTAFLKHKNIQSLNRGIMVELVKAVWVHENGEITVDFNFADEYQRIIDYIENNHNVIQVIESKAI

SEQ ID NO: 45527 - DNA, 50 bp, Enterocloster asparagiformis; identical to SEQ ID NO: 13407
  source 1..50: mol_type = genomic DNA

SEQ ID NO: 45528 - DNA, 40 bp, Enterocloster asparagiformis
  source 1..40: mol_type = genomic DNA
cactggctccaccggacccactggtcccactggcacaacc

SEQ ID NO: 45529 - DNA, 50 bp, Enterocloster asparagiformis
  source 1..50: mol_type = genomic DNA
tgttgtgcataaataaacggctctagtgccccgtcaatatatgcacaaca

SEQ ID NO: 45530 - DNA, 40 bp, Enterocloster asparagiformis
  source 1..40: mol_type = genomic DNA
cacaggggccacagggcacaggggtcccactgccactact

SEQ ID NO: 45531 - protein, 463 aa, Coprococcus catus
MSFFTPNPQLFGLRVVKYIRCSHDDQVLHGDTLEAQDLILEDFIKVNRMILVDTFIDEALTARKRFNKRKEFVRLLNGVKAHDFDLIIFTKLDRWFRNIGDYHKIQEILEANGVQWKAVTENYDTTTTNGRLHINIRLSVAQDECDRDSDRIKDVFAYKLKNKTYVSGSLPRGLKLDAEKHVIIDPEWNCFALDMFDRFEATCSKRDTQLFLQEKYNIRVCYDTVARYLKNPLFKGQYRDDPDFCPATISPERFERIQKLAIRNVRIRHTQQFYIFSGLLICSSCNHYMCGTVTYRRMADGSEKMYKNYRCNFKAQSKLCDRGKTYREADLEEYMLAHIRPALSDYIAKYEVTAASTVQKNPVTEIAKIERKMKKLYDLFMDDLIDKEAYRSEYDKFKAQIEELQKCSTAAPMRSLDSVKKLLSEDWEAVYHTFSDREKNTFWKSFVESVLVYEDGSMDIRFL

SEQ ID NO: 45532 - DNA, 50 bp, Coprococcus catus
  source 1..50: mol_type = genomic DNA
tgtcgtactaactatgcaccgcctgtcggtactgctttgttagtacaatc

SEQ ID NO: 45533 - DNA, 40 bp, Coprococcus catus
  source 1..40: mol_type = genomic DNA
cttagaatcaagatttcctgtcggctcatctgcaaatata

SEQ ID NO: 45534 - DNA, 50 bp, Coprococcus catus
  source 1..50: mol_type = genomic DNA
tgtcgtactaactatgcaccgcctttcggtactgctttgttagtacaatc

SEQ ID NO: 45535 - DNA, 40 bp, Coprococcus catus
  source 1..40: mol_type = genomic DNA
gttaaaaacaagatttgctttcctctaagctccaaaaata

SEQ ID NO: 45536 - protein, 497 aa, Microbacterium caowuchunii
MTGRLSRLPVRAGNRAIIYTRQSTYREESISLEVQEQAAREHCARNGYTVVGIESDPGVSGRSWKQRRGVQAALGAVEAGEADLIVVWRWSRLSRSRRDWAVAADRADLAGGRIESATEPNDQTAAGRFARGVMTELAAFESERIGEQWEEARQHRVARGLPSTGGTRFGYRIEEGSYRPAPETAPLLGEMYRLYLAGAGSAQICRMLNDSGVKRGRTGRPWHYQDVYQVMDTGFAAGLLVRTPPRPKDRPTASAPRQPVWEREFRPGIHEPVIDRATWDAYVAARQQRTTVRVRRGAPMLSGLIRCTDCGSTFTHTSWKAGRLYVCASGSRTDVVRQVSVAAHRIEAAVTEWVLGYAADLSRVAEAMASTEERAERVDMTARRAQQQLDRSDDRLTQLTLRLADGTITEAAYRLAAAAIEAEAAAARARLTAATRNPVRESAPQALPRDLARLWPGMTTEMQNSILRPLIDRIEVWPAAHRGDRSERWRIVPSWDA

SEQ ID NO: 45537 - DNA, 50 bp, Microbacterium caowuchunii
  source 1..50: mol_type = genomic DNA
tacaggacttagtgggcgactatgtcgaaagagtccatataacccatatt

SEQ ID NO: 45538 - DNA, 40 bp, Microbacterium caowuchunii
  source 1..40: mol_type = genomic DNA
gtcgatcttggagacgatgtcgaaactggagtcagccatg

SEQ ID NO: 45539 - DNA, 50 bp, Microbacterium caowuchunii
  source 1..50: mol_type = genomic DNA
tacaggacttagtgggcgactatgtggaaagagtccatataacccatatt

SEQ ID NO: 45540 - DNA, 40 bp, Microbacterium caowuchunii
  source 1..40: mol_type = genomic DNA
gtctaagagggagaagatgtggaagattgactcagccatg

SEQ ID NO: 45541 - protein, 662 aa, Erysipelotrichaceae bacterium I46
MRKLNTTYYKSNKIALYYRLSVADGDAESESIKNQRKQLRLYMEKHNLTYVDEYIDDGVSGMTFDRPDFNRLMQDIEKGRINTIITKSLERLGRDSNKVGFYVEKYFPEHRIRYLALNDNVDTAIECVSSDLILKIGFNDFYPYHASDNIKAVIYSKRQKGDYLSSFAPYGYIKDPADHHHLIIDDSSSKIIKRIFELYINNNSANAIADILTSEHISTPARYRKTGNLYETDTEVCYKWDKSFILNTIQNKVYLGCVLSNKYIKVSLKSKKSVRLDKKYLLCKENRHEPIIDKCTFDMANMVRLNKKMIAKDVHKAHHRFTLFGYTHDSSDYYSLVIDEKVAYIVHEIFDLYEQGYGYRNIAEICNDRNYITPKCYLKTKGSTTFKDVWTPDKIKCVLKNPSYYGCNVRKINGTKVITPNCHIPLIDKAQFDHVQELMKTKHKQATPLDKPILYKFLYCGCCGRKMQVTKITEKRKKLNIYCPAEKVKHIEPCSISQRFITYLDIEKHVTSRLHRLSKYVQSSKFEKKVEQIYLAPVASHVEERNRLEKELEIQMHKIDMIYSDRANNMISDTLFFDKIKEYQRSVISLNKQLDIERNIIFNYKQKSEEILDEAEILKNIFESENFIERFLDEIISKINVTDTTIEIVYKIKNPLITGESE

SEQ ID NO: 45542 - DNA, 50 bp, Erysipelotrichaceae bacterium I46
  source 1..50: mol_type = genomic DNA
tgggggtcacttttaccctcgacgtggttcgatgttcaaatgtgaccccc

SEQ ID NO: 45543 - DNA, 40 bp, Erysipelotrichaceae bacterium I46
  source 1..40: mol_type = genomic DNA
gatttttggcggctatccgtggttttaccgggatgagtta

SEQ ID NO: 45544 - DNA, 50 bp, Erysipelotrichaceae bacterium I46
  source 1..50: mol_type = genomic DNA
tgggggtcacttttaccctcgacgaagttcgatgttcaaatgtgaccccc

SEQ ID NO: 45545 - DNA, 40 bp, Erysipelotrichaceae bacterium I46
  source 1..40: mol_type = genomic DNA
aaattttgttggctatctgaagtttaactggatttagtta

SEQ ID NO: 45546 - protein, 446 aa, Lachnospiraceae bacterium
MLVEDIKRGLIARVVVYKLDRISRSILDFANMMALFQEYNVEFISSTEKFDTSTPMGRAMLNICIVFAQLERETIQKRVQDAWYARCQRGFKMGGRAPYGFRTEPIIIDGIHTKKLVIEPTEAAFVRKMYEMYNDPRISLYDIATQLTAQGVRSYFGKPFSRSTISMILRNPIYTMADLDIYEFFKSQGTEIYNDAADFAGTNGCYYYRSKGNTDNKHKYLQGQMLVLAPSEGFIPSDLWLQVRKKIMASQSYQPARKARHSWMAGKIKCGNCGYALMAAHSCGHLYFRCSKHAENKSCPGCGAVRLHDLEEVVYQQMVKKLEDYKTLTGRKKKRAASPKLTAKQTELARVESEIEKLLDTLTGATPVLISYANAKIEELDSRRQALASEIAKLTAEAVSPEQIDTISNYLDDWENVSFEDKQQVVDLMITVIRATSEKLQIEWKI

SEQ ID NO: 45547 - DNA, 50 bp, Lachnospiraceae bacterium
  source 1..50: mol_type = genomic DNA
ttttatgcccttgtccatcgtagttcactgatatggacaagaccacaaat

SEQ ID NO: 45548 - DNA, 40 bp, Lachnospiraceae bacterium
  source 1..40: mol_type = genomic DNA
tttctgtgggaaaatcatttccgtgtacattcccacttgt

SEQ ID NO: 45549 - DNA, 50 bp, Lachnospiraceae bacterium
  source 1..50: mol_type = genomic DNA
ttttatgcccttgtccatcgtagtggactgatatggacaagaccacaaat

SEQ ID NO: 45550 - DNA, 40 bp, Lachnospiraceae bacterium
  source 1..40: mol_type = genomic DNA
tttctgtggggaaaacaatggattgcaaattccaagctgt

SEQ ID NO: 45551 - protein, 533 aa, Bacteroides eggerthii
MENFDLKGFAKGKKQPKEQIGGNAIIYTRVSSSEQVDGQSLEVQIDKCREYAKVRSYTVVSEFGGTYESAKSDKERKEFNRMLAFIKQSNKKGSNRPVKTVIVFSTSRFSRTGSTTIIEEVEARGAYVVSATSNYDPRTPVGKYLQLMELANARFQNDEKRATTIENSVKALLKGRWIGKAPRGYDQKTTKKEQIITINEEGKLIRKAFLWKANNKLSNEEIRHRLAAEGLHICKQKLSELFKNPFYCGYMAHKFLQGDIVQGNHPPLIPKEIFLKVNGELSKNHSGYEQKIDKEYAPLLGSIKCPCCGKNLSASISTKMRKKFGRTDIGYYVCSRKGCKYNSSTKKVHEAFEEEVNRYALSDRVSELLKMQLTITFEYMNQENRERAKSIKANIKAKEKELEQVETNYALCTDAKKQSICEKVMTKLEKEVRDLKTEFSKVNTEILNLDKFIDFAFKMRSNLLELWELQELEGRRRLQKLVFPDGFIYDKNNEHIEPKKVNQFFLLKYSYPTGNGDKKKETNREKHDSSLRV

SEQ ID NO: 45552 - DNA, 50 bp, Bacteroides eggerthii
  source 1..50: mol_type = genomic DNA
aaaacacgattcgtcccttagagtacccttaacagatgaaatattgaacc

SEQ ID NO: 45553 - DNA, 40 bp, Bacteroides eggerthii
  source 1..40: mol_type = genomic DNA
aattagcgctttcatctgtactcgaagcgggacttgaacc

SEQ ID NO: 45554 - DNA, 50 bp, Bacteroides eggerthii
  source 1..50: mol_type = genomic DNA
aaaacacgattcgtcccttagagtttccttaacagatgaaatattgaacc

SEQ ID NO: 45555 - DNA, 40 bp, Bacteroides eggerthii
  source 1..40: mol_type = genomic DNA
agatagcgtcttgctatgtttcccaagctggacttgaacc

SEQ ID NO: 45556 - protein, 513 aa, Faecalibacterium prausnitzii
MARKKNIAAGQNAVIYARYSSHNQREVSIEQQVRECMKHAAELGLHVVGTYEDRAISGKTDKRPNFQRMMRDAEKGKFQAVVAWKSNRIGRNMLQAMVNEAKLEDCGVKVFYAEEDFDDTAAGRFALRNMMNVNQFYSENMAEDITRGLYDNASKCMANGRQPLGYKRGEDGRVVLDDANAAVVREIFTRVAAGDLFVDIARDLNAQGIKTSKGANWNKGSFQSICQNERYRGIYIYGDVRVVDGIPRIVSDDLWYRVQEAMRMKKNPVGTRHRVGAEDYLLTGKLRCGHCGSYMTGVSGTSRNGELHYYYTCQKRRTEHACDKKNIRRDVIEPAVAQAIKMYCLTDDVIEWMADRTVEYWEKHDNDLQIEALEQQLEENKKATSNMLKAIEMGIITEATRTRMVELETEQSRLSVQLNTAKEDVVKIDREQIISYLELLQQGDIHDRDFQMELFKNFLVAVYVYDDNRMKLVFSCMGDQNSVEISLETGEDPPDGGLSPDAKMFVLTPDSST

SEQ ID NO: 45557 - DNA, 50 bp, Faecalibacterium prausnitzii
  source 1..50: mol_type = genomic DNA
tgttcgttttgactcctgatagctccaccaatcaagagcaaaacgaacac

SEQ ID NO: 45558 - DNA, 40 bp, Faecalibacterium prausnitzii
  source 1..40: mol_type = genomic DNA
ggttcgatcccgctattctccaccaaaaaagcactgtact

SEQ ID NO: 45559 - DNA, 50 bp, Faecalibacterium prausnitzii
  source 1..50: mol_type = genomic DNA
tgttcgttttgactcctgatagctgtaccaatcaagagcaaaacgaacac

SEQ ID NO: 45560 - DNA, 40 bp, Faecalibacterium prausnitzii
  source 1..40: mol_type = genomic DNA
ggtctgatccagctattctgtataatgacagatctgtact

SEQ ID NO: 45561 - protein, 550 aa, Defluviitalea raffinosedens
MNRQSTFSTIRKSTLAFEEAKLTALYCRLSRDDELAGDSNSIVNQKAILKKYAEDNGFRNIEFYVDDGVSGTTFDRPDFNRMIADVESGRIGTIIIKDMSRFGRDYLKVGYYTEIMFPESDVRFIAINNGIDSANQTDSDFTPFLNIINEWYAKDTSKKIRAVFKSKGQSGKPLCTNPPYGYIKDPEDKLHWFIDEEAAEVVRDIFRLCMAGFGPTQIAKQLEKRCIDTPTVHLRKMGINTPARPPENPYAWSARTVADILAKMEYLGHTVNFKTSKKSYKSKVKILNNPEDWLVFKNTHEAIIDEGTWETVQKIRDGKRRPSRLGEMGMLSGMMFCADCGAKLYQVRGKGWTHDKEYFVCATYRKKKGMCSSHQIRNVVVEQLLLEDLRRVTSFAKDHEQEFIRIVMNNSEKELAKELRQSQKEYEQAQTRIADIDKIIRKLYEDNVMGKIPEERFYKMSAEYEAEQKTLEERIIKLKHTIDTANEQSLNTDRFLALVKKYTEITELDAEIIREFIDKIIVFKAEKVDGCRTQRIQIFYNCIGAIDLPN

SEQ ID NO: 45562 - DNA, 50 bp, Defluviitalea raffinosedens
  source 1..50: mol_type = genomic DNA
aattataaatccctatctgaccgctcctaaagaagcgttcacttagggat

SEQ ID NO: 45563 - DNA, 40 bp, Defluviitalea raffinosedens
  source 1..40: mol_type = genomic DNA
gcctaaaatcaaaaaatcgccctgatgggcgattttttta

SEQ ID NO: 45564 - DNA, 50 bp, Defluviitalea raffinosedens
  source 1..50: mol_type = genomic DNA
aattataaatccctatctgaccgcacctaaagaagcgttcacttagggat

SEQ ID NO: 45565 - DNA, 40 bp, Defluviitalea raffinosedens
  source 1..40: mol_type = genomic DNA
ccctaaaataaaataatcaacctgatggggaatggtctca

SEQ ID NO: 45566 - protein, 646 aa, Mediterraneibacter faecis
MNAGYVRLSRDDDKRNYVSIENQKLIINQYAADHGVVIDRWYEDDGLSGYIFDRPGFQQMMADLDKDIDAVYVKDFSRLGRHNAKVLLLLDEFQERGKHLIVIDDNYDSMDSSDDTIGIKTWFNERYVKDTSKKIKRAIGARQKEGTLITRPPFGYRRNEKDKTVLEIVPKEAEYIKQIYDLYLSGSGYRKIATYLTEQGAPTPSMIQREREIEEGRLSKRQVASKWSDAMIKEILDNDFYIGTFRLKKRARNTVHGKDKRVPKEEQCIFENHHPAIIDKATFSLVQELKEKRNRTNYRGNRGQWLSSEIPNPFGSCLYCKDCGSRLTPIKRQTSSRERKYYICTTYNTKGRRYCSKAHLIEKEDLMEDVLTYIKLCRNALCEVIATYDLKDFESEKKTVEEKRQELHREIGDRKNQLKVLLTQKVKDLAVANGNENLINETYDSIQNDLFAQIHGLEMQLKELDEAAIETPDVKDKLRNALDVVDKIIAGGTLDRRDIELLIEKIVVDEDGMPEITLKYGLSNLIQYSPADEMNRRENTIIAIVMKLITEDERGYTSAKYLSEHITDLGFKKTKQSILPYIELAKNLGILEPTENSLKPYRIVKSKEEITVLVKDYLPDTSDISAETTAKQLSDEYLHCNIDDRW

SEQ ID NO: 45567 - DNA, 50 bp, Mediterraneibacter faecis
  source 1..50: mol_type = genomic DNA
atttacattgtaatatagacgacaggtggcgtacatatatcaatgtaaat

SEQ ID NO: 45568 - DNA, 40 bp, Mediterraneibacter faecis; identical to SEQ ID NO: 32583
  source 1..40: mol_type = genomic DNA

SEQ ID NO: 45569 - DNA, 50 bp, Mediterraneibacter faecis
  source 1..50: mol_type = genomic DNA
atttacattgtaatatagacgacagatggcgtacatatatcaatgtaaat

SEQ ID NO: 45570 - DNA, 40 bp, Mediterraneibacter faecis
  source 1..40: mol_type = genomic DNA
ttttattagtagcagaaaagatgggattccagaaactgta

SEQ ID NO: 45571 - protein, 501 aa, Lentzea guizhouensis
MTEVVGIYERISEDPMLQEKGVTRQLEDGRALAQSRGWTVLDEWVDNDLSALRGGPRPAYEALMKAASRGEITRIVAYGMARLWRNRKERVDAIEQLAAARVSISLVKGSDIDLTSAAGRMVAGILGEADTLESELKGERVARAALQRAEEGRANGAVAYGWRRIYEQDKNGRVLGFTDEVDEAEAAIVREIVDRLLARESLNVITADLNARQVPTPYGGDRSWGTSSVRKLALRLSNIARRKRGGEDFGPAAWPPIVDQDKHDQVVALLTDPSRVQTRGGARQHLLTFGIGCCGKCGSALRVSNRWVNQRRKELGKTPLYVCDAASSCVGRRQEWVDDLVERVVVRRLQEPDARDLLTRDDVAAQAAREHAAGIRARLQAAADDYADDLLDREQFHRINAKLRPALEEADREAIRLVVGVPSDMITEMFGPQAQERWKQLTVLQRRALLTAMGVTVTIMPSRGGPGFKPESVKIQFERDDDQATPEEIRNLPTDFLEARS

SEQ ID NO: 45572 - DNA, 50 bp, Lentzea guizhouensis
  source 1..50: mol_type = genomic DNA
ccgcccaggaccacccggaaagagtaaatcacactagcggtgaacatcgg

SEQ ID NO: 45573 - DNA, 40 bp, Lentzea guizhouensis
  source 1..40: mol_type = genomic DNA
ccacaccccccggaaagagtgaatctccggtgaagaggtg

SEQ ID NO: 45574 - DNA, 50 bp, Lentzea guizhouensis
  source 1..50: mol_type = genomic DNA
ccgcccaggaccacccggaaagagcaaatcacactagcggtgaacatcgg

SEQ ID NO: 45575 - DNA, 40 bp, Lentzea guizhouensis
  source 1..40: mol_type = genomic DNA
ctccaggcactggaaagagcaaagctccagtggagagggg

SEQ ID NO: 45576 - protein, 501 aa, Lentzea atacamensis
MTEVVGIYARISEDPLLQEKGVTRQLEDGRALAQSRGWTVLDEWVDNDLSALRGGPRPAYEALMKAASRGEITRIVAYGMARLWRNRKERVDAIELLAAARVSISLVKGSDIDLTSAAGRMVAGILGEADTLESELKGERVARAALQRAEEGRANGAVAYGWRRVYEQDKNGRVLSFTDEMDEAEAAIVREIVDRLLARESLNVITADLNARQVPTPYGGDRSWGTSSVRKLALRLSNIARRKRGGEDFGPAAWPPIVDQDKHDQVVALLTDPSRVQTRGGARQHLLTFGIGCCGKCGSALRVSNRWVNQRRKELGKTPLYVCDAASSCVGRRQEWVDDLVERVVVRRLQEPDARNLLTRDDVAAQAAREHAAGIRARLQAAADDYADDLLDREQFHRINAKLRPALEEADREAMRLVVGVPSDMVTEMVGPQAQERWKQLTVLQRRALLMAMGVTVTIMPSRGGPGFKPESVGIHFERDDDQATLEAVRNLPTDLLEARS

SEQ ID NO: 45577 - DNA, 50 bp, Lentzea atacamensis; identical to SEQ ID NO: 45572
  source 1..50: mol_type = genomic DNA

SEQ ID NO: 45578 - DNA, 40 bp, Lentzea atacamensis; identical to SEQ ID NO: 45573
  source 1..40: mol_type = genomic DNA

SEQ ID NO: 45579 - DNA, 50 bp, Lentzea atacamensis; identical to SEQ ID NO: 45574
  source 1..50: mol_type = genomic DNA

SEQ ID NO: 45580 - DNA, 40 bp, Lentzea atacamensis; identical to SEQ ID NO: 45575
  source 1..40: mol_type = genomic DNA

SEQ ID NO: 45581 - protein, 522 aa, Mesorhizobium japonicum
MNQRLIKVARPAGLTKALLYARVSSKEQDKEGFSIPAQCKLLRDYAQQQRFDIAQEFVDVETAKTTGRTNFTEMVKYLRKHPGIRIVLVEKTDRLYRNLKDWVTLDELDVEIHLAKEGVILSRDSRSSEKFMHGIKVLMAKNYIDNLSEEARKGQMEKAEQGIWPTKAPLGYINTTGKDGRKVIEPHPELAPVVTQLFERYATGRYSLKALAKAAHGEGLIYPKSGNPVPVSTVHMILRNRLYTGLFQWNGKLHQGKHEPLVSIELWERVQGVLTGRNAVPTHPIGREFAFTGLMTCTECACAIVAEIKKSKYVYYHCTGHTNKGRGGYGDCRRKYVREEVLDQTFANLLDRLHFDEEILEWVKAGLLASHADERREHEQATHRCQVEYKRLEDRLHAMYLDKLDGRIDNAFYDRMSAQWRTEQTRLLREIERHASAEESYMEDSIRLLELAHNASRLFAKQPAHEKNRLLNLVLSNCKWDKGEVHAVFRQPFDLLAETVVAGAAMGAQQAPLSTGSPVWLG

SEQ ID NO: 45582 - DNA, 50 bp, Mesorhizobium japonicum
  source 1..50: mol_type = genomic DNA
tatcgacagggagtccagtttggctggggttcttggaagcttttcgaact

SEQ ID NO: 45583 - DNA, 40 bp, Mesorhizobium japonicum
  source 1..40: mol_type = genomic DNA
gtcggaaataaagaatggctggggaacctggattcgaacc

SEQ ID NO: 45584 - DNA, 50 bp, Mesorhizobium japonicum
  source 1..50: mol_type = genomic DNA
tatcgacagggagtccagtttggcaggggttcttggaagcttttcgaact

SEQ ID NO: 45585 - DNA, 40 bp, Mesorhizobium japonicum
  source 1..40: mol_type = genomic DNA
gtgggaaatgcagaaagaaagaagaacctggcttcgatcc

SEQ ID NO: 45586 - protein, 529 aa, Pseudoclavibacter helvolus
MTLLAPHPETDSAPLFTAVTYQRVSTKEQAAKGGRDEGFSIPAQREANARKAESLGARVVAEFVDAGESARSADRPDLQRMLEYIATHQVSYCIVHKVDRLARNRVDDVEIHRRLVEAGVTLVSATENIDETPSGMLLHGIMSSIAEFYSKNLATEVTKGLNQKFETGGTPMRAPIGYLNVRKRDEQGREYRTVEIDPERAPLIRWVFEQYATGDRTVVDLLAEVTARGLTTVPTPKRPSGPMARSGFFKILRNPYYIGIVRYKGAEQPGTHEPLIDLDTWQHVQRLLDSRKIASERRRSHDHYLKGTLYCGSCGSRMQLDYPANKQGVRYGYYVCSGRASKRKNCTRRAVPIGVAEQLVADCYQDIAITEDEYTALAAQVEAAFDERLASRSQEMAELTENRQRLQNESDKLLAAHFADAIDLDTLKRHQDRIRTGLADIDRRLASEHDHHTGARKQLSTALGLLVDCATLYARTNDQGKRLANQALTHGIDISEDERATIRLAEPFAALTPEPASTDVRSSSTSSIV

SEQ ID NO: 45587 - DNA, 50 bp, Pseudoclavibacter helvolus
  source 1..50: mol_type = genomic DNA
gagttctagtacgtcttcaattgtggacgcgggtggacttaaaccgaaca

SEQ ID NO: 45588 - DNA, 40 bp, Pseudoclavibacter helvolus
  source 1..40: mol_type = genomic DNA
ctgacccgggctccttggtggatctgaggggattcgaacc

SEQ ID NO: 45589 - DNA, 50 bp, Pseudoclavibacter helvolus
  source 1..50: mol_type = genomic DNA
gagttctagtacgtcttcaattgttgacgcgggtggacttaaaccgaaca

SEQ ID NO: 45590 - DNA, 40 bp, Pseudoclavibacter helvolus
  source 1..40: mol_type = genomic DNA
ctgacctgggaagattgcttgatctgaggagtttgaaacc

SEQ ID NO: 45591 - protein, 547 aa, Eubacterium rectale
MNREGKKCVLYPRVSTEMQVDGYSLEGQKNGLKRFADREEMEIVGIYEDAGKSGKSIEGRPAFKKMLSDIKNGLEIDYILVYKLSRFGRNAADILNSLEFVQSYGINLICIEEGIDSSQTSGKLLISVLSAVAEIERENIIEQTMNGRREKARQGGWNGGFAPYGYYLKDNQLLIEETEAEAIRIIFDKFANSDIGLGGVAKYLNLQGIKKIPRQNGTLETWSSHFIRLILDNPVYCGKIAYGRRTREKVKGTKNEYKQVHAEDYILEDGQHEGIISEELWQKVHAKRMATGIKQPSKIGKDRSHLLTGILKCPLCGSSMYTNKHAWTNKDGTYKEVYYYICGRNKQERGHHCDYKASLRKTDIEPLVIEAVKELVSDKYFAKEIEKRIGVQTDTTAIDKELANYESKLKEVDLNKARLEREIDNLPVDTRFRERKIHDMTLRLDALYDTIVELEERIEDAKLRKSSIEMETITLDNIYKLMLNFGKLYDIISDEEKKSLITYLIKEIQIYPNGESEQPLKSIEFNFPIYRDGQEVRRLLWEKGNTV

SEQ ID NO: 45592 - DNA, 50 bp, Eubacterium rectale; identical to SEQ ID NO: 2672
  source 1..50: mol_type = genomic DNA

SEQ ID NO: 45593 - DNA, 40 bp, Eubacterium rectale
  source 1..40: mol_type = genomic DNA
ttctcatacgacgcatgtagaaagtatttgcctcctcgag

SEQ ID NO: 45594 - DNA, 50 bp, Eubacterium rectale; identical to SEQ ID NO: 2672
  source 1..50: mol_type = genomic DNA

SEQ ID NO: 45595 - DNA, 40 bp, Eubacterium rectale; identical to SEQ ID NO: 14610
  source 1..40: mol_type = genomic DNA

SEQ ID NO: 45596 - protein, 547 aa, Eubacterium rectale
MNREGKKCVLYPRVSTEMQVDGYSLEGQKNSLKRFADREEMEIVDIYEDAGKSGKSIEGRPAFKKMLSDIKNGLEIDYILVYKLSRFGRNAADILNSLEFVQSYGINLICIEEGIDSSQTSGKLLISVLSAVAEIERENIIEQTMNGRREKARQGGWNGGFAPYGYYLKDNQLLIEETEAEAIRIIFDKFANSDIGLGGVAKYLNLQGIKKIPRQNGTLETWSSHFIRLILDNPVYCGKIAYGRRTREKVKGTKNEYKQIHTDDYILEDGQHEGIVSEELWQKAHTKRMATGIKQPSKIGKDRSHLLTGILKCPLCGSSMYTNKHAWTNKDGTYKEVYYYICGRNKQERGHHCDYKASLRKTDIEPLVIEAVKELVSDKYFAKEIEKRIGVQTDTTAIDKELANYESKLKEVDLNKARLEREIDNLPIDARFRERKIHDMTLRLDALYDTIVELEERIEDAKLRKSSIEMETITLDNIYKLMLNFGKLYDIISDEEKKSLITYLIKEIQIYPNGESEQPLKSIEFNFPIYRDGQEVRRLLWEKGNTV

SEQ ID NO: 45597 - DNA, 50 bp, Eubacterium rectale; identical to SEQ ID NO: 2672
  source 1..50: mol_type = genomic DNA

SEQ ID NO: 45598 - DNA, 40 bp, Eubacterium rectale; identical to SEQ ID NO: 45593
  source 1..40: mol_type = genomic DNA

SEQ ID NO: 45599 - DNA, 50 bp, Eubacterium rectale; identical to SEQ ID NO: 2672
  source 1..50: mol_type = genomic DNA

SEQ ID NO: 45600 - DNA, 40 bp, Eubacterium rectale; identical to SEQ ID NO: 14610
  source 1..40: mol_type = genomic DNA

SEQ ID NO: 45601 - protein, 557 aa, Eubacterium maltosivorans
MNRQSDKITALYCRLSRDDELQGESNSITNQKSIVEKYAKENGFKNTKFFVDDGYSGVSFTRPAFMELMELAEAGKVETIIVKDHSRLGRNRLVVGQLLEEDFVRLGVRYIAIMDNIDTKDGLSDFLPVQDWFNEMHAKNTSKKVRAVFQNKGMAGKPLTTVIPYDYKKNEANPDEWLVDEEATEVVRKIFRLCVEGYGPTQIANILFSDGVPTPTEYWQSKGRKTSALPAVPHKWAARTVADILERQEYIGDTVNFSSTTRSFKDKMKIERPKEEWKVFENTHEAIIDRETWELVQTLRANKRRPNRTGEVSMFSGLLYCGDCGEKLYYSVTNNYSREQAYFFCSSYRKNTANCTAHYIREKVVYALVLESLRRVLFYVQAFEKQFVQEQLDKSSKEQKKELAKKRREHAKSEKRITELDVLFQRIYEDNVSGKLTDERFSTMSVSYEAEQKSLKAAVAMLRNEIETQDDKTANVLAFVEKVKRYTEITELTPAIVNEFIDYIMVSKKQVIDGKTVYPIDIYYNGVGIITAPSAEEYEEMFQERLKKKRAKEQKTA

SEQ ID NO: 45602 - DNA, 50 bp, Eubacterium maltosivorans
  source 1..50: mol_type = genomic DNA
ttacttccttatgtgaaggggacaaagggacacttcacataaggaagtgt

SEQ ID NO: 45603 - DNA, 40 bp, Eubacterium maltosivorans
  source 1..40: mol_type = genomic DNA
ccaataaaaagaaccgcccaactgagcggttctttttatg

SEQ ID NO: 45604 - DNA, 50 bp, Eubacterium maltosivorans
  source 1..50: mol_type = genomic DNA
ttacttccttatgtgaaggggacacagggacacttcacataaggaagtgt

SEQ ID NO: 45605 - DNA, 40 bp, Eubacterium maltosivorans
  source 1..40: mol_type = genomic DNA
ccactaacaaacccagctccactgagcaattgtttttatg

SEQ ID NO: 45606 - protein, 452 aa, Listeria monocytogenes; identical to SEQ ID NO: 20166

SEQ ID NO: 45607 - DNA, 50 bp, Listeria monocytogenes; identical to SEQ ID NO: 39127
  source 1..50: mol_type = genomic DNA

SEQ ID NO: 45608 - DNA, 40 bp, Listeria monocytogenes; identical to SEQ ID NO: 7733
  source 1..40: mol_type = genomic DNA

SEQ ID NO: 45609 - DNA, 50 bp, Listeria monocytogenes
  source 1..50: mol_type = genomic DNA
tttagtatctcgttatctctcgttctagggagaagaaacgggataccaaa

SEQ ID NO: 45610 - DNA, 40 bp, Listeria monocytogenes
  source 1..40: mol_type = genomic DNA
ttttgctacatgttttcagctaagcaaagaggcaactaga

SEQ ID NO: 45611 - protein, 452 aa, Listeria monocytogenes; identical to SEQ ID NO: 33886

SEQ ID NO: 45612 - DNA, 50 bp, Listeria monocytogenes
  source 1..50: mol_type = genomic DNA
tttagtacctcgatttctctcgttggagggagaggaaatgggatacaaaa

SEQ ID NO: 45613 - DNA, 40 bp, Listeria monocytogenes; identical to SEQ ID NO: 7733
  source 1..40: mol_type = genomic DNA

SEQ ID NO: 45614 - DNA, 50 bp, Listeria monocytogenes
  source 1..50: mol_type = genomic DNA
tttagtacctcgatttctctcgttctagggagaggaaatgggatacaaaa

SEQ ID NO: 45615 - DNA, 40 bp, Listeria monocytogenes; identical to SEQ ID NO: 45610
  source 1..40: mol_type = genomic DNA

SEQ ID NO: 45616 - protein, 452 aa, Listeria monocytogenes; identical to SEQ ID NO: 39266

SEQ ID NO: 45617 - DNA, 50 bp, Listeria monocytogenes; identical to SEQ ID NO: 39267
  source 1..50: mol_type = genomic DNA

SEQ ID NO: 45618 - DNA, 40 bp, Listeria monocytogenes; identical to SEQ ID NO: 7733
  source 1..40: mol_type = genomic DNA

SEQ ID NO: 45619 - DNA, 50 bp, Listeria monocytogenes
  source 1..50: mol_type = genomic DNA
tttagtacttcgttttctctcgttctacggaggataaatgagaaactaaa

SEQ ID NO: 45620 - DNA, 40 bp, Listeria monocytogenes; identical to SEQ ID NO: 45610
  source 1..40: mol_type = genomic DNA

SEQ ID NO: 45621 - protein, 528 aa, Faecalibacterium prausnitzii
MQTTGEFKITALYARLSSDDELQGESNSIIHQKQILEEYAATNNLNNYQFYVDDGFSGTNFERPGFQRMVSDIKNGVIGTVVVKDLSRFGRNYLQVGYYTEMMFPEYDIRFISVTDNVDSNFGYNEFVPLHNLINDWYAKDISRKQKAVIQSKGNSGKRLTTKAIFGYKKDDNGQWVIDSEAAEVVKKIFKLCLDGYGTQMIANYLFAEKIKNPSAYMGYVCRTKGDKNPYLWTAQTISSILSRQEYCGDTVNFKTQRKSCMSKQIIYNNPEDYKIFYNTHTAIISREDFKKVQEIRSKRKRISPIQKPVLFDEIYCADCGHRMYIMRLRDKSKPDAYSCSKYRKNSLVCSSHYIREGYLIEYILNELNVLLNSAQDEDFRKKIKDEFSKKNSITQVEIKKNLANAQKRIDEINVIIKELYEDKVNGNITLEIFQKLSSEFINEQKELSNAIIDYSKERADLDNSKDALKGFLDIVEKYRTQGSITQLTNEIVDDFIDKIEVFESKKVDGKRQQKVNIYFKGIGILSV

SEQ ID NO: 45622 - DNA, 50 bp, Faecalibacterium prausnitzii
  source 1..50: mol_type = genomic DNA
actcttcactaaaacaattacaagctcttgtaattgaataagcgaagaaa

SEQ ID NO: 45623 - DNA, 40 bp, Faecalibacterium prausnitzii
  source 1..40: mol_type = genomic DNA
cgaaacacttaatacttctctaagcgcaggagggtagaaa

SEQ ID NO: 45624 - DNA, 50 bp, Faecalibacterium prausnitzii
  source 1..50: mol_type = genomic DNA
actcttcactaaaacaattacaagaccttgtaattgaataagcgaagaaa

SEQ ID NO: 45625 - DNA, 40 bp, Faecalibacterium prausnitzii
  source 1..40: mol_type = genomic DNA
ctgaacacttaacacttcaacaagcccatgagggaggcac

SEQ ID NO: 45626 - protein, 592 aa, Enterobacter asburiae
MSTQHHKPRLISYIRWSSQRQASGTTIERQTEAARLYAVENNLEYHEIRDEGVSAFKGKNSKKGGLADFIADVKRGVIPSDSWLYVENLDRLSRADVTTANELFLRLLRLGLTIVTGMDGKKFTLESVNQNPTDLMLSILLFMRANEESSTKQKRVFGNVAALVERHNQGQPVNIKSTGSSPWWIDDTGSQYEAVKPHPVHWGAAKKAIELLLQGWGCYRVAAYLNDHSDIYPAPKGNKGKGMKRGQSWAVANLKKMRVNRALIGEKVLTVNGQTYRLDGYFPPLCTETEFARIQEITESNKIPQGDQKKVITMLSGLGVLRCGHCGGSMSFFSHAGRLRYVCETGKNQTSACRVWSIQGRLVEALTVRAIIYGHTAKVLSGGVEAESLEPLIEDRKSSLASIQEKVKHVTTAITLGGNIASLVETLTTLESEKSQLLIEIDKLQQREALRGSDSDIDERIKQVITLFTPDLLEDITHPDRIQIREIVRSVLPVVTLSKRVDKALKVDFKFPDNSHLIYEGVMKGKEKTFSQYRTALGGQSVDDIYSKIGKVFTEAMGGSMKITDPYQAEQKRIVKALRLPELNGKDFFGKR

SEQ ID NO: 45627 - DNA, 50 bp, Enterobacter asburiae
  source 1..50: mol_type = genomic DNA
attgtaagcaaaaaatattttggcaacccaaagttaatttagattcgaat

SEQ ID NO: 45628 - DNA, 40 bp, Enterobacter asburiae
  source 1..40: mol_type = genomic DNA
cattatcagccatcccggcaacccgaagtacccgattgat

SEQ ID NO: 45629 - DNA, 50 bp, Enterobacter asburiae
  source 1..50: mol_type = genomic DNA
attgtaagcaaaaaatattttggcctcccaaagttaatttagattcgaat

SEQ ID NO: 45630 - DNA, 40 bp, Enterobacter asburiae
  source 1..40: mol_type = genomic DNA
cctgatctgccaccccggcctcccaaagtactgggattat

SEQ ID NO: 45631 - protein, 497 aa, Streptococcus constellatus
MSKIALYIRLSVEDQMKKDESESIINQRYFLNGFLDRNDEFKSFKREEYVDDGYTGTNEKRPSFQRMLEEVKNGKINAIIVKDLSRFMRDYITLGDYLENIFPFLGIRFIAINDGYDSAKEKGNGTDLDIQFKGLLYDFYTKDISQKVKTVTTELKKQGKFLAWSPPFGYMKDPDNKHNIIIDEKTAWIVRKVYDLALTGLASRKIAAVMNEENIPTPNERKKELTNMDYEYNIVSSDTRDAPTWTNGTVVDILSNENYTGTYVFNMQEKSVLNPSSFKFNPKEEWGRVYDHHEAIISREEFDKVQEIKEKNSFLKGKNTDYPWRKHSPLQGFARCPTCNHILGLTQSKFKRPDGSMRIHKYFHCRICKCNNVEHKNSRVDKLEKQVLTLIKEKYGEAEVKPKEKISIKNIEKKIEKLQAKKMADFEKYKLGKMTKVKFVERKSQIDKEIEKLEEKIKLSSNETEVVTDNELTRKLMEKYVESVICEGSIVQKIIWK

SEQ ID NO: 45632 - DNA, 50 bp, Streptococcus constellatus; identical to SEQ ID NO: 14077
  source 1..50: mol_type = genomic DNA

SEQ ID NO: 45633 - DNA, 40 bp, Streptococcus constellatus
  source 1..40: mol_type = genomic DNA
catcctcgacttcttcgctggttcgggcacaacaggccat

SEQ ID NO: 45634 - DNA, 50 bp, Streptococcus constellatus; identical to SEQ ID NO: 14079
  source 1..50: mol_type = genomic DNA

SEQ ID NO: 45635 - DNA, 40 bp, Streptococcus constellatus
  source 1..40: mol_type = genomic DNA
tctcctcgtcctcttctcagcatcaggcacaacaggcaac

SEQ ID NO: 45636 - protein, 658 aa, Pseudomonas aeruginosa
MDPTNEATSMDNSQPNPTRKVLYKYIRFSSIQQSKGSSFARQNARLEKYAQENGFEIDDSLDLRDFAKSGFHGINKEIDQGLGRFILAIEKGLIPTDGSAYLAVEQFDRISREDIDKAQDLFKSILRKNVNIITLMDGRIYTKKSLSNFMEVLYSLFLMEQAHQESLKKSDRIKGAYTNKIKKLKELNKEQKAILAEWEKNKEGKKPEFEPLINQVQYSSQIPYWIDQKTEVISGRKFIKFIINEEKASVIRYALSLLNDDNGYMNVAARLNKEGIPRIDYAANKKRSTRKDIWTNRAVNEFVNSDAIYGDLAIYENFYADKEFEYEGTKVSKKVGKRIHIENIPNYYPAVVDKKLIMGLRARANAKKKGRIAGRTTNNNLFQNLLFCGKCGDSMHLIQSKRETKKGTYQRFYLTCYSARHKACDAKMISYTELEREIVKYLVMPFNESKMSGTSKVISDSRNEKLLELEGEIKAIEDQIEAYKAEMKNNKNIKPSIALTFLSELETDKDYKTHQLKELQLQKDQTIESIESENVSNFDIEKEEGRIAFKVAVKQRYAGFFVFTEDQVVMVVKKTGSAGFFKIEVRNRRNKLINPERTADTFKLFQEKLNHIRNLSKTYKEGKLYNIIKAYKINDIEIFEEEYINRGLPQPISYNRFE

SEQ ID NO: 45637 - DNA, 50 bp, Pseudomonas aeruginosa
  source 1..50: mol_type = genomic DNA
ggttgtcaaattgcctatagtgggctatgattgtgggcaattcagcaacc

SEQ ID NO: 45638 - DNA, 40 bp, Pseudomonas aeruginosa
  source 1..40: mol_type = genomic DNA
cggctgctaccagagcgaactgccgctgctcgagcagatc

SEQ ID NO: 45639 - DNA, 50 bp, Pseudomonas aeruginosa
  source 1..50: mol_type = genomic DNA
ggttgtcaaattgcctatagtgggccatgattgtgggcaattcagcaacc

SEQ ID NO: 45640 - DNA, 40 bp, Pseudomonas aeruginosa
  source 1..40: mol_type = genomic DNA
cagctgctatcccacagaaccaccgctgctctctcagatc

SEQ ID NO: 45641 - protein, 549 aa, Faecalibacterium prausnitzii; identical to SEQ ID NO: 37551

SEQ ID NO: 45642 - DNA, 50 bp, Faecalibacterium prausnitzii
  source 1..50: mol_type = genomic DNA
agtttggacagtgatacacatgtcgagacggtgtgtttattgtccaaact

SEQ ID NO: 45643 - DNA, 40 bp, Faecalibacterium prausnitzii
  source 1..40: mol_type = genomic DNA
cccccagaccgcccattgtgaggtggtcggcgcgctgacc

SEQ ID NO: 45644 - DNA, 50 bp, Faecalibacterium prausnitzii
  source 1..50: mol_type = genomic DNA
agtttggacagtgatacacatgtccagacggtgtgtttattgtccaaact

SEQ ID NO: 45645 - DNA, 40 bp, Faecalibacterium prausnitzii
  source 1..40: mol_type = genomic DNA
cccccaaacctcccactttcatgtggaagccccgctgtcc

SEQ ID NO: 45646 - protein, 554 aa, Faecalibacterium prausnitzii
MENAYIYTRVSTLIQVDGFSLEAQEAEIRAFAEARKINIVGKYTDEGKSGKNAEHRPAFTQMMEDIRSKKDNIRYVLVFKLSRFARNTSDTAKYLQELSSYGIGLLGIKDGIDTSTVTGKMIANIMGAVAEVELENIHEQTLAGRQQKARSGLWNGAQAPFGYSLKDKKLMIYPKEAETVKEIFRLYTEEGQSISYIAKKLNDENIQREQRGNVKISGFTDRTVRVILSNPIYAGMISYGRRHTVKVEGKNNETKVVKQDDESKIILVDGVHEPIVSKETFAKAEERLKKNVAHRKTRSDSTTVYPLTGLIRCPDCGKNIFGYTAPPRKKKNGKEGYYPRYISYRCISGRDRNGISCSLANKYYSGTKLETEVKEVISSMVTIPEFVELISQKIDIQTDVNSLRKKQTAIRNEITKYNGNLLQTEKRLTELDIADRHYQNKVDSLNRILDDLYEKIEDAQTRLDGINQEITMVEKSAMTKKSIFEMLEGFSKYYDVMSPEDKKALLQAMVSFIELYPEKRDDKHLIKTIHFTFPVTYDGESGALFVRTNEQQVE

SEQ ID NO: 45647 - DNA, 50 bp, Faecalibacterium prausnitzii
  source 1..50: mol_type = genomic DNA
gtcagaactaatgaacagcaagttgagacggtatgtctcttagttctgag

SEQ ID NO: 45648 - DNA, 40 bp, Faecalibacterium prausnitzii; identical to SEQ ID NO: 45643
  source 1..40: mol_type = genomic DNA

SEQ ID NO: 45649 - DNA, 50 bp, Faecalibacterium prausnitzii
  source 1..50: mol_type = genomic DNA
gtcagaactaatgaacagcaagttcagacggtatgtctcttagttctgag

SEQ ID NO: 45650 - DNA, 40 bp, Faecalibacterium prausnitzii; identical to SEQ ID NO: 45645
  source 1..40: mol_type = genomic DNA

SEQ ID NO: 45651 - protein, 537 aa, Cryobacterium sp LW097
MRKVAIYARISQDRSGLQAGVDRQLKDCRELAQVSELEVIEEIVDNDVSATTGKRRRGWTQLVELIENGAVSGIVVWHTDRLYRKVRDLVVLLDLADKYNLKIYAVTAGDINLSDPTGRMFATMIAGVASFEVEQKAARSARKNFDTARQGKFHGGPIPMGYRKGPTPGTLEIDEKQAETLRRAAGRLIAGETLSGVTRWARVELARPSLKPNSLKDALTRPTIAGLRRHVPASTRRDWNLRRKQGEVSGDLPDEVDLYTAEWDAILDHAEWTHMKSILLDGARRRGRPAVKSLLSGLLICEVCETKLGYSAASYKCPGPDRNGCSGVAISTKTVEAVVTAFIRAGLASTLPDEPIEAPVVANEAVFDELASRRNVLLGQFARGRITETELDEQLDQLTLMEAKLQATVMLKQQSLLAEGRARRVDTAGWDDADLQRRREIIRAVFNKGITIFKSPKGRKSGSSFNSSRIYFGPPPWKDPRLTPEAQQFELQNHKLRLAGMTPLPPVSPIPPMSIYEATEHKAAFRSWQREMDKLME

SEQ ID NO: 45652 - DNA, 50 bp, Cryobacterium sp LW097
  source 1..50: mol_type = genomic DNA
aaagtagactaaagactgttcggatctacgaacgtgctttagtctacgga

SEQ ID NO: 45653 - DNA, 40 bp, Cryobacterium sp LW097
  source 1..40: mol_type = genomic DNA
gccgtcgggcaaggacgcatccacgaacggcgaggacagg

SEQ ID NO: 45654 - DNA, 50 bp, Cryobacterium sp LW097
  source 1..50: mol_type = genomic DNA
aaagtagactaaagactgttcggatgtacgaacgtgctttagtctacgga

SEQ ID NO: 45655 - DNA, 40 bp, Cryobacterium sp LW097
  source 1..40: mol_type = genomic DNA
ggcatctggcaaggccgcctgaagaaacggagagtacagg

SEQ ID NO: 45656 - protein, 461 aa, Listeria booriae
MTVGIYIRVSTEEQAKEGFSISAQREKLQAYCIAQGWNEFKFYVDEGLSAKNMERPMLKSLLKHIENGLIDTVLVYKLDRLTRSVVDLHNMLNYFDKFNCAFKSATEVYDTSSAMGRFFITIISSVAQFERENTSERVSFGMEERARQGKYIPLAPFGYKKGEDGVLVIYEEEAALVLELVDRLQKGYSIRQCCTYLDNLGVKTRRSNTVWKNTTLRRILENHALYGATSWSGKVFKDTHPGILTEAEFFELQNILKARTGHVSSRKRALTHVFAGKIVCPNCGYRMSCVRTKYKERYNNDYRCPNCKIHYTHTSVSERKLLKAFDEYIDSYRLTSFDIKKETKKENNQMKIERQIVNLSKKREKYQKGWALDLIDDQEFSKLMKETQLELDQLESQLEIDEHSPEKTFNVAAINNIVKNIKKNWSELTIEERKDFVNMFLKDIHYVKVAGVARITKIDFY

SEQ ID NO: 45657 - DNA, 50 bp, Listeria booriae
  source 1..50: mol_type = genomic DNA
ctctgcatttatgacaactacagactactgtacttatcataagtacagtt

SEQ ID NO: 45658 - DNA, 40 bp, Listeria booriae; identical to SEQ ID NO: 4853
  source 1..40: mol_type = genomic DNA

SEQ ID NO: 45659 - DNA, 50 bp, Listeria booriae
  source 1..50: mol_type = genomic DNA
ctctgcatttatgacaactacagatcactgtacttatcataagtacagtt

SEQ ID NO: 45660 - DNA, 40 bp, Listeria booriae
  source 1..40: mol_type = genomic DNA
tttcaattgggagtagttgtcggtggatttcttacccatt

SEQ ID NO: 45661 - protein, 461 aa, Listeria booriae
MTVGIYIRVSTEEQAKEGFSISAQREKLQAYCIAQGWNEFKFYVDEGLSAKNMERPMLKSLLKHIENGLIDTVLVYKLDRLTRSVVDLHNMLNYFDKFNCAFKSATEVYDTSSAMGRFFITIISSVAQFERENTSERVSFGMEERARQGKYIPLAPFGYKKGEDGVLVIYEEEAALVLELVDRLQKGYSIRQCCTYLDNLGVKTRRSNTVWKNTTLRRILENHALYGATSWSGKVFKDTHPGILTEAEFFELQNILKARTGHVSSRKRALTHVFAGKIVCPNCGYRMSCVRTKYKERYNNDYRCPNCKIHYTHTSVSERKLLKAFDEYIDSYRLTSFDIKKETKKENNQMKIERQIVNLSKKREKYQKGWALDLIDDQEFSKLMKETQLELDQLESQLEIDEHSPEKTFNVAAINNIVKNIKKNWSELTIEERKDFVNMFLKDIHYVKVAGVASITKIDFY

SEQ ID NO: 45662 - DNA, 50 bp, Listeria booriae; identical to SEQ ID NO: 45657
  source 1..50: mol_type = genomic DNA

SEQ ID NO: 45663 - DNA, 40 bp, Listeria booriae; identical to SEQ ID NO: 4853
  source 1..40: mol_type = genomic DNA

SEQ ID NO: 45664 - DNA, 50 bp, Listeria booriae; identical to SEQ ID NO: 45659
  source 1..50: mol_type = genomic DNA

SEQ ID NO: 45665 - DNA, 40 bp, Listeria booriae; identical to SEQ ID NO: 45660
  source 1..40: mol_type = genomic DNA

SEQ ID NO: 45666 - protein, 461 aa, Listeria booriae; identical to SEQ ID NO: 45656

SEQ ID NO: 45667 - DNA, 50 bp, Listeria booriae
  source 1..50: mol_type = genomic DNA
ctctgcatttatgacaactacagactactgtatttatcataagtacggtt

SEQ ID NO: 45668 - DNA, 40 bp, Listeria booriae; identical to SEQ ID NO: 4853
  source 1..40: mol_type = genomic DNA

SEQ ID NO: 45669 - DNA, 50 bp, Listeria booriae
  source 1..50: mol_type = genomic DNA
ctctgcatttatgacaactacagatcactgtatttatcataagtacggtt

SEQ ID NO: 45670 - DNA, 40 bp, Listeria booriae; identical to SEQ ID NO: 45660
  source 1..40: mol_type = genomic DNA

SEQ ID NO: 45671 - protein, 548 aa, Mycobacteroides abscessus
MSLRFAFYGRVSTEDAQDPEASRSWQKRRAIDLISPHGGVLAADYFDIGQSRSLPWKRRPEASRLLADVTSRDRGFDAVVIGEPARAFYGPQFALTFPVLTHYGVGLWVPEVGGAVDPGSEAHDLVMTLFGGMSKGERARIQMRVRTAMSALAQDTTRYLGGRPPYGYQLVDAGPHPNPAKASLGQRLHRLEPDPETAPTVERIYRMYADGAGLRFIAQQLTDDGVPSPSQYDPARNRHRDPRGWSHSAIRAILDNPAYRGIRVWGKQEKYEVLLNPDDVAAGYETRMRWRDRADWIAPDRRTHEELIPDELAQAVRLRMQARRGPGRVCSRESTVPYALRGLLFCAACGRRMQGAARPGKQTTRILYRCEFGKSRSVPVDLSDHPRTVYLREDAVTARLDEWIATLADPEDLARGQDVDPAAGPGYAALQRQLSEANAKVAALITAVESGVAVEDLTAALRQRTAERDELRARVERVERPRAMCAAEISELVKELGGLSVILGAATGAERAEVYASLGLRLDYDPHLRRVTATADLSRVAGCVRGGT

SEQ ID NO: 45672 - DNA, 50 bp, Mycobacteroides abscessus; identical to SEQ ID NO: 442
  source 1..50: mol_type = genomic DNA

SEQ ID NO: 45673 - DNA, 40 bp, Mycobacteroides abscessus
  source 1..40: mol_type = genomic DNA
cgcctcagtctgtgtccgaggggggacttgaacccccacg

SEQ ID NO: 45674 - DNA, 50 bp, Mycobacteroides abscessus; identical to SEQ ID NO: 442
  source 1..50: mol_type = genomic DNA

SEQ ID NO: 45675 - DNA, 40 bp, Mycobacteroides abscessus
  source 1..40: mol_type = genomic DNA
ggcttcagtatgttgcccagggtggtcttgaactcccagg

SEQ ID NO: 45676 - protein, 527 aa, Dehalogenimonas alkenigignens
MDTEIKNVALYARVSSDKQDTDLSISAQIRSIREYAAKTNSRIVREFIDEAESGRTASRPAFKEMVALARAKNPPFSAILVWKLNRFARSRADSITYKTLLRNKGIEVISINEPVDDSPTGRLLEGVIESIDEFYSANLGQDIRRGMRENASRGFFNGSKPAYGFHVVHVKDGDRTRNKLEPDPEDSGSAQTVRRIFDMAMKDIGCKEIAKTLNGEGLRTERGQRWGRTTIYKILSNEAYTGTLVWGDRPDCMVRRCGEKPVRVENAWPGLIDQKVFKSVQHKMTMKKPEVTHPRTVPSFYLLSGLFHCRCGGAMIGHSAKSGRHFYYLCSKGAKQGKDACDVRMLPKEKLERQVVHELRTRVLTDENMEKMALLTNEELRSTSSALTEQLDVIDAELADTKARLVRLYDALETGRIGLDDLAPRIGELRSRQADLEKSRLKVEKEIDKDGVELIDVDSVKRRARDLRQLLVDSSLTERKSFLRSFVREINTDGQSMRVRYKLPIVVGPDGGGYDAVLPIDKLGGAG

SEQ ID NO: 45677 - DNA, 50 bp, Dehalogenimonas alkenigignens
  source 1..50: mol_type = genomic DNA
gttctacctattgataagcttggtggagccggagtatcaataggtagaac

SEQ ID NO: 45678 - DNA, 40 bp, Dehalogenimonas alkenigignens
  source 1..40: mol_type = genomic DNA
tgcggaaaaaagttttggtggagccggaggggatcgaacc

SEQ ID NO: 45679 - DNA, 50 bp, Dehalogenimonas alkenigignens
  source 1..50: mol_type = genomic DNA
gttctacctattgataagcttggtgtagccggagtatcaataggtagaac

SEQ ID NO: 45680 - DNA, 40 bp, Dehalogenimonas alkenigignens
  source 1..40: mol_type = genomic DNA
tggggaaaaaagtttttgggtagatggaggggtaaaaaca

SEQ ID NO: 45681 - protein, 673 aa, Streptomyces coelicolor
MYQRNTDALDVAMGVVERAVQPVRLRAVAYARVSTEEQAKGYGVQAALKKILRYIGRKDWDHVGTYTDEGISGSLEAADREDLKRLMADAHRQPKPFDIVVVSEGRAIGRVGRAFWRWVWALEDIGIYVGVVEDDYDNSTPEGRKKMRRDADYAETEWETIRKRTQGGLQEKAEDGGWPGGQPPYGYEIACQGQKGKSHLVQCAAEVKTLRMAWAMVVEEKLNTREVAARLNALNRFTRSGVPWSHSNLRAKLLSESTINARVIFRNPNRAHAGHGAKFGEDGKPLHGETVIIKLKPIFEPGEVAALQVTLAQTSKGAGRPKPKPYPLSKRLFNEHTGCNSHHVGMARTSREGRWYRCTGLAAKYPGDPTCTCKMVDADAMESAVWGEVVSLLGDPDRLRAMAAEWVGMAAGDQVQHADRIADFDKQIANLDRAIASMATECVKAGLPAAAIAQASAALLEERRQLADLRDEAAAWLEETEAAEQRARDLEALATAARTRLADMDPAEQGEVLALLDVKVTITGPVPKPKLGLTCSLAEWFKVAGRLVPSELTDDMWAAAEPVVKAWEPSNHKLRPGRLMLDAMFYKARTGCRWDDLPERFGPWKGIHSRYKTWRNCGVWDEIMAALPVDGPGYRPVPEINLVPPFRVEGRVDPRVLAGPDIQEEVVRPETGV

SEQ ID NO: 45682 - DNA, 50 bp, Streptomyces coelicolor
  source 1..50: mol_type = genomic DNA
gtggtgcgcccggagaccggcgtccccacacctctttccgggggtgccgc

SEQ ID NO: 45683 - DNA, 40 bp, Streptomyces coelicolor
  source 1..40: mol_type = genomic DNA
ccggcacgtgatgggtgtcccggggccggcgaccagtgcc

SEQ ID NO: 45684 - DNA, 50 bp, Streptomyces coelicolor
  source 1..50: mol_type = genomic DNA
gtggtgcgcccggagaccggcgtccacacacctctttccgggggtgccgc

SEQ ID NO: 45685 - DNA, 40 bp, Streptomyces coelicolor
  source 1..40: mol_type = genomic DNA
cccagtcgtcctgggtgtccagaggcatgtgaccagtgcc

SEQ ID NO: 45686 - protein, 565 aa, Janthinobacterium sp LM6
MTNLAYSYIRFSHSSQRHGGSLERQDTTAAEYAARKGLTLDTELDMRDLGKSGFTGKNITDGALGKFVKAVEDGTVPVGSFLLIEDIDRLSRLPVMEALAVFQSIIKGGVTVVTLKDGKEYSSASLLDDWVPLMPILVSMGRANEESKRKSTLLSSAWKRKKEAAAAELLPMGNNAPQWLEYVKEDTAHGINAYYRAIPERAAIVQRIFQLSIDGRGRTSIAAILNAENTLAFKGGLWGTTQISRILKSRAVLGEYQPRTMRKTTGHPPVIGYFPAVIDEATFNEAAAKNTSRRIHGLKKTTRDFNVWAGIGKCAACGESMYSITKGKLPEVGRIYSAGEKKPPPVYTYLTCSGKRAGCKAKAIRIEKTELIYREILAKVGDKSLFEDKAAIQASNLEAAQGKLMTEEGKLAKMAEGLEEAYSLTLAKELNKQEGKIDNLKEEIASLKLSLAADTIDDKAAFFAAFDLTNRDLRQKSNELLKRLNIIVKIDGGASHYSVEQDKAKILDIFDSKEPGITFFPATPATSNAVWDQEGNFSPSFDPDPNYEEDDYASEGDYGDSRNTN

SEQ ID NO: 45687 - DNA, 50 bp, Janthinobacterium sp LM6
  source 1..50: mol_type = genomic DNA
ttagtgtaattaagcccatcttttaccattgctgggccgatatacactaa

SEQ ID NO: 45688 - DNA, 40 bp, Janthinobacterium sp LM6
  source 1..40: mol_type = genomic DNA
caatggcttgccttcttttaccattgtcggcctgcccgat

SEQ ID NO: 45689 - DNA, 50 bp, Janthinobacterium sp LM6
  source 1..50: mol_type = genomic DNA
ttagtgtaattaagcccatctttttacattgctgggccgatatacactaa

SEQ ID NO: 45690 - DNA, 40 bp, Janthinobacterium sp LM6
  source 1..40: mol_type = genomic DNA
cagaggattgccttctttttaaaatctcaggctgcctgct

SEQ ID NO: 45691 - protein, 550 aa, Streptococcus agalactiae
MLKEKIKVYLYTRVSTSIQIEGYSLEAQKSRMKAFAIYNDYEIVGEYEDAGKSGKSIEGRKQFNRMMEDIKSGKDGVSFVLVFKLSRFARNAADVLSTLQIMQDYGVNLICVEDGIDSSKDAGKLMISVLSAVAEIERENIRIQTMEGRIQKAREGKWNGGFAPYGYKLEDGKLFINEEEAVAIRTIFDQYVNTTIGANGISKYLENHGIRKIPRQNGKNPLFDAGLIRKILKNPVYNGKIAFGRRTLEKVHGTRNEYKQVEQDEYLISEGIHEAIVSDEVWQAAQVKLKSQAKKYEHVNKGKDTRTHLLSGIVKCPICGVGMFGNKCTKKKKDGTKYKDFYYYGCKHRQMIRGHKCTFSKQIREELLDDAVAEVIVKIVSNPKFASMMQEKINMKVDTSEIEKEIDNYQKELRKSHSTKFKLIEEIDNLDVEDKHYKRRKQDLDDRLYRMYDKIDELESSLIDAKAKKQTIEAEKLTGDNIYKVLIYFDKLYKVMNDVERRQLITALISEIQVYEEKQPNGQWLKSITFKLPIIDDDLNISLDNDEQVE

SEQ ID NO: 45692 - DNA, 50 bp, Streptococcus agalactiae
  source 1..50: mol_type = genomic DNA
agtttggacaatgatgaacaagttgagacggtagcgcttttgtccaaact

SEQ ID NO: 45693 - DNA, 40 bp, Streptococcus agalactiae
  source 1..40: mol_type = genomic DNA
cccaatgacacatcatgtggagtgtgtggctctgctcgta

SEQ ID NO: 45694 - DNA, 50 bp, Streptococcus agalactiae
  source 1..50: mol_type = genomic DNA
agtttggacaatgatgaacaagttaggacggtagcgcttttgtccaaact

SEQ ID NO: 45695 - DNA, 40 bp, Streptococcus agalactiae
  source 1..40: mol_type = genomic DNA
caaagtgacacatagagtgaggtctgtggctgttctctta

SEQ ID NO: 45696 - protein, 550 aa, Streptococcus agalactiae
MSKEKIKVYLYTRVSTSIQIEGYSLEAQKSRMKAFAIYNDYEIVGEYEDAGKSGKSIEGRIQFNRMMEDIKSGKDGVSFVLVFKLSRFARNAADVLSTLQIMQDYGVNLICVEDGIDSSKDAGKLMISVLSAVAEIERENIRIQTMEGRIQKAREGKWNGGFAPYGYKLEDGKLFINEEEAIAIRTIFDQYVNTTIGANGISKYLENHGIRKIPRQNGKNPLFDAGLIRKILKNPVYNGKIAFGRRTLEKVHGTRNEYKQVEQDEYLISEGIHEAIVSDEVWQAAQVKLKSQAKKYEHVNKGKDTRTHLLSGIVKCPICGVGMFGNKCIKKKKDGTKYKDFYYYGCKHRQMIRGHKCTFRKQIREELLDDAVAEVIVKIVSNPKFASMMQEKINMKVDTSEIETEIDNYQKELRKCHSTKFKLIEEIDNLDVEDKHYKRRKQDLDDRLYRMYDKIDELESSLIDAKAKKQTIEAEKLTGDNIYKVLIYFDKLYKVMNDVERRQLITALISEIQVYEEKQPNGQWLKSITFKLPIIEENLNIGLDNDEHVE

SEQ ID NO: 45697 - DNA, 50 bp, Streptococcus agalactiae; identical to SEQ ID NO: 12327
  source 1..50: mol_type = genomic DNA

SEQ ID NO: 45698 - DNA, 40 bp, Streptococcus agalactiae; identical to SEQ ID NO: 45693
  source 1..40: mol_type = genomic DNA

SEQ ID NO: 45699 - DNA, 50 bp, Streptococcus agalactiae; identical to SEQ ID NO: 12989
  source 1..50: mol_type = genomic DNA

SEQ ID NO: 45700 - DNA, 40 bp, Streptococcus agalactiae; identical to SEQ ID NO: 45695
  source 1..40: mol_type = genomic DNA

SEQ ID NO: 45701 - protein, 581 aa, Streptococcus agalactiae
MTKRKRTPKKTPRAVGYIRVSTDMQAEEGYSLENQEYQIKEFAEWQKMKLVHIYKEEKGASGKNIEGRPQFQQMLADIAKNRDIDYVVVLNMSRFARNAADALVTLNKLKSYNVNLYLLDDRLDTSSKTGSAMFSLSSIFAELERNNIRENTTAGRYQKARNGLWNGAQAPFGYRLDNGKLVIEESEAEVVRIIFDRYVHTPDGIHKIAVWLNEHGYKKEPRGNGKYVFFSPGTLKNIIDNPVYAGKIAYGRRRMEQVEGENNEFHPVRQDKEDWQISDGQHEAIVSPELFEEAQKRREAESTPFPRKRSDHVNLLTGLLVCPICGRKMIATNTRGKVKKDGSLGKETHAYSCKYSKKAFGPDCTFTKQYRQELIDKEIDDVIGVCLDDKLIAEMLTYMHNEMQDTEAIGTEIDAYEKQVAKFDTAIRSLSATMDSMDGTEPAYERKYRDLQERQDKLYEKIDEAELKLEEAQRRLDGAREGEATVEEVKLFLTEFGKAIGKVDKATRKTLYAELIDTIEIVPDADWKHGEGIVSRIRFKLPMIYGDKRTLEVSRREDGTLKPADKEVSNKYFRVTENTDE

SEQ ID NO: 45702 - DNA, 50 bp, Streptococcus agalactiae
  source 1..50: mol_type = genomic DNA
tttcgggttacagaaaataccgacgagacggtatgtttgctaacccgaaa

SEQ ID NO: 45703 - DNA, 40 bp, Streptococcus agalactiae; identical to SEQ ID NO: 45693
  source 1..40: mol_type = genomic DNA

SEQ ID NO: 45704 - DNA, 50 bp, Streptococcus agalactiae
  source 1..50: mol_type = genomic DNA
tttcgggttacagaaaataccgacaggacggtatgtttgctaacccgaaa

SEQ ID NO: 45705 - DNA, 40 bp, Streptococcus agalactiae; identical to SEQ ID NO: 45695
  source 1..40: mol_type = genomic DNA

SEQ ID NO: 45706 - protein, 581 aa, Streptococcus agalactiae
MPRKKIAPKKVLRAVGYIRVSTDMQAEEGYSLENQEHQIKEYVEYQNMQLVHIYKEEKGASGKNIEGRPQFQQMLADIAKNRDIDYIVVLNMSRFARNAADALVTLNKLKSYNVNLYLIDDKLDTSSKTGSAMFSLSSIFAELERNNIRENTTAGRYQKARNGLWNGAQAPFGYRLDNGKLVIEESEAEVVRIIFDRYVHTPDGIHKIAVWLNEHGYKKEPRGNGKYVFFSPGTLKNIIDNPVYAGKIAYGRRRMEQVEGENNEFHPVRQDKEDWQISDGQHEAIVSQELFDEAQERRKVESVPFPRKRSDHVNLLTGLLVCPICGRKMIATNTRGKVKKDGTLGKETHAYSCKYSKKAFGPDCTFTKQYRQELIDKEIDDVIGVCLDDKLIAEMLTYMHNEMQDTEAIEGEIAAYEKQMAKLDTAIRSLSATMDSMDGMEPAYERKYRDLQERQDKLYEKIDEAERKLYEAQRRLDGAREGEATVEEVKLFLTEFGKAIGKVDKATRKTLYAELIDTIEIMPGADWKHGEGIVSRIRFKLPMIYGDKRTLEVSRREDGTLKPADKEVDGKYFRVTENTDE

SEQ ID NO: 45707 - DNA, 50 bp, Streptococcus agalactiae
  source 1..50: mol_type = genomic DNA
tttcgggttacggaaaatacagacgagagtgtatgtttactaacccgaaa

SEQ ID NO: 45708 - DNA, 40 bp, Streptococcus agalactiae; identical to SEQ ID NO: 45693
  source 1..40: mol_type = genomic DNA

SEQ ID NO: 45709 - DNA, 50 bp, Streptococcus agalactiae
  source 1..50: mol_type = genomic DNA
tttcgggttacggaaaatacagacaggagtgtatgtttactaacccgaaa

SEQ ID NO: 45710 - DNA, 40 bp, Streptococcus agalactiae; identical to SEQ ID NO: 45695
  source 1..40: mol_type = genomic DNA

SEQ ID NO: 45711 - protein, 550 aa, Streptococcus agalactiae
MSKEKIKVYLYTRVSTSIQIEGYSLEAQKSRMKAFAIYNDYEIVGEYEDAGKSGRSIEGRIQFNRMMEDIKSGKDGVSFVLVFKLARFARNAADVLSTLQIMQDYGVNLICVDDGIDSSKDAGKLMISVLSAVAEIERENIRIQTMEGRIQKAREGKWNGGFAPYGYKLEDGKLFINEEEAVAIRTIFDQYVNTTIGANGLSKYLENHGIRKIPRQNGKNPLFDAGLIRKILKNPVYNGKIAFGRRTLEKVHGTRNEYKQVEQDEYLISEGIHEAIVSDEVWQAAQVKLKSQAKKYEHVNKGKDTRTHLLSGIVKCPICGVGMFGNKCTKKKKDGTKYKDFYYYGCKHRQMIRGHKCTFSKQIREELLDDAVAEVIVKIVSNPKFASMMQEKINMKVDTSEIEKEIDNYQKELRKSHSTKFKLIEEIDNLDVEDKHYKRRKQDLDDRLYRMYDKIDELESSLIDAKAKKQTIEAEKLTGDNIYKVLIYFDKLYKVMNDVERRQLITALISEIQVYEEKQPNGQWLKSITFKLPIIDDDLNISLDNNEQVE

SEQ ID NO: 45712 - DNA, 50 bp, Streptococcus agalactiae; identical to SEQ ID NO: 1837
  source 1..50: mol_type = genomic DNA

SEQ ID NO: 45713 - DNA, 40 bp, Streptococcus agalactiae; identical to SEQ ID NO: 45693
  source 1..40: mol_type = genomic DNA

SEQ ID NO: 45714 - DNA, 50 bp, Streptococcus agalactiae
  source 1..50: mol_type = genomic DNA
agtttggacaataatgaacaagttaggacggtagcacttttgtccaaact

SEQ ID NO: 45715 - DNA, 40 bp, Streptococcus agalactiae; identical to SEQ ID NO: 45695
  source 1..40: mol_type = genomic DNA

SEQ ID NO: 45716 - protein, 550 aa, Streptococcus agalactiae
MSKEKIKVYLYTRVSTSIQIEGYSLEAQKSRMKAFAIYNDYEIVGEYEDAGKSGKSIEGRKQFNRMMEDIKSGKDGVSFVLVFKLSRFARNAADVLSTLQIMQDYGVNLICVEDGIDSSKDAGKLMISVLSAVAEIERENIRIQTMEGRIQKAREGKWNGGFAPYGYKLEDGKLFINEEEAVAIRTIFDQYVNTTIGANGLSKYLENHGIRKIPRQNGKNPLFDAGLIRKILKNPVYNGKIAFGRRTLEKVHGTRNEYKQVEQDEYLISEGIHEAIVSDEVWQAAQVKLKSQAKKYEHVNKGKDTRTHLLSGIVKCPICGVGMFGNKCTKKKKDGTKYKDFYYYGCKHRQMIRGHKCTFRKQIREELLDDAVAEVIVKIVSNPKFASKMQEKINMKVDTSEIEKEIDNYQKELRKSHSTKFKLIEEIDNLDVEDKHYKRRKHDLDDRLYRMYDKIDELESSLIDAKAKKQTIEAEKLTGDNIYKVLIYFDKLYKVMNDVERRQLITALISEIQVYEEKQPNGQWLKSITFKLPIIDDDLNISLDNNKQVE

SEQ ID NO: 45717 - DNA, 50 bp, Streptococcus agalactiae
  source 1..50: mol_type = genomic DNA
agtttggacaataataaacaagttgagacggtagcacttttgtccaaact

SEQ ID NO: 45718 - DNA, 40 bp, Streptococcus agalactiae; identical to SEQ ID NO: 45693
  source 1..40: mol_type = genomic DNA

SEQ ID NO: 45719 - DNA, 50 bp, Streptococcus agalactiae
  source 1..50: mol_type = genomic DNA
agtttggacaataataaacaagttaggacggtagcacttttgtccaaact

SEQ ID NO: 45720 - DNA, 40 bp, Streptococcus agalactiae; identical to SEQ ID NO: 45695
  source 1..40: mol_type = genomic DNA

SEQ ID NO: 45721 - protein, 550 aa, Streptococcus agalactiae
MSKEKIKVYLYTRVSTSIQIEGYSLEAQKSRMKAFAIYNDYEIVGEYEDAGKSGKSIEGRIQFNRMMEDIKSGKDGVSFVLVFKLSRFARNAADVLSTLQIMQDYGVNLICVEDGIDSSKDAGKLMISVLSAVAEIERENIRIQTMEGRIQKAREGKWNGGFAPYGYKLEDGKLFINEEEAVAIRTIFDQYVNTTIGANGISKYLENHGIRKIPRQNGKNPLFDAGLIRKILKNPVYNGKIAFGRRTLEKVHGTRNEYKQVEQDEYLISEGIHEAIVSDEVWQAAQVKLKSQAKKYEHVNKGKDTRTHLLSGIVKCPICGVGMFGNKCIKKKKDGTKYKDFYYYGCKHRQMIRGHKCTFSKQIREELLDDAVAEVIVKIVSNPKFASMMQEKINMKVDTSEIEKEIDNYQKELRKSHSTKFKLIEEIDNLDVDDKHYKRRKQDLDERLYRMYDKIEELESLLIDAKAKKQTIEAEKLTGDNIYKVLIYFDKLYKVMNDVERRQLITALISEIQVYEEKQPNGQWLKSITFKLPIIDDDLNISLDNDEQVE

SEQ ID NO: 45722 - DNA, 50 bp, Streptococcus agalactiae; identical to SEQ ID NO: 37717
  source 1..50: mol_type = genomic DNA

SEQ ID NO: 45723 - DNA, 40 bp, Streptococcus agalactiae; identical to SEQ ID NO: 45693
  source 1..40: mol_type = genomic DNA

SEQ ID NO: 45724 - DNA, 50 bp, Streptococcus agalactiae
  source 1..50: mol_type = genomic DNA
agtttggacaatgatgaacaagttaggacggtagcacttttgtccaaact

SEQ ID NO: 45725 - DNA, 40 bp, Streptococcus agalactiae; identical to SEQ ID NO: 45695
  source 1..40: mol_type = genomic DNA

SEQ ID NO: 45726 - protein, 550 aa, Streptococcus agalactiae
MSKEKIKVYLYTRVSTSIQIEGYSLEAQKSRMKAFAIYNDYEIVGEYEDAGKSGRSIEGRIQFNRMMEDIKSGKDGVSFVLVFKLARFARNAADVLSTLQIMQDYGVNLICVDDGIDSSKDAGKLMISVLSAVAEIERENIRIQTMEGRIQKAREGKWNGGFAPYGYKLEDGKLFINEEEAVAIRTIFDQYVNTTIGANGLSKYLDNHGIRKIPRQNGKNPLFDAGLIRKILKNPVYNGKIAFGRRTLEKVHGTRNEYKQVEQDEYIISEGIHEAIVSDEVWQAAQVKLKSQAKKYEHVNKGKDTRTHLLSGIVKCPICGVGMFGNKCTKKKKDGTKYKDFYYYGCKHRQMIRGHKCTFRKQIREELLDDAVAEVIVKIVSNPKFASMMQEKINMKVDTSEIEKEIDNYQKELRKSHSTKFKLIEEIDNLDVEDKHYKRRKQDLDDRLYRMYDKIDELESSLIDAKAKKQTIEAEKLTGDNIYKVLIYFDKLYKVMNDVERRQLITALISEIQVYEEKQPNGQWLKSITFKLPIIDDDLNISLDNNEQVE

SEQ ID NO: 45727 - DNA, 50 bp, Streptococcus agalactiae; identical to SEQ ID NO: 1837
  source 1..50: mol_type = genomic DNA

SEQ ID NO: 45728 - DNA, 40 bp, Streptococcus agalactiae; identical to SEQ ID NO: 45693
  source 1..40: mol_type = genomic DNA

SEQ ID NO: 45729 - DNA, 50 bp, Streptococcus agalactiae; identical to SEQ ID NO: 45714
  source 1..50: mol_type = genomic DNA

SEQ ID NO: 45730 - DNA, 40 bp, Streptococcus agalactiae; identical to SEQ ID NO: 45695
  source 1..40: mol_type = genomic DNA

SEQ ID NO: 45731 - protein, 581 aa, Streptococcus agalactiae
MPRKKAVSKKALRAVGYIRVSTDMQAEEGYSLENQEYQIKEFAEWQKMKLVHIYKEEKGASGKNIEGRPQFQQMLADIAKNRDIDYVVVLNMSRFARNAADALVTLNKLKSYNVNLYLLDDKLDTSSKTGSAMFSLSSIFAELERNNIRENTTAGRYQKARNGLWNGAQAPFGYRLDNGKLVIEESEAEVVRIIFDRYVHTPDGIHKIAVWLNEHGYKKEPRGNGKYVFFSPGTLKNIIDNPVYAGKIAYGRRRMEQVEGENNEFRPVRQDREDWQISEGQHEAIVSSELFEEAQKRREAESTPFPRKRTDHVNLLTGLLVCPICGRKMIATNTRGKVKKDGTLGKETHAYSCKYSKKAFGPDCTFTKQYRQELIDKEIDDVIGVCLDDKLIAEMLTYMHNEMQDTEAIEGEIAAQEKQVAKLETAIRSLSATMDAMDGTEPAYERKYRDLQDRQDKLYEQIDDAERKLDEAQRRLDGAREGEATVEEVKLFLTEFGKAIGKVDKATRKTLYAELIDTIEIVPDADWKHGEGIVSRIRFKLPMIYGDKRTLEVSRREDGTLKPADKEVGNKYFRVTENTDE

SEQ ID NO: 45732 - DNA, 50 bp, Streptococcus agalactiae
  source 1..50: mol_type = genomic DNA
tttcgggttacagaaaatacagacgagacggtctgtttactaacccgaaa

SEQ ID NO: 45733 - DNA, 40 bp, Streptococcus agalactiae; identical to SEQ ID NO: 45693
  source 1..40: mol_type = genomic DNA

SEQ ID NO: 45734 - DNA, 50 bp, Streptococcus agalactiae
  source 1..50: mol_type = genomic DNA
tttcgggttacagaaaatacagacaggacggtctgtttactaacccgaaa

SEQ ID NO: 45735 - DNA, 40 bp, Streptococcus agalactiae; identical to SEQ ID NO: 45695
  source 1..40: mol_type = genomic DNA

SEQ ID NO: 45736 - protein, 599 aa, Streptococcus agalactiae
MGNERKKAFAYIRVSTGMQVEGYSLDNQRERIERKAYGENIDIVEWFADEGKSGKSIEGREEFQRMLEKIDAGADVQFVMVYKLSRFGRNAADVMTSLERIRLNDTELYCVEDGIDSSKDAGKLVISVLAAVSEIERENIIAQTMGGRRQKAREGKWNGGMAPYGYKIGTGKQKGILQVIPEAAEHVKMIYELYLNQHMGISRIADYMTDRGYRKIERQYVNPNPNRRKSPESEIFTPAFVKGVLDNPAYMGKIPYERRRTKRVSEKKDDKVHVKYVKEKQGDGDYGLYDGLHEAIIDKDTWYAVHTRRLETGVACDRRHDLDHVHLLTGILKCPVCGANMYSNPNRKKKKDGSGEYYETEYYYCCKHRKMVGDHRCDYHRQFKQSRINLEALDAIMDAQSSKTFINEVKARLNAAVDTKQQEKELAGLKKTRRQIEATIEKISDQMDRLDATDAMYDRKYADLEKRQNDKYDALGRLEDEINILDAKVRQVMIATINYKDAMIEVARKLNSWGTLPEQEKKELFQKYFKSIEIFEDPKPGERIIKKIIFQFPVEFMGGATPETDMTYQGIVDGKERWEAVGTPEIGDEVRWDRLGNVE

SEQ ID NO: 45737 - DNA, 50 bp, Streptococcus agalactiae; identical to SEQ ID NO: 17687
  source 1..50: mol_type = genomic DNA

SEQ ID NO: 45738 - DNA, 40 bp, Streptococcus agalactiae; identical to SEQ ID NO: 45693
  source 1..40: mol_type = genomic DNA

SEQ ID NO: 45739 - DNA, 50 bp, Streptococcus agalactiae
  source 1..50: mol_type = genomic DNA
aggtgggacagattaggtaatgttaggacggtagctcttttgtcccacca

SEQ ID NO: 45740 - DNA, 40 bp, Streptococcus agalactiae; identical to SEQ ID NO: 45695
  source 1..40: mol_type = genomic DNA

SEQ ID NO: 45741 - protein, 550 aa, Streptococcus agalactiae
MSKEKIKVYLYTRVSTSIQIEGYSLEAQKSRMKAFAIYNDYEIVGEYEDAGKSGKSIEGRIQFNRMMEDIRSGKDGVSFVLVFKLSRFARNAADVLSTLQIMQDYGVNLICVEDGIDSSKDAGKLMISVLSAVAEIERENIRIQTMEGRIQKAREGKWNGGFAPYGYKLEDGKLFINEEEAVAIRTIFDQYVNTTIGANGLSKYLENHGIRKIPRQNGKNPLFDAGLIRKILKNPVYNGKIAFGRRTLEKVHGTRNEYKQVEQDEYLISEGIHEAIVSDEVWQAAQVKLKSQAKKYEHVNKGKDTRTHMLSGIVKCPICGVGMFGNKCIKKKKDGTKYKDFYYYGCKHRQMIRGHKCTYNKQIREELLDDAVAEVIIKIVSNPKFASMMQEKINMKVDTSEIEKEIDNYQKELRKSHSTKFKLIEEIDNLDVDDKHYKRRKQDLDDRLYRMYDKIEELESLLIDAKAKKQTIEAEKLTGDNIYKVLIYFDKLYKVMNDVERRQLITALISEIQVYEEKQPNGQWLKSITFKLPIIEENLNIGLDNNEQVE

SEQ ID NO: 45742 - DNA, 50 bp, Streptococcus agalactiae
  source 1..50: mol_type = genomic DNA
ggtttggacaataatgaacaagttgagacggtagcacttttgtccaaact

SEQ ID NO: 45743 - DNA, 40 bp, Streptococcus agalactiae; identical to SEQ ID NO: 45693
  source 1..40: mol_type = genomic DNA

SEQ ID NO: 45744 - DNA, 50 bp, Streptococcus agalactiae
  source 1..50: mol_type = genomic DNA
ggtttggacaataatgaacaagttaggacggtagcacttttgtccaaact

SEQ ID NO: 45745 - DNA, 40 bp, Streptococcus agalactiae; identical to SEQ ID NO: 45695
  source 1..40: mol_type = genomic DNA

SEQ ID NO: 45746 - protein, 550 aa, Streptococcus agalactiae
MSKEKIKVYLYTRVSTSIQIDGYSLEAQKSRMKAFALYNDYEIVGEYEDAGKSGKSIEGRVQFTRMMEDIKSGKDGVSFVLVFKLSRFARNAADVLSTLQIMQDFGVNLICVEDGIDSSKDAGKLMISVLSAVAEIERENIRVQTMEGRIQKAREGKWNGGFAPYGYQLIDGKLLINEEEAIAIRTIFDQYVNTSIGANGLSKYLENHGIRKIPRQNGKNPLFDAGLIRKILKNPVYNGKIAFGRRTLEKVHGTRNEYRQVEQDDYLVAEGIHEAIIPDELWQAAQVKLKAQAKKYEHVNKGKNMRTHLLSGIVKCPICGAGMFGNKSIKYKKDGTKYKDFYYYGCKHRLMNRGHKCTYNKQIREELLDDAVAEVIIKLVSNPKFASMMQEKINMKVDTSAIENEIDNYQKELRKSHSTKFKLIEEIDNLDVDDKHYKRRKQDLDDRLYRMYDKIEELESLLIDAKAKKQTIEAEKLTGDNIYKVLIYFDKLYKVMNDVERRQLIEALISEIQIYEEKQPNGQWLKSITFKLPIIDEDLNISLDNDEQVE

SEQ ID NO: 45747 - DNA, 50 bp, Streptococcus agalactiae; identical to SEQ ID NO: 37717
  source 1..50: mol_type = genomic DNA

SEQ ID NO: 45748 - DNA, 40 bp, Streptococcus agalactiae; identical to SEQ ID NO: 45693
  source 1..40: mol_type = genomic DNA

SEQ ID NO: 45749 - DNA, 50 bp, Streptococcus agalactiae; identical to SEQ ID NO: 45724
  source 1..50: mol_type = genomic DNA

SEQ ID NO: 45750 - DNA, 40 bp, Streptococcus agalactiae; identical to SEQ ID NO: 45695
  source 1..40: mol_type = genomic DNA

SEQ ID NO: 45751 - protein, 550 aa, Streptococcus agalactiae
MSKEKIKVYLYTRVSTSIQIDGYSLEAQKSRMKAFALYNDYEIVGEYEDAGKSGKSIEGRIQFTRMMEDIKSGKDGVSFVLVFKLSRFARNAADVLSTLQTMQDFGVNLICVEDGIDSSKDAGKLMISVLSAVAEIERENIRVQTMEGRIQKAREGKWNGGFAPYGYQLIDGKLLINEEEAIAIRTIFDQYVNTSIGANGLSKYLENHGIRKIPRQNGKNPLFDAGLIRKILKNPVYNGKIAFGRRTLEKVHGTRNEYRQVDQDDYIVAEGIHEAIIPDELWQAAQVKLKAQAKKYEHVNKGKNMRTHLLSGIVKCPICGAGMFGNKSIKYKKDGTKYKDFYYYGCKHRLMNRGHKCTYNKQIREELLDDAVAEVIIKLVSNPKFASMMQEKINMKVDTSAIENEIDNYQKELRKSHSTKFKLIEEIDNLDVEDKHYKRRKNDLDDRLYRMYDKIEELESLLIDAKAKKQTIEAEKLTGDNIYKVLIYFDKLYKVMNDVERRQLITALISEIQIYEEKQPNGQWLKSITFKLPIIDKDLNIGLDNDEQVE

SEQ ID NO: 45752 - DNA, 50 bp, Streptococcus agalactiae
  source 1..50: mol_type = genomic DNA
ggtttggacaatgatgaacaagttgagacggtagcattattgtccaaact

SEQ ID NO: 45753 - DNA, 40 bp, Streptococcus agalactiae; identical to SEQ ID NO: 45693
  source 1..40: mol_type = genomic DNA

SEQ ID NO: 45754 - DNA, 50 bp, Streptococcus agalactiae
  source 1..50: mol_type = genomic DNA
ggtttggacaatgatgaacaagttaggacggtagcattattgtccaaact

SEQ ID NO: 45755 - DNA, 40 bp, Streptococcus agalactiae; identical to SEQ ID NO: 45695
  source 1..40: mol_type = genomic DNA

SEQ ID NO: 45756 - protein, 549 aa, Streptococcus agalactiae; identical to SEQ ID NO: 12611

SEQ ID NO: 45757 - DNA, 50 bp, Streptococcus agalactiae
  source 1..50: mol_type = genomic DNA
ggtttggacaataaagataatgtcgagacggtagctctgttgtacaaact

SEQ ID NO: 45758 - DNA, 40 bp, Streptococcus agalactiae; identical to SEQ ID NO: 45693
  source 1..40: mol_type = genomic DNA

SEQ ID NO: 45759 - DNA, 50 bp, Streptococcus agalactiae
  source 1..50: mol_type = genomic DNA
ggtttggacaataaagataatgtcaggacggtagctctgttgtacaaact

SEQ ID NO: 45760 - DNA, 40 bp, Streptococcus agalactiae; identical to SEQ ID NO: 45695
  source 1..40: mol_type = genomic DNA

SEQ ID NO: 45761 - protein, 550 aa, Streptococcus agalactiae
MSKEKIKVYLYTRVSTSIQIDGYSLEAQKSRMKAFALYNDYEIVGEYEDAGKSGKSIEGRVQFTRMMEDIKSGKDGVSFVLVFKLSRFARNAADVLSTLQIMQDFGVNLICVEDGIDSSKDAGKLMISVLSAVAEIERENIRVQTMEGRIQKAREGKWNGGFAPYGYQLIDGKLLINEEEAIAIRTIFDQYVNTSIGANGLSKYLENHGIRKIPRQNGKNPLFDAGLIRKILKNPVYNGKIAFGRRTLEKVHGTRNEYRQVEQDDYLVAEGIHEAIIPDELWQAAQVKLKAQAKKYEHVNKGKNMRTHLLSGIVKCPICGAGMFGNKSIKYKKDGTKYKDFYYYGCKHRLMNRGHKCTYNKQIREELLDDAVAEVIIKLVSNPKFASMMQEKINMKVDTSAIENEIDNYQKELRKSHSTKFKLIEEIDNLDVDDKHYKRRKQDLDDRLYRMYDKIDELESLLIDAKAKKQTIEAEKLTGDNIYKVLIYFDKLYKVMNDVERRQLIEALISEIQIYEEKQPNGQWLKSITFKLPIIDEDLNISLDNDEQVE

SEQ ID NO: 45762 - DNA, 50 bp, Streptococcus agalactiae; identical to SEQ ID NO: 37737
  source 1..50: mol_type = genomic DNA

SEQ ID NO: 45763 - DNA, 40 bp, Streptococcus agalactiae; identical to SEQ ID NO: 45693
  source 1..40: mol_type = genomic DNA

SEQ ID NO: 45764 - DNA, 50 bp, Streptococcus agalactiae
  source 1..50: mol_type = genomic DNA
agtttggacaatgatgaacaagttaggacggtagcactattgtccaaact

SEQ ID NO: 45765 - DNA, 40 bp, Streptococcus agalactiae; identical to SEQ ID NO: 45695
  source 1..40: mol_type = genomic DNA

SEQ ID NO: 45766 - protein, 549 aa, Streptococcus agalactiae; identical to SEQ ID NO: 12611

SEQ ID NO: 45767 - DNA, 50 bp, Streptococcus agalactiae; identical to SEQ ID NO: 12612
  source 1..50: mol_type = genomic DNA

SEQ ID NO: 45768 - DNA, 40 bp, Streptococcus agalactiae; identical to SEQ ID NO: 45693
  source 1..40: mol_type = genomic DNA

SEQ ID NO: 45769 - DNA, 50 bp, Streptococcus agalactiae
  source 1..50: mol_type = genomic DNA
ggtttggacaataaagataatgtcaggacggtagctctgttgtccaaact

SEQ ID NO: 45770 - DNA, 40 bp, Streptococcus agalactiae; identical to SEQ ID NO: 45695
  source 1..40: mol_type = genomic DNA

SEQ ID NO: 45771 - protein, 549 aa, Streptococcus agalactiae
MKKKKAYVYTRVSTSIQIDGYSLDAQEERIKQYAKAYGIEIIKTYKDAGKSGTSISGRNEFIAMLNDIEAEKDKVDYVIVFKLSRFGRNAADVLQSLQVMENHNVNLICVDDSLDSSKDSGKLVITILSAVAEMERENILSQTMEGRKQKAREGKWNGGFAPIGYSLDNGELVVNEEEAKAVRMIFDLYANSDMGANGVSKYLVSLGINKPIRQNGKNPYFSASLIRQILDNPVYNGKIAYGRRKTIKDKTTGKIKLEKSDHYIIAQGNHEPLIDDELWNEVQEKRKSQAKKYEKVNRGKDERVHILSNLIKCPYCGAGLYGNKSRKRNKNKEGEHYKDYYYYGCKHRQMMNGHTCTFNKQIRAELIEKEVETIITQIVSNPTFAKKIEEKINIQIDTKEIDEVINKHLAKIRQLTGTKASLINQIDSLNFEEKHYDRKYTDLNLRLDAIYDQLEYAEMQLNDIRKRKEAILEEKITSDNIYKILVNFNSLYTVLSDIDKKRLLNELIEEIQIYDEKPKNGTWIKSVVFKLPLIDHDLDYSLDKIDNVE

SEQ ID NO: 45772 - DNA, 50 bp, Streptococcus agalactiae
  source 1..50: mol_type = genomic DNA
agtttggacaaaatagataatgtggagacggtagctctgttgtccaaact

SEQ ID NO: 45773 - DNA, 40 bp, Streptococcus agalactiae; identical to SEQ ID NO: 45693
  source 1..40: mol_type = genomic DNA

SEQ ID NO: 45774 - DNA, 50 bp, Streptococcus agalactiae
  source 1..50: mol_type = genomic DNA
agtttggacaaaatagataatgtgaggacggtagctctgttgtccaaact

SEQ ID NO: 45775 - DNA, 40 bp, Streptococcus agalactiae; identical to SEQ ID NO: 45695
  source 1..40: mol_type = genomic DNA

SEQ ID NO: 45776 - protein, 550 aa, Streptococcus agalactiae
MSKEKIKVYLYTRVSTSIQIDGYSLEAQKSRMKAFALYNDYEIVGEYEDAGKSGKSIEGRVQFTRMMEDIKSGKDGVSFVLVFKLSRFARNAADVLSTLQIMQDYGVNLICVEDGIDSSKDAGKLMISVLSAVAEIERENIRVQTMEGRIQKAREGKWNGGFAPYGYQLIDGKLLINEEEAIAIRTIFDQYVNTSIGANGLSKYLENHGIRKIPRQNGKNPLFDAGLIRKILKNPVYNGKIAFGRRTLEKVHGTRNEYRQVEQDDYLVAEGIHEAIIPDELWQAAQVKLKAQAKKYEHVNKGKNMRTHLLSGIVKCPICGAGMFGNKSIKYKKDGTKYKDFYYYGCKHRLMNRGHKCTYNKQIREELLDDAVAEVIIKLVSNPKFASMMKEKINMKVDTSAIENEIDNYQKELRKSHSTKFKLIEEIDNLDVDDKHYKRRKQDLDDRLYRMYDKIEELESLLIDAKAKKQTIEAEKLTGDNIYKVLIYFDKLYKVMNDVERRQLISALISEIQIFEEKQPNGQWLKSITFKLPIIEENLNIGLDNDEHVE

SEQ ID NO: 45777 - DNA, 50 bp, Streptococcus agalactiae
  source 1..50: mol_type = genomic DNA
ggtttggacaacgatgaacatgttgagacggtagcactattgtccaaact

SEQ ID NO: 45778 - DNA, 40 bp, Streptococcus agalactiae; identical to SEQ ID NO: 45693
  source 1..40: mol_type = genomic DNA

SEQ ID NO: 45779 - DNA, 50 bp, Streptococcus agalactiae
  source 1..50: mol_type = genomic DNA
ggtttggacaacgatgaacatgttaggacggtagcactattgtccaaact

SEQ ID NO: 45780 - DNA, 40 bp, Streptococcus agalactiae; identical to SEQ ID NO: 45695
  source 1..40: mol_type = genomic DNA

SEQ ID NO: 45781 - protein, 549 aa, Streptococcus agalactiae
MSKEKIKVYLYTRVSTSIQIDGYSLEAQKSRMKAFALYNDYEIVGEYEDAGKSGKSIEGRIQFTRMMEDIKSGKDGVSFVLVFKLSRFARNAADVLSTLQIMQDFGVNLICVEDGIDSSKDAGKLMISVLSAVAEIERENIRVQTMEGRIQKAREGKWNGGFAPYGYQLIDGKLLINEEEAIAIRTIFDQYVNTSIGANGLSKYLENHGIRKIPRQNGKNPLFDAGLIRKILKNPVYNGKIAFGRRTLEKVHGTRNEYKQVEQDEYLISEGIHEAIVSDEVWQAAQVKLKSQAKKYEHVNKGKDTRTHLLSGIVKCPICGVGMFGNKCIKKKKDGTKYKDFYYYGCKHRQMIRGHKCTFSKQIREELLDDAVAEVIIKLVSNPKFASMMQEKINMKVDTSAIENEIDNYQKELRKSHSTKFKLIEEIDNLDVEDKHYKRRKQDLDDRLYRMYDKIEELESLLIDAKAKKQTIEAEKLTGDNIYKVLIYFDKLYKVMNDVERRQLISALISEIQIYEEKQPNGQWLKSITFKLPIIDEDLNISLDNDEQV

SEQ ID NO: 45782 - DNA, 50 bp, Streptococcus agalactiae
  source 1..50: mol_type = genomic DNA
agtttggacaatgatgaacaagttgaaacggtagcacttttgtccaaact

SEQ ID NO: 45783 - DNA, 40 bp, Streptococcus agalactiae; identical to SEQ ID NO: 45693
  source 1..40: mol_type = genomic DNA

SEQ ID NO: 45784 - DNA, 50 bp, Streptococcus agalactiae
  source 1..50: mol_type = genomic DNA
agtttggacaatgatgaacaagttagaacggtagcacttttgtccaaact

SEQ ID NO: 45785 - DNA, 40 bp, Streptococcus agalactiae; identical to SEQ ID NO: 45695
  source 1..40: mol_type = genomic DNA

SEQ ID NO: 45786 - protein, 581 aa, Streptococcus agalactiae
MPRKKAVSKKALRAVGYIRVSTDMQAEEGYSLENQEYQIKEFAEWQKMKLVHIYKEEKGASGKNIEGRPQFQQMLADIAKNRDIDYVVVLNMSRFARNAADALVTLNKLKSYNVNLYLLDDKLDTSSKTGSAMFSLSSIFAELERNNIRENTTAGRYQKARNGLWNGAQAPFGYRLDNGKLVIEESEAEVVRIIFDRYVHTPDGIHKIAVWLNEHGYKKEPRGNGKYVFFSPGTLKNIIDNPVYAGKIAYGRRRMEQVEGENNEFRPVRQDREDWQISEGQHEAIVSPELFEEAQKRREAESTPFPRKRTDHVNLLTGLLVCPICGRKMIATNTRGKVKKDGSLGKETHAYSCKYSKKAFGPDCTFTKQYRQELIDKEIDDVIGVCLDDKLIAEMLTYMHNEMQDTEAIEGEITAQEKHVAKLDTAIRSLSATMDSMDGTEPAYERKYRDLQERQDKLYEQIDDAERKLDEAQRRLDGAREGEATVEEVKLFLTEFGKTIGQVDKATRKTLYAELIDTIEIVPDADWKHGEGIVSRIRFKLPMIYGDKRTLEVSRREDGTLKPADKEVDGKYFRVTENTDE

SEQ ID NO: 45787 - DNA, 50 bp, Streptococcus agalactiae
  source 1..50: mol_type = genomic DNA
tttcgggttacagaaaatacagacgagagtgtctgtttgctaacccgaaa

SEQ ID NO: 45788 - DNA, 40 bp, Streptococcus agalactiae; identical to SEQ ID NO: 45693
  source 1..40: mol_type = genomic DNA

SEQ ID NO: 45789 - DNA, 50 bp, Streptococcus agalactiae
  source 1..50: mol_type = genomic DNA
tttcgggttacagaaaatacagacaggagtgtctgtttgctaacccgaaa

SEQ ID NO: 45790 - DNA, 40 bp, Streptococcus agalactiae; identical to SEQ ID NO: 45695
  source 1..40: mol_type = genomic DNA

SEQ ID NO: 45791 - protein, 550 aa, Streptococcus agalactiae
MSKEKIKVYLYTRVSTSIQIEGYSLEAQKSRMKAFAIYNDYEIVGEYEDAGKSGRSIEGRIQFNRMMEDIKSGKDGVSFVLVFKLARFARNAADVLSTLQIMQDYGVNLICVDDGIDSSKDAGKLMISVLSAVAEIERENIRIQTMEGRIQKAREGKWNGGFAPYGYKLEDGKLFINEEEAVAIRTIFDQYVNTTIGANGLSKYLENHGIRKIPRQNGKNPLFDAGLIRKILKNPVYNGKIAFGRRTLEKVHGTRNEYKQVEQDEYLISEGIHEAIVSDEVWQAAQVKLKSQAKKYEHVNKGKDTRTHLLSGIVKCPICGVGMFGNKCTKKKKDGTKYKDFYYYGCKHRQMIRGHKCTFRKQIREELLDDAVAEVIVKIVSNPKFASMMQEKINMKVDTSEIEKEIDNYQKELRKSHSTKFKLIEEIDNLDVEDKHYKRRKQDLDDRLYRMYDKIDELESSLIDAKAKKQAIEAEKLTGDNIYKVLIYFDKLYKVMNDVERRQLITALISEIQVYEEKQPNGQWLKSITFKLPIIDDDLNISLDNDEQVE

SEQ ID NO: 45792 - DNA, 50 bp, Streptococcus agalactiae
  source 1..50: mol_type = genomic DNA
agtttggacaatgatgaacaagttgagacggtagcgttattgtccaaact

SEQ ID NO: 45793 - DNA, 40 bp, Streptococcus agalactiae; identical to SEQ ID NO: 45693
  source 1..40: mol_type = genomic DNA

SEQ ID NO: 45794 - DNA, 50 bp, Streptococcus agalactiae
  source 1..50: mol_type = genomic DNA
agtttggacaatgatgaacaagttaggacggtagcgttattgtccaaact

SEQ ID NO: 45795 - DNA, 40 bp, Streptococcus agalactiae; identical to SEQ ID NO: 45695
  source 1..40: mol_type = genomic DNA

SEQ ID NO: 45796 - protein, 550 aa, Streptococcus agalactiae
MSKEKIKVYLYTRVSTSIQIDGYSLEAQKSRMKAFALYNDYEIVGEYEDAGKSGKSIEGRVQFTRMMEDIKSGKDGVSFVLVFKLSRFARNAADVLSTLQIMQDFGVNLICVEDGIDSSKDAGKLMISVLSAVAEIERENIRVQTMEGRIQKAREGKWNGGFAPYGYQLIDGKLLINEEEAIAIRTIFDQYVNTSIGANGLSKYLENHGIRKIPRQNGKNPLFDAGLIRKILKNPVYNGKIAFGRRTLEKVHGTRNEYKQVEQDEYLISEGIHEAIVSDEVWQAAQVKLKSQAKKYEHVNKGKDTRTHLLSGIVKCPICGVGMFGNKCIKKKKDGTKYKDFYYYGCKHRHMIRGHKCTYNKQIREELLDDAVAEVIIKLVSNPKFASMMQEKINMKVDTSAIENEIDNYQKELRKNHSTKFKLIEEIDNLDVDDKHYKRRKQDLDDRLYRMYDKIEELESLLIDAKAKKQTIEAEKLTGDNIYKILIYFDKLYKVMNDVERRQLITALISEIQIYEEKQPNGQWLKSITFKLPIIDEDLNISLDNDEQVE

SEQ ID NO: 45797 - DNA, 50 bp, Streptococcus agalactiae; identical to SEQ ID NO: 45792
  source 1..50: mol_type = genomic DNA

SEQ ID NO: 45798 - DNA, 40 bp, Streptococcus agalactiae; identical to SEQ ID NO: 45693
  source 1..40: mol_type = genomic DNA

SEQ ID NO: 45799 - DNA, 50 bp, Streptococcus agalactiae; identical to SEQ ID NO: 45794
  source 1..50: mol_type = genomic DNA

SEQ ID NO: 45800 - DNA, 40 bp, Streptococcus agalactiae; identical to SEQ ID NO: 45695
  source 1..40: mol_type = genomic DNA

SEQ ID NO: 45801 - protein, 550 aa, Streptococcus agalactiae
MSKEKIKVYLYTRVSTSIQIEGYSLEAQKSRMKAFAIYNNYEIVGEYEDAGKSGKSIEGRIQFNRMMEDIKSGKDGVSFVLVFKLSRFARNAADVLSTLQIMQDYGVNLICVEDGIDSSKDAGKLMISVLSAVAEIERENIRIQTMEGRIQKAREGKWNGGFAPYGYKLEDGKLFINEEEAVAIRTIFDQYVNTTIGANGLSKYLENHGIRKIPRQNGKNPLFDAGLIRKILKNPVYNGKIAFGRRTLEKVHGTRNEYKQVEQDEYLISEGIHEAIVSDEVWQAAQVKLKSQAKKYEHVNKGKDTRTHLLSGIVKCPICGVGMFGNKCTKKKKDGTKYKDFYYYGCKHRQMIRGHKCTFSKQIREELLDDAVAEVIVKIVSNPKFASMMQEKINMKVDTSEIEKEIDNYQKELRKSHSTKFKLIEEIDNLDVEDKHYKRRKQDLDDRLYRMYDKIDELESSLIDAKAKKQTIEAEKLTGDNIYKVLIYFDKLYKVMNDVERRQLITALISEIQVYEEKQPNGQWLKSITFKLPIIDDDLNISLDNDEQVE

SEQ ID NO: 45802 - DNA, 50 bp, Streptococcus agalactiae; identical to SEQ ID NO: 37717
  source 1..50: mol_type = genomic DNA

SEQ ID NO: 45803 - DNA, 40 bp, Streptococcus agalactiae; identical to SEQ ID NO: 45693
  source 1..40: mol_type = genomic DNA

SEQ ID NO: 45804 - DNA, 50 bp, Streptococcus agalactiae; identical to SEQ ID NO: 45724
  source 1..50: mol_type = genomic DNA

SEQ ID NO: 45805 - DNA, 40 bp, Streptococcus agalactiae; identical to SEQ ID NO: 45695
  source 1..40: mol_type = genomic DNA

SEQ ID NO: 45806 - protein, 550 aa, Streptococcus agalactiae
MSKEKIKVYLYTRVSTSIQIEGYSLEAQKSRMKAFAIYNDYEIVGEYEDAGKSGKSIEGRIQFNRMMEDIKSGKDGVSFVLVFKLSRFARNAADVLSTLQIMQDYGVNLICVEDGIDSSKDAGKLMISVLSAVAEIERENIRIQTMEGRIQKAREGKWNGGFAPYGYKLEDGKLFINEEEAVAIRTIFDQYVNTTIGANGISKYLENHGIRKIPRQNGKNPLFDAGLIRKILKNPVYNGKIAFGRRTLEKVHGTRNEYKQVEQDEYLISEGIHEAIVSDEVWQAAQVKLKSQAKKYEHVNKGKDTRTHLLSGIVKCPICGVGMFGNKCIKKKKDGTKYKDFYYYGCKHRQMIRGHKCTFRKQIREELLDDAVAEVIVKIVSNPKFASMMQEKINMKVDTSEIEKEIDNYQKELRKSHSTKFKLIEEIDNLDVEDKHYKRRKQDLDDRLYRMYDKIDELESSLIDAKAKKQTIEAEKLTGDNIYKVLIYFDKLYKVMNDVERRQLITALISEIQVYEEKQPNGQWLKSITFKLPIIDDDLNISLDNDEHVE

SEQ ID NO: 45807 - DNA, 50 bp, Streptococcus agalactiae
  source 1..50: mol_type = genomic DNA
agtttggacaatgatgagcatgtggagacggtagcacttttgtccaaact

SEQ ID NO: 45808 - DNA, 40 bp, Streptococcus agalactiae; identical to SEQ ID NO: 45693
  source 1..40: mol_type = genomic DNA

SEQ ID NO: 45809 - DNA, 50 bp, Streptococcus agalactiae
  source 1..50: mol_type = genomic DNA
agtttggacaatgatgagcatgtgaggacggtagcacttttgtccaaact

SEQ ID NO: 45810 - DNA, 40 bp, Streptococcus agalactiae; identical to SEQ ID NO: 45695
  source 1..40: mol_type = genomic DNA

SEQ ID NO: 45811 - protein, 550 aa, Streptococcus agalactiae
MSKEKIKVYLYTRVSTSIQIDGYSLEAQKSRMKAFALYNDYEIVGEYEDAGKSGKSIEGRVQFTRMMEDIKSGKDGVSFVLVFKLSRFARNAADVLSTLQIMQDFGVNLICVEDGIDSSKDAGKLMISVLSAVAEIERENIRVQTMEGRIQKAREGKWNGGFAPYGYQLIDGKLLINEEEAIAIRTIFDQYVNTSIGANGLSKYLENHGIRKIPRQNGKNPLFDAGLIRKILKNPVYNGKIAFGRRTLEKVHGTRNEYRQVEQDDYLVAEGIHEAIIPDELWQAAQVKLKAQAKKYEHVNKGKNMRTHLLSGIVKCPICGAGMFGNKSIKYKKDGTKYKDFYYYGCKHRLMNRGHKCTYNKQIREELLDDAVAEVIIKLVSNPKFASMMKEKINMKVDTSAIENEIDNYQKELRKSHSTKFKLIEEIDNLDVDDKHYKRRKQDLDDRLYRMYDKIEELESLLIDAKAKKQTIEAEKLTGDNIYKVLIYFDKLYKVMNDVERRQLIEALISEIQIYEEKQANGQWLKSITFKLPIIDEDLNISLDNDEHVE

SEQ ID NO: 45812 - DNA, 50 bp, Streptococcus agalactiae
  source 1..50: mol_type = genomic DNA
agtttggacaatgatgagcatgttgagacggtagcactattgtccaaact

SEQ ID NO: 45813 - DNA, 40 bp, Streptococcus agalactiae; identical to SEQ ID NO: 45693
  source 1..40: mol_type = genomic DNA

SEQ ID NO: 45814 - DNA, 50 bp, Streptococcus agalactiae
  source 1..50: mol_type = genomic DNA
agtttggacaatgatgagcatgttaggacggtagcactattgtccaaact

SEQ ID NO: 45815 - DNA, 40 bp, Streptococcus agalactiae; identical to SEQ ID NO: 45695
  source 1..40: mol_type = genomic DNA

SEQ ID NO: 45816 - protein, 549 aa, Streptococcus agalactiae
MSKEKIKVYLYTRVSTSIQIDGYSLEAQKSRMKAFALYNDYEIVGEYEDAGKSGKSIEGRVQFTRMMEDIKSGKDGVSFVLVFKLSRFARNAADVLSTLQIMQDFGVNLICVEDGIDSSKDAGKLMISVLSAVAEIERENIRVQTMEGRIQKAREGKWNGGFAPYGYQLIDGKLLINEEEAIAIRTIFDQYVNTSIGANGLSKYLENHGIRKIPRQNGKNPLFDAGLIRKILKNPVYNGKIAFGRRTLEKVHGTRNEYRQVEQDDYLVAEGIHEAIIPDELWQAAQVKLKAQAKKYEHVNKGKNMRTHLLSGIVKCPICGAGMFGNKSIKYKKDGTKYKDFYYYGCKHRLMNRGHKCTYNKQIREELLDDAVAEVIIKLVSNPKFASMMQEKINMKVDTSAIENEIDNYQKELRKSHSTKFKLIEEIDNLDVDDKHYKRRKQDLDDRLYRMYDKIEELEGQLIEAKAKKETIEAEKLTGDNIYKVLIYFDKLYKVMNDVERRQLIEALISEIQIYEEKQPNGQWLKSITFKLPIIDEDLNISLDNDEQV

SEQ ID NO: 45817 - DNA, 50 bp, Streptococcus agalactiae
  source 1..50: mol_type = genomic DNA
agtttggacaatgatgagcaagtggaaacggtagcacttttgtccaaact

SEQ ID NO: 45818 - DNA, 40 bp, Streptococcus agalactiae; identical to SEQ ID NO: 45693
  source 1..40: mol_type = genomic DNA

SEQ ID NO: 45819 - DNA, 50 bp, Streptococcus agalactiae
  source 1..50: mol_type = genomic DNA
agtttggacaatgatgagcaagtgagaacggtagcacttttgtccaaact

SEQ ID NO: 45820 - DNA, 40 bp, Streptococcus agalactiae; identical to SEQ ID NO: 45695
  source 1..40: mol_type = genomic DNA

SEQ ID NO: 45821 - protein, 550 aa, Streptococcus agalactiae
MSKEKIKVYLYTRVSTSIQIDGYSLEAQKSRMKAFALYNDYEIVGEYEDAGKSGKSIEGRVQFTRMMEDIKSGKDGVSFVLVFKLSRFARNAADVLSTLQIMQDFGVNLICVEDGIDSSKDAGKLMISVLSAVAEIERENIRVQTMEGRIQKAREGKWNGGFAPYGYQLIDGKLLINEEEAIAIRTIFDQYVNTSIGANGLSKYLENHGIRKIPRQNGKNPLFDAGLIRKILKNPVYNGKIAFGRRTLEKVHGTRNEYKQVEQDEYLISEGIHEAIVSDEVWQAAQVKLKSQAKKYEHVNKGKDTRTHLLSGIVKCPICGVGMFGNKCIKKKKDGTKYKDFYYYGCKHRHMIRGHKCTYNKQIREELLDDAVAEVIIKIVSNPKFASMMQEKINMKVDTSEIEKEIDNYQKELRKSHSTKFKLIEEIDNLDADDKHYKRRKQDLDDRLYRMYDKIEDLESLLIDAKAKKQTIEAEKLTGDNIYKVLIYFDKLYKVMNDVERRQLIEALISEIQIYEEKQPNGQWLKSITFKLPIIDENLNIGLDNDEQVE

SEQ ID NO: 45822 - DNA, 50 bp, Streptococcus agalactiae
  source 1..50: mol_type = genomic DNA
ggtttggacaatgatgaacaagttgagacggtagcgttattgtccaaact

SEQ ID NO: 45823 - DNA, 40 bp, Streptococcus agalactiae; identical to SEQ ID NO: 45693
  source 1..40: mol_type = genomic DNA

SEQ ID NO: 45824 - DNA, 50 bp, Streptococcus agalactiae
  source 1..50: mol_type = genomic DNA
ggtttggacaatgatgaacaagttaggacggtagcgttattgtccaaact

SEQ ID NO: 45825 - DNA, 40 bp, Streptococcus agalactiae; identical to SEQ ID NO: 45695
  source 1..40: mol_type = genomic DNA

SEQ ID NO: 45826 - protein, 550 aa, Streptococcus agalactiae
MSKEKIKVYLYTRVSTSIQIDGYSLEAQKSRMKAFALYNDYEIVGEYEDAGKSGKSIEGRVQFTRMMEDIKSGKDGVSFVLVFKLSRFARNAADVLSTLQIMQDFGVNLICVEDGIDSSKDAGKLMISVLSAVAEIERENIRVQTMEGRIQKAREGKWNGGFAPYGYQLIDGKLLINEEEAIAIRTIFDQYVNTSIGANGISKYLENHGIRKIPRQNGKNPLFDAGLIRKILKNPVYNGKIAFGRRTLEKVHGTRNEYKQVEQDEYLISEGIHEAIVSDEVWQAAQVKLKSQAKKYEHVNKGKDTRTHLLSGIVKCPICGVGMFGNKCIKKKKDGTKYKDFYYYGCKHRQMIRGHKCTFSKQIREELLDDAVAEVIIKLVSNPKFASMMQDKINMKVDTSAIENEIDNYQKELRKSHSTKFKLIEEIDNLDVDDKHYKRRKQDLDDRLYRMYDKIEELESLLIDAKAKKQTIEAEKLTGDNIYKVLIYFDKLYKVMNDVERRQLITALISEIQVYEEKQPNGQWLKSITFKLPIIDDDLNISLDNDEQVE

SEQ ID NO: 45827 - DNA, 50 bp, Streptococcus agalactiae; identical to SEQ ID NO: 37737
  source 1..50: mol_type = genomic DNA

SEQ ID NO: 45828 - DNA, 40 bp, Streptococcus agalactiae; identical to SEQ ID NO: 45693
  source 1..40: mol_type = genomic DNA

SEQ ID NO: 45829 - DNA, 50 bp, Streptococcus agalactiae; identical to SEQ ID NO: 45764
  source 1..50: mol_type = genomic DNA

SEQ ID NO: 45830 - DNA, 40 bp, Streptococcus agalactiae; identical to SEQ ID NO: 45695
  source 1..40: mol_type = genomic DNA

SEQ ID NO: 45831 - protein, 550 aa, Streptococcus agalactiae
MSKEKIKVYLYTRVSTSIQIEGYSLEAQKSRMKAFAIYNDYEIVGEYEDAGKSGRSIEGRIQFNRMMEDIKSGKDGVSFVLVFKLARFARNAADVLSTLQIMQDYGVNLICVDDGIDSSKDAGKLMISVLSAVAEIERENIRIQTMEGRIQKAREGKWNGGFAPYGYKLEDGKLFINEEEAVAIRTIFDQYVNTTIGANGISKYLENHGIRKIPRQNGKNPLFDAGLIRKILKNPVYNGKIAFGRRTLEKVHGTRNEYKQVEQDEYLISEGIHEAIVSDEVWQAAQVKLKSQAKKYEHVNKGKDTRTHLLSGIVKCPICGVGMFGNKCIKKKKDGTKYKDFYYYGCKHRQMIRGHKCTFRKQIREELLDDAVAEVIVKIVSNPKFASMMQEKINMKVDTSEIETEIDNYQKELRKCHSTKFKLIEEIDNLDVEDKHYKRRKQDLDDRLYRMYDKIDELESSLIDAKAKKQTIEAEKLTGDNIYKVLIYFDKLYKVMNDVERRQLITALISEIQVYEEKQPNGQWLKSITFKLPIIEENLNIGLDNDEHVE

SEQ ID NO: 45832 - DNA, 50 bp, Streptococcus agalactiae; identical to SEQ ID NO: 12327
  source 1..50: mol_type = genomic DNA

SEQ ID NO: 45833 - DNA, 40 bp, Streptococcus agalactiae; identical to SEQ ID NO: 45693
  source 1..40: mol_type = genomic DNA

SEQ ID NO: 45834 - DNA, 50 bp, Streptococcus agalactiae; identical to SEQ ID NO: 12989
  source 1..50: mol_type = genomic DNA

SEQ ID NO: 45835 - DNA, 40 bp, Streptococcus agalactiae; identical to SEQ ID NO: 45695
  source 1..40: mol_type = genomic DNA

SEQ ID NO: 45836 - protein, 550 aa, Streptococcus agalactiae
MSKEKIKVYLYTRVSTSIQIEGYSLEAQKSRMKAFAIYNDYEIVGEYEDAGKSGKSIEGRIQFNRMMEDIKSGKDGVSFVLVFKLSRFARNAADVLSTLQIMQDYGVNLICVEDGIDSSKDAGKLMISVLSAVAEIERENIRIQTMEGRIQKAREGKWNGGFAPYGYKLEDGKLFINEEEAVAIRTIFDQYVNTTIGANGISKYLENHGIRKIPRQNGKNPLFDAGLIRKILKNPVYNGKIAFGRRTLEKVHGTRNEYKQVEQDEYLISEGIHEAIVSDEVWQAAQVKLKSQAKKYEHVNKGKDTRTHLLSGIVKCPICGVGMFGNKCIKKKKDGTKYKDFYYYGCKHRQMIRGHKCTFSKQIREELLDDAVAEVIVKIVSNPKFASMMQEKINMKVDTSEIETEIDNYQKELRKCHSTKFKLIEEIDNLDVEDKHYKRRKQDLDDRLYRMYDKIDELESSLIDAKAKKQTIEAEKLTGDNIYKVLIYFDKLYKVMNDVERRQLITALISEIQVYEEKQPNGQWLKSITFKLPIIDDDLNISLDNDEHVE

SEQ ID NO: 45837 - DNA, 50 bp, Streptococcus agalactiae
  source 1..50: mol_type = genomic DNA
agtttggacaatgatgaacacgttgagacggtagcactattgtccaaact

SEQ ID NO: 45838 - DNA, 40 bp, Streptococcus agalactiae; identical to SEQ ID NO: 45693
  source 1..40: mol_type = genomic DNA

SEQ ID NO: 45839 - DNA, 50 bp, Streptococcus agalactiae
  source 1..50: mol_type = genomic DNA
agtttggacaatgatgaacacgttaggacggtagcactattgtccaaact

SEQ ID NO: 45840 - DNA, 40 bp, Streptococcus agalactiae; identical to SEQ ID NO: 45695
  source 1..40: mol_type = genomic DNA

SEQ ID NO: 45841 - protein, 550 aa, Streptococcus agalactiae
MSKEKIKVYLYTRVSTSIQIDGYSLEAQKSRMKAFALYNDYEIVGEYEDAGKSGKSIEGRIQFTRMMEDIKSGKDGVSFVLVFKLSRFARNAADVLSTLQIMQDFGVNLICVEDGIDSSKDAGKLMISVLSAVAEIERENIRVQTMEGRIQKAREGKWNGGFAPYGYQLIDGKLLINEEEAIAIRTIFDQYVNTSIGANGLSKYLENHGIRKIPRQNGKNPLFDAGLIRKILKNPVYNGKIAFGRRTLEKVHGTRNEYRQVEQDDYLVAEGIHEAIIPDELWQAAQVKLKAQAKKYEHVNKGKNMRTHLLSGIVKCPICGAGMFGNKSIKYKKDGTKYKDFYYYGCKHRLMNRGHKCTYNKQIREELLDDAVAEVIIKLVSNPKFASMMQEKINMKVDTSAIENEIDNYQKELRKSHSTKFKLIEEIDNLDVDDKHYKRRKQDLDDRLYRMYDKIDELESLLIDAKAKKQTIEAEKLTGDNIYKVLIYFDKLYKVMNDVERRQLIEALISEIQIYEEKQPNGQWLKSITFKLPIIDEDLNISLDNDEQVE

SEQ ID NO: 45842 - DNA, 50 bp, Streptococcus agalactiae; identical to SEQ ID NO: 45792
  source 1..50: mol_type = genomic DNA

SEQ ID NO: 45843 - DNA, 40 bp, Streptococcus agalactiae; identical to SEQ ID NO: 45693
  source 1..40: mol_type = genomic DNA

SEQ ID NO: 45844 - DNA, 50 bp, Streptococcus agalactiae; identical to SEQ ID NO: 45794
  source 1..50: mol_type = genomic DNA

SEQ ID NO: 45845 - DNA, 40 bp, Streptococcus agalactiae; identical to SEQ ID NO: 45695
  source 1..40: mol_type = genomic DNA

SEQ ID NO: 45846 - protein, 550 aa, Streptococcus agalactiae
MSKEKIKVYLYTRVSTSIQIDGYSLEAQKSRMKAFALYNDYEIVGEYEDAGKSGKSIEGRVQFTRMMEDIKSGKDGVSFVLVFKLSRFARNAADVLSTLQIMQDFGVNLICVEDGIDSSKDAGKLMISVLSAVAEIERENIRVQTMEGRIQKAREGKWNGGFAPYGYQLIDGKLLINEEEAIAIRTIFDQYVNTSIGANGLSKYLENHGIRKIPRQNGKNPLFDAGLIRKILKNPVYNGKIAFGRRTLEKVHGTRNEYRQVEQDDYLVAEGIHEAIIPDELWQAAQVKLKAQAKKYEHVNKGKNMRTHLLSGIVKCPICGAGMFGNKSIKYKKDGTKYKDFYYYGCKHRLMNRGHKCTYNKQIREELLDDAVAEVIIKLVSNPKFASMMQEKINMKVDTSAIENEIDNYQKELRKSHSTKFKLIEEIDNLDVDDKHYKRRKQDLDDRLYRMYDKIEELEGQLIEAKAKKETIEAEKLTGDNIYKVLIYFDKLYKVMNDVERRQLIEALISEIQIYEEKQPNGQWLKSITFKLPIIDEDLNISLDNDEQVE

SEQ ID NO: 45847 - DNA, 50 bp, Streptococcus agalactiae
  source 1..50: mol_type = genomic DNA; mol_type = genomic DNA
agtttggacaatgatgagcaagttgagacggtagcactattgtccaaact

SEQ ID NO: 45848 - DNA, 40 bp, Streptococcus agalactiae; identical to SEQ ID NO: 45693
  source 1..40: mol_type = genomic DNA; mol_type = genomic DNA

SEQ ID NO: 45849 - DNA, 50 bp, Streptococcus agalactiae
  source 1..50: mol_type = genomic DNA
agtttggacaatgatgagcaagttaggacggtagcactattgtccaaact

SEQ ID NO: 45850 - DNA, 40 bp, Streptococcus agalactiae; identical to SEQ ID NO: 45695
  source 1..40: mol_type = genomic DNA

SEQ ID NO: 45851 - protein, 549 aa, Streptococcus agalactiae
MKNKKAYVYTRVSTSMQIDGYSLDAQEERIKQYAKAYGIEIIETYKDAGKSGTSISGRNEFIAMLNDIEAEKDKVDYVMVFKLSRFGRNAADVLQSLQVMENHNVNLICVDDSLDSSKDSGKLVITILSAVAEMERENILSQTMEGRKQKAREGKWNGGFAPIGYSLDNGELVVNEDEAKAVRMIFDLYANSDMGANGVSKYLVSLGINKPIRQNGKNPYFSASLIRQILDNPVYNGKIAYGRRKTIKDKTTGKIKLEKSDHYIIAQGNHEALIDDELWNTVQEKRKSQAKKYEKINRGKDERVHILSNLIKCPYCGAGLYGNKSRKRNKNKEGEHYKDYYYYGCKHRQMMNGHKCTFNKQIRAELIEKEVETIITQVVSNPTFAKKIEEKINIQIDTKEIDEVINKHLAKIRQLTGTKASLINQIDSLNFEDKHYDRKYTDLNLRLDAIYDQLEYAEMQLNDSRKRKEAILEEKITSDNIYKILVNFNSLYTVLSDIDKKRLLNEMIEEIQIYDEKTEKDTWIKSVVFKLPLIDNEIDFDLDNKDNVE

SEQ ID NO: 45852 - DNA, 50 bp, Streptococcus agalactiae
  source 1..50: mol_type = genomic DNA
gatttggacaataaagataatgtcgagacggtagctctgttgtccaaact

SEQ ID NO: 45853 - DNA, 40 bp, Streptococcus agalactiae; identical to SEQ ID NO: 45693
  source 1..40: mol_type = genomic DNA

SEQ ID NO: 45854 - DNA, 50 bp, Streptococcus agalactiae
  source 1..50: mol_type = genomic DNA
gatttggacaataaagataatgtcaggacggtagctctgttgtccaaact

SEQ ID NO: 45855 - DNA, 40 bp, Streptococcus agalactiae; identical to SEQ ID NO: 45695
  source 1..40: mol_type = genomic DNA

SEQ ID NO: 45856 - protein, 549 aa, Streptococcus agalactiae
MKNKKAYVYTRVSTSIQIDGYSLDAQEERIKQYAKAYDIEIIQTYRDAGKSGTSITGRNEFIAMLNDIEAEKDKVDYVMVFKLSRFGRNAADVLQSLQVMENHNVNLICVDDSLDSSKDSGKLVITILSAVAEMERENILSQTMEGRKQKAREGKWNGGFAPIGYSLDNGELVVNEDEAKAVRMIFDLYSNSDMGANGVSKYLVSLGINKPVRQNGKNPYFSASLIRQILDNPVYNGKIAYGRRKTIKDKTTGKIKLEKSDHYIIAQGNHEALIDDELWNTVQEKRKSQAKKYEKISRGKDERVHILSNLIKCPYCSAGLYGNKSRKRNKNKEGERYKDYYYYGCKHRQMMNGHKCTFNKQIRAELIEKEVETIITQVVSNPTFAKKIEEKINIQIDTKEIDEVINKHLAKIRQLTGTKASLINQIDSLNFEDKHYDRKYTDLNLRLDAIYDQLEYAEMQLNDSRKRKEAILEEKITSDNIYKILVNFNSLYTVLSDIDKKRLLNEMIEEIQIYDEKTEKDTWIKSVVFKLPLKDNEIDFSLDNKDNVE

SEQ ID NO: 45857 - DNA, 50 bp, Streptococcus agalactiae
  source 1..50: mol_type = genomic DNA
agtttggacaataaagacaatgtcgagacggtagctctgttgtccaaact

SEQ ID NO: 45858 - DNA, 40 bp, Streptococcus agalactiae; identical to SEQ ID NO: 45693
  source 1..40: mol_type = genomic DNA

SEQ ID NO: 45859 - DNA, 50 bp, Streptococcus agalactiae
  source 1..50: mol_type = genomic DNA
agtttggacaataaagacaatgtcaggacggtagctctgttgtccaaact

SEQ ID NO: 45860 - DNA, 40 bp, Streptococcus agalactiae; identical to SEQ ID NO: 45695
  source 1..40: mol_type = genomic DNA

SEQ ID NO: 45861 - protein, 550 aa, Streptococcus agalactiae
MSKEKIKVYLYTRVSTSIQIDGYSLEAQKSRMKAFALYNDYEIVGEYEDAGKSGKSIEGRVQFTRMMEDIKSGKDGVSFVLVFKLSRFARNAADVLSTLQTMQDFGVNLICVEDGIDSSKDAGKLMISVLSAVAEIERENIRVQTMEGRIQKAREGKWNGGFAPYGYQLVDGKLFINEEEAVAIRTIFDQYVNTTIGANGLSKYLENHGIRKIPRQNGKNPLFDAGLIRKILKNPVYNGKIAFGRRTLEKVHGTRNEYKQVEQDEYLIAEGIHEAIISDELWQAAQVKLKSQAKKYEHVNKGKDVRTHLLSGIVKCPICEVGMFGNKCIKKKKDGTKYKDFYYYGCKHRQMIRGHKCTFSKQIREELLDDAVAEVIIKIVSNPKFASMMQEKINMKVDTSEIEKEIDNYQKELRKSHSTKFKLIEEIDNLDVDDRHYKRRKQDLDDRLYRMYDKIEELESLLIDAKAKKQTIEAEKLTGDNIYKVLIYFDKLYNVMNDVERRQLITSLISEIQIYEEKQPNGQWLKSITFKLPIIDEDLNIGLDNNKHVE

SEQ ID NO: 45862 - DNA, 50 bp, Streptococcus agalactiae
  source 1..50: mol_type = genomic DNA
ggtttggacaataataagcatgttgagacggtagcgttattgtccaaact

SEQ ID NO: 45863 - DNA, 40 bp, Streptococcus agalactiae; identical to SEQ ID NO: 45693
  source 1..40: mol_type = genomic DNA

SEQ ID NO: 45864 - DNA, 50 bp, Streptococcus agalactiae
  source 1..50: mol_type = genomic DNA
ggtttggacaataataagcatgttaggacggtagcgttattgtccaaact

SEQ ID NO: 45865 - DNA, 40 bp, Streptococcus agalactiae; identical to SEQ ID NO: 45695
  source 1..40: mol_type = genomic DNA

SEQ ID NO: 45866 - protein, 499 aa, Actinomyces naeslundii
MPAETTLRAAIYARQSIDVEQGIQQQVAACDAEAKRRGMAVVENYRDNDVSGTKERGPQTAWAQMLRDFDAGLFDVLVVNDVDRLTRRLADVLEVRPPRRAMRVVVVRGGIDTADPTGDFVFTQFVLLAEREVRVKTQRAAAYAVERRKIGHPPPGATAYGYRWVPARERDAAGTRFAIVPKEANVVRRIFAEFKAGGNLGQIARDLREEGVSTRKGGKWHTSTIRRILLNPIYAALLPAPQPSGQHSVNYADIETCVPGAWDPIVSVDEVVLARAALLSRKPQHNGTARKWLLSGLAVCSECRAPVRSARGEAHPTTRKDGGRAKSRRYHAYRCTNGHFMRNGDLIDELAAKVAIGRISADDAADLLAPNESSDDIVALRTHIQALEERQASIANLIASGKMQPTAANNALDTLKDEISQTTIRIAEATANDPLADVVGLDDAWRWWDEATLNRRRALIEALMTVVIHPIGKGRRATTIDQVAQTVSIEWKDPSKHRS

SEQ ID NO: 45867 - DNA, 50 bp, Actinomyces naeslundii
  source 1..50: mol_type = genomic DNA
atacgtccctggtctcgcatagcggccactatgtacgaacgaagacatac

SEQ ID NO: 45868 - DNA, 40 bp, Actinomyces naeslundii
  source 1..40: mol_type = genomic DNA
gtacgccatcgggaccttggcggccgcggccttcgccggc

SEQ ID NO: 45869 - DNA, 50 bp, Actinomyces naeslundii
  source 1..50: mol_type = genomic DNA
atacgtccctggtctcgcatagcgcccactatgtacgaacgaagacatac

SEQ ID NO: 45870 - DNA, 40 bp, Actinomyces naeslundii
  source 1..40: mol_type = genomic DNA
tcacgccttcggggcttggccggccgctgcagacgccggc

SEQ ID NO: 45871 - protein, 526 aa, Vibrio cyclitrophicus
MKNCYLYRRYSTSKQSKGSSLERQQSLADKWCATNDGQLLDVITDEGYSAFKGDHISQGAFAGVLTAISSGVIPAGSYLLVENIDRLSRQAIGDALTTWMNILGADINIVTLMDGKVFTKESRNDLGSMLTYLVTQERAWSESHAKSVRTTNAIKAANKRLLNGEIARVTRPASWVTYTPQGYVLNEKADGVRRLFELYLSGLGQASTAKQLNDEGVSTLSGRSALWSSASVRKVLLNENVTGVKTIDGQAVIVYPVVVSREDWLKAREQLASKNVGASITVGKVSNPLTGLCYCGVCGDTMHYSSSTSRVGKRYEYLNCASHRRADKCGNVLFKLDHLFEIAKNLAAILCELPVQEDETQRLSAELEGAQLELADASERLAVASTMAVKYPSEAAFAALGTLELEISEVTKRVEKAELALAGAKGVQSAPLVQLSTVRKLQMSEEASRREAAQIFSSSFVSWSFDVNGNSELRTKRHGVIHLDGAGRVLEVRANGLALEGLINRFRAIPFVIDGKQGHITFDRTG

SEQ ID NO: 45872 - DNA, 50 bp, Vibrio cyclitrophicus
  source 1..50: mol_type = genomic DNA
tttttgtgtagtgacaactaaagctcgcattagttgtcatatgaggtaaa

SEQ ID NO: 45873 - DNA, 40 bp, Vibrio cyclitrophicus; identical to SEQ ID NO: 9123
  source 1..40: mol_type = genomic DNA

SEQ ID NO: 45874 - DNA, 50 bp, Vibrio cyclitrophicus
  source 1..50: mol_type = genomic DNA
tttttgtgtagtgacaactaaagcgtgcattagttgtcatatgaggtaaa

SEQ ID NO: 45875 - DNA, 40 bp, Vibrio cyclitrophicus
  source 1..40: mol_type = genomic DNA
tgtctctgcatcccatatagtaggttcagaacctagaaaa

SEQ ID NO: 45876 - protein, 544 aa, Bacillus atrophaeus
MSLIGKINALIYARVSTTDQANKGFSIDSQIERCKERAIKKFGYKESEIIVLVEPGGMGDDPNRPALNHALYLLERGLGKKFIVLHPDRLTRDNTLQGVVSRRIWGMGVDIEFIEFEVNPHDPESMLMYNIQGSIAQYNKAKIHANSKRGRLAKAKKGEFPSFKRLYGYKFNTVTDLPEYNEEEKEILFEMKDMLLNKKMSSNEIAKELSRRGVAPPNGNTWYQATVSRMLKNEDYTGDFYYGKSKVVQINGEKKQVPTDQEEWILIKIPPLWDHATREQIIEQLKRNFKGRSRATKDYLLKSKAKCGRCGGACGSGITSKTKSGVYKYYSCRAKTAKGYQNGKKVVSCEGKNWRVDIVDEVFWNWFIKLMKNPEKFLESFLEEASDQKKIDEIKAKVSRLEKQLSEIDDEIAKYVILFGKGKIKESMFDELSQPLEKNKEHIENEIKIINSQLAANKQTEDKKQKMIEYIGSFSKMIRNEITIEEKRQFLDFFIEKVTLFDDDHMEVVWKSSSLNNENSHVDFLNGEQGGEFRNSHKRLNHIQ

SEQ ID NO: 45877 - DNA, 50 bp, Bacillus atrophaeus
  source 1..50: mol_type = genomic DNA
cgcataaaagattaaaccatattcaagaacaaggttttaacttttatgtc

SEQ ID NO: 45878 - DNA, 40 bp, Bacillus atrophaeus
  source 1..40: mol_type = genomic DNA
agcaatagacacgctcgtaaagcatatggaagacaaacag

SEQ ID NO: 45879 - DNA, 50 bp, Bacillus atrophaeus
  source 1..50: mol_type = genomic DNA
cgcataaaagattaaaccatattccagaacaaggttttaacttttatgtc

SEQ ID NO: 45880 - DNA, 40 bp, Bacillus atrophaeus
  source 1..40: mol_type = genomic DNA
aacaaaatacacgttcatacagcctgtgcaatacaaacac

SEQ ID NO: 45881 - protein, 512 aa, Brevibacterium aurantiacum; identical to SEQ ID NO: 45461

SEQ ID NO: 45882 - DNA, 50 bp, Brevibacterium aurantiacum; identical to SEQ ID NO: 45462
  source 1..50: mol_type = genomic DNA

SEQ ID NO: 45883 - DNA, 40 bp, Brevibacterium aurantiacum
  source 1..40: mol_type = genomic DNA
ttccatcggcacctgctggtccagaagcatgcccatcagc

SEQ ID NO: 45884 - DNA, 50 bp, Brevibacterium aurantiacum
  source 1..50: mol_type = genomic DNA
ccccatggtcagcgcacctgctggaggcaccacatattttaaccatgtag

SEQ ID NO: 45885 - DNA, 40 bp, Brevibacterium aurantiacum
  source 1..40: mol_type = genomic DNA
ttccatcagcaccagcaccagcaccagcacacccaccagc

SEQ ID NO: 45886 - protein, 583 aa, Pectobacterium atrosepticum
MATRLYSYVRWSTDKQSGNTSLDRQTDKAKAFASLHGLEYVQILDAGISAFRGKNTTQGALAGFIEAVKAGAIPNDSYLYVENLDRLTRQDVMTALNLFTGLLSLGLTIVTGMDGKVYSQDSVKNNVTDLMMSLFLFSRANEESLTKQKRAHETALKLIDRHRAGLPVNIKSAGSAPWWIDASMGTYEAVKPHPVHWKAAQKAVELMLEGWGCFRVASYLTDNPDLYPPPRGNRGKGKKRSECWAVANLKAMRSNRALYGEKVITIDGVTHRLSNYYPAVCSQTDFARLQDVACSNRHKVGEVRQTITLLSGLGLLRCGHCGGSMSFFSKEGRIRYVCETGKNKTSSCRVWSVSGLLVERCLLVPLIRGYMDIMMGKQGLREDLTQAIADKRGELNGIESQISNITSAITMGGNIPALVASLQALEHTKSGVLVELERLTQRQALQDGKDHQLESMVDFYELLTPDLLEDTTDERRLKVREVVRAVVRSVTLSKGPDKALTLSYELQDKTAYVYTGTLTAEGKKGYTLEVVNGDIQINGTEDNEEAQRLISVIQDAEQEYHKAISKILAGFPAPVGSHFFGKR

SEQ ID NO: 45887 - DNA, 50 bp, Pectobacterium atrosepticum
  source 1..50: mol_type = genomic DNA
attggaatctaaaaatatttcgggttccccaacttcaaatagatgccaat

SEQ ID NO: 45888 - DNA, 40 bp, Pectobacterium atrosepticum
  source 1..40: mol_type = genomic DNA
atcgacgggaaacttcgggttaccggggtggctaatgata

SEQ ID NO: 45889 - DNA, 50 bp, Pectobacterium atrosepticum
  source 1..50: mol_type = genomic DNA
attggaatctaaaaatatttcgggtgccccaacttcaaatagatgccaat

SEQ ID NO: 45890 - DNA, 40 bp, Pectobacterium atrosepticum
  source 1..40: mol_type = genomic DNA
atagaaggaaaaattcggctgagcgtggtggctcatgctt

SEQ ID NO: 45891 - protein, 560 aa, Emergencia timonensis; identical to SEQ ID NO: 1631

SEQ ID NO: 45892 - DNA, 50 bp, Emergencia timonensis; identical to SEQ ID NO: 1632
  source 1..50: mol_type = genomic DNA

SEQ ID NO: 45893 - DNA, 40 bp, Emergencia timonensis
  source 1..40: mol_type = genomic DNA
aacgggtccaactggggcaacaggcccgaccggccctgga

SEQ ID NO: 45894 - DNA, 50 bp, Emergencia timonensis
  source 1..50: mol_type = genomic DNA
tgttgtgcataaatacacggctctgatgccccgtcaatatatgcacaaca

SEQ ID NO: 45895 - DNA, 40 bp, Emergencia timonensis
  source 1..40: mol_type = genomic DNA
accaggcccagctggggcagaaggtcctgcaggtcctggc

SEQ ID NO: 45896 - protein, 502 aa, Anaerotruncus rubiinfantis
MYPEVLLLRLAAYCRVSTELGEQLESLENQKSFFEEFARRHHYDLVEIYADEGISGKQIHNREAFLRMLSDAGQHLFDMVVVKDISRFSRNTVDFLNAVRQLKALRIEVQFLSNNQTVLGNSEFILTIFSALAQEESANLSKRVKFGKRVNAKKGRVPNVVYGYDQKDTFTLRVNEPEAQIVREIFTLYAQDGWGVRKIAQHLNESGVPSKRGYGWTPKTIRRMLENPLYIGILENNKSETVDFLTGMQVKLPPEEHFFHDRPELAIVPRELYDRAQREIAARRKPEDCEGKLAARHSARRLFSTLIRCGVCRYAFTRVQYTYQNTYVKWRCSGKNQYGAKFCKNNLTIDEADLTGALDQYLASRIADRGAFAARVAAAYGGNAPLDAEKARQKRLERIARQKQRYRTLYANELLTLEELKEKLAALGAREAELSDQQQSQPITSGHVLEELRLSHWTNAELRELVETIEARPDGRVVIRFRTLAPAGLPAAKPRAAVGRAP

SEQ ID NO: 45897 - DNA, 50 bp, Anaerotruncus rubiinfantis
  source 1..50: mol_type = genomic DNA
cccgcccgtttgtggtcactgacacatatagatgcgcacaaaaaggtggg

SEQ ID NO: 45898 - DNA, 40 bp, Anaerotruncus rubiinfantis
  source 1..40: mol_type = genomic DNA
catgcctaaggcaagtgtacatgtcgttgaccccatgtgc

SEQ ID NO: 45899 - DNA, 50 bp, Anaerotruncus rubiinfantis
  source 1..50: mol_type = genomic DNA
cccgcccgtttgtggtcactgacaaatatagatgcgcacaaaaaggtggg

SEQ ID NO: 45900 - DNA, 40 bp, Anaerotruncus rubiinfantis
  source 1..40: mol_type = genomic DNA
aatgccaaaggcaagtggaaatgtcattttcccctgaagc

SEQ ID NO: 45901 - protein, 612 aa, Streptococcus pyogenes; identical to SEQ ID NO: 471

SEQ ID NO: 45902 - DNA, 50 bp, Streptococcus pyogenes; identical to SEQ ID NO: 9697
  source 1..50: mol_type = genomic DNA

SEQ ID NO: 45903 - DNA, 40 bp, Streptococcus pyogenes
  source 1..40: mol_type = genomic DNA
gtttatctgctgtcgttgctggtattacaaaagctgattt

SEQ ID NO: 45904 - DNA, 50 bp, Streptococcus pyogenes
  source 1..50: mol_type = genomic DNA
agaaagtccttgacaagttgttacctgagtaatagaattaaggagaacac

SEQ ID NO: 45905 - DNA, 40 bp, Streptococcus pyogenes
  source 1..40: mol_type = genomic DNA
ttttagctgatgtcctcgcctgtatttcccaggctgtttt

SEQ ID NO: 45906 - protein, 541 aa, Ruminococcus flavefaciens
MTDKITALYCRLSQDDMLDGESNSITNQKAILQKFAEDNGFPNPTFYVDDGVSGTTWERDGFKAMMSDIEDGKVGIVITKDLSRLGRDYLKTGELIEMVFPDYDVRYIAVNDNVDTAKSENELLAFKNIFNDWYARDCSKKIRAVFRAKGQSGKHLCPPVYGYKKSDTDKNLWVIDEPAAEVVRKIFKLCIDGYGPVQIARILTEQGIPTPTAYALSQGRDNGRHNAKTYRWGANTIAHILERYEYCGHTVNFRTKMKSYKVHKIVYNPQDEWQIFENTQEPIITQQTFDLVQELRKHKRRPQKMQTVNPFAGMVYCADCGEKMYLSRRKNERPEQEHMRCSTYAKEQDKCTVHYIRTCVLNEIVLGELNKLLTMVRENEEDFIQTAMSNSVQRKSSELTKAKKTLKQAEKRIAELDKLFTRLYEDNVLGRLSDERFTMMSAGYEEEQAKLKATVAELTTLIDGAEQKSSDVTAFLKVVHKYEHIEKLTPEIMHELVDKIIVHEPDKSSGKRVQDIEIHFRFDVAVSTISVETGKYGKKVA

SEQ ID NO: 45907 - DNA, 50 bp, Ruminococcus flavefaciens
  source 1..50: mol_type = genomic DNA
aaacttctatatcactactgtgctttacgacagtaggcataaagaagttt

SEQ ID NO: 45908 - DNA, 40 bp, Ruminococcus flavefaciens
  source 1..40: mol_type = genomic DNA
atattccagtcctacaaccttatccccgtgctcaacgttg

SEQ ID NO: 45909 - DNA, 50 bp, Ruminococcus flavefaciens; identical to SEQ ID NO: 45907
  source 1..50: mol_type = genomic DNA

SEQ ID NO: 45910 - DNA, 40 bp, Ruminococcus flavefaciens
  source 1..40: mol_type = genomic DNA
accttccagtcctaccaccttattcctaaactgaatgttg

SEQ ID NO: 45911 - protein, 563 aa, Anaerostipes hadrus
MREVQVLQATKTAPNSRGRNSNYAVQIDRIRVAAYCRVSTDGDEQLGSFESQKLYYEEKIRKNKEWAMAGIFADEAITGTKIDKREGFQEMIRKCLNGEIDMILTKSISRFSRNTPDTIKYVRMLRDKNIAIMFEKENINTLDMNGEMLLTILSSLAQEEVESLSSNVKMGLQMKMKRGELVGFNGCFGYDYHQDTKTITVNETEAETVRLIYDMYLQGNGCGTIAKRLVELGIKNKRGTVEWHDHGVMGMIKNEKYKGDVLLGKTFTVDPISKRRLANMGEENQYYIRDHHEAIVSREIWDKAEEIRLKRAKPKLMQTTGNRERYTRQFTFSSMLECGYCGHKLSRRTRHQTTTTKKPVWQCMNATKNGIDNCPNCKAVDEVIIENAFLEAFRLLADSFDDVLQSVLNTIEDILKDDTELKRVKQLEKDISTIESKKSRLTDLLIDGKIEQEDYDEKKLSFQRKLHKITEEKAYLEENIGQQKNISRRMSQLRQTLENENALDEFDRIVFESIVEKVIVGGYDAEGNPTPYKLTFVLKCNQTLKVDNAKADYRANQKGKKVS

SEQ ID NO: 45912 - DNA, 50 bp, Anaerostipes hadrus
  source 1..50: mol_type = genomic DNA
tgtgttccccagccgatgccgacacatgtggaagtcgtgtgttgtctaca

SEQ ID NO: 45913 - DNA, 40 bp, Anaerostipes hadrus
  source 1..40: mol_type = genomic DNA
tcagttcccgaatacggttcatatcgagagtatggtgttg

SEQ ID NO: 45914 - DNA, 50 bp, Anaerostipes hadrus
  source 1..50: mol_type = genomic DNA
tgtgttccccagccgatgccgacaactgtggaagtcgtgtgttgtctaca

SEQ ID NO: 45915 - DNA, 40 bp, Anaerostipes hadrus
  source 1..40: mol_type = genomic DNA
acagttactgaatacagttactgtcttcagcatggtgttt

SEQ ID NO: 45916 - protein, 557 aa, Pseudomonas fragi
MPTKAYSYIRFSSPEQAKGDSYRRQRKAAEDYCSRHEIELASSREYTFLDKGRSAYKGRHLDDEGQLRRFLDLVENGTIGRGSYLLVESLDRLSREKVSTALPRFMDLLNSGIRVVTLSDNRLYTEDYNELDLIISIVHMSRAHNESSIKAQRLSSAWDNKKALARTQLKPLGRACPAWLELVDGNYQPIQQRVETIQLIFELAIAGYGQGVIPRMLNGRGTPVFGSRNRNHSGAWGSSSVSKILGNRALLGEYQPTHIVNGVRTSDGEPVTGFFPAVIPEDIFYQAQAVRTERRIHKTGGQTKRFNVVQGLIKCSICDDAMHLVNKGRPPKGATYIQCHSARKGVCKNGYIRIERIEAVLREILTKVDSLSLVQSSEGEARKQMITVTGKLEAVTQRQTQMSEDYFVSPSTNLATMIARLETEQLTLREEQKRLTETLATSQVVSKEDFFEKLDLVTFEGRHAANSLLKRLGVTISVLSEASAEQWYMVKTEARELFAIFHRSDEISTRSLDFRILDLQSLHGEIGEDDRARFEAVAEQMKKEAEKILSKLLAARN

SEQ ID NO: 45917 - DNA, 50 bp, Pseudomonas fragi
  source 1..50: mol_type = genomic DNA
agataccttttgttttgtgtccatacacaacgtactgacattgtgatagg

SEQ ID NO: 45918 - DNA, 40 bp, Pseudomonas fragi
  source 1..40: mol_type = genomic DNA
tggtcgccgctgctggcagtcacaatctgctgtttaccgg

SEQ ID NO: 45919 - DNA, 50 bp, Pseudomonas fragi
  source 1..50: mol_type = genomic DNA
agataccttttgttttgtgtccatatacaacgtactgacattgtgatagg

SEQ ID NO: 45920 - DNA, 40 bp, Pseudomonas fragi
  source 1..40: mol_type = genomic DNA
tgaacgctgctgatgggagataccatgtcctgtttctcgg

SEQ ID NO: 45921 - protein, 618 aa, Ruminococcus lactaris; identical to SEQ ID NO: 11111

SEQ ID NO: 45922 - DNA, 50 bp, Ruminococcus lactaris; identical to SEQ ID NO: 11112
  source 1..50: mol_type = genomic DNA

SEQ ID NO: 45923 - DNA, 40 bp, Ruminococcus lactaris
  source 1..40: mol_type = genomic DNA
atttttttagagtcctcgtgaagttggtcaacgacatctg

SEQ ID NO: 45924 - DNA, 50 bp, Ruminococcus lactaris; identical to SEQ ID NO: 42609
  source 1..50: mol_type = genomic DNA

SEQ ID NO: 45925 - DNA, 40 bp, Ruminococcus lactaris
  source 1..40: mol_type = genomic DNA
atttatttggattcctagtttaggtttcaaaagacatctg

SEQ ID NO: 45926 - protein, 525 aa, Nonlabens ulvanivorans
MKDQTIFDQFAKKGKGQKLRTDGKAVIYTRVSTKEQAENNASLETQLKYCKELANKKGLEVSEYFGGTYESAKSDERKEFQKMLNYVKRRSNVGYIIVYSYDRFSRTGANGAYISDQLKRQGIVTISATQEVDTSTSAGSFQQNLYYMFSQFDNELRRDKSVSGMQEKLRKGHWTGAYPFGYTNANPGKGKTPKFVITKEGKLLKQAFLWKANSNMSHVEIANKLQEKGLKINDKRLSVLFRNPFYCGLIVNSLIPGEVIEGNHQPMITKELFLKIHNLLNTGTETRKYCVDDENLPLKTFLKSTTCGTPYTGFIVKKKGLYYYKNRRKGSKENRSAKKLHQEFLELLETYKLKDKKFVAPLKEMVYDTFVSMNEEAIKETKELSSGIVALEMKLDRLEERYVFEEINKSQYDRFRTKLVAEVNQKKKNLSKHSFDSSNLKKSINIALKYALNLPLLWSSGNIEIKRKLQYMVFPDGLGYDFQNKRVQTFRVNSIFAQIACLSDKLGANKNGNFQNNIENSRLVT

SEQ ID NO: 45927 - DNA, 50 bp, Nonlabens ulvanivorans
  source 1..50: mol_type = genomic DNA
aatattgaaaattcccgtttagtgacctcgaagggacaaagttcaaactt

SEQ ID NO: 45928 - DNA, 40 bp, Nonlabens ulvanivorans
  source 1..40: mol_type = genomic DNA
ctttttaaatgtattcgtgaccacgacaggattcaaacct

SEQ ID NO: 45929 - DNA, 50 bp, Nonlabens ulvanivorans
  source 1..50: mol_type = genomic DNA
aatattgaaaattcccgtttagtgctctcgaagggacaaagttcaaactt

SEQ ID NO: 45930 - DNA, 40 bp, Nonlabens ulvanivorans
  source 1..40: mol_type = genomic DNA
ctttttaaatgtagttttgcttaaaacagaattctatcca

SEQ ID NO: 45931 - protein, 496 aa, Lacrimispora sphenoides
MSKEKLMIGAAYIRVSTGKQEELSPDSQKRLILDYAKANDIVIPEEYIFMENGISGRKADKRPQFQKMIALAKAGKFEIILLWKFSRFARNQEESIVYKSMLKKVGVDVVSISEPLVDGPFGSLIERIIEWMDEFYSIRLSGDVTRGMTEKAMRGGYQSRPPLGYRVPYHNAVPEIVPEEADIIRKIFDNYVNGNLSTYQIAKNMNALGFKTSHGKNFEKRSIEYIIDNPCYAGYVRWNRTENSTNIIKPQEEWIIREGNHDAIISNEMFEAAQARRKAEYSPRGQRPSETYKHWLSGVLKCSSCGRTLAIAYRKNRYGVMYASFQCYGYNKGKCLKSHNISSLKIEPIVMEALKETIETGSINYSIKQPDRQQSDDELYLLEKQLERLELKEKRIKAAYIDGIDTLDEYKENKTKLDNERNMILEELEVSSQADEQNIDSIMLNNVRSVYDILSSNADISEKSEAIKSIVEKIVFNKEEMNIDVYYYYTPFRKPS

SEQ ID NO: 45932 - DNA, 50 bp, Lacrimispora sphenoides
  source 1..50: mol_type = genomic DNA
gtttatacgttcttgttacttggttgcccgtatagcaagaacgtataaac

SEQ ID NO: 45933 - DNA, 40 bp, Lacrimispora sphenoides
  source 1..40: mol_type = genomic DNA
gtccaatgccctaactggatgactcagtggggaagtttaa

SEQ ID NO: 45934 - DNA, 50 bp, Lacrimispora sphenoides
  source 1..50: mol_type = genomic DNA
gtttatacgttcttgttacttggtagcccgtatagcaagaacgtataaac

SEQ ID NO: 45935 - DNA, 40 bp, Lacrimispora sphenoides
  source 1..40: mol_type = genomic DNA
atgcaattccttaaaagaaagcctcagggggaaagtttaa

SEQ ID NO: 45936 - protein, 512 aa, Staphylococcus epidermidis; identical to SEQ ID NO: 21606

SEQ ID NO: 45937 - DNA, 50 bp, Staphylococcus epidermidis
  source 1..50: mol_type = genomic DNA
aatactttatttagtctatctctagtggaactgtacttaattaagtcgaa

SEQ ID NO: 45938 - DNA, 40 bp, Staphylococcus epidermidis
  source 1..40: mol_type = genomic DNA
gatgcgcgactggaacttggtatagggctggtgaagggtt

SEQ ID NO: 45939 - DNA, 50 bp, Staphylococcus epidermidis
  source 1..50: mol_type = genomic DNA
aatactttatttagtctatctctaatggaactgtacttaattaagtcgaa

SEQ ID NO: 45940 - DNA, 40 bp, Staphylococcus epidermidis
  source 1..40: mol_type = genomic DNA
gattcagtattggaacttgatattggtctggtcagggttt

SEQ ID NO: 45941 - protein, 540 aa, Ruminococcus torques
MKQPYNTTIYNTALYLRLSRDDELQGESGSIQTQRMMLRQYAAEHGLTVADEYIDDGWSGTNFERPSFQRMIDDIEDGKINCVVTKDLSRLGRNYILTGQYTDIYFPSKGVRYIAINDNVDTLNGESELAPFLNILNEMHARQTSKKVKAAMHTRFANGAHYGAYAPLGYVKDPDKKGHLLIDPETRWIVEKIFDLAVHGRGAASITRILVEEKVPTPGWLNYDRYGTFANIYAGAPAEKAYAWTIAQVKSILKEETYIGHSVHNKQSNISFKNKKKVRKPQEEWYRVENTHEAIISEEAFQKVQELIASRRRKRRNGTTQIFAGLIKCADCGWSLAYGENKQNKNPYGYYHCSKNGQGLRQCSMHYIRYDVLYAYVLTRLQYWSVLAQKDEDKLLKQLLNASDKERTFAKKKQAAELKKAEKRKAEVDGLFAKMYEDWSAGRITEYNFNMLSEKYQNEQKELETKIRQLHETMEAAVQTATDAEKWIALMKQYVNPVELTAELLNTLIEKITVHEAVKGEDGSREQEVEIYYRFIGKID

SEQ ID NO: 45942 - DNA, 50 bp, Ruminococcus torques
  source 1..50: mol_type = genomic DNA
caatatctttaactaagggaaacgggagtttcccatagttaaagatacca

SEQ ID NO: 45943 - DNA, 40 bp, Ruminococcus torques
  source 1..40: mol_type = genomic DNA
agtttcaaaatgggaaaagggattatccgttccggatgca

SEQ ID NO: 45944 - DNA, 50 bp, Ruminococcus torques
  source 1..50: mol_type = genomic DNA
caatatctttaactaagggaaacgtaagtttcccatagttaaagatacca

SEQ ID NO: 45945 - DNA, 40 bp, Ruminococcus torques
  source 1..40: mol_type = genomic DNA
aatttcatgatgggaaatgtaagtatatgttctgtgtgca

SEQ ID NO: 45946 - protein, 540 aa, Mediterraneibacter faecis; identical to SEQ ID NO: 10596

SEQ ID NO: 45947 - DNA, 50 bp, Mediterraneibacter faecis; identical to SEQ ID NO: 3657
  source 1..50: mol_type = genomic DNA

SEQ ID NO: 45948 - DNA, 40 bp, Mediterraneibacter faecis; identical to SEQ ID NO: 45943
  source 1..40: mol_type = genomic DNA

SEQ ID NO: 45949 - DNA, 50 bp, Mediterraneibacter faecis
  source 1..50: mol_type = genomic DNA
caatatctttaattaagggaaacgtaagtttcccatagttaaagatacca

SEQ ID NO: 45950 - DNA, 40 bp, Mediterraneibacter faecis; identical to SEQ ID NO: 45945
  source 1..40: mol_type = genomic DNA

SEQ ID NO: 45951 - protein, 514 aa, Chryseobacterium gleum
MSNVALYIRVSTDEQADRGYSQRDQEERLKRYCETNNLKVNNLFFEDHSAKNFNRPAWTELLNVLRKKSSKVNKVLFTKWDRFSRNAGDAYQMINILRKLGVEVQSIEQPLDLSIPENKMMLAIYLAAPEVENDRRALNTFHGMRRAQKEGRWMASAPFGYTNKITEDGKYKFIEPKEPEASIIRYLFNEIAKGIEAPETIRRQISEKGVKILSNQAFHVAIRNPVYCGKIFIKKYRDEEAHYVKSLHVPLVSETLFNKVQLILEGNKRKSRKYVKFSSAEIFPLRGFLTCPKCGRNLTASGSRGSQKVYYYYHCKSSCGFRQSAELTNNLFVEELKKYEFLPSVQNILRNILLTSYKKFNSKADERRKRIISEIENCNAKIALAREKLLADKIEDDDYMIIKAQSKQKIETLENELHSCLIATRNPEKVDDRLNKALSVISNLSLLYQSSSVEAKRKIISSIYPENLEFTGIEYRTNRVNSILKCISLVTSVLCDINNKENAKKTAYPCLVAP

SEQ ID NO: 45952 - DNA, 50 bp, Chryseobacterium gleum
  source 1..50: mol_type = genomic DNA
aaaaaacagcttatccctgtctggtagccccaacggatgatttctcgaat

SEQ ID NO: 45953 - DNA, 40 bp, Chryseobacterium gleum
  source 1..40: mol_type = genomic DNA
gtgattaagaatatttttgtagccccaccaggaatcgaac

SEQ ID NO: 45954 - DNA, 50 bp, Chryseobacterium gleum
  source 1..50: mol_type = genomic DNA
aaaaaacagcttatccctgtctggtggccccaacggatgatttctcgaat

SEQ ID NO: 45955 - DNA, 40 bp, Chryseobacterium gleum
  source 1..40: mol_type = genomic DNA
tttattaagagtatttttgtggcctaacatgtaatctatc

SEQ ID NO: 45956 - protein, 495 aa, Aeromonas veronii
MKYHIYSRISSTKQTTGVGLDRQEQNALEYTARNHYEVANVSSDIASAYHSKHMEGKLGAFLEAITNKEIETPCGLVVESLDRLGREHELTALSRFIDIVQAGVEIHEISTGIVYNTKDTHLLHVALSIMTRAYNESLMKAKRSNDAIQRKLGEARGGKIIRSNVPAWIDINGSKFQLNEHHLTVKRIFEMYLNGMTLRPIAKYFNNNNIPYMPPKVATKGVKNGEYKWNSSRILTVLASPYVYGVYTPKNGEPIEDYYPACVDHATFLKVKDIRENRQIKAVKINNLLSIFSSCCSCSLCGHSYTANLRSYTNKQGLVETVGMRCNGRLVGIPCKGVLVPNDKLEAYVLPLIPNLDISKLNRTKMKTLDNLKAKLITYNEQKQNIMKLVLLGSEDAQVKYIEIETKAKDLKAKIEKLESKLVPEAQEDISLLALDTKNLDLRRKVNTQLQLMGIKVQLECRTTGTANVTIKLKDNIVHRGWLKWSKKKRIDARS

SEQ ID NO: 45957 - DNA, 50 bp, Aeromonas veronii
  source 1..50: mol_type = genomic DNA
tatgcgtatactgtttggtgcatggagctgcaacgtacagtataacacgt

SEQ ID NO: 45958 - DNA, 40 bp, Aeromonas veronii
  source 1..40: mol_type = genomic DNA
ctgtggcggcgtgccgaccgacgtgcggatcaccacccgc

SEQ ID NO: 45959 - DNA, 50 bp, Aeromonas veronii
  source 1..50: mol_type = genomic DNA
tatgcgtatactgtttggtgcatgtcgctgcaacgtacagtataacacgt

SEQ ID NO: 45960 - DNA, 40 bp, Aeromonas veronii
  source 1..40: mol_type = genomic DNA
ctgtgggtgagtgcccacctccggggggacggccaccagc

SEQ ID NO: 45961 - protein, 548 aa, Mycobacterium intracellulare; identical to SEQ ID NO: 38736

SEQ ID NO: 45962 - DNA, 50 bp, Mycobacterium intracellulare; identical to SEQ ID NO: 38737
  source 1..50: mol_type = genomic DNA

SEQ ID NO: 45963 - DNA, 40 bp, Mycobacterium intracellulare
  source 1..40: mol_type = genomic DNA
cgcctcagtcgtgtgtccgaggggggacttgaacccccac

SEQ ID NO: 45964 - DNA, 50 bp, Mycobacterium intracellulare
  source 1..50: mol_type = genomic DNA
gagtcgtgtcgccaaatgtgtccgcggggggacttgtccgtctacgacac

SEQ ID NO: 45965 - DNA, 40 bp, Mycobacterium intracellulare
  source 1..40: mol_type = genomic DNA
agcctcagtcctgtgtcctcgggggcactggaaggcaggc

SEQ ID NO: 45966 - protein, 548 aa, Mycobacterium intracellulare; identical to SEQ ID NO: 45326

SEQ ID NO: 45967 - DNA, 50 bp, Mycobacterium intracellulare
  source 1..50: mol_type = genomic DNA
tgagtcgtgtcgccggctgtgtccgaggggggacttggccacgtgcgaca

SEQ ID NO: 45968 - DNA, 40 bp, Mycobacterium intracellulare; identical to SEQ ID NO: 28418
  source 1..40: mol_type = genomic DNA

SEQ ID NO: 45969 - DNA, 50 bp, Mycobacterium intracellulare
  source 1..50: mol_type = genomic DNA
tgagtcgtgtcgccggctgtgtcctcggggggacttggccacgtgcgaca

SEQ ID NO: 45970 - DNA, 40 bp, Mycobacterium intracellulare
  source 1..40: mol_type = genomic DNA
cagcctcagtcctgtgtcctcgggggcactggaaggcagg

SEQ ID NO: 45971 - protein, 461 aa, Mycobacteroides abscessus; identical to SEQ ID NO: 35826

SEQ ID NO: 45972 - DNA, 50 bp, Mycobacteroides abscessus; identical to SEQ ID NO: 35827
  source 1..50: mol_type = genomic DNA

SEQ ID NO: 45973 - DNA, 40 bp, Mycobacteroides abscessus
  source 1..40: mol_type = genomic DNA
ggcgcaggcgagggtgaggttgccgatgtcggtattgggg

SEQ ID NO: 45974 - DNA, 50 bp, Mycobacteroides abscessus
  source 1..50: mol_type = genomic DNA
gggtcacatttatgacttgttggggcgctgatttttcgttaaactgacct

SEQ ID NO: 45975 - DNA, 40 bp, Mycobacteroides abscessus
  source 1..40: mol_type = genomic DNA
cgcggaggggagggggagggcggcggtgggggggttgggg

SEQ ID NO: 45976 - protein, 537 aa, Arthrobacter alpinus
MTSSQAHSPGDPVAIYLRISSDRTGDGEGVARQLVDCERLAKQRGLNVIKVIRENDVSAYNGKRRKGFEVLKLMIEEGKIMGVVAYDSDRIYRAVSDLEALLKIIEEHAVTGFTMYSVTAGKIDFNTPQGRMTARLFATVAQYEVDHKAQRQVSAHEAIFARGGWSGGRLPLGYQLGERVGEIEPDPVSAPVIQHIAAEMITGRMTITAATKYLRENTRHKFTKPVALKGALRGPTLYGLREYIPAKVRRKNEKAKTPIKVPGTLKKAAWEPILDTDDRAKLMIILKEIPRGRPLSRSLLAGLMQCGLCGTLMGYSKTTYKCNFSTGGCAKISVSTTGVEKHVMAEVNKFLAVHSSPLNGIQYAGKPPVSAPTRRDVASELTAIAEKRKQYMSLEAEGLFGNDGGVELRRLLKQLKAQEEEINFLVVGEINAEIKAEREAEAHRVWASIAKDQSQEALAMKNQTIRNVTSSIKVMPSAKGTSSGPKFEGSRVKITFGQIVEEEDFVVDQRLVDLNTPSDENFLQMARDNAERHGSKY

SEQ ID NO: 45977 - DNA, 50 bp, Arthrobacter alpinus
  source 1..50: mol_type = genomic DNA
cccatctataaagtctcctttgcggacgcgaaggataacttatccatggg

SEQ ID NO: 45978 - DNA, 40 bp, Arthrobacter alpinus
  source 1..40: mol_type = genomic DNA
tctgagcagcccctttgtggatgcggcacttcctgacggg

SEQ ID NO: 45979 - DNA, 50 bp, Arthrobacter alpinus
  source 1..50: mol_type = genomic DNA
cccatctataaagtctcctttgcggtcgcgaaggataacttatccatggg

SEQ ID NO: 45980 - DNA, 40 bp, Arthrobacter alpinus
  source 1..40: mol_type = genomic DNA
cctgagcagcccctgggtggtgacgccatttcccgaggtg

SEQ ID NO: 45981 - protein, 572 aa, Clostridium phoceensis
MASRIAEKLAAKKAAIYIRVSTHWQVDKDSLKVQRRELIAYVTLVLGITDYVVFEDPGYSAKNTDRPEYQAMMDRIRTGEFTHLVVWKIDRISRNLIDFAAMHDELQSLGVTFVSKNEQFDTSSAIGEAMMRIILIFAELERKTTAERVTAVMLSRASDGQWNGGRVPFGYSWSKETKTFSIVPEEAKAIRRMAELYEQYQSLLYVAKYLNDAGIVTKTGGQWTPTTVRTILTNPWYIGQYVYNVHSDGKGIEKRDSDEWITVENHHEPILNEDVFCRMKFLLTRNKRGGVPSHKTYVRKNIHVFAGLLRCGQCGSNMTANLDRRRANGFRPSQYACGSRRRKGTSCTNKYISDTTLGPFVLNYVANIIRASKNSSEATTPEVLERKLLRGEAFEDVASVSTDSLGQLLDAFRSAGDAVEYRPQIAFSGEDNAIREIDTLRARRRKLDNALARLNALYLYDDEAMPEKDFVMQRGQITKQLEEVNARIEELQNQESSEELGDDFIGKASYYIMANKLIEDRYIDYEKYIRAIDPSIPHSFLQQIIDHIVVNDGRVTSITFKNGATHTFTYKT

SEQ ID NO: 45982 - DNA, 50 bp, Clostridium phoceensis
  source 1..50: mol_type = genomic DNA
atcacgtctccaatgaacatcgcatcaccgatgctcacgcgaagcgtgat

SEQ ID NO: 45983 - DNA, 40 bp, Clostridium phoceensis
  source 1..40: mol_type = genomic DNA
gtccgcgatcagcatcgcgtctccgaaggagaaaaaccgg

SEQ ID NO: 45984 - DNA, 50 bp, Clostridium phoceensis
  source 1..50: mol_type = genomic DNA
atcacgtctccaatgaacatcgcaccaccgatgctcacgcgaagcgtgat

SEQ ID NO: 45985 - DNA, 40 bp, Clostridium phoceensis
  source 1..40: mol_type = genomic DNA
gtcctcgatcagcatcactcctgggaaggggaaggcccag

SEQ ID NO: 45986 - protein, 607 aa, Streptococcus pneumoniae; identical to SEQ ID NO: 37106

SEQ ID NO: 45987 - DNA, 50 bp, Streptococcus pneumoniae; identical to SEQ ID NO: 9827
  source 1..50: mol_type = genomic DNA

SEQ ID NO: 45988 - DNA, 40 bp, Streptococcus pneumoniae
  source 1..40: mol_type = genomic DNA
tctattttctcaaacgcatcacgtcgagacggtagcactt

SEQ ID NO: 45989 - DNA, 50 bp, Streptococcus pneumoniae
  source 1..50: mol_type = genomic DNA
tgtattcctatcctattgacaacatctgtggagtgcatagcgttgataca

SEQ ID NO: 45990 - DNA, 40 bp, Streptococcus pneumoniae
  source 1..40: mol_type = genomic DNA
tctattttttcaaaagcattctccccagaggttagcaaat

SEQ ID NO: 45991 - protein, 532 aa, Clostridioides difficile
MKAAIYSRKSRFTGKGDSIENQIQLCMDYAKSIGIKDFFIYEDEGFSGSNIDRPQFKKMMQDAKDKKFNHLICYRLDRISRNVSDFSTLIEKLNKLDISFISIKEQFDTSTPMGRAMMFISSVFAQLERETIAERIKDNMYELARSGRWLGGKTPHGFNSEKITFLDENLKERSMYKLQVNNEQMEVVKLIYNKYLELGSLSKLYKYVYHNGIRGPHGGKFDPSSLSRILRNPAYVKANDEILKYLRNNGMDVVGTPDRRCGILTYAKNTSDSIAAIAKHHGVIEPDIWLEVQIQLDKNRDKTPRIATGKTALLSGLIKCGKCGANMRITYKGKKTDKDLKYYYVCGTKKTLGVDSCNCKNLNGPLVESLVVDKIKNCNVESIISAFNINKIKICNISNDLHSETNLLKSQVSDKEKLINNLIKELAKNTGSIASDYIISQVESLNNEISILKGKINDLKSRDVNISSNHLNLDIIVSNLKRFSDEVDNASLDDKRLLLSTIIDSVIWDSSLGNLNIIYMGAEIDDSVSLKH

SEQ ID NO: 45992 - DNA, 50 bp, Clostridioides difficile
  source 1..50: mol_type = genomic DNA
agttgcactttcttagcgatagtagaagcactatgtataaaagtgcaact

SEQ ID NO: 45993 - DNA, 40 bp, Clostridioides difficile; identical to SEQ ID NO: 26603
  source 1..40: mol_type = genomic DNA

SEQ ID NO: 45994 - DNA, 50 bp, Clostridioides difficile; identical to SEQ ID NO: 45992
  source 1..50: mol_type = genomic DNA

SEQ ID NO: 45995 - DNA, 40 bp, Clostridioides difficile; identical to SEQ ID NO: 14750
  source 1..40: mol_type = genomic DNA

SEQ ID NO: 45996 - protein, 532 aa, Clostridioides difficile; identical to SEQ ID NO: 4206

SEQ ID NO: 45997 - DNA, 50 bp, Clostridioides difficile
  source 1..50: mol_type = genomic DNA
agttgcacttttttaactatagcagaagcaaggtgtataaaagtgcaact

SEQ ID NO: 45998 - DNA, 40 bp, Clostridioides difficile; identical to SEQ ID NO: 26603
  source 1..40: mol_type = genomic DNA

SEQ ID NO: 45999 - DNA, 50 bp, Clostridioides difficile; identical to SEQ ID NO: 45997
  source 1..50: mol_type = genomic DNA

SEQ ID NO: 46000 - DNA, 40 bp, Clostridioides difficile; identical to SEQ ID NO: 14750
  source 1..40: mol_type = genomic DNA

SEQ ID NO: 46001 - protein, 532 aa, Clostridioides difficile; identical to SEQ ID NO: 1046

SEQ ID NO: 46002 - DNA, 50 bp, Clostridioides difficile; identical to SEQ ID NO: 14747
  source 1..50: mol_type = genomic DNA

SEQ ID NO: 46003 - DNA, 40 bp, Clostridioides difficile; identical to SEQ ID NO: 26603
  source 1..40: mol_type = genomic DNA

SEQ ID NO: 46004 - DNA, 50 bp, Clostridioides difficile; identical to SEQ ID NO: 14747
  source 1..50: mol_type = genomic DNA

SEQ ID NO: 46005 - DNA, 40 bp, Clostridioides difficile; identical to SEQ ID NO: 14750
  source 1..40: mol_type = genomic DNA

SEQ ID NO: 46006 - protein, 532 aa, Clostridioides difficile
MKAAIYSRKSRFTGKGDSIENQIQLCIDYAKSIGVKDFLIYEDEGFSGSNIDRPQFKKMMQDAKDKKFSYLVCYRLDRISRNVSDFSTLIEKLNELSISFISIKEQFDTSTPMGRAMMFISSVFAQLERETIAERIKDNMYELARSGRWLGGNTPHGFNSEKITFLDENLKERSMYKLQVNDEQMEIVKLIYNKYLELRSLSKLYKYVYNNGIRGPRGGKFDPSSLSRILRNPAYVKANDEILDYLKNSGMDVVGTPDRKCGILTYAKNTSNSIAAIAKHHGVIEPEIWLEGQNQLDKNRDKTPRISTGKTALLSGLIKCGKCGSNMRITYKGKKTDKDLKYYYICGTKKTLGSDSCNCKNLNGPLVESLVIDKIKNCKEESIISAFNSNNIKTDNVFNIFKSETNLLKNQILDKERLIKNLVIELAKNTGSTASDYIVSQIESLNNEISILKDKINILESSNINISSDSINIDIIVSNLKRFNDEVDNASLDDKRLLLSTIINSIVWDSSLGNLNIVYMGAEVDNSVSLSN

SEQ ID NO: 46007 - DNA, 50 bp, Clostridioides difficile; identical to SEQ ID NO: 14747
  source 1..50: mol_type = genomic DNA

SEQ ID NO: 46008 - DNA, 40 bp, Clostridioides difficile; identical to SEQ ID NO: 26603
  source 1..40: mol_type = genomic DNA

SEQ ID NO: 46009 - DNA, 50 bp, Clostridioides difficile; identical to SEQ ID NO: 14747
  source 1..50: mol_type = genomic DNA

SEQ ID NO: 46010 - DNA, 40 bp, Clostridioides difficile; identical to SEQ ID NO: 14750
  source 1..40: mol_type = genomic DNA

SEQ ID NO: 46011 - protein, 532 aa, Clostridioides difficile
MKAAIYSRKSRFTGKGDSIENQIQLCIDYAKSIGVKDFLIYEDEGFSGSNIDRPQFKKMMQDAKDKKFSYLVCYRLDRISRNVSDFSTLIEKLNELSISFISIKEQFDTSTPMGRAMMFISSVFAQLERETIAERIKDNMYELARSGRWLGGNTPHGFNSEKITFLDENLKERSMYKLQVNDEQMEIVKLIYNKYLELRSLSKLYKYVYNNGIRGPRGGKFDPSSLSRILRNPAYVKANDEILDYLKNSGMDVVGTPDRKCGILTYAKNTSNSIAAIAKHHGVIEPEIWLEGQNQLDKNRDKTPRISTGKTALLSGLIKCGKCGSNMRITYKGKKTDKDLKYYYICGTKKTLGSDSCNCKNLNGPLVESLVIDKIKNCKEESIISAFNSNNIKTDNVFNIFKSETNLLKNQILDKERLIKNLVIELAKNTGSTASDYIVSQIESLNNEISILKDKINTLESSNINISSDSINIDIIVSNLKRFNDEVDNASLDDKRLLLSTIINSIVWDSSLGNLNIVYMGAEVDNSVSLSN

SEQ ID NO: 46012 - DNA, 50 bp, Clostridioides difficile; identical to SEQ ID NO: 14747
  source 1..50: mol_type = genomic DNA

SEQ ID NO: 46013 - DNA, 40 bp, Clostridioides difficile; identical to SEQ ID NO: 26603
  source 1..40: mol_type = genomic DNA

SEQ ID NO: 46014 - DNA, 50 bp, Clostridioides difficile; identical to SEQ ID NO: 14747
  source 1..50: mol_type = genomic DNA

SEQ ID NO: 46015 - DNA, 40 bp, Clostridioides difficile; identical to SEQ ID NO: 14750
  source 1..40: mol_type = genomic DNA

SEQ ID NO: 46016 - protein, 532 aa, Clostridioides difficile
MKAAIYSRKSRFTGKGDSIENQIQLCIDYAKSIGVKDFLIYEDEGFSGSNIDRPQFKKMMQDAKDKKFSYLVCYRLDRISRNVSDFSTLIEKLNELNISFISIKEQFDTSTPMGRAMMFISSVFAQLERETIAERIKDNMYELARSGRWLGGNTPHGFNSEKITFLDENLKERSMYKLQVNDEQMEIVKLIYNKYLELRSLSKLYKYVYNNGIRGPRGGKFDPSSLSRILRNPAYVKANDEILDYLKNSGMDVVGTPDRKCGILTYAKNTSNSIAAIAKHHGVIEPEIWLEGQNQLDKNRDKTPRISTGKTALLSGLIKCGKCGSNMRITYKGKKTDKDLKYYYICGTKKTLGSDSCNCKNLNGPLVESLVIDKIKNCKEESIISAFNSNNIKTDNVFNIFKSETNLLKNQILDKERLIKNLVIELAKNTGSTASDYIVSQIESLNNEISILKDKINILESSNINISSDSINIDIIVSNLKRFNDEVDNASLDDKRLLLSTIINSIVWDSSLGNLNIVYMGAEVDNSVSLSN

SEQ ID NO: 46017 - DNA, 50 bp, Clostridioides difficile; identical to SEQ ID NO: 14747
  source 1..50: mol_type = genomic DNA

SEQ ID NO: 46018 - DNA, 40 bp, Clostridioides difficile; identical to SEQ ID NO: 26603
  source 1..40: mol_type = genomic DNA

SEQ ID NO: 46019 - DNA, 50 bp, Clostridioides difficile; identical to SEQ ID NO: 14747
  source 1..50: mol_type = genomic DNA

SEQ ID NO: 46020 - DNA, 40 bp, Clostridioides difficile; identical to SEQ ID NO: 14750
  source 1..40: mol_type = genomic DNA

SEQ ID NO: 46021 - protein, 532 aa, Clostridioides difficile
MKAAIYSRKSRFTGKGDSIENQIQLCIDYAKSIGVKDFLIYEDEGFSGSNIDRPQFKKMMQDAKDKKFSYLVCYRLDRISRNVSDFSTLIEKLNELNISFISIKEQFDTSTPMGRAMMFISSVFAQLERETIAERIKDNMYELARSGRWLGGNTPHGFNSEKITFLDENLKERSMYKLQVNDEQMEIVKLIYNKYLELRSLSKLYKYVYNNGIRGPRGGKFDPSSLSRILRNPAYVKANDEILDYLKNSGMDVVGTPDRKCGILTYAKNTSNSIAAIAKHHGVIEPEIWLEGQNQLDKNRDKTPRISTGKTALLSGLIKCGKCGSNMRITYKGKKTDKDLKYYYICGTKKTLGSDSCNCKNLNGPLVESLVIDKIKNCKEESIINAFNSNNIKTDNVFNIFKSETNLLKNQILDKERLIKNLVIELAKNTGSTASDYIVSQIESLNNEISILKDKINTLESSNINISSDSINIDIIVSNLKRFNDEVDNASLDDKRLLLSTIINSIVWDSSLGNLNIVYMGVEVDNSVSLSN

SEQ ID NO: 46022 - DNA, 50 bp, Clostridioides difficile; identical to SEQ ID NO: 39597
  source 1..50: mol_type = genomic DNA

SEQ ID NO: 46023 - DNA, 40 bp, Clostridioides difficile; identical to SEQ ID NO: 26603
  source 1..40: mol_type = genomic DNA

SEQ ID NO: 46024 - DNA, 50 bp, Clostridioides difficile; identical to SEQ ID NO: 39597
  source 1..50: mol_type = genomic DNA

SEQ ID NO: 46025 - DNA, 40 bp, Clostridioides difficile; identical to SEQ ID NO: 14750
  source 1..40: mol_type = genomic DNA

SEQ ID NO: 46026 - protein, 532 aa, Clostridioides difficile
MKAAIYSRKSRFTGKGDSIENQIQLCIDYAKSIGVKDFLIYEDEGFSGSNIDRPQFKKMMQDAKDKKFSYLVCYRLDRISRNVSDFSTLIEKLNELNISFISIKEQFDTSTPMGRAMMFISSVFAQLERETIAERIKDNMYELARSGRWLGGNTPHGFNREKITFLDENLKERSMYKLQVNDEQMEIVKLIYNKYLELRSLSKLYKYVYNNGIRGPRGGKFDPSSLSRILRNPAYVKANDEILDYLKNNGMDVVGTPDRKCGILTYAKNTSNSIAAIAKHHGVIEPEIWLEVQNQLDKNRDKTPRISTGKTALLSGLIKCGKCGSNMRITYKGKKTDKDLKYYYICGTKKTLGSDSCNCKNLNGPLVESLVIDKIKNCKEESIISAFNSNNIKTDNVFNIFKSETNLLKNQILDKERLIKNLVIELAKNTGSTASDYIVSQIESLNNEISILKDKINTLESSNINISSDSINIDIIVSNLKRFNDEVDNASLDDKRLLLSTIINSIVWDSSLGNLNIVYMGAEVDNSVSLSN

SEQ ID NO: 46027 - DNA, 50 bp, Clostridioides difficile; identical to SEQ ID NO: 14747
  source 1..50: mol_type = genomic DNA

SEQ ID NO: 46028 - DNA, 40 bp, Clostridioides difficile; identical to SEQ ID NO: 26603
  source 1..40: mol_type = genomic DNA

SEQ ID NO: 46029 - DNA, 50 bp, Clostridioides difficile; identical to SEQ ID NO: 14747
  source 1..50: mol_type = genomic DNA

SEQ ID NO: 46030 - DNA, 40 bp, Clostridioides difficile; identical to SEQ ID NO: 14750
  source 1..40: mol_type = genomic DNA

SEQ ID NO: 46031 - protein, 532 aa, Clostridioides difficile
MKAAIYSRKSRFTGKGDSIENQIQLCIDYAKSIGVKDFLIYEDEGFSGSNIDRPQFKKMMQDAKDKKFSYLVCYRLDRISRNVSDFSTLIEKLNELNISFISIKEQFDTSTPMGRAMMFISSVFAQLERETIAERIKDNMYELARSGRWLGGNTPHGFNSEKITFLDENLKERSMYKLQVNDEQMEIVKLIYNKYLELRSLSKLYKYVYNNGIRGPRGGKFDPSSLSRILRNPAYVKANDEILDYLKNSGMDVVGTPDRKCGILTYAKNTSNSIAAIAKHHGVIEPEIWLEVQNQLDKNRDKTPRISTGKTALLSGLIKCGKCGSNMRITYKGKKTDKDLKYYYICGTKKTLGSDSCNCKNLNGPLVESLVIDKIKNCKEESIISAFNSNNIKTDNVFNIFKSETNLLKNQILDKERLIKNLVIELAKNTGSTASDYIVSQIESLNNEISILKDKINTLESSNINISSDSINIDIIVSNLKRFNDEVDNASLDDKRLLLSTIINSIVWDSSLGNLNIVYMGAEVDNSVSLSN

SEQ ID NO: 46032 - DNA, 50 bp, Clostridioides difficile; identical to SEQ ID NO: 39597
  source 1..50: mol_type = genomic DNA

SEQ ID NO: 46033 - DNA, 40 bp, Clostridioides difficile; identical to SEQ ID NO: 26603
  source 1..40: mol_type = genomic DNA

SEQ ID NO: 46034 - DNA, 50 bp, Clostridioides difficile; identical to SEQ ID NO: 39597
  source 1..50: mol_type = genomic DNA

SEQ ID NO: 46035 - DNA, 40 bp, Clostridioides difficile; identical to SEQ ID NO: 14750
  source 1..40: mol_type = genomic DNA

SEQ ID NO: 46036 - protein, 532 aa, Clostridioides difficile; identical to SEQ ID NO: 1046

SEQ ID NO: 46037 - DNA, 50 bp, Clostridioides difficile; identical to SEQ ID NO: 39597
  source 1..50: mol_type = genomic DNA

SEQ ID NO: 46038 - DNA, 40 bp, Clostridioides difficile; identical to SEQ ID NO: 26603
  source 1..40: mol_type = genomic DNA

SEQ ID NO: 46039 - DNA, 50 bp, Clostridioides difficile; identical to SEQ ID NO: 39597
  source 1..50: mol_type = genomic DNA

SEQ ID NO: 46040 - DNA, 40 bp, Clostridioides difficile; identical to SEQ ID NO: 14750
  source 1..40: mol_type = genomic DNA

SEQ ID NO: 46041 - protein, 532 aa, Clostridioides difficile
MKAAIYSRKSRFTGKGDSIENQIQLCIDYAKSIGVKDFLIYEDEGFSGSNIDRPQFKKMMQDAKDKKFSYLVCYRLDRISRNVSDFSTLIEKLNELSISFISIKEQFDTSTPMGRAMMFISSVFAQLERETIAERIKDNMYELARSGRWLGGNTPHGFNSEKITFLDENLKERSMYKLQVNDEQMEIVKLIYNKYLELRSLSKLYKYVYNNGIRGPRGGKFDPSSLSRILRNPAYVKANDEILDYLKNSGMDVVGTPDRKCGILTYAKNTSNSIAAIAKHHGVIEPEIWLEVQNQLDKNRDKTPRISTGKTALLSGLIKCGKCGSNMRITYKGKKTDKDLKYYYICGTKKTLGSDSCNCKNLNGPLVESLVIDKIKNCKEESIISAFNNNNIKTDNVFNIFKSETNLLKNQILDKEKLIKNLVIELAKNTGSTASDYIVSQIESLNNEISILKDKINTLESSNINISSDSINIDIIVSNLKRFNDEVDNASLDDKRLLLSTIINSIVWDSSLGNLNIVYMGAEVDNSVSLSN

SEQ ID NO: 46042 - DNA, 50 bp, Clostridioides difficile; identical to SEQ ID NO: 39597
  source 1..50: mol_type = genomic DNA

SEQ ID NO: 46043 - DNA, 40 bp, Clostridioides difficile; identical to SEQ ID NO: 26603
  source 1..40: mol_type = genomic DNA

SEQ ID NO: 46044 - DNA, 50 bp, Clostridioides difficile; identical to SEQ ID NO: 39597
  source 1..50: mol_type = genomic DNA

SEQ ID NO: 46045 - DNA, 40 bp, Clostridioides difficile; identical to SEQ ID NO: 14750
  source 1..40: mol_type = genomic DNA

SEQ ID NO: 46046 - protein, 532 aa, Clostridioides difficile
MKAAIYSRKSRFTGKGDSIENQIQLCIDYAKSIGVKDFLIYEDEGFSGSNIDRPQFKKMMQDAKDKKFSYLVCYRLDRISRNVSDFSTLIEKLNELNISFISIKEQFDTSTPMGRAMMFISSVFAQLERETIAERIKDNMYELARSGRWLGGNTPHGFNSEKITFLDENLKERSMYKLQVNDEQMEIVKLIYNKYLELRSLSKLYKYVYNNGIRGPRGGKFDPSSLSRILRNPAYVKANDEILDYLKNSGMDVVGTPDRKCGILTYAKNTSNSIAAIAKHHGVIEPEIWLEVQNQLDKNRDKTPRISTGKTALLSGLIKCGKCGSNMRITYKGKKTDKDLKYYYICGTKKTLGSDSCNCKNLNGPLVESLVIDKIKNCKEESIINAFNSNNIKTDNVFNIFKSETNLLKNQILDKERLIKNLVIELAKNTGSTASDYIVSQIESLNNEISILKDKINTLESSNINISSDSINIDIIVSNLKRFNDEVDNASLDDKRLLLSTIINSIVWDSSLGNLNIVYMGVEVDNSVSLSN

SEQ ID NO: 46047 - DNA, 50 bp, Clostridioides difficile; identical to SEQ ID NO: 14747
  source 1..50: mol_type = genomic DNA

SEQ ID NO: 46048 - DNA, 40 bp, Clostridioides difficile; identical to SEQ ID NO: 26603
  source 1..40: mol_type = genomic DNA

SEQ ID NO: 46049 - DNA, 50 bp, Clostridioides difficile; identical to SEQ ID NO: 14747
  source 1..50: mol_type = genomic DNA

SEQ ID NO: 46050 - DNA, 40 bp, Clostridioides difficile; identical to SEQ ID NO: 14750
  source 1..40: mol_type = genomic DNA

SEQ ID NO: 46051 - protein, 532 aa, Clostridioides difficile
MKAAIYSRKSRFTGKGDSIENQIQLCIDYAKSIGVKDFLIYEDEGFSGSNIDRPQFKKMMQDAKDKKFSYLVCYRLDRISRNVSDFSTLIEKLNELNISFISIKEQFDTSTPMGRAMMFISSVFAQLERETIAERIKDNMYELARSGRWLGGNTPHGFNSEKITFLDENLKERSMYKLQVNDEQMEIVKLIYNKYLELRSLSKLYKYVYNNGIRGPRGGKFDPSSLSRILRNPAYVKANDEILDYLKNSGMDVVGTPDRKCGILTYAKNTSNSIAAIAKHHGVIEPEIWLEVQNQLDKNRDKTPRISTGKTALLSGLIKCGKCGSNMRITYKGKKTDKDLKYYYICGTKKTLGSDSCNCKNLNGPLVESLVIDKIKNCKEESIISAFNSNNIKTDNVFNIFKSETNLLKNQILDKERLIKNLVIELAKNTGSTASDYIVSQIESLNNEISILKDKINTLESGNINISSDSINIDIIVSNLKRFNDEVDNASLDDKRLLLSTIINSIVWDSSLGNLNIVYMGAEVDNSVSLSN

SEQ ID NO: 46052 - DNA, 50 bp, Clostridioides difficile; identical to SEQ ID NO: 39597
  source 1..50: mol_type = genomic DNA

SEQ ID NO: 46053 - DNA, 40 bp, Clostridioides difficile; identical to SEQ ID NO: 26603
  source 1..40: mol_type = genomic DNA

SEQ ID NO: 46054 - DNA, 50 bp, Clostridioides difficile; identical to SEQ ID NO: 39597
  source 1..50: mol_type = genomic DNA

SEQ ID NO: 46055 - DNA, 40 bp, Clostridioides difficile; identical to SEQ ID NO: 14750
  source 1..40: mol_type = genomic DNA

SEQ ID NO: 46056 - protein, 494 aa, Clostridioides difficile
MIYEDEGFSGSNIDRPQFKKMMQDAKDKKFSYLVCYRLDRISRNVSDFSTLIEKLNELSISFISIKEQFDTSTPMGRAMMFISSVFAQLERETIAERIKDNMYELARSGRWLGGNTPHGFNSEKITFLDENLKERSMYKLQVNDEQMEIVKLIYNKYLELRSLSKLYKYVYNNGIRGPRGGKFDPSSLSRILRNPAYVKANDEILDYLKNSGMDVVGTPDRKCGILTYAKNTSNSIAAIAKHHGVIEPEIWLEVQNQLDKNRDKTPRISTGKTALLSGLIKCGKCGSNMRITYKGKKTDKDLKYYYICGTKKTLGSDSCNCKNLNGPLVESLVIDKIKNCKEESIISAFNNNNIKTDNVFNIFKSETNLLKNQILDKEKLIKNLVIELAKNTGSTASDYIVSQIESLNNEISILKDKINTLESSNINISSDSINIDIIVSNLKRFNDEVDNASLDDKRLLLSTIINSIVWDSSLGNLNIVYMGAEVDNSVSLSN

SEQ ID NO: 46057 - DNA, 50 bp, Clostridioides difficile; identical to SEQ ID NO: 39597
  source 1..50: mol_type = genomic DNA

SEQ ID NO: 46058 - DNA, 40 bp, Clostridioides difficile; identical to SEQ ID NO: 26603
  source 1..40: mol_type = genomic DNA

SEQ ID NO: 46059 - DNA, 50 bp, Clostridioides difficile; identical to SEQ ID NO: 39597
  source 1..50: mol_type = genomic DNA

SEQ ID NO: 46060 - DNA, 40 bp, Clostridioides difficile; identical to SEQ ID NO: 14750
  source 1..40: mol_type = genomic DNA

SEQ ID NO: 46061 - protein, 532 aa, Clostridioides difficile
MKAAIYSRKSRFTGKGDSIENQIQLCIDYAKSIGVKDFLIYEDEGFSGSNIDRPQFKKMMQDAKDKKFSYLVCYRLDRISRNVSDFSTLIEKLNELNISFISIKEQFDTSTPMGRAMMFISSVFAQLERETIAERIKDNMYELARSGRWLGGNTPHGFNSEKITFLDENLKERSMYKLQVNDEQMEIVKLIYNKYLELRSLSKLYKYVYNNGIRGPRGGKFDPSSLSRILRNPAYVKANDEILDYLKNSGMDVVGTPDRKCGILTYAKNTSNSIAAIAKHHGVIEPEIWLEVQNQLDKNRDKTPRISTGKTALLSGLIKCGKCGSNMRITYKGKKTDKDLKYYYICGTKKTLGSDSCNCKNLNGPLVESLVIDKIKNCKEESIISAFNSNNIKTDNVFNIFKSETNLLKNQILDKERLIKNLVIELAKNTGSTASDYIVSQIESLNNEISILKDKINILESSNINISSDSINIDIIVSNLKRFNDEVDNASLDDKRLLLSTIINSIIWDSSLGNLNIVYMGAEVDNSVSLSN

SEQ ID NO: 46062 - DNA, 50 bp, Clostridioides difficile; identical to SEQ ID NO: 14747
  source 1..50: mol_type = genomic DNA

SEQ ID NO: 46063 - DNA, 40 bp, Clostridioides difficile; identical to SEQ ID NO: 26603
  source 1..40: mol_type = genomic DNA

SEQ ID NO: 46064 - DNA, 50 bp, Clostridioides difficile; identical to SEQ ID NO: 14747
  source 1..50: mol_type = genomic DNA

SEQ ID NO: 46065 - DNA, 40 bp, Clostridioides difficile; identical to SEQ ID NO: 14750
  source 1..40: mol_type = genomic DNA

SEQ ID NO: 46066 - protein, 532 aa, Clostridioides difficile; identical to SEQ ID NO: 46031

SEQ ID NO: 46067 - DNA, 50 bp, Clostridioides difficile; identical to SEQ ID NO: 14747
  source 1..50: mol_type = genomic DNA

SEQ ID NO: 46068 - DNA, 40 bp, Clostridioides difficile; identical to SEQ ID NO: 26603
  source 1..40: mol_type = genomic DNA

SEQ ID NO: 46069 - DNA, 50 bp, Clostridioides difficile; identical to SEQ ID NO: 14747
  source 1..50: mol_type = genomic DNA

SEQ ID NO: 46070 - DNA, 40 bp, Clostridioides difficile; identical to SEQ ID NO: 14750
  source 1..40: mol_type = genomic DNA

SEQ ID NO: 46071 - protein, 532 aa, Clostridioides difficile
MKAAIYSRKSRFTGKGDSIENQIQVCIDYAKSIGVKDFLIYEDEGFSGSNIDRPQFKKMMQDAKDKKFSYLVCYRLDRISRNVSDFSTLIEKLNELNISFISIKEQFDTSTPMGRAMMFISSVFAQLERETIAERIKDNMYELARSGRWLGGNTPHGFNSEKITFLDENLKERSMYKLQVNDEQMEIVKLIYNKYLELRSLSKLYKYVYNNGIRGPRGGKFDPSSLSRILRNPAYVKANDEILDYLKNSGMDVVGTPDRKCGILTYAKNTSNSIAAIAKHHGVIEPEIWLEVQNQLDKNRDKTPRISTGKTALLSGLIKCGKCGSNMRITYKGKKTDKDLKYYYICGTKKTLGSDSCNCKNLNGPLVESLVIDKIKNCKEESIISAFNSNNIKTDNVFNIFKSETNLLKNQILDKERLIKNLVIELAKNTGSTASDYIVSQIESLNNEISILKDKINTLESGNINISSDSINIDIIVSNLKRFNDEVDNASLDDKRLLLSTIINSIVWDSSLGNLNIVYMGAEVDNSVSLSN

SEQ ID NO: 46072 - DNA, 50 bp, Clostridioides difficile; identical to SEQ ID NO: 39597
  source 1..50: mol_type = genomic DNA

SEQ ID NO: 46073 - DNA, 40 bp, Clostridioides difficile; identical to SEQ ID NO: 26603
  source 1..40: mol_type = genomic DNA

SEQ ID NO: 46074 - DNA, 50 bp, Clostridioides difficile; identical to SEQ ID NO: 39597
  source 1..50: mol_type = genomic DNA

SEQ ID NO: 46075 - DNA, 40 bp, Clostridioides difficile; identical to SEQ ID NO: 14750
  source 1..40: mol_type = genomic DNA

SEQ ID NO: 46076 - protein, 532 aa, Clostridioides difficile; identical to SEQ ID NO: 14746

SEQ ID NO: 46077 - DNA, 50 bp, Clostridioides difficile; identical to SEQ ID NO: 14747
  source 1..50: mol_type = genomic DNA

SEQ ID NO: 46078 - DNA, 40 bp, Clostridioides difficile; identical to SEQ ID NO: 26603
  source 1..40: mol_type = genomic DNA

SEQ ID NO: 46079 - DNA, 50 bp, Clostridioides difficile; identical to SEQ ID NO: 14747
  source 1..50: mol_type = genomic DNA

SEQ ID NO: 46080 - DNA, 40 bp, Clostridioides difficile; identical to SEQ ID NO: 14750
  source 1..40: mol_type = genomic DNA

SEQ ID NO: 46081 - protein, 532 aa, Clostridioides difficile
MKAAIYSRKSRFTGKGDSIENQIQLCIDYAKSIGVKDFLIYEDEGFSGSNIDRPQFKKMMQDAKDKKFSYLVCYRLDRISRNVSDFSTLIEKLNELSISFISIKEQFDTSTPMGRAMMFISSVFAQLERETIAERIKDNMYELARSGRWLGGNTPHGFNSEKITFLDENLKERSMYKLQVNDEQMEIVKLIYNKYLELRSLSKLYKYVYNNGIRGPRGGKFDPSSLSRILRNPAYVKANDEILDYLKNSGMDVVGTPDRKCGILTYAKNTSNSIAAIAKHHGVIEPEIWLEVQNQLDKNRDKTPRISTGKTALLSGLIKCGKCGSNMRITYKGKKTDKDLKYYYICGTKKTLGSDSCNCKNLNGPLVESLVIDKIKNCKEESIISAFNSNNIKTDNVFNIFKSETNLLKNQILDKERLIKNLVIELAKNTGSTASDYIVSQIESLNNEISILKDKINTLESSNINISSDSINIDIIVSNLKRFNDEVDNASLDNKRLLLSTIINSIVWDSSLGNLNIVYMGAEVDNSVSLSN

SEQ ID NO: 46082 - DNA, 50 bp, Clostridioides difficile; identical to SEQ ID NO: 14747
  source 1..50: mol_type = genomic DNA

SEQ ID NO: 46083 - DNA, 40 bp, Clostridioides difficile; identical to SEQ ID NO: 26603
  source 1..40: mol_type = genomic DNA

SEQ ID NO: 46084 - DNA, 50 bp, Clostridioides difficile; identical to SEQ ID NO: 14747
  source 1..50: mol_type = genomic DNA

SEQ ID NO: 46085 - DNA, 40 bp, Clostridioides difficile; identical to SEQ ID NO: 14750
  source 1..40: mol_type = genomic DNA

SEQ ID NO: 46086 - protein, 532 aa, Clostridioides difficile
MKAAIYSRKSRFTGKGDSIENQIQLCIDYAKSIGVKDFLIYEDEGFSGSNIDRPQFKKMMQDAKDKKFSYLVCYRLDRISRNVSDFSTLIEKLNELNISFISIKEQFDTSTPMGRAMMFISSVFAQLERETIAERIKDNMYELARSGRWLGGNTPHGFNSEKITFLDENLKERSMYKLQVNDEQMEIVKLIYNKYLELRSLSKLYKYVYNNGIRGPRGGKFDPSSLSRILRNPAYVKANDEILDYLKNNGMDVVGTPDRKCGILTYAKNTSNSIAAIAKHHGVIEPEIWLEVQNQLDKNRDKTPRISTGKTALLSGLIKCGKCGSNMRITYKGKKTDKDLKYYYICGTKKTLGSDSCNCKNLNGPLVESLVIDKIKNCKEESIISAFNSNNIKTDNVFNIFKSETNLLKNQILDKERLIKNLVIELAKNTGSTASDYIVSQIESLNNEISILKDKINTLESSNINISSDSINIDIIVSNLKRFNDEVDNASLDDKRLLLSTIINSIVWDSSLGNLNIVYMGAEVDNSVSLSN

SEQ ID NO: 46087 - DNA, 50 bp, Clostridioides difficile; identical to SEQ ID NO: 39597
  source 1..50: mol_type = genomic DNA

SEQ ID NO: 46088 - DNA, 40 bp, Clostridioides difficile; identical to SEQ ID NO: 26603
  source 1..40: mol_type = genomic DNA

SEQ ID NO: 46089 - DNA, 50 bp, Clostridioides difficile; identical to SEQ ID NO: 39597
  source 1..50: mol_type = genomic DNA

SEQ ID NO: 46090 - DNA, 40 bp, Clostridioides difficile; identical to SEQ ID NO: 14750
  source 1..40: mol_type = genomic DNA

SEQ ID NO: 46091 - protein, 532 aa, Clostridioides difficile
MKAAIYSRKSRFTGKGDSIENQIQLCIDYAKSIGVKDFLIYEDEGFSGSNIDRPQFKKMMQDAKDKKFSYLVCYRLDRISRNVSDFSTLIEKLNELNISFISIKEQFDTSTPMGRAMMFISSVFAQLERETIAERIKDNMYELARSGRWLGGNTPHGFNSEKITFLDENLKERSMYKLQVNDEQMEIVKLIYNKYLELRSLSKLYKYVYNNGIRGPRGGKFDPSSLSRILRNPAYVKANDEILDYLKNSGMDVVGTPDRKCGILTYAKNTANSIAAIAKHHGVIEPEIWLEVQNQLDKNRDKTPRISTGKTALLSGLIKCGKCGSNMRITYKGKKTDKDLKYYYICGTKKTLGSDSCNCKNLNGPLVESLVIDKIKNCKEESIISAFNSNNIKTDNVFNIFKSETNLLKNQILDKERLIKNLVIELAKNTGSTASDYIVSQIESLNNEISILKDKINILESSNINISSDSINIDIIVSNLKRFNDEVDNASLDDKRLLLSTIINSIVWDSSLGNLNIVYMGAEVDNSVSLSN

SEQ ID NO: 46092 - DNA, 50 bp, Clostridioides difficile; identical to SEQ ID NO: 14747
  source 1..50: mol_type = genomic DNA

SEQ ID NO: 46093 - DNA, 40 bp, Clostridioides difficile; identical to SEQ ID NO: 26603
  source 1..40: mol_type = genomic DNA

SEQ ID NO: 46094 - DNA, 50 bp, Clostridioides difficile; identical to SEQ ID NO: 14747
  source 1..50: mol_type = genomic DNA

SEQ ID NO: 46095 - DNA, 40 bp, Clostridioides difficile; identical to SEQ ID NO: 14750
  source 1..40: mol_type = genomic DNA

SEQ ID NO: 46096 - protein, 532 aa, Clostridioides difficile
MKAAIYSRKSRFTGKGDSIENQIQLCIDYAKSIGVKDFLIYEDEGFSGSNIDRPQFKKMMQDAKDKKFSYLVCYRLDRISRNVSDFSTLIEKLNELNISFISIKEQFDTSTPMGRAMMFISSVFAQLERETIAERIKDNMYELARSGRWLGGNTPHGFNSEKITFLDENLKERSMYKLQVNDEQMEIVKLIYNKYLELRSLSKLYKYVYNNGIRGPRGGKFDPSSLSRILRNPAYVKANDEILDYLKNSGMDVVGTPDRKCGILTYAKNTSNSIAAIAKHHGVIEPEIWLEVQNQLDKNRDKTPRISTGKTALLSGLIKCGKCGSNMRITYKGKKTDKDLKYYYICGTKKTLGSDSCNCKNLNGPLVESLVIDKIKNCKEESIISAFNSNNIKTDNVFNIFKSETNLLKNQILDKEKLIKNLVIELAKNTGSTASDYIVSQIESLNNEISILKDKINTLESSNINISSDSINIDIIVSNLKRFNDEVDNASLDDKRLLLSTIINSIVWDSSLGNLNIVYMGAEVDNSVSLSN

SEQ ID NO: 46097 - DNA, 50 bp, Clostridioides difficile
  source 1..50: mol_type = genomic DNA
agttgcacttttttagctatagcagaagcaaggtatataaaagtgcaact

SEQ ID NO: 46098 - DNA, 40 bp, Clostridioides difficile; identical to SEQ ID NO: 26603
  source 1..40: mol_type = genomic DNA

SEQ ID NO: 46099 - DNA, 50 bp, Clostridioides difficile; identical to SEQ ID NO: 46097
  source 1..50: mol_type = genomic DNA

SEQ ID NO: 46100 - DNA, 40 bp, Clostridioides difficile; identical to SEQ ID NO: 14750
  source 1..40: mol_type = genomic DNA

SEQ ID NO: 46101 - protein, 532 aa, Clostridioides difficile; identical to SEQ ID NO: 46086

SEQ ID NO: 46102 - DNA, 50 bp, Clostridioides difficile; identical to SEQ ID NO: 14747
  source 1..50: mol_type = genomic DNA

SEQ ID NO: 46103 - DNA, 40 bp, Clostridioides difficile; identical to SEQ ID NO: 26603
  source 1..40: mol_type = genomic DNA

SEQ ID NO: 46104 - DNA, 50 bp, Clostridioides difficile; identical to SEQ ID NO: 14747
  source 1..50: mol_type = genomic DNA

SEQ ID NO: 46105 - DNA, 40 bp, Clostridioides difficile; identical to SEQ ID NO: 14750
  source 1..40: mol_type = genomic DNA

SEQ ID NO: 46106 - protein, 532 aa, Clostridioides difficile
MKAAIYSRKSRFTGKGDSIENQIQLCIDYAKSIGVKDFLIYEDEGFSGSNIDRPQFKKMMQDAKDKKFSYLVCYRLDRISRNVSDFSTLIEKLNELSISFISIKEQFDTSTPMGRAMMFISSVFAQLERETIAERIKDNMYELARSGRWLGGNTPHGFNSEKITFLDENLKERSMYKLQVNDEQMEIVKLIYNKYLELRSLSKLYKYVYNNGIRGPRGGKFDPSSLSRILRNPAYVKANDEILDYLKNSGMDVVGTPDRKCGILTYAKNTSNSIAAIAKHHGVIEPEIWLEVQNQLDKNRDKTPRISTGKTALLSGLIKCGKCGSNMRITYKGKKTDKDLKYYYICGTKKTLGSDSCNCKNLNGPLVESLVIDKIKNCKEESIISAFNSNNIKTDNVFNIFKSETNLLKNQILDKERLIKNLVIELAKNTGSTASDYIVSQIESLNNEISILKDKINTLESSNINISSDSINIDIIVSNLKRFNDEVDNASLDDKRLLLSTIINSIVWDSSLGNLNIVYMGAEVDNSVSLSN

SEQ ID NO: 46107 - DNA, 50 bp, Clostridioides difficile; identical to SEQ ID NO: 14747
  source 1..50: mol_type = genomic DNA

SEQ ID NO: 46108 - DNA, 40 bp, Clostridioides difficile; identical to SEQ ID NO: 26603
  source 1..40: mol_type = genomic DNA

SEQ ID NO: 46109 - DNA, 50 bp, Clostridioides difficile; identical to SEQ ID NO: 14747
  source 1..50: mol_type = genomic DNA

SEQ ID NO: 46110 - DNA, 40 bp, Clostridioides difficile; identical to SEQ ID NO: 14750
  source 1..40: mol_type = genomic DNA

SEQ ID NO: 46111 - protein, 532 aa, Clostridioides difficile
MKAAIYSRKSRFTGKGDSIENQIQLCIDYAKSIGVKDFLIYEDEGFSGSNIDRPQFKKMMQDAKDKKFSYLVCYRLDRISRNVSDFSTLIEKLNELNISFISIKEQFDTSTPMGRAMMFISSVFAQLERETIAERIKDNMYELARSGRWLGGNTPHGFNSEKITFLDENLKERSMYKLQVNDEQMEIVKLIYNKYLELRSLSKLYKYVYNNGIRGPRGGKFDPSSLSRILRNPAYVKANDEILDYLKNSGMDVVGTPDRKCGILTYAKNTSNSIAAIAKHHGVIEPEIWLEVQNQLDKNRDKTPRISTGKTALLSGLIKCGKCGSNMRITYKGKKTDKDLKYYYICGTKKTLGSDSCNCKNLNGPLVESLVIDKIKNCKEESIISAFNSNNIKADNVFNAFKSETNLLKNQILDKERLIKNLVIELAKNTGSTASDYIVSQIESLNNEISILKDKINTLESSNINISSDSINIDIIVSNLKRFNDEVDNASLDNKRLLLSTIINSIVWDSSLGNLNIVYMGAEVDNSVSLSN

SEQ ID NO: 46112 - DNA, 50 bp, Clostridioides difficile; identical to SEQ ID NO: 14747
  source 1..50: mol_type = genomic DNA

SEQ ID NO: 46113 - DNA, 40 bp, Clostridioides difficile; identical to SEQ ID NO: 26603
  source 1..40: mol_type = genomic DNA

SEQ ID NO: 46114 - DNA, 50 bp, Clostridioides difficile; identical to SEQ ID NO: 14747
  source 1..50: mol_type = genomic DNA

SEQ ID NO: 46115 - DNA, 40 bp, Clostridioides difficile; identical to SEQ ID NO: 14750
  source 1..40: mol_type = genomic DNA

SEQ ID NO: 46116 - protein, 532 aa, Clostridioides difficile
MKAAIYSRKSRFTGKGDSIENQIQLCIDYAKSIGVKDFLIYEDEGFSGSNIDRPQFKKMMQDAKDKKFSYLVCYRLDRISRNVSDFSTLIEKLNELNISFISIKEQFDTSTPMGRAMMFISSVFAQLERETIAERIKDNMYELARSGRWLGGNTPHGFNSEKITFLDENLKERSMYKLQVNDEQMEIVKLIYNKYLELRSLSKLYKYVYNNGIRGPRGGKFDPSSLSRILRNPAYVKANDEILDYLKNSGMDVVGTPDRKCGILTYAKNTSNSIAAIAKHHGVIEPEIWLEVQNQLDKNRDKTPRISTGKTALLSGLIKCGKCGSNMRITYKGKKTDKDLKYYYICGTKKTLGSDSCNCKNLNGPLVESLVIDKIKNCKEESIISAFNSNNIKTDNVFNIFKSETNLLKNQILDKEKLIKNLVIELAKNTGSTASDYIVSQIESLNNEISILKDKINTLESSNINISSDSINIDIIVSNLKRFNDEVDNASLDDKRLLLSTIINSIIWDSSLGNLNIVYMGAEVDNSVSLNN

SEQ ID NO: 46117 - DNA, 50 bp, Clostridioides difficile; identical to SEQ ID NO: 46097
  source 1..50: mol_type = genomic DNA

SEQ ID NO: 46118 - DNA, 40 bp, Clostridioides difficile; identical to SEQ ID NO: 26603
  source 1..40: mol_type = genomic DNA

SEQ ID NO: 46119 - DNA, 50 bp, Clostridioides difficile; identical to SEQ ID NO: 46097
  source 1..50: mol_type = genomic DNA

SEQ ID NO: 46120 - DNA, 40 bp, Clostridioides difficile; identical to SEQ ID NO: 14750
  source 1..40: mol_type = genomic DNA

SEQ ID NO: 46121 - protein, 532 aa, Clostridioides difficile; identical to SEQ ID NO: 46106

SEQ ID NO: 46122 - DNA, 50 bp, Clostridioides difficile; identical to SEQ ID NO: 46097
  source 1..50: mol_type = genomic DNA

SEQ ID NO: 46123 - DNA, 40 bp, Clostridioides difficile; identical to SEQ ID NO: 26603
  source 1..40: mol_type = genomic DNA

SEQ ID NO: 46124 - DNA, 50 bp, Clostridioides difficile; identical to SEQ ID NO: 46097
  source 1..50: mol_type = genomic DNA

SEQ ID NO: 46125 - DNA, 40 bp, Clostridioides difficile; identical to SEQ ID NO: 14750
  source 1..40: mol_type = genomic DNA

SEQ ID NO: 46126 - protein, 532 aa, Clostridioides difficile
MKAAIYSRKSRFTGKGDSIENQIQLCIDYAKSIGVKDFLIYEDEGFSGSNIDRPQFKKMMQDAKDKKFSYLVCYRLDRISRNVSDFSTLIEKLNELNISFISIKEQFDTSTPMGRAMMFISSVFAQLERETIAERIKDNMYELARSGRWLGGNTPHGFNSEKITFLDENLKERSMYKLQVNDEQMEIVKLIYNKYLELRSLSKLYKYVYNNGIRGPRGGKFDPSSLSRILRNPAYVKANDEILDYLKSSGMDVVGTPDRNCGILTYAKNTSNSIAAIAKHHGVIEPEIWLEVQNQLDKNRDKTPRISTGKTALLSGLIKCGKCGSNMRITYKGKKTDKDLKYYYICGTKKILGSDSCNCKNLNGPLVESLVIDKIKNCKEESIISAFNSNNIKTDNVFNIFKSETNLLKNQILDKERLIKNLVIKLAKNTGSTASDYIVSQIESLNNEISILKDKINTLESSNINISSDSINIDIIVSNLKRFNDEVDNASLDDKRLLLSTIINSIVWDSSLGNLNIVYMGAEVDNSVSLNN

SEQ ID NO: 46127 - DNA, 50 bp, Clostridioides difficile; identical to SEQ ID NO: 14747
  source 1..50: mol_type = genomic DNA

SEQ ID NO: 46128 - DNA, 40 bp, Clostridioides difficile; identical to SEQ ID NO: 26603
  source 1..40: mol_type = genomic DNA

SEQ ID NO: 46129 - DNA, 50 bp, Clostridioides difficile; identical to SEQ ID NO: 14747
  source 1..50: mol_type = genomic DNA

SEQ ID NO: 46130 - DNA, 40 bp, Clostridioides difficile; identical to SEQ ID NO: 14750
  source 1..40: mol_type = genomic DNA

SEQ ID NO: 46131 - protein, 532 aa, Clostridioides difficile; identical to SEQ ID NO: 46096

SEQ ID NO: 46132 - DNA, 50 bp, Clostridioides difficile; identical to SEQ ID NO: 14747
  source 1..50: mol_type = genomic DNA

SEQ ID NO: 46133 - DNA, 40 bp, Clostridioides difficile; identical to SEQ ID NO: 26603
  source 1..40: mol_type = genomic DNA

SEQ ID NO: 46134 - DNA, 50 bp, Clostridioides difficile; identical to SEQ ID NO: 14747
  source 1..50: mol_type = genomic DNA

SEQ ID NO: 46135 - DNA, 40 bp, Clostridioides difficile; identical to SEQ ID NO: 14750
  source 1..40: mol_type = genomic DNA

SEQ ID NO: 46136 - protein, 532 aa, Clostridioides difficile; identical to SEQ ID NO: 4206

SEQ ID NO: 46137 - DNA, 50 bp, Clostridioides difficile; identical to SEQ ID NO: 14747
  source 1..50: mol_type = genomic DNA

SEQ ID NO: 46138 - DNA, 40 bp, Clostridioides difficile; identical to SEQ ID NO: 26603
  source 1..40: mol_type = genomic DNA

SEQ ID NO: 46139 - DNA, 50 bp, Clostridioides difficile; identical to SEQ ID NO: 14747
  source 1..50: mol_type = genomic DNA

SEQ ID NO: 46140 - DNA, 40 bp, Clostridioides difficile; identical to SEQ ID NO: 14750
  source 1..40: mol_type = genomic DNA

SEQ ID NO: 46141 - protein, 532 aa, Clostridioides difficile
MKAAIYSRKSRFTGKGDSIENQIQLCIDYAKSIGVKDFLIYEDEGFSGSNIDRPQFKKMMQDAKDKKFSYLVCYRLDRISRNVSDFSTLIEKLNELNISFISIKEQFDTSTPMGRAMMFISSVFAQLERETIAERIKDNMYELARSGRWLGGNTPHGFNSEKITFLDENLKERSMYKLQVNDEQMEIVKLIYNKYLELRSLSKLYKYVYNNGIRGPRGGKFDPSSLSRILRNPAYVKANDEILDYLKNSGMDVVGTPDRKCGILTYAKNTSNSIAAIAKHHGVIEPEIWLEVQNQLDKNRDKTPRISTGKTALLSGLIKCGKCGSNMRITYKGKKTDKDLKYYYICGTKKTLGSDSCNCKNLNGPLVESLVIDKIKNCKEESIISAFNSNNIKTDNVFNIFKSETNLLKNQILDKERLIKNLVIELAKNTDSTASDYIVSQIESLNNEISILKDKINTLESGNINISSDSINIDIIVSNLKRFNDEVDNASLDDKRLLLSTIINSIVWDSSLGNLNIVYMGAEVDNSVSLSN

SEQ ID NO: 46142 - DNA, 50 bp, Clostridioides difficile; identical to SEQ ID NO: 14747
  source 1..50: mol_type = genomic DNA

SEQ ID NO: 46143 - DNA, 40 bp, Clostridioides difficile; identical to SEQ ID NO: 26603
  source 1..40: mol_type = genomic DNA

SEQ ID NO: 46144 - DNA, 50 bp, Clostridioides difficile; identical to SEQ ID NO: 14747
  source 1..50: mol_type = genomic DNA

SEQ ID NO: 46145 - DNA, 40 bp, Clostridioides difficile; identical to SEQ ID NO: 14750
  source 1..40: mol_type = genomic DNA

SEQ ID NO: 46146 - protein, 532 aa, Clostridioides difficile; identical to SEQ ID NO: 46031

SEQ ID NO: 46147 - DNA, 50 bp, Clostridioides difficile; identical to SEQ ID NO: 46097
  source 1..50: mol_type = genomic DNA

SEQ ID NO: 46148 - DNA, 40 bp, Clostridioides difficile; identical to SEQ ID NO: 26603
  source 1..40: mol_type = genomic DNA

SEQ ID NO: 46149 - DNA, 50 bp, Clostridioides difficile; identical to SEQ ID NO: 46097
  source 1..50: mol_type = genomic DNA

SEQ ID NO: 46150 - DNA, 40 bp, Clostridioides difficile; identical to SEQ ID NO: 14750
  source 1..40: mol_type = genomic DNA

SEQ ID NO: 46151 - protein, 532 aa, Clostridioides difficile
MKAAIYSRKSRFTGKGDSIENQIQLCIDYAKSIGVKDFLIYEDEGFSGSNIDRPQFKKMMQDAKDKKFSYLVCYRLDRISRNVSDFSTLIEKLNELSISFISIKEQFDTSTPMGRAMMFISSVFAQLERETIAERIKDNMYELARSGRWLGGNTPHGFNSEKITFLDENLKERSMYKLQVNDEQMEIVKLIYNKYLELRSLSKLYKYVYNNGIRGPRGGKFDPSSLSRILRNPAYVKANDEILDYLKNSGMDVVGTPDRKCGILTYAKNTSNSIAAIAKHHGVIEPEIWLEVQNQLDKNRDKTPRISTGKTALLSGLIKCGKCGSNMRITYKGKKTDKDLKYYYICGTKKTLGSDSCNCKNLNGPLVESLVIDKIKNCKEESIISAFNSNNIKTDNVFNIFKSETNLLKNQILDKEKLIKNLVIELAKNTGSTASDYIVSQIESLNNEISILKDKINTLESSNINISSDSINIDIIVSNLKRFNDEVDNASLDDKRLLLSTIINSIVWDSSLGNLNIVYMGAEVDNSVSLSN

SEQ ID NO: 46152 - DNA, 50 bp, Clostridioides difficile; identical to SEQ ID NO: 39597
  source 1..50: mol_type = genomic DNA

SEQ ID NO: 46153 - DNA, 40 bp, Clostridioides difficile; identical to SEQ ID NO: 26603
  source 1..40: mol_type = genomic DNA

SEQ ID NO: 46154 - DNA, 50 bp, Clostridioides difficile; identical to SEQ ID NO: 39597
  source 1..50: mol_type = genomic DNA

SEQ ID NO: 46155 - DNA, 40 bp, Clostridioides difficile; identical to SEQ ID NO: 14750
  source 1..40: mol_type = genomic DNA

SEQ ID NO: 46156 - protein, 532 aa, Clostridioides difficile
MKAAIYSRKSRFTGKGDSIENQIQLCIDYAKSIGVKDFLIYEDEGFSGSNIDRPQFKKMMQDAKDKKFSYLVCYRLDRISRNVSDFSTLIEKLNELNISFISIKEQFDTSTPMGRAMMFISSVFAQLERETIAERIKDNMYELARSGRWLGGNTPHGFNSEKITFLDENLKERSMYKLQVNDEQMEIVKLIYNKYLELRSLSKLYKYVYNNGIRGPRGGKFDPSSLSRILRNPAYVKANDEILDYLKNSGMDVVGTPDRKCGILTYAKNTSNSIAAIAKHHGVIEPEIWLEVQNQLDKNRDKTPRISTGKTALLSGLIKCGKCGSNMRITYKGKKTDKDLKYYYICGTKKTLGYDSCNCKNLNGPLVESLVIDKIKNCKEESIISAFNSNNIKTDNVFNIFKSETNLLKNQILDKERLIKNLVIELAKNTGSTASDYIVSQIESLNNEISILKDKINTLESSNINISSDSINIDIIVSNLKRFNDEVDNASLDDKRLLLSTIINSIVWDSSLGDLNIVYMGAEVDNSVSLSN

SEQ ID NO: 46157 - DNA, 50 bp, Clostridioides difficile
  source 1..50: mol_type = genomic DNA
agttgcacttttttggctatagcagaagcaaggtgtataaaagtgcaact

SEQ ID NO: 46158 - DNA, 40 bp, Clostridioides difficile; identical to SEQ ID NO: 26603
  source 1..40: mol_type = genomic DNA

SEQ ID NO: 46159 - DNA, 50 bp, Clostridioides difficile; identical to SEQ ID NO: 46157
  source 1..50: mol_type = genomic DNA

SEQ ID NO: 46160 - DNA, 40 bp, Clostridioides difficile; identical to SEQ ID NO: 14750
  source 1..40: mol_type = genomic DNA

SEQ ID NO: 46161 - protein, 532 aa, Clostridioides difficile
MKAAIYSRKSRFTGKGDSIENQIQLCIDYAKSIGVKDFLIYEDEGFSGSNIDRPQFKKMMQDAKDKKFSYLVCYRLDRISRNVSDFSTLIEKLNELNISFISIKEQFDTSTPMGRAMMFISSVFAQLERETIAERIKDNMYELARSGRWLGGNTPHGFNSEKITFLDENLKERSMYKLQVNDEQMEIVKLIYNKYLELRSLSKLYKYVYNNGIRGPRGGKFDPSSLSRILRNPAYVKANDEILDYLKSSGMDVVGTPDRNCGILTYAKNTSNSIAAIAKHHGVIEPEIWLEVQNQLDKNRDKTPRISTGKTALLSGLIKCGKCGSNMRITYKGKKTDKDLKYYYICGTKKTLGSDSCNCKNLNGPLVESLVIDKIKNCKEESIISAFNSNNIKTDNVFNIFKSETNLLKNQILDKEKLIKNLVIELAKNTGSTASDYIVSQIESLNNEISILKDKINTLESSNINISSDSINIDIIVSNLKRFNDEVDNASLDDKRLLLSTIINSIVWDSSLGNLNIVYMGAEVDNSVSLNN

SEQ ID NO: 46162 - DNA, 50 bp, Clostridioides difficile; identical to SEQ ID NO: 14747
  source 1..50: mol_type = genomic DNA

SEQ ID NO: 46163 - DNA, 40 bp, Clostridioides difficile; identical to SEQ ID NO: 26603
  source 1..40: mol_type = genomic DNA

SEQ ID NO: 46164 - DNA, 50 bp, Clostridioides difficile; identical to SEQ ID NO: 14747
  source 1..50: mol_type = genomic DNA

SEQ ID NO: 46165 - DNA, 40 bp, Clostridioides difficile; identical to SEQ ID NO: 14750
  source 1..40: mol_type = genomic DNA

SEQ ID NO: 46166 - protein, 532 aa, Clostridioides difficile
MKAAIYSRKSRFTGKGDSIENQIQLCIDYAKSIGVKDFLIYEDEGFSGSNIDRPQFKKMMQDAKDKKFSYLVCYRLDRISRNVSDFSTLIEKLNELNISFISIKEQFDTSTPMGRAMMFISSVFAQLERETIAERIKDNMYELARSGRWLGGNTPHGFNSEKITFLDENLKERSMYKLQVNDEQMEIVKLIYNKYLELRSLSKLYKYVYNNGIRGPRGGKFDPSSLSRILRNPAYVKANDEILDYLKNSGMDVVGTPDRKCGILTYAKNTSNSIAAIAKHHGVIEPEIWLEVQNQLDKNRDKTPRISTGKTALLSGLIKCGKCGSNMRITYKGKKTDKDLKYYYICGTKKTLGSDSCNCKNLNGPLVESLVIDKIKNCKEESIISAFNSNNIKTDNVFNIFKSETNLLKNQILDKERLIKNLVIELAKNTGSTASDYIVSQIESLNNEISILKDKINTLESSNINISSDSINIDIIVSNLKRFNDEVDNASLDDKRLLLSTIINSIVWDSSLGNLNIVYMGAEVDNSVSLNN

SEQ ID NO: 46167 - DNA, 50 bp, Clostridioides difficile; identical to SEQ ID NO: 39597
  source 1..50: mol_type = genomic DNA

SEQ ID NO: 46168 - DNA, 40 bp, Clostridioides difficile; identical to SEQ ID NO: 26603
  source 1..40: mol_type = genomic DNA

SEQ ID NO: 46169 - DNA, 50 bp, Clostridioides difficile; identical to SEQ ID NO: 39597
  source 1..50: mol_type = genomic DNA

SEQ ID NO: 46170 - DNA, 40 bp, Clostridioides difficile; identical to SEQ ID NO: 14750
  source 1..40: mol_type = genomic DNA

SEQ ID NO: 46171 - protein, 532 aa, Clostridioides difficile
MKAAIYSRKSRFTGKGDSIENQIQLCIDYAKSIGVKDFLIYEDEGFSGSNIDRPQFKKMMQDAKDKKFSYLVCYRLDRISRNVSDFSTLIEKLNELSISFISIKEQFDTSTPMGRAMMFISSVFAQLERETIAERIKDNMYELARSGRWLGGNTPHGFNSEKITFLDENLKERSMYKLQVNDEQMEIVKLIYNKYLELRSLSKLYKYVYNNGIRGPRGGKFDPSSLSRILRNPAYVKANDEILDYLKNSGMDVVGTPDRKCGILTYAKNTSNSIAAIAKHHGVIEPEIWLEVQNQLDKNRDKTPRISTGKTALLSGLIKCGKCGSNMRITYKGKKTDKDLKYYYICGTKKTLGSDSCNCKNLNGPLVESLVIDKIKNCKEESIISAFNSNNIKTDNVFNIFKSETNLLKNQILDKERLIKNLVIELAKNTGSTASDYIVFQIESLNNEISILKDKINTLESSNINISSDSINIDIIVSNLKRFNDEVDNASLDDKRLLLSTIINSIIWDSSLGNLNIVYMGAEVDNSVSLSN

SEQ ID NO: 46172 - DNA, 50 bp, Clostridioides difficile; identical to SEQ ID NO: 14747
  source 1..50: mol_type = genomic DNA

SEQ ID NO: 46173 - DNA, 40 bp, Clostridioides difficile; identical to SEQ ID NO: 26603
  source 1..40: mol_type = genomic DNA

SEQ ID NO: 46174 - DNA, 50 bp, Clostridioides difficile; identical to SEQ ID NO: 14747
  source 1..50: mol_type = genomic DNA

SEQ ID NO: 46175 - DNA, 40 bp, Clostridioides difficile; identical to SEQ ID NO: 14750
  source 1..40: mol_type = genomic DNA

SEQ ID NO: 46176 - protein, 532 aa, Clostridioides difficile
MKAAIYSRKSRFTGKGDSIENQIQLCIDYAKSIGVKDFLIYEDEGFSGSNIDRPQFKKMMQDAKDKKFSCLVCYRLDRISRNVSDFSTLIEKLNELNISFISIKEQFDTSTPMGRAMMFISSVFAQLERETIAERIKDNMYELARSGRWLGGNTPHGFNSEKITFLDENLKERSMYKLQVNDEQMEIVKLIYNKYLELRSLSKLYKYVYNNGIRGPRGGKFDPSSLSRILRNPAYVKANDEILDYLKNSGMDVVGTPDRKCGILTYAKNTSNSIAAIAKHHGVIEPEIWLEVQNQLDKNRDKTPRISTGKTALLSGLIKCSKCGSNMRITYKGKKTDKDLKYYYICGTKKTLGSDSCNCKNLNGPLVESLVIDKIKNCKEESIISAFNSNNIKTDNVFNIFKSETNLLKNQILDKERLIKNLVIELAKNTGSTASDYIVSQIESLNNEISILKDKINTLESSNINISSDSINIDIIVSNLKRFNDEVDNASLDDKRLLLSTIINSIVWDSSLGNLNIVYMGAEVDNSVSLSN

SEQ ID NO: 46177 - DNA, 50 bp, Clostridioides difficile; identical to SEQ ID NO: 39597
  source 1..50: mol_type = genomic DNA

SEQ ID NO: 46178 - DNA, 40 bp, Clostridioides difficile; identical to SEQ ID NO: 26603
  source 1..40: mol_type = genomic DNA

SEQ ID NO: 46179 - DNA, 50 bp, Clostridioides difficile; identical to SEQ ID NO: 39597
  source 1..50: mol_type = genomic DNA

SEQ ID NO: 46180 - DNA, 40 bp, Clostridioides difficile; identical to SEQ ID NO: 14750
  source 1..40: mol_type = genomic DNA

SEQ ID NO: 46181 - protein, 532 aa, Clostridioides difficile
MKAAIYSRKSRFTGKGDSIENQIQLCIDYAKSIGVKDFLIYEDEGFSGSNIDRPQFKKMMQDAKDKKFSYLVCYRLDRISRNVSDFSTLIEKLNELNISFISIKEQFDTSTPMGRAMMFISSVFAQLERETIAERIKDNMYELARSGRWLGGNTPHGFNSEKITFLDENLKERSMYKLQVNDEQMEIVKLIYNKYLELRSLSKLYKYVYNNGIRGPRGGKFDPSSLSRILRNPAYVKANDEILDYLKNSGMDVVGTPDRKCGILTYAKNTSNSIAAIAKHHGVIEPEIWLEVQNQLDKNRDKTPRISTGKTALLSGLIKCGKCGSNMRITYKGKKTDKDLKYYYICGTKKTLGSDSCNCKNLNGPLVESLVIDKIKNCKEESIISAFNSNNIKTDNVFNIFKSETNLLKNQILDKERLIKNLVIELAKNTGSTASDYIVSQIESLNNEISILKDKINTLESGNINISSDSINIDIIVSNLKRFNDEVDNASLDDKRLLLSTIINSIVWDSSLGNLNIVYMGVEVDNSVSLSN

SEQ ID NO: 46182 - DNA, 50 bp, Clostridioides difficile; identical to SEQ ID NO: 14747
  source 1..50: mol_type = genomic DNA

SEQ ID NO: 46183 - DNA, 40 bp, Clostridioides difficile; identical to SEQ ID NO: 26603
  source 1..40: mol_type = genomic DNA

SEQ ID NO: 46184 - DNA, 50 bp, Clostridioides difficile; identical to SEQ ID NO: 14747
  source 1..50: mol_type = genomic DNA

SEQ ID NO: 46185 - DNA, 40 bp, Clostridioides difficile; identical to SEQ ID NO: 14750
  source 1..40: mol_type = genomic DNA

SEQ ID NO: 46186 - protein, 532 aa, Clostridioides difficile
MKAAIYSRKSRFTGKGDSIENQIQLCIDYAKSIGVKDFLIYEDEGFSGSNIDRPQFKKMMQDAKDKKFSYLVCYRLDRISRNVSDFSSLIEKLNELNISFISIKEQFDTSTPMGRAMMFISSVFAQLERETIAERIKDNMYELARSGRWLGGNTPHGFNSEKITFLDENLKERSMYKLQVNDEQMEIVKLIYNKYLELRSLSKLYKYVYNNGIRGPRGGKFDPSSLSRILRNPAYVKANDEILDYLKNNGMDVVGTPDRKCGILTYAKNTSNSIAAIAKHHGVIEPEIWLEVQNQLDKNRDKTPRISTGKTALLSGLIKCGKCGSNMRITYKGKKTDKDLKYYYICGTKKTLGSDSCNCKNLNGPLVESLVIDKIKNCKEESIISAFNSNNIKTDNVFNIFKSETNLLKNQILDKERLIKNLVIELAKNTGSTASDYIVSQIESLNNEISILKDKINTLESSNINISSDSINIDIIVSNLKRFNDEVDNASLDDKRLLLSTIINSIVWDSSLGNLNIVYMGAEVDNSVSLSN

SEQ ID NO: 46187 - DNA, 50 bp, Clostridioides difficile; identical to SEQ ID NO: 14747
  source 1..50: mol_type = genomic DNA

SEQ ID NO: 46188 - DNA, 40 bp, Clostridioides difficile; identical to SEQ ID NO: 26603
  source 1..40: mol_type = genomic DNA

SEQ ID NO: 46189 - DNA, 50 bp, Clostridioides difficile; identical to SEQ ID NO: 14747
  source 1..50: mol_type = genomic DNA

SEQ ID NO: 46190 - DNA, 40 bp, Clostridioides difficile; identical to SEQ ID NO: 14750
  source 1..40: mol_type = genomic DNA

SEQ ID NO: 46191 - protein, 532 aa, Clostridioides difficile; identical to SEQ ID NO: 4206

SEQ ID NO: 46192 - DNA, 50 bp, Clostridioides difficile; identical to SEQ ID NO: 39597
  source 1..50: mol_type = genomic DNA

SEQ ID NO: 46193 - DNA, 40 bp, Clostridioides difficile; identical to SEQ ID NO: 26603
  source 1..40: mol_type = genomic DNA

SEQ ID NO: 46194 - DNA, 50 bp, Clostridioides difficile; identical to SEQ ID NO: 39597
  source 1..50: mol_type = genomic DNA

SEQ ID NO: 46195 - DNA, 40 bp, Clostridioides difficile; identical to SEQ ID NO: 14750
  source 1..40: mol_type = genomic DNA

SEQ ID NO: 46196 - protein, 532 aa, Clostridioides difficile; identical to SEQ ID NO: 46051

SEQ ID NO: 46197 - DNA, 50 bp, Clostridioides difficile; identical to SEQ ID NO: 14747
  source 1..50: mol_type = genomic DNA

SEQ ID NO: 46198 - DNA, 40 bp, Clostridioides difficile; identical to SEQ ID NO: 26603
  source 1..40: mol_type = genomic DNA

SEQ ID NO: 46199 - DNA, 50 bp, Clostridioides difficile; identical to SEQ ID NO: 14747
  source 1..50: mol_type = genomic DNA

SEQ ID NO: 46200 - DNA, 40 bp, Clostridioides difficile; identical to SEQ ID NO: 14750
  source 1..40: mol_type = genomic DNA

SEQ ID NO: 46201 - protein, 532 aa, Clostridioides difficile; identical to SEQ ID NO: 46046

SEQ ID NO: 46202 - DNA, 50 bp, Clostridioides difficile; identical to SEQ ID NO: 39597
  source 1..50: mol_type = genomic DNA

SEQ ID NO: 46203 - DNA, 40 bp, Clostridioides difficile; identical to SEQ ID NO: 26603
  source 1..40: mol_type = genomic DNA

SEQ ID NO: 46204 - DNA, 50 bp, Clostridioides difficile; identical to SEQ ID NO: 39597
  source 1..50: mol_type = genomic DNA

SEQ ID NO: 46205 - DNA, 40 bp, Clostridioides difficile; identical to SEQ ID NO: 14750
  source 1..40: mol_type = genomic DNA

SEQ ID NO: 46206 - protein, 532 aa, Clostridioides difficile
MKAAIYSRKSRFTGKGDSIENQIQLCIDYAKSIGVKDFLIYEDEGFSGSNIDRPQFKKMMQDAKDKKFSYLVCYRLDRISRNVSDFSTLIEKLNELNISFISIKEQFDTSTPMGRAMMFISSVFAQLERETIAERIKDNMYELARSGRWLGGNTPHGFNSEKITFLDENLKERSMYKLQVNDEQMEIVKLIYNKYLELRSLSKLYKYVYNNGIRGPRGGKFDPSSLSRILRNPAYVKANDEILDYLKNSGMDVVGTPDRKCGILTYAKNTSNSIAAIAKHHGVIEPEIWLEVQNQLDKNRDKTPRISTGKTALLSGLIKCGKCGSNMRITYKGKKTDKDLKYYYICGTKKTLGSDSCNCKNLNGPLVESLVIDKIKNCKEESIISAFNSNNIKTDNVFNIFKSETNLLKNQILDKERLIKNLVIELAKNTGSTASDYIVSQIESLNNEISILKDKINTLESSNINISSDSINIDIIVSNLKRFNDEVDNASLDNKRLLLSTIINSIVWDSSLGNLNIVYMGAEVDNSVSLSN

SEQ ID NO: 46207 - DNA, 50 bp, Clostridioides difficile; identical to SEQ ID NO: 39597
  source 1..50: mol_type = genomic DNA

SEQ ID NO: 46208 - DNA, 40 bp, Clostridioides difficile; identical to SEQ ID NO: 26603
  source 1..40: mol_type = genomic DNA

SEQ ID NO: 46209 - DNA, 50 bp, Clostridioides difficile; identical to SEQ ID NO: 39597
  source 1..50: mol_type = genomic DNA

SEQ ID NO: 46210 - DNA, 40 bp, Clostridioides difficile; identical to SEQ ID NO: 14750
  source 1..40: mol_type = genomic DNA

SEQ ID NO: 46211 - protein, 532 aa, Clostridioides difficile
MKAAIYSRKSRFTGKGDSIENQIQLCIDYAKSIGVKDFLIYEDEGFSGSNIDRPQFKKMMQDAKDKKFSYLVCYRLDRISRNVSDFSTLIEKLNELNISFISIKEQFDTSTPMGRAMMFISSVFAQLERETIAERIKDNMYELARSGRWLGGNTPHGFNSEKITFLDENLKERSMYKLQVNDEQMEIVKLIYNKYLELRSLSKLYKYVYNNGIRGPRGGKFDPSSLSRILRNPAYVKANDEILDYLKNSGMDVVGTPDRKCGILTYAKNTSNSIAAIAKHHGVIEPEIWLEVQNQLDKNRDKTPRISTGKTALLSGLIKCGKCGSNMRITYKGKKTDKDLKYYYICGTKKTLGSDSCNCKNLNGPLVESLVIDKIKNCKEESIISAFNSNNIKTDNVFNIFKSETNLLKNQILDKEKLIKNLVIELAKNTGSTASDYIVSQIESLNNEISILKDKINTLESSNINISSDSINIDIIVSNLKRFNDEVDNASLDDKRLLLSTIINSIVWDSSLGNLNIVYMGVEVDNSVSLSN

SEQ ID NO: 46212 - DNA, 50 bp, Clostridioides difficile; identical to SEQ ID NO: 39597
  source 1..50: mol_type = genomic DNA

SEQ ID NO: 46213 - DNA, 40 bp, Clostridioides difficile; identical to SEQ ID NO: 26603
  source 1..40: mol_type = genomic DNA

SEQ ID NO: 46214 - DNA, 50 bp, Clostridioides difficile; identical to SEQ ID NO: 39597
  source 1..50: mol_type = genomic DNA

SEQ ID NO: 46215 - DNA, 40 bp, Clostridioides difficile; identical to SEQ ID NO: 14750
  source 1..40: mol_type = genomic DNA

SEQ ID NO: 46216 - protein, 532 aa, Clostridioides difficile
MKAAIYSRKSRFTGKGDSIENQIQLCIDYAKSIGVKDFLIYEDEGFSGSNIDRPQFKKMMQDAKDKKFSYLVCYRLDRISRNVSDFSTLIEKLNELNISFISIKEQFDTSTPMGRAMMFISSVFAQLERETIAERIKDNMYELARSGRWLGGNTPHGFNSEKITFLDENLKERSMYKLQVNDEQMEIVKLIYNKYLELRSLSKLYKYVYNNGIRGPRGGKFDPSSLSRILRNPAYVKANDEILDYLKNSGMDVVGTPDRKCGILTYAKNTSNSIAAIAKHHGVIEPEIWLEVQNQLDKNRDKTPRISTGKTALLSGLIKCGKCGSNMRITYKGKKADKDLKYYYICGTKKTLGSDSCNCKNLNGPLVESLVIDKIKNCKEESIISAFNSNNIKTDNVFNIFKSETNLLKNQILDKERLIKNLVIELAKNTGSTASDYIVSQIESLNNEISILKDKINTLESSNINISSDSINIDIIVSNLKRFNDEVDNASLDDKRLLLSTIINSIVWDSSLGNLNIVYMGAEVDNSVSLNN

SEQ ID NO: 46217 - DNA, 50 bp, Clostridioides difficile; identical to SEQ ID NO: 14747
  source 1..50: mol_type = genomic DNA

SEQ ID NO: 46218 - DNA, 40 bp, Clostridioides difficile; identical to SEQ ID NO: 26603
  source 1..40: mol_type = genomic DNA

SEQ ID NO: 46219 - DNA, 50 bp, Clostridioides difficile; identical to SEQ ID NO: 14747
  source 1..50: mol_type = genomic DNA

SEQ ID NO: 46220 - DNA, 40 bp, Clostridioides difficile; identical to SEQ ID NO: 14750
  source 1..40: mol_type = genomic DNA

SEQ ID NO: 46221 - protein, 532 aa, Clostridioides difficile
MKAAIYSRKSRFTGKGDSIENQIQLCMDYAKSIGIKDFFIYEDEGFSGSNIDRPQFKKMMQDAKDKKFNHLICYRLDRISRNVSDFSTLIEKLNKLDISFISIKEQFDTSTPMGRAMMFISSVFAQLERETIAERIKDNMYELARSGRWLGGKTPHGFNSEKITFLDENLKERSMYKLQVNNEQMEVVKLIYNKYLELRSLSKLYKYVYHNGIRGPHGGKFDPSSLSRILRNPAYVKANDEILKYLRNNGMDVVGTPDRRCGILTYAKNTSDSIAAIAKHHGVIEPDIWLEVQIQLDKNRDKTPRIATGKTALLSGLIKCGKCGANMRITYKGKKTDKDLKYYYVCGTKKTLGVDSCNCKNLNGPLVESLVVDKIKNCNVESIISAFNINKIKICNISNDLHSETNLLKSQVSDKEKLINNLIKELAKNTGSIACDYIISQVENLNNEISILKGKINDLKSRDINISSNHLNLDIIVSNLKRFSDEVDNASLDDKRLLLSTIIDSVIWDSSLGNLNIIYMGAEIDDSVSLKH

SEQ ID NO: 46222 - DNA, 50 bp, Clostridioides difficile
  source 1..50: mol_type = genomic DNA
agttgcactttcttaacgatagtagaagcactatgtataaaagtgcaact

SEQ ID NO: 46223 - DNA, 40 bp, Clostridioides difficile; identical to SEQ ID NO: 26603
  source 1..40: mol_type = genomic DNA

SEQ ID NO: 46224 - DNA, 50 bp, Clostridioides difficile; identical to SEQ ID NO: 46222
  source 1..50: mol_type = genomic DNA

SEQ ID NO: 46225 - DNA, 40 bp, Clostridioides difficile; identical to SEQ ID NO: 14750
  source 1..40: mol_type = genomic DNA

SEQ ID NO: 46226 - protein, 532 aa, Clostridioides difficile
MKAAIYSRKSRFTGKGDSIENQIQLCIDYAKSIGVKDFLIYEDEGFSGSNIDRPQFKKMMQDAKDKKFSYLVCYRLDRISRNVSDFSTLIEKLNELNISFISIKEQFDTSTPMGRAMMFISSVFAQLERETIAERIKDNMYELARSGRWLGGNTPHGFNSEKITFLDENLKERSMYKLQVNDEQMEIVKLIYNKYLELRSLSKLYKYVYNNGIRGPRGGKFDPSSLSRILRNPAYVKANDEILDYIKNSGMDVVGTPDRKCGILTYAKNTSNSIAAIAKHHGVIEPEIWLEVQNQLDKNRDKTPRISTGKTALLSGLIKCGKCGSNMRITYKGKKTDKDLKYYYICGTKKTLGSDSCNCKNLNGPLVESLVIDKIKNCKEESIISAFNSNNIKTDNVFNIFKSETNLLKNQILDKERLIKNLVIELAKNTGSTASDYIVSQIESLNNEISILKDKINILESSNINISSDSINIDIIVSNLKRFNDEVDNASLDDKRLLLSTIINSIVWDSSLGNLNIVYMGAEVDNSVSLSN

SEQ ID NO: 46227 - DNA, 50 bp, Clostridioides difficile
  source 1..50: mol_type = genomic DNA
agttgcacttttttagctatagcagaagctatatctataaaagtgcaact

SEQ ID NO: 46228 - DNA, 40 bp, Clostridioides difficile; identical to SEQ ID NO: 26603
  source 1..40: mol_type = genomic DNA

SEQ ID NO: 46229 - DNA, 50 bp, Clostridioides difficile; identical to SEQ ID NO: 46227
  source 1..50: mol_type = genomic DNA

SEQ ID NO: 46230 - DNA, 40 bp, Clostridioides difficile; identical to SEQ ID NO: 14750
  source 1..40: mol_type = genomic DNA

SEQ ID NO: 46231 - protein, 534 aa, Clostridioides difficile
  REGION 28..31: note = misc_feature - Xaa can be any naturally occurring amino acid
MKAAIYSRKSRFTGKGDSIENQIQLCIXXXXAKSIGVKDFLIYEDEGFSGSNIDRPQFKKMMQDAKDKKFSYLVCYRLDRISRNVSDFSTLIEKLNELNISFISIKEQFDTSTPMGRAMMFISSVFAQLERETIAERIKDNMYELARSGRWLGGNTPHGFNSEKITFLDENLKERSMYKLQVNNEQMEVVKLIYNKYLELRSLSKLYKYIYNNGIRGPRGGKFDPSSLSRILRNPAYVKANDEILDYLKNSGMDVVGTPDRKCGILTYAKNTANSIAAIAKHHGVIEPEIWLEVQNQLDKNRDKTPRISTGKTALLSGLIKCGKCGSNMRITYKGKKTDKDLKYYYICGTKKTLGSDSCNCKNLNGPLVESLVIDKIKNCKEESIISAFNSNNIKADNVFNAFKSETNLLKNQILDKERLIKNLVIELAKNTGSTASDYIVSQIESLNNEISILKDKINTLESSNINISSDSINIDIIVSNLKRFNDEVDNASLDDKRLLLSTIINSIVWDSSLGNLNIVYMGAEMDNSVSLSN

SEQ ID NO: 46232 - DNA, 50 bp, Clostridioides difficile
  source 1..50: mol_type = genomic DNA
agttgcacttttttagctatagtagaagctatatctataaaagtgcaact

SEQ ID NO: 46233 - DNA, 40 bp, Clostridioides difficile; identical to SEQ ID NO: 26603
  source 1..40: mol_type = genomic DNA

SEQ ID NO: 46234 - DNA, 50 bp, Clostridioides difficile; identical to SEQ ID NO: 46232
  source 1..50: mol_type = genomic DNA

SEQ ID NO: 46235 - DNA, 40 bp, Clostridioides difficile; identical to SEQ ID NO: 14750
  source 1..40: mol_type = genomic DNA

SEQ ID NO: 46236 - protein, 532 aa, Clostridioides difficile
MKAAIYSRKSRFTGKGDSIENQIQLCMDYAKSIGIEDFYIYEDEGFSGSNIDRPQFKKMMQDAKGKKFNYLVCYRLDRISRNVSDFSTLIEKLNKLDISFISIKEQFDTSTPMGRAMMFISSVFAQLERETIAERIKDNMYELARSGRWLGGKTPHGFNSEKITFLDENLKERSMYKLQVNDEQMEIVKLIYNKYLELRSLSKLYKYVYHNGIRGPHGGKFDPSSLSRILRNPAYVKANDEILKYLRDNGMEVVGTANKKCGILTYAKNTSDSIAAIAKHHGVIEPEIWLETQNQLDKNRDKSPRIATGKTALLSGLIKCGKCGANMRITYKGKKTDKDLKYYYVCGTKKTLGIDGCNCKNLNGPLVESLVVDKIKNCNLASIISAFDSNKIKIDDAFNNLHSETNLLKNKVLEKEKLINNLIKELAKNTGSIASDYIISQVESLNNEISILNSKINDLESSDINISSDCLNIKTIVSNLKKFNDEVDNASLEDKRLLLSTIIDYVIWDSSLGNLNIIYMGAEIDDSISLKN

SEQ ID NO: 46237 - DNA, 50 bp, Clostridioides difficile
  source 1..50: mol_type = genomic DNA
agttgcactttcttagcgatagtagaagctatatgtataaaagtgcaaca

SEQ ID NO: 46238 - DNA, 40 bp, Clostridioides difficile; identical to SEQ ID NO: 26603
  source 1..40: mol_type = genomic DNA

SEQ ID NO: 46239 - DNA, 50 bp, Clostridioides difficile; identical to SEQ ID NO: 46237
  source 1..50: mol_type = genomic DNA

SEQ ID NO: 46240 - DNA, 40 bp, Clostridioides difficile; identical to SEQ ID NO: 14750
  source 1..40: mol_type = genomic DNA

SEQ ID NO: 46241 - protein, 532 aa, Clostridioides difficile
MKAAIYSRKSRFTGKGDSIENQIQLCIDYAKSIGVKDFLIYEDEGFSGSNIDRPQFKKMMQDAKDKKFSYLVCYRLDRISRNVSDFSTLIEKLNELNISFISIKEQFDTSTPMGRAMMFISSVFAQLERETIAERIKDNMYELARSGRWLGGNTPHGFNSEKITFLDENLKERSMYKLQVNNEQMEVVKLIYNKYLELRSLSKLYKYIYNNGIRGPRGGKFDPSSLSRILRNPAYVKANDEILDYLKNSGMDVVGTPDRKCGILTYAKNTANSIAAIAKHHGVIEPEIWLEVQNQLDKNRDKTPRISTGKTALLSGLIKCGKCGSNMRITYKGKKTDKDLKYYYICGTKKTLGSDSCNCKNLNGPLVESLVIDKIKNCKEESIISAFNSNNIKADNVFNAFKSETNLLKNQILDKERLIKNLVIELAKNTGSTASDYIVSQIESLNNEISILKDKINTLESSNINISSDSINIDIIVSNLKRFNDEVDNASLDDKRLLLSTIINSIVWDSSLGNLNIVYMGAEMDNSVSLSN

SEQ ID NO: 46242 - DNA, 50 bp, Clostridioides difficile; identical to SEQ ID NO: 46232
  source 1..50: mol_type = genomic DNA

SEQ ID NO: 46243 - DNA, 40 bp, Clostridioides difficile; identical to SEQ ID NO: 26603
  source 1..40: mol_type = genomic DNA

SEQ ID NO: 46244 - DNA, 50 bp, Clostridioides difficile; identical to SEQ ID NO: 46232
  source 1..50: mol_type = genomic DNA

SEQ ID NO: 46245 - DNA, 40 bp, Clostridioides difficile; identical to SEQ ID NO: 14750
  source 1..40: mol_type = genomic DNA

SEQ ID NO: 46246 - protein, 532 aa, Clostridioides difficile
MKAAIYSRKSRFTGKGDSIENQIQLCIDYAKSIGIKDFLIYEDEGFSGSNIDRPQFKKMMQDAKDKKFNYLVCYRLDRISRNVSDFSTLIEKLNELNISFISIKEQFDTSTPMGRAMMFISSVFAQLERETIAERIKDNMYELARSGRWLGGNTPHGFNSEKITFLDENLKERSMYKLQVNDEQMDVVKLIYNKYLELRSLSKLYKYIYNNGIRGPRGGKFDPSSLSRILRNPAYVKANDEILEYLKNNGMDIVGTPDKKCGVLTYAKNTTNSIAAIAKHHGVIEPEIWLEVQNQLDKNRDKTPRIATGKTALLSGFIKCGKCGSNMRITYKGRKTDKDLKYYYICGTKKTLGADNCNCKNLNGPLVESLIIDKIKNCKEESIISTFNNNNIKTGNIFNVLKSETNLLKNQILDKEKLIKNLVIELAKNTDSIASDYIVSQIENLNSEINILKDKLNTLESSNANISSDSINLDIIVSNLKRFNDEVDNASLDDKRLLLSTIINSIVWDSNLGNLNIIYMGAEMDNSVSLSN

SEQ ID NO: 46247 - DNA, 50 bp, Clostridioides difficile
  source 1..50: mol_type = genomic DNA
agttgcacttttttagctatagtagatgctatatctataaaagtgcaact

SEQ ID NO: 46248 - DNA, 40 bp, Clostridioides difficile; identical to SEQ ID NO: 26603
  source 1..40: mol_type = genomic DNA

SEQ ID NO: 46249 - DNA, 50 bp, Clostridioides difficile; identical to SEQ ID NO: 46247
  source 1..50: mol_type = genomic DNA

SEQ ID NO: 46250 - DNA, 40 bp, Clostridioides difficile; identical to SEQ ID NO: 14750
  source 1..40: mol_type = genomic DNA

SEQ ID NO: 46251 - protein, 532 aa, Clostridioides difficile
MKAAIYSRKSRFTGKGDSIENQIQLCIDYAKSIGIKDFLIYEDEGFSGSNIDRPQFKKMMQDAKDKKFNYLVCYRLDRISRNVSDFSTLIEKLNELNISFISIKEQFDTSTPMGRAMMFISSVFAQLERETIAERIKDNMYELARSGRWLGGNTPHGFNSEKITFLDENLKERSMYKLQVNDEQMEVVKLIYNKYLELRSLSKLYKYIYNNGIRGPRGGKFDPSSLSRILRNPAYVKANDEILEYLKNNGMDIVGTPDKKCGVLTYAKNTTNSIAAIAKHHGVIEPEIWLEVQNQLDKNRDKTPRIATGKTALLSGFIKCGKCGSNMRITYKGRKTDKDLKYYYICGTKKTLGADNCNCKNLNGPLVESLIIDKIKNCKEESIISTFNNNNIKTGNIFNVLKSETNLLKNQILDKEKLIKNLVIELAKNTDSIASDYIVSQIENLNSEINILKDKLNTLESSNANISSDSINLDIIVSNLKRFNDEVDNASLDDKRLLLSTIINSIVWDSNLGNLNIIYMGAEMDNSVSLSN

SEQ ID NO: 46252 - DNA, 50 bp, Clostridioides difficile; identical to SEQ ID NO: 46247
  source 1..50: mol_type = genomic DNA

SEQ ID NO: 46253 - DNA, 40 bp, Clostridioides difficile; identical to SEQ ID NO: 26603
  source 1..40: mol_type = genomic DNA

SEQ ID NO: 46254 - DNA, 50 bp, Clostridioides difficile; identical to SEQ ID NO: 46247
  source 1..50: mol_type = genomic DNA

SEQ ID NO: 46255 - DNA, 40 bp, Clostridioides difficile; identical to SEQ ID NO: 14750
  source 1..40: mol_type = genomic DNA

SEQ ID NO: 46256 - protein, 532 aa, Clostridioides difficile
MKAAIYSRKSRFTGKGDSIENQIQLCIDYAKSIGIKDFLIYEDEGFSGSNIDRPQFKKMMQDAKDKKFNYLVCYRLDRISRNVSDFSTLIEKLNELNISFISIKEQFDTSTPMGRAMMFISSVFAQLERETIAERIKDNMYELARSGRWLGGNTPHGFNSEKITFLDENLKERSMYKLQVNDEQMEVVKLIYNKYLELRSLSKLYKYIYNNGIRGPRGGKFDPSSLSRILRNPAYVKANDEILEYLKNNGMDIVGTPDKKCGVLTYAKNTTNSIAAIAKHHGVIEPEIWLEVQNQLDKNRDKTPRIATGKTALLSGFIKCGKCGSNMRITYKGRKTDKDLKYYYICGTKKTLGADNCNCKNLNGPLVESLIIDKIKNCKEESIISTFNNNNIKTGNIFNVLKSETNLLKNQILDKEKLIKNLVIELAKNTDSIASDYIVSQIENLNSEINILKDKLNTLESSNANISSDSINLDIIVSNLKRFNDEVDNASLDDKRLLLSTIINSIVWDSSLGNLNIIYMGAEMDNSVSLSN

SEQ ID NO: 46257 - DNA, 50 bp, Clostridioides difficile; identical to SEQ ID NO: 46247
  source 1..50: mol_type = genomic DNA

SEQ ID NO: 46258 - DNA, 40 bp, Clostridioides difficile; identical to SEQ ID NO: 26603
  source 1..40: mol_type = genomic DNA

SEQ ID NO: 46259 - DNA, 50 bp, Clostridioides difficile; identical to SEQ ID NO: 46247
  source 1..50: mol_type = genomic DNA

SEQ ID NO: 46260 - DNA, 40 bp, Clostridioides difficile; identical to SEQ ID NO: 14750
  source 1..40: mol_type = genomic DNA

SEQ ID NO: 46261 - protein, 532 aa, Clostridioides difficile
MKAAIYSRKSRFTGKGDSIENQIQLCIDYAKSIGIKDFLIYEDEGFSGSNIDRPQFKKMMQDAKDKKFNYLVCYRLDRISRNVSDFSTLIEKLNELNISFISIKEQFDTSTPMGRAMMFISSVFAQLERETIAERIKDNMYELARSGRWLGGNTPHGFNSKKITFLDENLKERSMYKLQVNDEQMEVVKLIYNKYLELRSLSKLYKYIYNNGIRGPRGGKFDPSSLSRILRNPAYVKANDEILEYLKNNGMDIVGTPDKKCGVLTYAKNTTNSIAAIAKHHGVIEPEIWLEVQNQLDKNRDKTPRIATGKTALLSGFIKCGKCGSNMRITYKGRKTDKDLKYYYICGTKKTLGADNCNCKNLNGPLVESLIIDKIKNCKEESIISTFNNNNIKTGNIFNVLKSETNLLKNQILDKEKLIKNLVIELAKNTDSIASDYIVSQIENLNSEINILKDKLNTLESSNANISSDSINLDIIVSNLKRFNDEVDNASLDDKRLLLSTIINSIVWDSNSGNLNIIYMGAEMDNSVSLSN

SEQ ID NO: 46262 - DNA, 50 bp, Clostridioides difficile; identical to SEQ ID NO: 46247
  source 1..50: mol_type = genomic DNA

SEQ ID NO: 46263 - DNA, 40 bp, Clostridioides difficile; identical to SEQ ID NO: 26603
  source 1..40: mol_type = genomic DNA

SEQ ID NO: 46264 - DNA, 50 bp, Clostridioides difficile; identical to SEQ ID NO: 46247
  source 1..50: mol_type = genomic DNA

SEQ ID NO: 46265 - DNA, 40 bp, Clostridioides difficile; identical to SEQ ID NO: 14750
  source 1..40: mol_type = genomic DNA

SEQ ID NO: 46266 - protein, 533 aa, Bacteroides cellulosilyticus
MENFDLKGFAKGKKQQKEQIGGNAIIYTRVSSSEQVDGQSLEVQIDKCREYAKVRSYTVVGEFGGTYESAKSDKERKEFNRMLAFIKQSNKKGSSQPVKTVIVFSTSRFSRTGSTTIIEEVEARGAYVVSATSNYDPRTPVGKYMQLMELANARFQNDEKRATTIENSVKALLKGRWIGKAPRGYDQKTTKKEQIITINEEGKLIRKAFLWKANNKLSNEEIRHRLAAEGLHICKQKLSELFKNPFYCGYMAHKFLQGDIVQGNHPPLIPKEIFLKVNGELSKNHSGYEQKIDKEYAPLLGSIKCPCCGKNLSASISTKMRKRFGRTDIGYYVCSRKGCKYNSSTKKVHEAFEEEVNKYALSDKVSELLKMQLTITFEYMNQENRERAKSIKANIKAKEKELEQVETNYALCTDAKKQSICEKVMTKLEKEVRDLKTEFSKVNTEILNLDKFIDFAFKMRSNLFELWELQGLEGRRRLQKLVFPDGFIYDKNNEHIEPKRVNQFFLLKYSYPTDNGDKKKETNRGKHDSSLRV

SEQ ID NO: 46267 - DNA, 50 bp, Bacteroides cellulosilyticus; identical to SEQ ID NO: 45552
  source 1..50: mol_type = genomic DNA

SEQ ID NO: 46268 - DNA, 40 bp, Bacteroides cellulosilyticus
  source 1..40: mol_type = genomic DNA
ttatggagctttaatcagtactcgaagcgggacttgaacc

SEQ ID NO: 46269 - DNA, 50 bp, Bacteroides cellulosilyticus
  source 1..50: mol_type = genomic DNA
aaaacacgattcgtcccttagagtagccttaacagatgaaatattgaacc

SEQ ID NO: 46270 - DNA, 40 bp, Bacteroides cellulosilyticus
  source 1..40: mol_type = genomic DNA
ttatggaccttaaagcagaagctgaagggtaacttggacc

SEQ ID NO: 46271 - protein, 559 aa, Bacillus subtilis
MLILKGDQKLSTDNIMHLIGKINALIYARVSTTDQANKGFSIESQIERCKERAISKFGYKESEIIALVEPGGMGDDPNRPALNHALYLLEKGLGKKFIVLHPDRLTRDNTLQGVVSRRIWGMGVDIEFIEFEVNPHDPESMLMYNIQGSIAQYNKAKIHANSKRGRLAKAKKGEFPSFKRLYGYKFNTVTDLPEYNEEEKEILLEMKDMLLNKKMSSNEIAKELSRRGVAAPNGKTWYQATVSRMLQNEDYTGDFYYGKSKVVQINGKKKQVPTNKDEWILIKIPPMWDKATREQIIERLKSNFKGRSRATKDYLLKNKAKCGRCGGACGSGITSKTKSGVYKYYSCRAKTAKGYQNGKKVVSCEGKNWRVDIVDEVFWNWFIKLLKNPEKFLESFLEEASDQKKIDELKAKASRLEKQLGEIDEEIANYVILFGKGKIKESMFDQLSQPLEQNKEHIENEIKIINSQLAANKQTEDKKQKMIEYIGSFSKMIKNEITIEEKRQFLDFFIEKVTLFDDDHMEVVWKSSSLNNENSHVDFLNGEQGGEFINSHKRLNHIQ

SEQ ID NO: 46272 - DNA, 50 bp, Bacillus subtilis
  source 1..50: mol_type = genomic DNA
cgcataaaagactaaaccatattcaagaacaaggttttaacttttatgtc

SEQ ID NO: 46273 - DNA, 40 bp, Bacillus subtilis
  source 1..40: mol_type = genomic DNA
agcgatcgacacacttgtaaagcatatggaagacaaacag

SEQ ID NO: 46274 - DNA, 50 bp, Bacillus subtilis
  source 1..50: mol_type = genomic DNA
cgcataaaagactaaaccatattcaggaacaaggttttaacttttatgtc

SEQ ID NO: 46275 - DNA, 40 bp, Bacillus subtilis
  source 1..40: mol_type = genomic DNA
agtgacctcaaaaactgtaaggcatatagaaaacaaacag

SEQ ID NO: 46276 - protein, 536 aa, Sphingomonas melonis
MRTVVYARYSSQLQNSRSIEDQIAVCRERADREGWTIVDVFTDYAISGAAGIGEAQRPGLNAMLAAIDAGGIDQILTESTDRIARHQGDAFAIRERIQFAGARIFTLMDGEVDDITGTIKGLMDARFRKDLGARVKRGQRGAVQQGRAAAGIAYGYSRANRLDERGELIRGLRAIDADQAAIVVRIFTEYASGQSPKAIAARLNAEGVPAPRGQTWRTTTISGDRKRQNGMLNNRLYIGELIVNRTSKIANPVTRRSVIRPNPEKDWVVEQVPILRIIDDALWASAQAMRERLQGIPFDKTRRPKHLLSGLGQCGVCGGGWVKYNRDQWGCGRYRDGRGCENGRSISNQQFEKRVLAGLQDELLHPDLVASYVRAWHVENARRAQVTTRERAKMERRHEEAVRRVDRLIEAVACGADDFREIREVLAKARADRDSLAAQLADLDALPVIALHPGLADDYRRQVAALNDALGENDASRLEAVPRLRSLIDRIVLTPHPSGRGVTVSITGRLDEIVRLATGRTASALTPAKKRLAALT

SEQ ID NO: 46277 - DNA, 50 bp, Sphingomonas melonis
  source 1..50: mol_type = genomic DNA
ttacctgataacgcccaattcccgttacccgctccagttttatcaggtaa

SEQ ID NO: 46278 - DNA, 40 bp, Sphingomonas melonis; identical to SEQ ID NO: 33838
  source 1..40: mol_type = genomic DNA

SEQ ID NO: 46279 - DNA, 50 bp, Sphingomonas melonis
  source 1..50: mol_type = genomic DNA
ttacctgataacgcccaattcccgctacccgctccagttttatcaggtaa

SEQ ID NO: 46280 - DNA, 40 bp, Sphingomonas melonis
  source 1..40: mol_type = genomic DNA
ttaacgtgttccattctcactacctgctccttcccacacc

SEQ ID NO: 46281 - protein, 455 aa, Streptomyces viridosporus
MTADLRELCQREGLTEVALHVDDGLSGGFRDRPAFLNWIADARTGRADVLLTWHVDRLTREGLNVAAQLLDVVEGKDQNTGRLISRPVRLLDVKGLDSDHGETFRMRFVLQAEIARAERERMRERSKAAHRRLAQAGRYRGGFTPYGYKAVPSEDGKGKTLVIEPREAEAIRECVDRVLSGHTLGRVARWLNDQGYKPRRTEEWTRRGLLHVLTGDAILGRVSRAGKPVRDADGEILAPFPAIVTEAESAALKAACNPAGKRTTPMGRQPSRLLSGLLTCFSCGATLTVVRRNGRTAAYRCMSRGVGKTCAAAVSVGAKVIEDHITERYLSAVGNRRMMRDHVITEGVDELAAVDAEIADVMAQVATRATPALFERLTALQTKREEIESTPPQQRTVTVDTGLTVAQWWEDAHIDDRRDALAEAFAVLEVSPGKPGSRIFNPARLQVEWNEQPDV

SEQ ID NO: 46282 - DNA, 50 bp, Streptomyces viridosporus
  source 1..50: mol_type = genomic DNA
ggtgtgttagatgggtagaccgagaggtccgaggtgcgctataaatcacc

SEQ ID NO: 46283 - DNA, 40 bp, Streptomyces viridosporus
  source 1..40: mol_type = genomic DNA
gaggtgcagcaccaccgagagggcggccgcaagctggctg

SEQ ID NO: 46284 - DNA, 50 bp, Streptomyces viridosporus
  source 1..50: mol_type = genomic DNA
ggtgtgttagatgggtagaccgaggcgtccgaggtgcgctataaatcacc

SEQ ID NO: 46285 - DNA, 40 bp, Streptomyces viridosporus
  source 1..40: mol_type = genomic DNA
cacgagcagcgccgccgaggccgcgccctgcagctggctg

SEQ ID NO: 46286 - protein, 567 aa, Eubacterium siraeum
MTTQNKSNGQEKEKITALYCRLSVDDDKKDMESNSITNQKQILLDYAKKHGYLHPVFFVDDGISGTTFQRPDFQRMQRLAENGEVGTIIVKDVSRFGREQVEMGRLTQVVYPSLGITFIAIQENINSMTGEGMEMLPFYSIFNEWYAAQTSKKIRAVNELKASQGRRVASAVAYGYKKIDGDKEQWYIDEPAAQIVRKIFALCLAGKGPTQIAKQLEKEKILTPTAYFHSIGRKTSNPMPVNVYGWRENTIEHILENQQYTGCTVNGKSTTVSYKVHKVIENPKEEYQIIPNTQEAIIDENVWLRVQELRKNKRRPTKTNRKSLFSGLVFCADCKSKLHFCAAKSLKRNQEFFRCANYKDGRGSCTIHFIRDVVLEMIVKEAVAGLADFVRCYESVFLYMQKQKCGEFQKKRQQELKLSMESSRKRIADLDKLFSRIYEDNVIGKLSDERYARMSAEYESEQKELLEKVKEEEQLLSEMEQKSVDMRLLLQGLREFTDMKELTPTIVNKLIRRIEVHNPEKKHARKSVKVDIYFTAVGLVSLPDEQDIRKMMEQIRSTSQLPKQLTA

SEQ ID NO: 46287 - DNA, 50 bp, Eubacterium siraeum
  source 1..50: mol_type = genomic DNA
ttactgccttatcagcaccgggtgtttgccgggtgtgtataaggcagtat

SEQ ID NO: 46288 - DNA, 40 bp, Eubacterium siraeum
  source 1..40: mol_type = genomic DNA
caaaaaatcacccgatgcattttagcatcgggtgattttt

SEQ ID NO: 46289 - DNA, 50 bp, Eubacterium siraeum; identical to SEQ ID NO: 46287
  source 1..50: mol_type = genomic DNA

SEQ ID NO: 46290 - DNA, 40 bp, Eubacterium siraeum
  source 1..40: mol_type = genomic DNA
catataataacccagtgaattttagcttctgctgattgtt

SEQ ID NO: 46291 - protein, 565 aa, Paraburkholderia terrae
MARRKAVEEPIAGKPRLFIYGRFSSKKQASGDSYNRQMTYAREWAEKHGFEVDDKLTMFDHGLSAFNGDHVKKGALGAFLIAIQKGVVRPGEVLLVESLDRLSRAEELDALGQFATIVQAGITIISMQDGIYNQERIRETQGGILHAALAVMTRAHNESERKSYLVSKAAHAACIAWSAGKGVKPISVGNDPSWVRWNDDLKRFEHIPDQVASLRKLLDLYRIGNGAVRIFERMRATGIALPKGVSNVARVTRLVKHRALVGEKTVKVGDAPAYTIPNYYPSILTEDEFTALQHIRKQRGRRVGKAEVISFMTGMRLTFCANCGSSMGNQNIMNRSRREDGLPQDGHRRLKCSGEQKSVNRCWAGSCSIVPIERALMEFCSDQMNLASLFIDGNEKAEALGSALTRTRQDAEKAQAALDTFMEVGALDSKAAGAKVIRAQIAKLSIELEEKNAEVGHLEYELASLHQHSTPAVAEVWAALREGVRLLDNDARTKARQLVADTFARIEVGLAHDDLIELRLVSRRDVVRVLRVDRKTGERLDQETVDNTQHEALKRRPRKQVRKAA

SEQ ID NO: 46292 - DNA, 50 bp, Paraburkholderia terrae
  source 1..50: mol_type = genomic DNA
ggtatacatcgagagttcgtcgtcgtgacgtaagttttgcaatatatact

SEQ ID NO: 46293 - DNA, 40 bp, Paraburkholderia terrae
  source 1..40: mol_type = genomic DNA
cggctatgcgctgttcgaagtaccgagcaacctgctgctg

SEQ ID NO: 46294 - DNA, 50 bp, Paraburkholderia terrae
  source 1..50: mol_type = genomic DNA
ggtatacatcgagagttcgtcgtcacgacgtaagttttgcaatatatact

SEQ ID NO: 46295 - DNA, 40 bp, Paraburkholderia terrae
  source 1..40: mol_type = genomic DNA
tggctaggcactgttctaaacacaaagcaactttatgatg

SEQ ID NO: 46296 - protein, 468 aa, Rhodococcus qingshengii
MTAKQAPTRAIIYVRVSQDSSRSGRSVAEQEADCRAVCLREGWPVGEVLEDNDIGASRWSGKDRPAYRRLAEVLRPGDVLVTWEASRAQRDLTAYAELRDLCAALGVFWNYKGRTHDLNLGTDRFSTGLDALMAEKEADETRDRVVRALKSNAAQGKPHGKHPYGYRGVRDARGNLVRGEREIEPASAEFVREMVGRVLDGETLRSIAKDVGPRAGEEWRPTSLAKMLKNPALAGWRVHNGEKVRGTWEPILTEDEHMRVVAVLDNPQRRTNRGTAPKFLLSGIAVCDVCGSFCYRRKQHTKGSYQCVNFHVARNVERADAVVIEKMLQLIRKYQEHLFLFSDDEGDEVTGDSARYLAEADELQQRLDGYTDAAMRGEMSQKQYLRMEAGLIGQIERAQQKARESTLVSDPILLRFIAKDPLAVWEDATLEEQRRIVRASVNVRIKKTGRVFNPDDVEVTWKTVRRAL

SEQ ID NO: 46297 - DNA, 50 bp, Rhodococcus qingshengii
  source 1..50: mol_type = genomic DNA
tgacctctctaaggtggcagaacatgggtaataaatcaatagggaggtca

SEQ ID NO: 46298 - DNA, 40 bp, Rhodococcus qingshengii
  source 1..40: mol_type = genomic DNA
cggcgttaacgtcggaacatgggatacgaatttcaagtca

SEQ ID NO: 46299 - DNA, 50 bp, Rhodococcus qingshengii
  source 1..50: mol_type = genomic DNA
tgacctctctaaggtggcagaacaccggtaataaatcaatagggaggtca

SEQ ID NO: 46300 - DNA, 40 bp, Rhodococcus qingshengii
  source 1..40: mol_type = genomic DNA
catgcttcacgtgggaacacctgctaccaatttcaagaca

SEQ ID NO: 46301 - protein, 559 aa, Bacillus paralicheniformis
MLILKGEERLTTEQIMGLIGKINAIIYVRVSTTDQAEKGYSLESQIERCKERALTKFKYKDSELIVLVEPGGMGDDPNRPALNHALYLLEKGLGKKFIVLHPDRLTRDNTLQGIVSRKIWGMGVDIEFIEFEVDPTNPESMLMYNIQGSIAQYNKAKINANSKRGRVAKAKKGEFPSFKRLFGYKFNKETDLPEYNEEERQILIEMKDMLLNRDMSSNEIAKELSKRGVPAPDGDTWYQATVSRMLKNEDYTGDFYYGKTKVVQINGESKQVPTPEEEWILIEIPPIWDHETRDQILKKLKENYKGRSRKTRDYLLKGKAKCGRCGSACGSGFTSKTKSGVYKYYSCRKKNAKAYQNGKKIIDCPGKNWRVDIVDDVFWKWFKKLLKNPTDFLEQFLSETSNEKKVEELQHKVKNLTKQIEEIDSEVSNYVILFGKGKINEDMFDKLTQPLDQKKEYIETELEIINSQINANKDVEDKNQKLKEYVSSFSEMVDKDLSMDEKRKFIDFFIEKVTLFDDDHMEIVWKGDGLNNNDDKASLCNEGVAMKLNNSHKRLNHVQ

SEQ ID NO: 46302 - DNA, 50 bp, Bacillus paralicheniformis
  source 1..50: mol_type = genomic DNA
cacataaaagattaaaccatgttcaagaacacggttttaaattttatgtc

SEQ ID NO: 46303 - DNA, 40 bp, Bacillus paralicheniformis; identical to SEQ ID NO: 23443
  source 1..40: mol_type = genomic DNA

SEQ ID NO: 46304 - DNA, 50 bp, Bacillus paralicheniformis
  source 1..50: mol_type = genomic DNA
cacataaaagattaaaccatgttcccgaacacggttttaaattttatgtc

SEQ ID NO: 46305 - DNA, 40 bp, Bacillus paralicheniformis
  source 1..40: mol_type = genomic DNA
ggaaatcgattcatttctaccacatatggtagagagatgg

SEQ ID NO: 46306 - protein, 531 aa, Pseudomonas aeruginosa; identical to SEQ ID NO: 27356

SEQ ID NO: 46307 - DNA, 50 bp, Pseudomonas aeruginosa
  source 1..50: mol_type = genomic DNA
acggcatatcccgccatgcaggcgacctccagcgaggcgcgttcgcgctg

SEQ ID NO: 46308 - DNA, 40 bp, Pseudomonas aeruginosa
  source 1..40: mol_type = genomic DNA
ccccgctgcctcgtaggcgaatatgagaagcaggccgagc

SEQ ID NO: 46309 - DNA, 50 bp, Pseudomonas aeruginosa
  source 1..50: mol_type = genomic DNA
acggcatatcccgccatgcaggcgagctccagcgaggcgcgttcgcgctg

SEQ ID NO: 46310 - DNA, 40 bp, Pseudomonas aeruginosa
  source 1..40: mol_type = genomic DNA
ccgtgttgcctcacaggctagtattagaaccagggcgggc

SEQ ID NO: 46311 - protein, 549 aa, Veillonella seminalis
MKKKKAYVYTRVSTSMQIDGYSLDAQEERIKQYAKAYDIEIIKTYKDAGKSGTSISGRNEFIAMLNDIEAEKDKVDYVMVFKLSRFGRNAADVLQSLQIMENHNVNLICVDDSLDSSKDSGKLVITILSAVAEMERENILSQTMEGRKQKAREGKWNGGFAPIGYSLDNGELVVNEDEAKAVRMIFDLYANSDMGANGVSKYLVSLGINKPIRQNGKNPYFSASLIRQILDNPVYNGKIAYGRRKTIKDKTTGKIKLEKSDHYIIAQGNHEPLIDDELWNEVQEKRKSQAKKYEKVNRGKDERVHILSNLIKCPYCGAGLYGNKSRKRNKNKEGEHYKDYYYYGCKHRQMMNGHTCTFNKQIRAELIEKEVEPIITQIVSNPTFAKKIEEKINIQIDTKKIDEVINKHLAKIRQLTGTKASLINQIDSLNFEDKHYDRKYTDLNLRLDAIYDQLEYAEMQLNDSRKRKEAILEEKITSDNIYKILINFNSLYSVLGDIDKKRLLNELIEEIQIYDEKPKNGTWIKSVVFKLPLIDYDIDFSLDKIDNVE

SEQ ID NO: 46312 - DNA, 50 bp, Veillonella seminalis
  source 1..50: mol_type = genomic DNA
agtttggacaaaatagataatgtcgagacggtagcactattgtccaaact

SEQ ID NO: 46313 - DNA, 40 bp, Veillonella seminalis
  source 1..40: mol_type = genomic DNA
ccccataaccataagggttgagactatagcgttgatacaa

SEQ ID NO: 46314 - DNA, 50 bp, Veillonella seminalis
  source 1..50: mol_type = genomic DNA
agtttggacaaaatagataatgtcttgacggtagcactattgtccaaact

SEQ ID NO: 46315 - DNA, 40 bp, Veillonella seminalis
  source 1..40: mol_type = genomic DNA
caccatatccataatgttattgattataggggtgaaacag

SEQ ID NO: 46316 - protein, 540 aa, Candidatus Galacturonibacter soehngenii
MKQPYNTTIYNTALYLRLSRDDELQGESGSIQTQRMMLRQYAAEHGLTVVDEYIDDGWSGTNFERPSFQRMIDDIEDGKINCVVTKDLSRLGRNYILTGQYTEIYFPSKGVRYIAINDNVDTINGESELAPFLNILNEMHARQTSKKVKAAMHTRFANGAHYGAYAPLGYVKDPDKKGHLLIDPETRWIVEKIFDLAVHGRGAASITRILVEEKVPTPGWLNYERYGTFANIYAGAPAEKAYAWTIAQVKSILKEETYIGHSVHNKQSNISFKNKKKVRKPQEEWYRVENTHEAIISEEVFQKVQELIASRRRKRRNGTTQIFAGLIKCADCGWSLAYGENKQNKNPYGYYHCSKNGQGLRQCSMHYIRYDVLYAYVLARLQYWSMMVQKDEDKLLKRLLNASDRERNSAKKKQAAELKKAEKRKAEVDGLFAKMYEDWSAGRITEYNFNMLSEKYQNEQKELETKIRQLHETMEAAVQTAADAEKWIALMKQYVNPVELTAELLNTLIEKITVHEAVKGEDGSREQEVEIYYRFIGKID

SEQ ID NO: 46317 - DNA, 50 bp, Candidatus Galacturonibacter soehngenii; identical to SEQ ID NO: 3657
  source 1..50: mol_type = genomic DNA

SEQ ID NO: 46318 - DNA, 40 bp, Candidatus Galacturonibacter soehngenii
  source 1..40: mol_type = genomic DNA
ggtagcgaagtgggaatcaggacttacttatcctgacatt

SEQ ID NO: 46319 - DNA, 50 bp, Candidatus Galacturonibacter soehngenii
  source 1..50: mol_type = genomic DNA
caatatctttaattaagggaaacgcaagtttcccatagttaaagatacca

SEQ ID NO: 46320 - DNA, 40 bp, Candidatus Galacturonibacter soehngenii
  source 1..40: mol_type = genomic DNA
ggtagagtagttgcagtcacaacttggttaagctgacaat

SEQ ID NO: 46321 - protein, 655 aa, Vibrio parahaemolyticus
MKPTIITYLRYSSKQQADGLSEFRQSEINRKFVEKFCAEHDVDLNEVISLKDLGVSAYRGLNLTLGSFSQTIKKFKSGEIKKRFNEDGEINTYLIVESLDRITRTGPFKSTQIFTELLEYTNIVVLADGEKKIYSKKSIDSTHGMMDLFMALISLQRSHTESLMKEYRSRKSWEKKREDLLNYFTLPEEDRVGLERPKNATAMCPFWLTAKKDGRGYDFIPENKKVMDFLIEKLLDGNGMTRAVRLLNDEIDAGNLKPKLKKANRKTRHFRAAAYSGLFNSEISTVKGDYLLTESYYPTEDDIEQGKYPEKHLGKRVRKEIAVLKNYYPALMTESQAAYIRKMMDERRSAGTKPNKSIKNLAQGILRCPHCNSTYIKSKDRRNVYLRCNLAREGLCNAKVIKHGVFEHNLLQFCKGLNINKIISNQSSDQVIDSSLKELEQKMMPLKVKKSQLEDDIEQIVKNISSIKIPSLLEKVQDDYLKKENELKKVVQEIDLIETSIMKLQHQIAMSDGDNSLQELIDLTLDEHADDEIRQRFNVELKKVVKSMTVLYRDTEDNPFGYHMISIQFLDGVHRLIPVHEKMTDKIHNILPYQDAVKVDSVDFSETVILPEDYVEGREKGKYPNLDGMAKYYQENPTKYLRLKHKIDQVHEIHA

SEQ ID NO: 46322 - DNA, 50 bp, Vibrio parahaemolyticus
  source 1..50: mol_type = genomic DNA
gacagtacttatttctcaccaatggagatggttgatctatttgtgcagta

SEQ ID NO: 46323 - DNA, 40 bp, Vibrio parahaemolyticus; identical to SEQ ID NO: 24003
  source 1..40: mol_type = genomic DNA

SEQ ID NO: 46324 - DNA, 50 bp, Vibrio parahaemolyticus
  source 1..50: mol_type = genomic DNA
gacagtacttatttctcaccaatgtcgatggttgatctatttgtgcagta

SEQ ID NO: 46325 - DNA, 40 bp, Vibrio parahaemolyticus; identical to SEQ ID NO: 14805
  source 1..40: mol_type = genomic DNA

SEQ ID NO: 46326 - protein, 655 aa, Vibrio parahaemolyticus
MKPTIITYLRYSSKQQADGLSEFRQSEINRKFVEKFCAEHDVDLNEVISLKDLGVSAYRGLNLTLGSFSQTIKKFKSGEIKKRFNEDGEINTYLIVESLDRITRTGPFKSTQIFTELLEYTNIVVLADGEKKIYSKKSIDSTHGMMDLFMALISLQRSHTESLMKEYRSRKSWEKKREDLLNYFTLPEEERVGLERPKNATAMCPFWLTAKKDGRGYDFIPENKKVMDFLIEKLLDGNGMTRAVRLLNDEIDAGNLKPKLKKANRKTRHFRAAAYSGLFNSEISTVKGDYLLTESYYPTEDDIEQGKYPEKHLGKRVRKEIAVLKNYYPALMTESQAAYIRKMMDERRSAGTKPNKSIKNLAQGILRCPHCNSTYIKAKDRKNVYLRCNLSREGLCNAKVIKHGVFEHNLLQFCKGLNINKIISNQSSDQVIDSSLKELEQKILPLKVKKSKLEDDIEQIVKNISSIKISSLLEKVQDDYLKKENELKKVVQEIDLIETSIMKLQQQIAMSDGDSSLQDLIDLTLDENADDEIRQRFNVELKKVVKSMTVLYRDTEDNPFGYHMISIQFLDGVHRLIPVHEKMTDKIHNILPYQDAVKVDSVDFSETVILPEDYVEGREKGKYPNLDGMAKYYQENPTKYLRLKHKMDQVHEIHA

SEQ ID NO: 46327 - DNA, 50 bp, Vibrio parahaemolyticus; identical to SEQ ID NO: 14802
  source 1..50: mol_type = genomic DNA

SEQ ID NO: 46328 - DNA, 40 bp, Vibrio parahaemolyticus; identical to SEQ ID NO: 24003
  source 1..40: mol_type = genomic DNA

SEQ ID NO: 46329 - DNA, 50 bp, Vibrio parahaemolyticus; identical to SEQ ID NO: 14804
  source 1..50: mol_type = genomic DNA

SEQ ID NO: 46330 - DNA, 40 bp, Vibrio parahaemolyticus; identical to SEQ ID NO: 14805
  source 1..40: mol_type = genomic DNA

SEQ ID NO: 46331 - protein, 655 aa, Vibrio parahaemolyticus
MKPTIITYLRYSSKQQADGLSEFRQSEINRKFVEKFCAEHDVDLNEVISLKDLGVSAYRGLNLTLGSFSQTIKKFKSGEIKKRFNEDGEINTYLIVESLDRITRTGPFKSTQIFTELLEYTNIVVLADGEKKIYSKKSIDSTHGMMDLFMALISLQRSHTESLMKEFRSRKSWEKKREDLLNYFTLPEEERVGLERPKNATAMCPFWLTAKKDGRGYDFIPENKKVMDFLIEKLLDGNGMTRAVRLLNDEIDAGNLKPKLKKANRKTRHFRAAAYSGLFNSEISTVKGDYLLTESYYPTEDDVEQGKYPEKHLGKRVRKEVAVLKNYYPALMTESQAAYIRKMMDERRSSGTKPNKSIKNLAQGILRCPNCNSTYIKSKDRRNVYLRCNLAREGLCNAKVIKHGVFEHNLLQFCKGLNINKIISNQSSDQVIDSSLKELEQKMMPLKVKKSQLEDDIEQIVKNISSIKIPSLLEKVQDDYLKKENELKKVVQEIDLIETSIMKLQHQIAMSDGDNSLQELIDLTLDEHADDEIRQRFNVELKKVVKSMTVLYRDTDDNPFGYHMISIQFLDGVHRLIPVHEKMTDKIHNILPYQDAVKVDSVDFSETVILPEDYVEGREKGKYPNLDGMAKYYQENPTKYLRLKHKMDQVHEIHA

SEQ ID NO: 46332 - DNA, 50 bp, Vibrio parahaemolyticus; identical to SEQ ID NO: 14802
  source 1..50: mol_type = genomic DNA

SEQ ID NO: 46333 - DNA, 40 bp, Vibrio parahaemolyticus; identical to SEQ ID NO: 24003
  source 1..40: mol_type = genomic DNA

SEQ ID NO: 46334 - DNA, 50 bp, Vibrio parahaemolyticus; identical to SEQ ID NO: 14804
  source 1..50: mol_type = genomic DNA

SEQ ID NO: 46335 - DNA, 40 bp, Vibrio parahaemolyticus; identical to SEQ ID NO: 14805
  source 1..40: mol_type = genomic DNA

SEQ ID NO: 46336 - protein, 655 aa, Vibrio parahaemolyticus
MKPTIITYLRYSSKQQADGLSEFRQSEINRKFVEKFCAEHDVDLNEVISLKDLGVSAYRGLNLTLGSFSQTIKKFKSGEIKKRFNEDGEINTYLIVESLDRITRTGPFKSTQIFTELLEYTNIVVLADGEKKIYSKKSIDSTHGMMDLFMALISLQRSHTESLMKEFRSRKSWEKKREDLLNYFTLPEEERIGLERPKNATAMCPFWLTAKKDGRGYDFIPENKKVMDFLIEKLLDGNGMTRAVRLLNDEIDAGNLKPKLKKANRKTRHFRAAAYSGLFNSEISTVKGDYLLTESYYPTEDDVEQGKYPEKHLGKRVRKEIAVLKNYYPALMTESQAAYIRKMMDERRSSGTKPNKSIKNLAQGILRCPNCNSTYIKSKDRRNVYLRCNLAREGLCNAKVIKHGVFEHNLLQFCKGLNINKIISNQSSDQVIDSSLKELEQKMIPLKVKKSQLEDDIEQIVKNISSIKIPSLLEKVQDDYLKKENDLKKVVQEIDLLETSIMKLQQQIAMSDSDNSLQELIDLTLDENADDEIRQRFNVELKKVVKSMTVLYRDTEDNPFGYHMISIQFLDGVHRLIPVHEKMTDKIHNILPYQDAVKVDSVDFSETVILPEDYVEGREKGKYPNLDGMAKYYQENPTKYLRLKHKMDQVHEIHA

SEQ ID NO: 46337 - DNA, 50 bp, Vibrio parahaemolyticus
  source 1..50: mol_type = genomic DNA
gacagcacttatttctcaccaatggagatggttgatctatttgtgcagta

SEQ ID NO: 46338 - DNA, 40 bp, Vibrio parahaemolyticus; identical to SEQ ID NO: 24003
  source 1..40: mol_type = genomic DNA

SEQ ID NO: 46339 - DNA, 50 bp, Vibrio parahaemolyticus
  source 1..50: mol_type = genomic DNA
gacagcacttatttctcaccaatgtcgatggttgatctatttgtgcagta

SEQ ID NO: 46340 - DNA, 40 bp, Vibrio parahaemolyticus; identical to SEQ ID NO: 14805
  source 1..40: mol_type = genomic DNA

SEQ ID NO: 46341 - protein, 655 aa, Vibrio parahaemolyticus
MKPTIITYLRYSSKQQADGLSEFRQSEINRKFVEKFCEEHGVDLNEVISLKDLGVSAYRGLNLTLGSFSQTIKKFKSGEIKKRFNEDGEINTYLIVESLDRITRTGPFKSTQIFTELLEYTNIVVLADGEKKIYSKKSIDSTHGMMDLFMALISLQRSHTESLMKEYRSRKSWEKKREDLLNYFTLPEDEREGLERPKNATAMCPFWLTAKKDGRGYDFIPENKKVMDFLIEKLLDGNGMTRAVRLLNDEIDNGNLKPKLKKANRKTRHFRAAAYSGLFNSVISTVKGDYLLTESYYPTEDDVEQGKYPEKHLGKRVRKEVAVLKNYYPALMTESQAAYIRKMMDERRTSGTKPNKSIKNLAQGILRCPYCNSTYIKSKDRRNVYLRCNLAREGLCNAKVIKHDVFEHNLLQFCKGLNINKIISNQACDQVLDSSLKELEQKMIPLKVRKSELEDDIEQIVKNISSIKIPSLLEKVQDDYLAKENELKKVVQEIDLIETSIMKLQQQIAMSDGDNSLQELIDLTLDESADDEIRQRFNVELKKVVKSMTVLYRDTEDNPFSYHMISIQFLDGVHRLIPVHEKMTDKIHNILPYQDAVKVDSVDFSETVILPTDYLEGLESGKYPQLDGMAKYYQENPAKYLKLKYQIDHSQEIYE

SEQ ID NO: 46342 - DNA, 50 bp, Vibrio parahaemolyticus; identical to SEQ ID NO: 39742
  source 1..50: mol_type = genomic DNA

SEQ ID NO: 46343 - DNA, 40 bp, Vibrio parahaemolyticus; identical to SEQ ID NO: 24003
  source 1..40: mol_type = genomic DNA

SEQ ID NO: 46344 - DNA, 50 bp, Vibrio parahaemolyticus
  source 1..50: mol_type = genomic DNA
gacagtacaattgtttcaccaatgtcgatggttgaactatttgtgcagta

SEQ ID NO: 46345 - DNA, 40 bp, Vibrio parahaemolyticus; identical to SEQ ID NO: 14805
  source 1..40: mol_type = genomic DNA

SEQ ID NO: 46346 - protein, 655 aa, Vibrio parahaemolyticus
MKPTIITYLRYSSKQQADGLSEFRQSEINRKFVEKFCEEHGVDLNEVISLKDLGVSAYRGLNLTLGSFSQTIKKFKSGEIKKRFNEDGEINTYLIVESLDRITRTGPFKSTQIFTELLEYTNIVVLADGEKKIYSKKSIDSTHGMMDLFMALISLQRSHTESLMKEYRSRKSWEKKREDLLNYFTLPEDEREGLERPKNATAMCPFWLTAKKDGRGYDFIPENKKVMDFLIEKLLDGNGMTRAVRLLNDEIDNGNLKPKLKKANRKTRHFRAAAYSGLFNSVISTVKGDYLLTESYYPTEDDVEQGKYPEKHLGKRVRKEVAVLKNYYPALMTESQAAYIRKMMDERRTSGTKPNKSIKNLAQGILRCPYCNSTYIKSKDRRNVYLRCNLAREGLCNAKVIKHDVFEHNLLQFCKGLNINKIISNQACDQVLDSSLKELEQKMIPLKVRKSELEDDIEQIVKNISSIKIPSLLEKVQDDYLAKENELKKVVQEIDLIETSIMKLQQQIAMSDGDNSLQELIDLTLDESADDEIRQRFNVELKKVVKSMTVLYRDTEDNPFGYHMISIQFLDGVHRLIPVHEKMTDKIHNILPYQDAVKVDSVDFSETVILPTDYLEGLESGKYPQLDGMAKYYQENPAKYLKLRYQIDHSQEIYE

SEQ ID NO: 46347 - DNA, 50 bp, Vibrio parahaemolyticus
  source 1..50: mol_type = genomic DNA
gacagtacttatttctcaccaatggagatggttgaactatttgtgcagta

SEQ ID NO: 46348 - DNA, 40 bp, Vibrio parahaemolyticus; identical to SEQ ID NO: 24003
  source 1..40: mol_type = genomic DNA

SEQ ID NO: 46349 - DNA, 50 bp, Vibrio parahaemolyticus
  source 1..50: mol_type = genomic DNA
gacagtacttatttctcaccaatgtcgatggttgaactatttgtgcagta

SEQ ID NO: 46350 - DNA, 40 bp, Vibrio parahaemolyticus; identical to SEQ ID NO: 14805
  source 1..40: mol_type = genomic DNA

SEQ ID NO: 46351 - protein, 655 aa, Vibrio parahaemolyticus; identical to SEQ ID NO: 24001

SEQ ID NO: 46352 - DNA, 50 bp, Vibrio parahaemolyticus; identical to SEQ ID NO: 39742
  source 1..50: mol_type = genomic DNA

SEQ ID NO: 46353 - DNA, 40 bp, Vibrio parahaemolyticus; identical to SEQ ID NO: 24003
  source 1..40: mol_type = genomic DNA

SEQ ID NO: 46354 - DNA, 50 bp, Vibrio parahaemolyticus; identical to SEQ ID NO: 46344
  source 1..50: mol_type = genomic DNA

SEQ ID NO: 46355 - DNA, 40 bp, Vibrio parahaemolyticus; identical to SEQ ID NO: 14805
  source 1..40: mol_type = genomic DNA

SEQ ID NO: 46356 - protein, 655 aa, Vibrio parahaemolyticus
MKPTIITYLRYSSKQQADGLSEFRQSEINRKFVEKFCAEHDVDLNEVISLKDLGVSAYRGLNLTLGSFSQTIKKFKSGEIKKRFNEDGEINTYLIVESLDRITRTGPFKSTQIFTELLEYTNIVVLADGEKKIYSKKSIDSTHGMMDLFMALISLQRSHTESLMKEYRSRKSWEKKREDLLNYFTLPEEGRVGLERPKNATAMCPFWLTAKKDGRGYDFIPENKKVMDFLIEKLLDGNGMTRAVRLLNDEIDAGHLKPKLKKANRQTRHFRAAAYSGLFNSEISTVKGDYLLTESYYPTEDDVEQGKYPEKHLGKRVRKEVAVLKNYYPALMTESQAAYIRKMMDERRSAGTKPNKSIKNLAQGILRCPLCNSTYIKSKDRRNIYLRCNLSREGLCKAKVIKHGVFEHNLLQFCKGLNINKIISNQASDQALDSSLKELEQKMIPLKVRKSELEDDIEQIVKNISSIKIPSLLEKVQDDYLAKENELKKVVQEIDLIETSIMKLQQQIAMSDGDNSLQELIDLTLDENADDEIRQRFNVELKKVVKSMTVLYRDTEDNPFGYHMISIQFLDGVHRLIPVHEKMTDKIHNILPYQDAVKVDSVDFSETVILPTDYLEGLESGKYPHLDGMAKYYQENPAKYLKLKYQIDQSQEIYE

SEQ ID NO: 46357 - DNA, 50 bp, Vibrio parahaemolyticus
  source 1..50: mol_type = genomic DNA
gacagtacttatttttcaccaatggagatggttgaactatttgtgcagta

SEQ ID NO: 46358 - DNA, 40 bp, Vibrio parahaemolyticus; identical to SEQ ID NO: 24003
  source 1..40: mol_type = genomic DNA

SEQ ID NO: 46359 - DNA, 50 bp, Vibrio parahaemolyticus
  source 1..50: mol_type = genomic DNA
gacagtacttatttttcaccaatgtcgatggttgaactatttgtgcagta

SEQ ID NO: 46360 - DNA, 40 bp, Vibrio parahaemolyticus; identical to SEQ ID NO: 14805
  source 1..40: mol_type = genomic DNA

SEQ ID NO: 46361 - protein, 446 aa, Vibrio parahaemolyticus
MREAYSYIRLSHTNQLSGHGRQRQLESTVRAAKEKGWQLMDETFEDLGVSGFKGINVETGAFSKFLTAVQQGAIREGSVLIVENVDRLSRAGVNRAVTLMLQLLEYGITIHTLSDNKTYEPSSENPLMDLMQWALTAQRGYEESLIKSKRIQAVKDAVREKARKEGTYYTTKSPSWIIISPDKKEATFHPTNAAIVKVVIDLYLNGYGTTRIANRMIELGHPTLSVKSKCWNASLVRSLLTQPALSGDIMFKRNGKRDPDILEDYYPALIDKDTHRKIKERLAKGGACKGRRSTTMRNPLAGLLRCKCGSGLGLSHNNARKYSNPRTALRCKKYYGECNGSGISAPRAITGILYGLRRLPMATLLTEEKKVDRVSVEVEIRSLTDSLEGIKQIMDNVITTIAAVGGNKALQEKLIELTAEQDAIEKKRDALRKQLEAITPYRSQRT

SEQ ID NO: 46362 - DNA, 50 bp, Vibrio parahaemolyticus
  source 1..50: mol_type = genomic DNA
agcggcgcttttaacagtcctatggagattgaacaatactaagagccgct

SEQ ID NO: 46363 - DNA, 40 bp, Vibrio parahaemolyticus; identical to SEQ ID NO: 24003
  source 1..40: mol_type = genomic DNA

SEQ ID NO: 46364 - DNA, 50 bp, Vibrio parahaemolyticus
  source 1..50: mol_type = genomic DNA
agcggcgcttttaacagtcctatgtcgattgaacaatactaagagccgct

SEQ ID NO: 46365 - DNA, 40 bp, Vibrio parahaemolyticus; identical to SEQ ID NO: 14805
  source 1..40: mol_type = genomic DNA

SEQ ID NO: 46366 - protein, 655 aa, Vibrio parahaemolyticus
MKPTIITYLRYSSKQQADGLSEFRQSEINRKFVEKFCAEHDVDLNEVISLKDLGVSAYRGLNLTLGSFSQTIKKFKSGEIKKRFNEDGEINTYLIVESLDRITRTGPFKSTQIFTELLEYTNIVVLADGEKKIYSKKSIDSTHGMMDLFMALISLQRSHTESLMKEFRSRKSWEKKREDLLNYFTLPEEDRVGLERPKNATAMCPFWLTAKKDGRGYDFIPENKKVMDFLIEKLLDGNGMTRAVRLLNDEIDAGNLKPKLKKANRKTRHFRAAAYSGLFNSEISTVKGDYLLTESYYPTEDDIEQGKYPEKHLGKRVRKEIAVLKNYYPALMTESQAAYIRKMMDERRSAGTKPNKSIKNLAQGILRCPLCNSTYIKSKDRKNVYLRCNLAREGLCNAKVIKHGVFEHNLLQFCKGLNINKIISNQSSDQVIDSSLKELEQKMMPLKVKKSQLEDDIEQIVKNISSIKIPSLLEKVQDDYLKKENELKKVVQEIDLIETSIMKLQHQIAMSDGDNSLQDLIDLTLDENADDEIRQRFNVELKKVVKSMTVLYRDTDDNPFGYHMISIQFLDGVHRLIPVHEKMTDKIHNILPYQDAVKVDSVDFSETVILPEDYVEGREKGKYPNLDGMAKYYQENPTKYLRLKHKMDQVHEIHA

SEQ ID NO: 46367 - DNA, 50 bp, Vibrio parahaemolyticus; identical to SEQ ID NO: 46337
  source 1..50: mol_type = genomic DNA

SEQ ID NO: 46368 - DNA, 40 bp, Vibrio parahaemolyticus; identical to SEQ ID NO: 24003
  source 1..40: mol_type = genomic DNA

SEQ ID NO: 46369 - DNA, 50 bp, Vibrio parahaemolyticus; identical to SEQ ID NO: 46339
  source 1..50: mol_type = genomic DNA

SEQ ID NO: 46370 - DNA, 40 bp, Vibrio parahaemolyticus; identical to SEQ ID NO: 14805
  source 1..40: mol_type = genomic DNA

SEQ ID NO: 46371 - protein, 655 aa, Vibrio parahaemolyticus
MKPTIITYLRYSSKQQADGLSEFRQSEINRKFVEKFCAEHDVDLNEVISLKDLGVSAYRGLNLTLGSFSQTIKKFKSGEIKKRFNEDGEINTYLIVESLDRITRTGPFKSTQIFTELLEYTNIVVLADGEKKIYSKKSIDSTHGMMDLFMALISLQRSHTESLMKEYRSRKSWEKKREDLLNYFTLPEEDRVGLERPKNATAMCPFWLTAKKDGRGYDFIPENKKVMDFLIEKLLDGNGMTRAVRLLNDEIDAGNLKPKLKKANRKTRHFRAAAYSGLFNSEISTVKGDYLLTESYYPTEDDIEQGKYPEKHLGKRVRKEIAVLKNYYPALMTESQAAYIRKMMDERRSAGTKPNKSIKNLAQGILRCPHCNSTYIKSKDRRNVYLRCNLAREGLCNAKVIKHGVFEHNLLQFCKGLNINKIISNQSSDQVIDSSLKELEQKMMPLKVKKSQLEDDIEQIVKNISSIKIPSLLEKVQDDYLKKESELKKVVQEIDLIETSIMKLQHQIAMSDGDSSLQDLIDLTLDENADDEIRQRFNVELKKVVKSMTVLYRDTDDNPFGYHMISIQFLDGVHRLIPVHEKMTDKIHNILPYQDAAKVDSVDFSETVILPEDYVEGREKGKYPNLDGMAKYYQENPTKYLRLKHKMDQVHEIHA

SEQ ID NO: 46372 - DNA, 50 bp, Vibrio parahaemolyticus; identical to SEQ ID NO: 14802
  source 1..50: mol_type = genomic DNA

SEQ ID NO: 46373 - DNA, 40 bp, Vibrio parahaemolyticus; identical to SEQ ID NO: 24003
  source 1..40: mol_type = genomic DNA

SEQ ID NO: 46374 - DNA, 50 bp, Vibrio parahaemolyticus; identical to SEQ ID NO: 14804
  source 1..50: mol_type = genomic DNA

SEQ ID NO: 46375 - DNA, 40 bp, Vibrio parahaemolyticus; identical to SEQ ID NO: 14805
  source 1..40: mol_type = genomic DNA

SEQ ID NO: 46376 - protein, 655 aa, Vibrio parahaemolyticus
MKPTIITYLRYSSKQQADGLSEFRQDEINRKFVEKFCAEYDVDLNEVISLKDLGVSAYRGLNLTLGSFSQTIKKFKSGEIKKRFNEDGEINTYLIVESLDRITRTGPFKSTQIFTELLEYTNIVVLADGEKKIYSKKSIDSTHGMMDLFMALISLQRSHTESLMKEYRSRKSWEKKREDLLNYFTLSEEERVGLERPKNATAMCPFWLTAKKDGRGYEFIPENKKVMDFLIEKLLDGNGMTRAVRLLNDEIDAGNLKPKLKKANRKTRHFRAAAYSGLFNSETSTVKGDYLLTESYYPTEDDIEQGKYPEKHLGKRVRKEVAVLKNYYPALMTESQAAYIRKMMDERRSSGTKPNKSIKNLAQGILRCPLCNSTYIKSKDRRNEYLRCNLAREGLCKAKVIKHGVFEHNLLQFCKGLNINKIISNQSSDQVLDSSLKELEQKMLPLKVKKSQLEDDIEQIVKNISSIKIPSLLEKVQDDYLKKENELKKVVQDLDLLETSIMKLQHQIAMSDGDSSLQDLIDLTLDENANGEIRQRFNVELKKVVKSMTVLYADTDDNPFGYHMISIQFLDGVHRLIPVHEKMTDKIHNILPYQDAVKVDSVDFSETVILPTDYLEGLESGKYPQLDGMAKYYQENPAKYLKLKHQIDQSQEIYE

SEQ ID NO: 46377 - DNA, 50 bp, Vibrio parahaemolyticus; identical to SEQ ID NO: 46322
  source 1..50: mol_type = genomic DNA

SEQ ID NO: 46378 - DNA, 40 bp, Vibrio parahaemolyticus; identical to SEQ ID NO: 24003
  source 1..40: mol_type = genomic DNA

SEQ ID NO: 46379 - DNA, 50 bp, Vibrio parahaemolyticus; identical to SEQ ID NO: 46324
  source 1..50: mol_type = genomic DNA

SEQ ID NO: 46380 - DNA, 40 bp, Vibrio parahaemolyticus; identical to SEQ ID NO: 14805
  source 1..40: mol_type = genomic DNA

SEQ ID NO: 46381 - protein, 655 aa, Vibrio parahaemolyticus
MKPTIITYLRYSSKQQADGLSEYRQSEINRKFVEKFCAEHEVDLNEVISLKDLGVSAYRGLNLTLGSFSQTIKKFKSGEIGKKFNEDGEINTYLIVESLDRITRTGPFKSTQIFTELLEYTNIVVLADGEKKIYSKKSIDSTHGMMDLFMALVSLQRSHSESSMKEFRSRKSWEKKREDLLGYFTLPEEERKGLERPKNATAMCPFWLRAKKDGRGYEFIPENKKVMDFLIEKLLDGNGMTRSVRLLNDEIDKGTLKPKLKKANRKTRHFRAAAYSGLFNSEVSTVKGDYLLTESYYPTDDDVEQGKYPEKHLGKRVRKEIAVLKNYYPALMTESQAAYIRSLMGERRSKGTKPNKAIKNLAQGILRCPHCNSTYIKAKDRKNVYLRCNLAREGLCKAKVIKHEVFEHNLLHFCKGLNINKIISNQTGDMALESSLKEFEHQMIPLQVQKSELEGDMAQLVKNISSIKIPSLLEKVQEDYLSKENELKRVIQEIDLVETSLMKLQQQMSMLDDDSSLQELIDLTLDENADDEVRQRFNIELNKVVKGMTVLYKATDDNPFDYHLISIQFLDGVHRLIPVHEKLTDKIHNILPYQDAVKVDSVDFSETVILPTDYLEGLESGKYPQLDGMAKYYQENPAKYLKLKHQIDQSQEIYQ

SEQ ID NO: 46382 - DNA, 50 bp, Vibrio parahaemolyticus; identical to SEQ ID NO: 46322
  source 1..50: mol_type = genomic DNA

SEQ ID NO: 46383 - DNA, 40 bp, Vibrio parahaemolyticus; identical to SEQ ID NO: 24003
  source 1..40: mol_type = genomic DNA

SEQ ID NO: 46384 - DNA, 50 bp, Vibrio parahaemolyticus; identical to SEQ ID NO: 46324
  source 1..50: mol_type = genomic DNA

SEQ ID NO: 46385 - DNA, 40 bp, Vibrio parahaemolyticus; identical to SEQ ID NO: 14805
  source 1..40: mol_type = genomic DNA

SEQ ID NO: 46386 - protein, 655 aa, Vibrio parahaemolyticus
MKPTIITYLRYSSKQQADGLSEFRQDEINRKFVEKFCAEYDVDLNEVISLKDLGVSAYRGLNLTLGSFSQTIKKFKSGEIKKRFNEDGEINTYLIVESLDRITRTGPFKSTQIFTELLEYTNIVVLADGEKKIYSKKSIDSTHGMMDLFMALISLQRSHTESLMKEYRSRKSWEKKREDLLNYFTLSEEERVGLERPKNATAMCPFWLTAKKDGRGYEFIPENKKVMDFLIEKLLDGNGMTRAVRLLNDEIDAGNLKPKLKKANRKTRHFRAAAYSGLFNSEISTVKGDYLLTESYYPTEDDIEQGKYPEKHLGKRVRKEVAVLKNYYPALMTESQAAYIRKMMDERRSSGTKPNKSIKNLAQGILRCPLCNSTYIKSKDRRNEYLRCNLAREGLCKAKVIKHGVFEHNLLQFCKGLNINKIISNQSSDQVLDSSLKELEQKMLPLKVKKSQLEDDIEQIVKNISSIKIPSLLEKVQDDYLKKENELKKVVQDLDLLETSIMKLQHQIAMSDGDSSLQDLIDLTLDENANGEIRQRFNVELKKVVKSMTVLYADTDDNPFGYHMISIQFLDGVHRLIPVHEKMTDKIHNILPYQDAVKVDSVDFSETVILPTDYLEGLESGKYPQLDGMAKYYQENPAKYLKLKHQIDQSQEIYE

SEQ ID NO: 46387 - DNA, 50 bp, Vibrio parahaemolyticus; identical to SEQ ID NO: 14802
  source 1..50: mol_type = genomic DNA

SEQ ID NO: 46388 - DNA, 40 bp, Vibrio parahaemolyticus; identical to SEQ ID NO: 24003
  source 1..40: mol_type = genomic DNA

SEQ ID NO: 46389 - DNA, 50 bp, Vibrio parahaemolyticus; identical to SEQ ID NO: 14804
  source 1..50: mol_type = genomic DNA

SEQ ID NO: 46390 - DNA, 40 bp, Vibrio parahaemolyticus; identical to SEQ ID NO: 14805
  source 1..40: mol_type = genomic DNA

SEQ ID NO: 46391 - protein, 655 aa, Vibrio parahaemolyticus
MKPTIITYLRYSSKQQADGLSEFRQSEINRKFVEKFCEEHGVDLNEVISLKDLGVSAYRGLNLTLGSFSQTIKKFKSGEIKKRFNEDGEINTYLIVESLDRITRTGPFKSTQIFTELLEYTNIVVLADGEKKIYSKKSIDSTHGMMDLFMALISLQRSHTESLMKEYRSRKSWEKKREDLLNYFTLPEDEREGLERPKNATAMCPFWLTAKKDGRGYDFIPENKKVMDFLIEKLLDGNGMTRAVRLLNDEIDNGNLKPKLKKANRKTRHFRAAAYSGLFNSVISTVKGDYLLTESYYPTEDDVEQGKYPEKHLGKRVRKEVAVLKNYYPALMTESQAAYIRKMMDERRTSGTKPNKSIKNLAQGILRCPYCNSTYIKSKDRRNVYLRCNLAREGLCNAKVIKHDVFEHNLLQFCKGLNINKIISNQASDQVLDSSLKELEQKMIPLKVRKSELEDDIEQIVKNISSIKIPSLLEKVQDDYLAKENELKKVVQEIDLIETSIMKLQQQIAMSDGDNSLQELIDLTLDENADDEIRQRFNVELKKVVKSMTVLYRDTEDNPFGYHMISIQFLDGVHRLIPVHEKMTDKIHNILPYQDAVKVDSVDFSETVILPTDYLEGLESGKYPHLDGMAKYYQENPAKYLKLKHQIDQSQEIYE

SEQ ID NO: 46392 - DNA, 50 bp, Vibrio parahaemolyticus; identical to SEQ ID NO: 46347
  source 1..50: mol_type = genomic DNA

SEQ ID NO: 46393 - DNA, 40 bp, Vibrio parahaemolyticus; identical to SEQ ID NO: 24003
  source 1..40: mol_type = genomic DNA

SEQ ID NO: 46394 - DNA, 50 bp, Vibrio parahaemolyticus; identical to SEQ ID NO: 46349
  source 1..50: mol_type = genomic DNA

SEQ ID NO: 46395 - DNA, 40 bp, Vibrio parahaemolyticus; identical to SEQ ID NO: 14805
  source 1..40: mol_type = genomic DNA

SEQ ID NO: 46396 - protein, 655 aa, Vibrio parahaemolyticus
MKPTIITYLRYSSKQQADGLSEFRQSEINRKFVEKFCAEHDVDLNEVISLKDLGVSAYRGLNLTLGSFSQTIKKFKSGEIKKRFNEDGEINTYLIVESLDRITRTGPFKSTQIFTELLEYTNIVVLADGEKKIYSKKSIDSTHGMMDLFMALISLQRSHTESLMKEFRSRKSWEKKREDLLNYFTLPEDEREGLERPKNATAMCPFWLTAKKDGRGYDFIPENKKVMDFLIEKLLDGNGMTRAVRLLNDEIDAGNLKPKLKKANRKTRHFRAAAYSGLFNSEISTVKGDYLLTESYYPTEDDIEQGKYPEKHLGKRVRKEIAVLKNYYPALMTESQAAYIRKMMDERRSAGTKPNKSIKNLAQGILRCPLCNSTYIKSKDRKNVYLRCNLAREGLCNAKVIKHGVFEHNLLQFCKGLNINKIISNQSSDQVIDSSLKELEQKMMPLKVKKSQLEDDIEQIVKNISSIKIPSLLEKVQDDYLKKENELKKVVQEIDLIETSIMKLQHQIAMSDGDNSLQELIDLTLAEHADDEIRQRFNVELKKVVKSMTVLYRDTDDNPFGYHMISIQFLDGVHRLIPVHEKMTDKIHNILPYQDAVKVDSVDFSENVILPEDYVEGREKGKYPNLDGMAKYYQENPTKYLRLKHKMDQVHEIHA

SEQ ID NO: 46397 - DNA, 50 bp, Vibrio parahaemolyticus; identical to SEQ ID NO: 46337
  source 1..50: mol_type = genomic DNA

SEQ ID NO: 46398 - DNA, 40 bp, Vibrio parahaemolyticus; identical to SEQ ID NO: 24003
  source 1..40: mol_type = genomic DNA

SEQ ID NO: 46399 - DNA, 50 bp, Vibrio parahaemolyticus; identical to SEQ ID NO: 46339
  source 1..50: mol_type = genomic DNA

SEQ ID NO: 46400 - DNA, 40 bp, Vibrio parahaemolyticus; identical to SEQ ID NO: 14805
  source 1..40: mol_type = genomic DNA

SEQ ID NO: 46401 - protein, 655 aa, Vibrio parahaemolyticus; identical to SEQ ID NO: 12176

SEQ ID NO: 46402 - DNA, 50 bp, Vibrio parahaemolyticus; identical to SEQ ID NO: 14802
  source 1..50: mol_type = genomic DNA

SEQ ID NO: 46403 - DNA, 40 bp, Vibrio parahaemolyticus; identical to SEQ ID NO: 24003
  source 1..40: mol_type = genomic DNA

SEQ ID NO: 46404 - DNA, 50 bp, Vibrio parahaemolyticus; identical to SEQ ID NO: 14804
  source 1..50: mol_type = genomic DNA

SEQ ID NO: 46405 - DNA, 40 bp, Vibrio parahaemolyticus; identical to SEQ ID NO: 14805
  source 1..40: mol_type = genomic DNA

SEQ ID NO: 46406 - protein, 655 aa, Vibrio parahaemolyticus
MKPTIITYLRYSSKQQADGLSEFRQDEINRKFVEKFCAEYDVDLNEVISLKDLGVSAYRGLNLTLGSFSQTIKKFKSGEIKKRFNEDGEINTYLIVESLDRITRTGPFKSTQIFTELLEYTNIVVLADGEKKIYSKKSIDSTHGMMDLFMALISLQRSHTESLMKEYRSRKSWEKKREDLLNYFTLSEEERVGLERPKNATAMCPFWLTAKKDGRGYEFIPENKKVMDFLIEKLLDGNGMTRAVRLLNDEIDAGNLKPKLKKANRKTRHFRAAAYSGLFNSEISTVKGDYLLTESYYPTEDDIEQGKYPEKHLGKRVRKEVAVLKNYYPALMTESQAAYIRKMMAERRSSGTKPNKSIKNLAQGILRCPLCNSTYIKSKDRRNEYLRCNLAREGLCKAKVIKHGVFEHNLLQFCKGLNINKIISNQSSDQVLDSSLKELEQKMLPLKVKKSQLEDDIEQIVKNISSIKIPSLLEKVQDDYLKKENELKKVVQDLDLLETSIMKLQHQIAMSDGDSSLQDLIDLTLDENANGEIRQRFNVELKKVVKSMTVLYADTDDNPFGYHMISIQFLDGVHRLIPVHEKMTDKIHNILPYQDAVKVDSVDFSETVILPTDYLEGLESGKYPQLDGMAKYYQENPAKYLKLKHQIDQSQEIYE

SEQ ID NO: 46407 - DNA, 50 bp, Vibrio parahaemolyticus; identical to SEQ ID NO: 46322
  source 1..50: mol_type = genomic DNA

SEQ ID NO: 46408 - DNA, 40 bp, Vibrio parahaemolyticus; identical to SEQ ID NO: 24003
  source 1..40: mol_type = genomic DNA

SEQ ID NO: 46409 - DNA, 50 bp, Vibrio parahaemolyticus; identical to SEQ ID NO: 46324
  source 1..50: mol_type = genomic DNA

SEQ ID NO: 46410 - DNA, 40 bp, Vibrio parahaemolyticus; identical to SEQ ID NO: 14805
  source 1..40: mol_type = genomic DNA

SEQ ID NO: 46411 - protein, 655 aa, Vibrio parahaemolyticus
MKPTIITYLRYSSKQQADGLSEFRQSEINRKFVEKFCAEHDVDLNEVISLKDLGVSAYRGLNLTLGSFSQTIKKFKSGEIKKRFNGDGEINTYLIVESLDRITRTGPFKSTQIFTELLEYTNIVVLADGEKKIYSKKCIDSTHGMMDLFMALISLQRSHTESLMKEFRSRKSWEKKREDLLNYFTLPEDEREGLERPKNATAMCPFWLTAKKDGRGYDFIPENKKVMDFLIEKLLDGNGMTRAVRLLNDEIDAGNLKPKLKKANRKTRHFRAAAYSGLFNSEISTVKGDYLLTESYYPTEDDVEQGKYPEKHLGKRVRKEVAVLKNYYPALMTESQAAYIRKMMDERRSAGTKPNKSIKNLAQGILRCPNCNSTYIKSKDRRNVYLRCNLAREGLCNAKVIKHGVFEHNLLQFCKGLNINKIISNQSSDQVIDSSLKELEQKMMPLKVKKSQLEDDIEQIVKNISSIKIPSLLEKVQDDYLKKENELKKVVQEIDLIETSIMKLQHQIAMSDGDNSLQELIDLTLDEHADDEIRQRFNVELKKVVKSMTVLYRDTDDNPFGYHMISIQFLDGVHRLIPVHEKMTDKIHNILPYQDAVKVDSIDFSETVILPEDYVEGREKGKYPNLDGMAKYYQENPTKYLRLKHKMDQVHEIHA

SEQ ID NO: 46412 - DNA, 50 bp, Vibrio parahaemolyticus; identical to SEQ ID NO: 14802
  source 1..50: mol_type = genomic DNA

SEQ ID NO: 46413 - DNA, 40 bp, Vibrio parahaemolyticus; identical to SEQ ID NO: 24003
  source 1..40: mol_type = genomic DNA

SEQ ID NO: 46414 - DNA, 50 bp, Vibrio parahaemolyticus; identical to SEQ ID NO: 14804
  source 1..50: mol_type = genomic DNA

SEQ ID NO: 46415 - DNA, 40 bp, Vibrio parahaemolyticus; identical to SEQ ID NO: 14805
  source 1..40: mol_type = genomic DNA

SEQ ID NO: 46416 - protein, 655 aa, Vibrio parahaemolyticus; identical to SEQ ID NO: 24001

SEQ ID NO: 46417 - DNA, 50 bp, Vibrio parahaemolyticus; identical to SEQ ID NO: 46347
  source 1..50: mol_type = genomic DNA

SEQ ID NO: 46418 - DNA, 40 bp, Vibrio parahaemolyticus; identical to SEQ ID NO: 24003
  source 1..40: mol_type = genomic DNA

SEQ ID NO: 46419 - DNA, 50 bp, Vibrio parahaemolyticus; identical to SEQ ID NO: 46349
  source 1..50: mol_type = genomic DNA

SEQ ID NO: 46420 - DNA, 40 bp, Vibrio parahaemolyticus; identical to SEQ ID NO: 14805
  source 1..40: mol_type = genomic DNA

SEQ ID NO: 46421 - protein, 458 aa, Staphylococcus epidermidis
MNYERSYLRSCQVSTLEQKEHGYSIEEQERKLKSFCEINDWSVSDVFIDAGFSGAKRDRPELQRMMKDIKRFDLVLVYKLDRLTRNVRDLLDLLEVFEQNDVAFRSATEVYDTSTAMGRLFVTLVGAMAEWERETIRERVMMGKRAAIKQGMILTPPPFYYDRVDNTYVPNDYKKVVLWAYDEVLKGVSSKGIARKLNDSDIPPPNGKRWEDRTITRALRSPITRGHYTWGDVFIENSHEPIISEEMYQQIKERLEERINTKIVSHVSVFRGKFICPRCGGTLTLNTTTRKRKKGYVTYKTYYCNTCKTIKQSFGFSENEALRVFRDYLSKLDLEEYEVKTKQKDDVVTIDIDKIMEQRKRYHKLYAKGLMQEEELFELIKETDETIAEYEKQKELVPSKTLDVDKIKNFKNALLESWEIFSLEDKADFIKMAIKSIDIDYVKLKNRHSIKINDIEFY

SEQ ID NO: 46422 - DNA, 50 bp, Staphylococcus epidermidis
  source 1..50: mol_type = genomic DNA
gtacggaagtatagacacttgattaatatttaatgtgtatacttccgtat

SEQ ID NO: 46423 - DNA, 40 bp, Staphylococcus epidermidis
  source 1..40: mol_type = genomic DNA
aataagtgtcgaaccaagtaatattgaggccgtaccaaca

SEQ ID NO: 46424 - DNA, 50 bp, Staphylococcus epidermidis
  source 1..50: mol_type = genomic DNA
gtacggaagtatagacacttgattgctatttaatgtgtatacttccgtat

SEQ ID NO: 46425 - DNA, 40 bp, Staphylococcus epidermidis
  source 1..40: mol_type = genomic DNA
aattagtgtctattcaattgcttttaagcaagtaccaaca

SEQ ID NO: 46426 - protein, 554 aa, Sphingomonas paucimobilis
MTNAALAPSETGAVQPALRAALYLRVSSPRSAESDLSIPDQRRQTSSYCHSNGWEVAAEFVEPGVSGTDDRRPAFQEMIDAALERPSPFDVIVVHSFSRFFRDQFQFEFYLRKLAKNGVQLVSITQILGDDPMSEMMRKIMTLFDEYQSKENGKHTLRAMNENARQGFWNGARPPIGYRAVAAEQRGAKIKKKLEIDPLHAETVRRIFRLALEGADGRGPIGVMAIACWLNENNIRTRYGGRWGKGMVHQVLTRTTYIGEHRFNTYDVKKGRAKPETEHAIMEVPPIITVAEFEAVQRSLKARSPKMMPPRAVGGSTLLTGICFCACCGGAMTLRTGTSRSGQEYRYYTCATKATKGKTGCPGVSLPMDRLNEAVIEHLEKRLLDPARLEVLMDQLIARRDEWVTERRQHVAEMERRATEVETKLSRLYEAIENGLVDMGDPSLKARIAELTTIRDQARGDAERAVAHIERISPEITVESLHAFALVAKRKLRHDDGSYARNHIRAVAQRVEVHSKTDVRICGTRTELLRTLTAVSGVEAAVLGTRAFGPKWCP

SEQ ID NO: 46427 - DNA, 50 bp, Sphingomonas paucimobilis; identical to SEQ ID NO: 38742
  source 1..50: mol_type = genomic DNA

SEQ ID NO: 46428 - DNA, 40 bp, Sphingomonas paucimobilis
  source 1..40: mol_type = genomic DNA
ttaattttacaagtgtggtgcccctggccggactcgaacc

SEQ ID NO: 46429 - DNA, 50 bp, Sphingomonas paucimobilis
  source 1..50: mol_type = genomic DNA
ctcgggcttttggaccgaaatggtaacccaaggcggacgaaagcgatgaa

SEQ ID NO: 46430 - DNA, 40 bp, Sphingomonas paucimobilis
  source 1..40: mol_type = genomic DNA
cttattttacagatgaggaaaccgaggctggactcgatcc

SEQ ID NO: 46431 - protein, 449 aa, Enterococcus faecalis
MLKRAALYIRVSTDQQAKHGDSLDAQIATLKDYVSTQDNLTIIDTYIDDGISGQKLYRDEFQRLLEDIKKNRIDIILFTKLDRWFRNLRHYLNIQEILDNSGVTWLAVSQPFFNTDTAYGRSFVNQSMSFAELEAQMASERIKAVFENKIRKGEVVTGSVPFGYKICDKKLIPNENAPIAKDIFKHYSIHNSIRLTVEYLFNEYDITRSSRTIKHMLRNRKYIGEVSGNKNYCPPIVDKETFEKVQNLLDKNISSIAKRTYIFSGLVVCSCCGKKMTGRYRKRKYIKKDGTVMYYTKKVYRCNGNTYKRNKCPNKINIPEEILEEYLLNNIKADAENFEAKQKKIAVSAPEKNNNSKILKKIERLKKAYLNEVISLDEYKKDRKELEQMIVQVKPKETIVFKSNWFNKNIESTYRDFDEEEKRFVWRSVLKNLLVDPHGKITINFLTKN

SEQ ID NO: 46432 - DNA, 50 bp, Enterococcus faecalis
  source 1..50: mol_type = genomic DNA
ttagccacttttaggaactgtcctactggataattccatttaacgcaaac

SEQ ID NO: 46433 - DNA, 40 bp, Enterococcus faecalis
  source 1..40: mol_type = genomic DNA
tttctactgcatatgccgtactagtaacacttggcgctat

SEQ ID NO: 46434 - DNA, 50 bp, Enterococcus faecalis
  source 1..50: mol_type = genomic DNA
ttagccacttttaggaactgtcctgatggataattccatttaacgcaaac

SEQ ID NO: 46435 - DNA, 40 bp, Enterococcus faecalis
  source 1..40: mol_type = genomic DNA
tttctactgcacatgcccagaaagtggaatttggcccttt

SEQ ID NO: 46436 - protein, 507 aa, Flavobacterium columnare
MKKVVMYRRVSTDDQKEFGYSLQDQKERITSYCERNNWEIIADYQDDFSAKTFNRPSWELLLKDVSKKQIRPEIIVVTRADRFSRSASESLQMLLILKKSNIKVFSLNENCFLDLDNPQTFLQNFFSLGMAEYDNITRADNTKRGMRQAAREGRTMGKAPKGYINNKIYKTVEIDPVDGPLIKEGFDLLKLGIYTMEDIRRKLVKKGLKNCSKQTFLNIVRNKYYYGIVKVPESRDEASMEVVGLHSPLISKEDYDIIQSIYFGKSKKSNTINLTNEELPLRGFLLCKLCGSTLTGSGSKSRNGNRYYYYHCQNGCKERFRADEANSLFINFLQNFQIKESVIRLYRQIVSDLYSENDEARIKELNAVNDDINKCKLRLSSLQDKYLDNMFAVEDYKSIKSRLEDELNLLNNKKAELNIDQETFKEYLDFCIDFLKNLGKEFGNSSVEIKRKIIGSIINGKIIFDNKKYRTASINSLISLITLNINELGEIKNGQKTISSNLSTYAP

SEQ ID NO: 46437 - DNA, 50 bp, Flavobacterium columnare
  source 1..50: mol_type = genomic DNA
tttctagtaatttgtccacttatgctccccttagtaatagtttttcgaac

SEQ ID NO: 46438 - DNA, 40 bp, Flavobacterium columnare
  source 1..40: mol_type = genomic DNA
aacgtaaaacctttttttgctccccctcttgggctcgaac

SEQ ID NO: 46439 - DNA, 50 bp, Flavobacterium columnare
  source 1..50: mol_type = genomic DNA
tttctagtaatttgtccacttatgttccccttagtaatagtttttcgaac

SEQ ID NO: 46440 - DNA, 40 bp, Flavobacterium columnare
  source 1..40: mol_type = genomic DNA
accttaaaacctttttatgtttctctacttgtcctagaac

SEQ ID NO: 46441 - protein, 600 aa, Rhodococcus pyridinivorans
MTAAPSLGIKPLAVQYLRVSTKDQAERGGETEGFSIPAQRDACLRKAQSLDAVTVAEFVDAGESARSANRPELKKMLDYVKAHKIQYVIVHKIDRLARNRADDVEINLQLTAVGAQLVSCSENIDETPSGMLLHGIMSSIAEFYSRNLATESRKGMLQKAKGGGTPGMAPFGYLNSRIRTDDGREVKTVVIDSARSHWVTWMFERYATGEWTAGMIKDEFDKRGVTTVARPNRPSRPIAHSHIASMLQNRYYTGAVRFEGVEYPGSHPALVSEALFAEVQRVREARHQSREKPRVHNHYLKGSVYCGQCGEPLTFEKTRNRVGTTYDYFYCLGRQRLKNGCTFRAIQAPHLEDLVTAHWQTVTLVEQQTTAIRDLILDHMRVLLPDAARTRQTASERLQQLERDNRKLLDAFYADAIGTPELRTEQARIATERAQAEARLGEFDLQEAHLTTKLEACLTLLGNAHEHYVLADAKSRRDLNQSIFTHLYVHDDDIVASDLTPAYQLLMNDDLAARLVAERKREQKSVVRTSDLIDVAKVTGGGARGDESPPRDLPPRAHRIAPHARIPGFLHVERPKGAMPWEKERTTAPEDRGSNIISLV

SEQ ID NO: 46442 - DNA, 50 bp, Rhodococcus pyridinivorans
  source 1..50: mol_type = genomic DNA
gaccgtggttctaacattatctctttggtagtcctcgccagcgctaagac

SEQ ID NO: 46443 - DNA, 40 bp, Rhodococcus pyridinivorans
  source 1..40: mol_type = genomic DNA
gagacgaccggccttcgtggtggtagcggggacaggattt

SEQ ID NO: 46444 - DNA, 50 bp, Rhodococcus pyridinivorans
  source 1..50: mol_type = genomic DNA
gaccgtggttctaacattatctcttgggtagtcctcgccagcgctaagac

SEQ ID NO: 46445 - DNA, 40 bp, Rhodococcus pyridinivorans
  source 1..40: mol_type = genomic DNA
gtaaagtctggccttcttgtgggaagtggggataggattg

SEQ ID NO: 46446 - protein, 433 aa, Hydrogeniiclostidium mannosilyticum
MQGNQTEKYTLLYGRLSNEDKREGTSLSIQHQEEMLRDYAAKQGFSNVLFLYDDGISGTKTNRPGFQRVLAMIREGQAATLIVTDLTRLYRNQSEANNLLEIVFPALEVRFIAITNNYDSATNTESDEDLAMFSNLFNEWYPRQTSRKINAVIQHKAEKGVRIASIPPYGYQKDPADRFKIIPDPEAAEQVRYIFNLCASGMGPEQIAKRLEQERILVPTEYAYRKFGRNHSSRNPDFPYRWSGSSVADILENPDYIGIQTSCKTHKPSYKSDLVVEVPEEKRYKVENAHEPIIDRELWDIVQRVRENKRRPTKLGEMDMLAGMVQCADCGSTHYLCRCGSWDESQYSYLCGRYHRHKETCTPHTVKALYLRETVLKAIQRLRCGAKRPGSLYLPSDGEEIRAVEKGAGGKAEGAGTGEKPASRAGQPDSRHL

SEQ ID NO: 46447 - DNA, 50 bp, Hydrogeniiclostidium mannosilyticum
  source 1..50: mol_type = genomic DNA
ttacttccttatcttgccggggccatctctccggcccgaaaaggaagtat

SEQ ID NO: 46448 - DNA, 40 bp, Hydrogeniiclostidium mannosilyticum
  source 1..40: mol_type = genomic DNA
acttaaaaagccggggaatattccccggcttttttatatt

SEQ ID NO: 46449 - DNA, 50 bp, Hydrogeniiclostidium mannosilyticum
  source 1..50: mol_type = genomic DNA
ttacttccttatcttgccggggccaactctccggcccgaaaaggaagtat

SEQ ID NO: 46450 - DNA, 40 bp, Hydrogeniiclostidium mannosilyticum
  source 1..40: mol_type = genomic DNA
aattagaaagtctgggtttaaaccctggcttctttttatt

SEQ ID NO: 46451 - protein, 493 aa, Flavonifractor plautii
MKAVIYARYSSDSQREESIEGQLRECTAFAEKNGITVLRHYIDRAYSAKTDNRPEFQNMIKDSGKRLFDIVIVWKLDRFARNRYDSARYKATLKKNGVKVVSATEIISEGAEGIILESVLEGYAEYYSADLSEKVIRGMTDNALKCKFNGGMMPIGYVIDAEQHFQIDPLTAPFVLEAFKRYDGGATMKEVRDALNAKGVTNQRGGELTFNSIQHMLNNRRYMGEFSYRDVVIPDGIPAIVPQDLFDRVQEKLAKNKKAPARHKAEDDYLLTTKLFCGYCGAYLCGESGTSRTGKVHHYYKCVSVKKKRTECHKKPVRKEWIEDLVVGETMKMVMDDKAIEAIVSMLMDLQDRDNVNVPLYEQQIREADTAISNLLNAIQQGILTRSTKKRLEELENRRDELENRLACEKLAKPKVSAEFMTFWLHRFRKLDVRQQSHRKMLIDTFINAIFLYDDKMVITFNYKEGTKTITFAELQEAISNKNGSDLDCLAAP

SEQ ID NO: 46452 - DNA, 50 bp, Flavonifractor plautii; identical to SEQ ID NO: 9647
  source 1..50: mol_type = genomic DNA

SEQ ID NO: 46453 - DNA, 40 bp, Flavonifractor plautii
  source 1..40: mol_type = genomic DNA
ggttcgactcccgccgcccgcaccatcggagtatcctccg

SEQ ID NO: 46454 - DNA, 50 bp, Flavonifractor plautii
  source 1..50: mol_type = genomic DNA
ggttcggatttggattgccttgctcaaccaaacaaatataatccgaacca

SEQ ID NO: 46455 - DNA, 40 bp, Flavonifractor plautii
  source 1..40: mol_type = genomic DNA
ggctcgactcccccagccccaggaatctgagtgtcctctt

SEQ ID NO: 46456 - protein, 494 aa, Flavonifractor plautii
MKAVIYARYSSDNQREESIEGQIRECTAFAEKNGITILRHYIDRAFSAKTDNRPEFQNMIKDSGKRLFDMIIVWKLDRFARNRYDSARYKATLKKNGVKVVSATEVISDGAEGIILESVLEGYAEYYSADLSEKVVRGMTENALKSKYNGGTRPIGYLIDSDQCFQLDPLTAPFVREAFQRYDEGATMTQIRDWLNEQGVKNTRGQKMTYNSVQHLLNNRRYIGEYTYRDIVVPDGIPAIVPQDLFDRVQEKLAKNKKAPARHKAEDDYLLTTKLFCGYCGAYLCGESGTSHTGNVHHYYKCVSVKKKRTECHKKSVRKEWIEDLVVSETMRMVMDDTAIEAIVSMLMDLQDRENVNLPLYEQQLREADTAIQNLLNAIQQGILTKSTKSRLEELEATKEKLETKIACEKLAKPKVSAEFMTFWLQRFRKLDVRQKSHRKMLIDTFINAIFLYDDKMVVTFNYKEGTTTITFDDLKTALADQKTGSDLDCSTAP

SEQ ID NO: 46457 - DNA, 50 bp, Flavonifractor plautii
  source 1..50: mol_type = genomic DNA
ggttcggatttggattgctcaactgcaccataccaatataatccgaactt

SEQ ID NO: 46458 - DNA, 40 bp, Flavonifractor plautii; identical to SEQ ID NO: 46453
  source 1..40: mol_type = genomic DNA

SEQ ID NO: 46459 - DNA, 50 bp, Flavonifractor plautii
  source 1..50: mol_type = genomic DNA
ggttcggatttggattgctcaactcaaccataccaatataatccgaactt

SEQ ID NO: 46460 - DNA, 40 bp, Flavonifractor plautii; identical to SEQ ID NO: 46455
  source 1..40: mol_type = genomic DNA

SEQ ID NO: 46461 - protein, 553 aa, Comamonas testosteroni
MVSVMGQSAKNGLVYSYLRFSDPKQSAGGSTDRQLAYAAKWAAEHGLDLDTRLSLKDEGLSAYHQQHIKSGALGVFLRAIEDGRVPNGSVLIVEGLDRLSRAEPLQAQAQLGQIVNAGITVVTASDGKTYSRQRLKENPMDLVYSLLVMIRAHEESDTKSKRVKASVRRLCEKWIDGSYRGPVEQGHDPFWLERQSELSWAVTPDASRAVLRTIELYKQGFGGKRIVQALDAESLRIYTKGSGNKTLQVYRITKMPQLAGHKPISVDGEDYLLRDYYPALLSETEWEDLQRVVSSSGRRRIKGDLPHIITGIGITYCGYCGRPMAGQNLASKKRLPDGRIRDGYRRLLCASAAAYSTGCDVPGSTSVAPVEKAIMSYCSDMMNLQALFSQGATNSPKQEMLQDRQEVETIKNQLEKLTDAMLASTNDGIPLVFARRARQLEAELEAAEKKLSASERELAHYARIDISGVDEKWRALAAGVEAQDIDTRLQARQLIADTFDRIVIYHHGIRPDHTPKSRDYDIDLMLVGKGGSSRWLRIDKAGNWVDGEQFALD

SEQ ID NO: 46462 - DNA, 50 bp, Comamonas testosteroni
  source 1..50: mol_type = genomic DNA
tgtattcattgagtatcactcgggcagccgagtgataccatacctatacg

SEQ ID NO: 46463 - DNA, 40 bp, Comamonas testosteroni
  source 1..40: mol_type = genomic DNA
atcagtcaaggccttggggcagcccagcgaaacaaagccc

SEQ ID NO: 46464 - DNA, 50 bp, Comamonas testosteroni
  source 1..50: mol_type = genomic DNA
tgtattcattgagtatcactcgggtggccgagtgataccatacctatacg

SEQ ID NO: 46465 - DNA, 40 bp, Comamonas testosteroni
  source 1..40: mol_type = genomic DNA
aaacctcaaggccttgtggtggcccagctcagcctagccc

SEQ ID NO: 46466 - protein, 550 aa, Comamonas thiooxydans
MGDSAKNGLVYSYLRFSDPKQSAGGSTDRQLAYAAKWAAEHDLKLDTHLSLRDEGLSAYHQQHIKSGALGVFLRAVEEGRVPFGSVLIVEGLDRLSRAEPIQAQAQLAQIVNAGITVVTASDGKTYSRQRLKDNPMDLVYSLLVMIRAHEESDTKSKRVKASVRRLCEKWIDGSYRGRVEQGHDPAWLTRNDADGWDFKPETVKAILRTIEMYKQGLGGKRIIEKLNAEGLRIYPTSKENQTLQVYRVTKMPQLAGHKPISVDGDEYLLKGYYPPLLSELEWEDLQRVVKSSGRRRVKGDLPHVITGIGITFCGYCGHPMAGQHLASKKRLSDGRIRDGYRRLLCSAAATFSAVCPVRGSTSVAPIERAIMSYCSDMMNLQGLFEADTSSESRKELLKAQKNVEAIKAQLDKLTDAMLASADEGIPLTFARRARQLEEDLAVAEKSLTAQERDIAMLARRDISGADEKWRALAAGVEAQDIETRLQARQLVADTFSRISVYHHGLRPNHTPKSRDYYIDLMLVAKGGSSRWLRIDRDGNWVHGENYEAAD

SEQ ID NO: 46467 - DNA, 50 bp, Comamonas thiooxydans
  source 1..50: mol_type = genomic DNA
gatatacattgagcatcactcgggcacccgagtgataccatacctatacg

SEQ ID NO: 46468 - DNA, 40 bp, Comamonas thiooxydans; identical to SEQ ID NO: 46463
  source 1..40: mol_type = genomic DNA

SEQ ID NO: 46469 - DNA, 50 bp, Comamonas thiooxydans
  source 1..50: mol_type = genomic DNA
gatatacattgagcatcactcgggtgcccgagtgataccatacctatacg

SEQ ID NO: 46470 - DNA, 40 bp, Comamonas thiooxydans; identical to SEQ ID NO: 46465
  source 1..40: mol_type = genomic DNA

SEQ ID NO: 46471 - protein, 550 aa, Comamonas thiooxydans
MGDSAKNGLVYSYLRFSDPKQSAGGSTDRQLAYAAKWAAEHDLKLDTHLSLRDEGLSAYHQQHIKSGALGVFLRAVEEGRVPFGSVLIVEGLDRLSRAEPIQAQAQLAQIVNAGITVVTASDGKTYSRQRLKDNPMDLVYSLLVMIRAHEESDTKSKRVKASVRRLCEKWIDGSYRGRVEQGHDPAWLTRNDADGWDFKPDTVKAIQRTIEMYKQGLGGKRIIEKLNAEGLRIYPTSKENQTLQVYRVTKMPQLAGHKPISVDGDEYLLKGYYPPLLSELEWEDLQRVVKSSGRRRVKGDLPHVITGIGITFCGYCGHPMAGQHLASKKRLPDGRIRDGYRRLLCSAAATFSEVCPVRGSTSVAPIERAIMSYCSDMMNLQGLFEADTSSESRKELLKAQKNVEAIKAQLDKLTDAMLASADEGIPLTFARRARQLEEDLAIAEKTLAAQERDIAMLARRDISGADEKWRALAAGVEAQDIEIRLQARQLVADTFSRISVYHHGLRPNHTPKSRDYYIDLMLVAKGGSSRWLRIDRDGNWVHGENYEAAD

SEQ ID NO: 46472 - DNA, 50 bp, Comamonas thiooxydans
  source 1..50: mol_type = genomic DNA
gctatacattaagtatcattcgggcacccgagtgataccatacctatacg

SEQ ID NO: 46473 - DNA, 40 bp, Comamonas thiooxydans; identical to SEQ ID NO: 46463
  source 1..40: mol_type = genomic DNA

SEQ ID NO: 46474 - DNA, 50 bp, Comamonas thiooxydans
  source 1..50: mol_type = genomic DNA
gctatacattaagtatcattcgggtgcccgagtgataccatacctatacg

SEQ ID NO: 46475 - DNA, 40 bp, Comamonas thiooxydans; identical to SEQ ID NO: 46465
  source 1..40: mol_type = genomic DNA

SEQ ID NO: 46476 - protein, 485 aa, Flavonifractor plautii; identical to SEQ ID NO: 45041

SEQ ID NO: 46477 - DNA, 50 bp, Flavonifractor plautii
  source 1..50: mol_type = genomic DNA
ggttcggatttggaagcaagcgctccaccaatttgatcccaggtcgaacc

SEQ ID NO: 46478 - DNA, 40 bp, Flavonifractor plautii
  source 1..40: mol_type = genomic DNA
ggttcgactccccccgcctccaccagaaaagaaagacacg

SEQ ID NO: 46479 - DNA, 50 bp, Flavonifractor plautii
  source 1..50: mol_type = genomic DNA
ggttcggatttggaagcaagcgcttaaccaatttgatcccaggtcgaacc

SEQ ID NO: 46480 - DNA, 40 bp, Flavonifractor plautii
  source 1..40: mol_type = genomic DNA
agtttgccaccccctgtcttaaacccaaaagaaagacagg

SEQ ID NO: 46481 - protein, 479 aa, Mycobacterium avium
MAKMKSAGQRAGVRSAAIYARISADVEGTGLGVARQLEDCRKLSADRGWPVGDEYVDNDVSAFSGKPRRQYARMLADLASGARDAVIVYNLDRLHRRPVELEEFVALCESVGVRDVATVTADIDLGNDDGLFMARIFAAFAAKESGRKSARIRRKMLQNAEQGLPHGSVRPFGYEDDKITLRTSEAAVVREMVDRYLAGQSLLSLTVWLNDSGVSPAVAKSWQTSAVRQILCSGRIAGLREHRGEVIGPAKWPAIITPAERDRILARIAARSVTKTRAARTYVLSGMLRCGRCGNRLYSQARHSNPDHRVRRYVCLKGPDHGGCGRLTVVAEPVEALLTDAVLTRLDSRDLAKVLAGKASPNHDVAALAAAVEADQTRLDELAGLYADGAISAREWIAARDPITSRIQQARRDIAEATDTSEVYELAGTGGALRGQWPDLDVERQRSIVKSILDHAVIAPGTPGSRSLDINRVQPHWRI

SEQ ID NO: 46482 - DNA, 50 bp, Mycobacterium avium
  source 1..50: mol_type = genomic DNA
ggggcatattagcgacttgtcagcaaggttagatgctgctaatatacccc

SEQ ID NO: 46483 - DNA, 40 bp, Mycobacterium avium
  source 1..40: mol_type = genomic DNA
cgggtggacggtgctggagaacctcaaatgcctgtgccga

SEQ ID NO: 46484 - DNA, 50 bp, Mycobacterium avium
  source 1..50: mol_type = genomic DNA
ggggcatattagcgacttgtcagcggggttagatgctgctaatatacccc

SEQ ID NO: 46485 - DNA, 40 bp, Mycobacterium avium
  source 1..40: mol_type = genomic DNA
agggtggatagagcctgtgggcctcagatggctgtgccca

SEQ ID NO: 46486 - protein, 535 aa, Sphingomonas koreensis; identical to SEQ ID NO: 37136

SEQ ID NO: 46487 - DNA, 50 bp, Sphingomonas koreensis; identical to SEQ ID NO: 37137
  source 1..50: mol_type = genomic DNA

SEQ ID NO: 46488 - DNA, 40 bp, Sphingomonas koreensis
  source 1..40: mol_type = genomic DNA
ttcaaagggcgccggtggcggagcgggagggattcgaacc

SEQ ID NO: 46489 - DNA, 50 bp, Sphingomonas koreensis
  source 1..50: mol_type = genomic DNA
tgcccaccgttgttccgaagtggcaggccacgcccgatgatgatgggcat

SEQ ID NO: 46490 - DNA, 40 bp, Sphingomonas koreensis
  source 1..40: mol_type = genomic DNA
ctgacagggcgccggtgggagggcaggagggagacaaaac

SEQ ID NO: 46491 - protein, 482 aa, Mycobacteroides chelonae
MVDAGQRVLGRIRLSRLTDESTSKERQQEIIEQWAAMHGHTIVGWAEDMDVSRSVDPFDTPELGGWLTKPEKIEQWDIVATWKLDRLATGSIYLNKTMHWCFQHEKIIVSVTENFDLSTWVGRMIANVIAGVAEGELEAIKERTKASRKKLVQTGRWPGGRAPYGYRPVKIPEGGWALEIDPEQEAVILRTAAEIIDGAAFEAVAKRLREEDVPTPRGGKWAPSVLKRMLTNKSLLGHSTYRRETVRDEQGNPVLVADPILQLDEWNRLQAAAEARTVAPRRTRQTSPLLDIVKCWECEENLAYKYYKTRHCYYHCRHSGDHTQMIRSEAVEEWLEGAFLSEVGDDLAQERIYVPAENNRQSLDEATKAADELTGLLATVSSDTMRTRVLGQLSALDKKISELEKTPARAAHWELRQMDYTYREEWERSDTEGRRQLLLRSEITASIKLTDRPANGSGNAGVYHTRLNIPEDVLERLAANRD

SEQ ID NO: 46492 - DNA, 50 bp, Mycobacteroides chelonae
  source 1..50: mol_type = genomic DNA
gttctaccaagccctaccaatgaagtgtcgatgctggtacattgtagaac

SEQ ID NO: 46493 - DNA, 40 bp, Mycobacteroides chelonae
  source 1..40: mol_type = genomic DNA
gttctcgtacaccttcgcggtgtcgatgctccggtatccg

SEQ ID NO: 46494 - DNA, 50 bp, Mycobacteroides chelonae
  source 1..50: mol_type = genomic DNA
gttctaccaagccctaccaatgaacagtcgatgctggtacattgtagaac

SEQ ID NO: 46495 - DNA, 40 bp, Mycobacteroides chelonae
  source 1..40: mol_type = genomic DNA
attctggtacacatgggcacagtcgatgtggcggtacccg

SEQ ID NO: 46496 - protein, 513 aa, Elizabethkingia anophelis
MKRADLYIRVSTDEQADKGYSQRDQEERLRRYCSSHNISVGQIIYEDHSAKTFNRPEWAKLLISLKKKSSKTNLILFTKWDRFSRNAGDAYQMINILTKLGIEPQAVEQPLDLSIPENKMMLAIYLAAPEVENDRRALNTFYGMRRAKKEGRVLGNAPFGYINRSREDGSKYIAIKEPEASTMRMAFEEILKGIFAPDQIRQKIERSGKKILSRASFHTAIRNPVYCGKVFVAKYGDEEAVTVKGQHEAIISEELFYNVQDILHGNKRATVHSTKILSDVNLPLRGYLVCPDCGRNLTGSASKGRNTRYYYYHCIASCGYRQKAEKANEIFEQGLAQFELNEANKDILKKMVLLNYNQVIKENPRMDKRKIVLEIDKLNEKLSVAREKLLSNVMDDDEYVELKKEYKEKIDKLEEQLARDDKPDSNEMSIQRKLNKALDIVQNISKLYIQGGIETKRTLIGSIFPEKLEFNGTQYRTARINSVVATIFQINSELGSKKDRRKSELSLFSGLVP

SEQ ID NO: 46497 - DNA, 50 bp, Elizabethkingia anophelis
  source 1..50: mol_type = genomic DNA
attatcacttttctccggtcttgtacccaacaccgaccaaatatcgaaac

SEQ ID NO: 46498 - DNA, 40 bp, Elizabethkingia anophelis; identical to SEQ ID NO: 28688
  source 1..40: mol_type = genomic DNA

SEQ ID NO: 46499 - DNA, 50 bp, Elizabethkingia anophelis
  source 1..50: mol_type = genomic DNA
attatcacttttctccggtcttgttcccaacaccgaccaaatatcgaaac

SEQ ID NO: 46500 - DNA, 40 bp, Elizabethkingia anophelis
  source 1..40: mol_type = genomic DNA
ttctgaacttttcaatggttcccaatgtcgaaatccaacc

SEQ ID NO: 46501 - protein, 534 aa, Pseudomonas qingdaonensis
MTKKCFPYVRFSSTRQEDGSTRTRQNELIDAFVTKHGLDVDRHLEDAGTSAHRGKNAGAEGVLGQFLRQVRMGEIDKGSYLLIENFDRLSRDKIVRSNKIFTDLLYAGIKIVILDKNKIYDAENLDFGDWISALVEFERANAESERKSDFSSKAWKFNREKMRNGEIVTKKVPSWLKVENNAFVIDYLKVERINTLFKLSLSKGLQEATREYNDLYSEKLAIHQTQYLLSNRKLIGEHSPQKIHYDESGQLKRKGEGESIPNYYPAVVDEKLFYQVQEVIKSRRPFAGRYSGQRYNVFRDLIFCKACGGTIRYMNKGERDYFLCTNSMTGKCVLNSHFGQQSIRGKKLFGMFFAFTENLNISALLEENTVAEVIKTELLKLDARRNQIKDRLDEFKISVKDMIMNGKVIPNTYNELISDFESNRIHIDQEIETKTKELEQIHTSAKSFAGLKESDISSIIYDRSDEAVEKRVRYNNELKKIIKTINIDYLNTFLQIEFFNGVTRRIDEDGKAFDYNLEELNASMYAAAKNYAPK

SEQ ID NO: 46502 - DNA, 50 bp, Pseudomonas qingdaonensis
  source 1..50: mol_type = genomic DNA
gtggaacctatcattgaacacgtccagacatgctacgctatacgttccac

SEQ ID NO: 46503 - DNA, 40 bp, Pseudomonas qingdaonensis
  source 1..40: mol_type = genomic DNA
gcgggcatagcaatagatgcaaccatgctcgcaacctcgg

SEQ ID NO: 46504 - DNA, 50 bp, Pseudomonas qingdaonensis
  source 1..50: mol_type = genomic DNA
gtggaacctatcattgaacacgtcacgacatgctacgctatacgttccac

SEQ ID NO: 46505 - DNA, 40 bp, Pseudomonas qingdaonensis
  source 1..40: mol_type = genomic DNA
gcagtcactggaatagatgacagcatgctcaccaccaagg

SEQ ID NO: 46506 - protein, 525 aa, Aeromonas allosaccharophila; identical to SEQ ID NO: 25906

SEQ ID NO: 46507 - DNA, 50 bp, Aeromonas allosaccharophila
  source 1..50: mol_type = genomic DNA
tcatgtttcccactaaaatcagttaacggtggtatactgctattggtaga

SEQ ID NO: 46508 - DNA, 40 bp, Aeromonas allosaccharophila
  source 1..40: mol_type = genomic DNA
gatcggcgggggccagattgactgtgatgtgtttgctcgg

SEQ ID NO: 46509 - DNA, 50 bp, Aeromonas allosaccharophila
  source 1..50: mol_type = genomic DNA
tcatgtttcccactaaaatcagtttacggtggtatactgctattggtaga

SEQ ID NO: 46510 - DNA, 40 bp, Aeromonas allosaccharophila
  source 1..40: mol_type = genomic DNA
gctcagcaggacccatatttactgcattgtgtttgctagg

SEQ ID NO: 46511 - protein, 558 aa, Ruminococcus torques; identical to SEQ ID NO: 3086

SEQ ID NO: 46512 - DNA, 50 bp, Ruminococcus torques; identical to SEQ ID NO: 3087
  source 1..50: mol_type = genomic DNA

SEQ ID NO: 46513 - DNA, 40 bp, Ruminococcus torques
  source 1..40: mol_type = genomic DNA
ctggaaggcagggcggttgaaattgcggcccgtatagccg

SEQ ID NO: 46514 - DNA, 50 bp, Ruminococcus torques
  source 1..50: mol_type = genomic DNA
aggtatcgttatcttacctcaacatgagctgacgttagataacgatactt

SEQ ID NO: 46515 - DNA, 40 bp, Ruminococcus torques
  source 1..40: mol_type = genomic DNA
ctgaaaggcagataggctgtgattggggccctgataccca

SEQ ID NO: 46516 - protein, 558 aa, Pseudomonas aeruginosa
MPRAYAYVRWSTAEQGEEGRDSHDRQTTPLQAFTATTGIPVVETIIDKGVSAFKGANARIGQLKGLLDRIESGEIERGDYIIVESIDRLTRQKLNDSVDLIQSILKKGVRLHTVIDQKTYSHDDPSRDLETLLMVGVIAKRAHEESDTKSKRLKSSWLKKRNAAETTIIRKQCPYGLRYDEEAQAFAIVEDEAQEIRDIFENLKYMGILESIKRVNQYSKRRWTRKHIDELIKNKSPIGVLSLRRRNDEDGTKIFDRYVPGYYPKIIDETEFDAAVSAVKGRFNERKSGRRSQKHYNIFRHCIQCSQHKVGMSFNLQGLGVEKKRYAYLVCSNRAERVCECHNRIRFDLVFGTFLAFVKQLSENRYIDERTDKKRKDFTWFSQDNYKQMDAVNDAFSRFFSARDTNTPKEEIRAKKGQLTSEKTALEMLDASLAQFDGLIPKTFIKRIADTEARITALEVEIQNLEGSLAIEAETLEVTTYQDILDLYATEQGRLKLNTFFISRGITFEVNSDKESNMVGLQIKIKGDEKFSLYTSQFFTTKDPLTPFGIPDLSHIIK

SEQ ID NO: 46517 - DNA, 50 bp, Pseudomonas aeruginosa
  source 1..50: mol_type = genomic DNA
ttattagaaaacgctagaccattgaacaacggacgggtattttctaataa

SEQ ID NO: 46518 - DNA, 40 bp, Pseudomonas aeruginosa
  source 1..40: mol_type = genomic DNA
gccatcgatgctgccctggaacagcacctcgaacgccagg

SEQ ID NO: 46519 - DNA, 50 bp, Pseudomonas aeruginosa
  source 1..50: mol_type = genomic DNA
ttattagaaaacgctagaccattggccaacggacgggtattttctaataa

SEQ ID NO: 46520 - DNA, 40 bp, Pseudomonas aeruginosa
  source 1..40: mol_type = genomic DNA
gctgcagaagctgccctgggccagcaacaccatcgcctgg

SEQ ID NO: 46521 - protein, 558 aa, Pseudomonas aeruginosa
MPRAYAYVRWSTAEQGEEGRDSHDRQTTPLEAFSKATGIPVVETIIDKGVSAFKGANARIGQLKGLLDRIESGEIERGDYIIVESIDRLTRQKLNDSVDLIQSILKKGVRLHTVIDQKTYSHDDPSRDLETLLMVGVIAKRAHEESDTKSKRLKSSWLKKRNAAETTIIRKQCPYGLRYDEEAQAFAIVEDEAQEIRDIFENLKYMGILESIKRVNQYSKRRWTRKHIDELIKNKSPIGVLSLRRRNDEDGTKIFDRYVPGYYPKIIDETEFDAAVSAVKGRFNERKSGRRSQKHYNIFRHCIQCSQHKVGMSFNLQGLGVEKKRYAYLVCSNRAERVCECHNRIRFDLVFGTFLAFVKQLSENRYIDERTDKKRKDFTWFSQDNYKQMDAVNDAFSRFFSARDTNTPKEEIRAKKGQLTSEKTALEMLDASLAQFDGLIPKTFIKRIADTEARITALEVEIQNLEGSLAIEAETLEVTTYQDILDLYATEQGRLKLNTFFISRGITFEVNSDKESNMVGLQIKIKGDEKFSLYTSQFFTTKDPLTPFGIPDLSHIIK

SEQ ID NO: 46522 - DNA, 50 bp, Pseudomonas aeruginosa; identical to SEQ ID NO: 46517
  source 1..50: mol_type = genomic DNA

SEQ ID NO: 46523 - DNA, 40 bp, Pseudomonas aeruginosa; identical to SEQ ID NO: 46518
  source 1..40: mol_type = genomic DNA

SEQ ID NO: 46524 - DNA, 50 bp, Pseudomonas aeruginosa; identical to SEQ ID NO: 46519
  source 1..50: mol_type = genomic DNA

SEQ ID NO: 46525 - DNA, 40 bp, Pseudomonas aeruginosa; identical to SEQ ID NO: 46520
  source 1..40: mol_type = genomic DNA

SEQ ID NO: 46526 - protein, 558 aa, Pseudomonas aeruginosa
MPRAYAYVRWSTAEQGEEGRDSHDRQTTPLQAFTESTGIPVVETIIDKGVSAFKGANARIGQLKGLLDRIESGEIERGDYIIVESIDRLTRQKLNDSVDLIQSILKKGVRLHTVIDQKTYSHDDPSRDLETLLMVGVIAKRAHEESDTKSKRLKSSWLKKRDAAETTIIRKQCPYGLRYDEEAQAFAIVEDEAQEIRDIFENLKYMGILESIKRVNQYSKRRWTRKHIDELIKNKSPIGVLSLRRRNDEDGTKIFDRYVPGYYPKIIDETEFDAAVSAVKGRFNERKSGRRSPNNYNIFRHCIQCHQHKAGMLFNLQGLGVEKKRYAYLVCSNRAERVCECDNRIRFDLVFGTFLAFVKQLSENRYIDERTDKKRKDFTWFSQDNYKQMDAVNDAFSRFFSVRDTSTPKEEIRAKKAQLTSEKTALEMLDASLAQFDGLIPKTFIKRIADTEARITALEVEIQNLEGSLAIEAETLEVTTYQDILDLYATEQGRLKLNTFFISRGITFEVNSDKESNMVGLQIKIKGDEKFNLSAYQFFTTKEPLKPFGIPDLSHIIK

SEQ ID NO: 46527 - DNA, 50 bp, Pseudomonas aeruginosa; identical to SEQ ID NO: 46517
  source 1..50: mol_type = genomic DNA

SEQ ID NO: 46528 - DNA, 40 bp, Pseudomonas aeruginosa; identical to SEQ ID NO: 46518
  source 1..40: mol_type = genomic DNA

SEQ ID NO: 46529 - DNA, 50 bp, Pseudomonas aeruginosa; identical to SEQ ID NO: 46519
  source 1..50: mol_type = genomic DNA

SEQ ID NO: 46530 - DNA, 40 bp, Pseudomonas aeruginosa; identical to SEQ ID NO: 46520
  source 1..40: mol_type = genomic DNA

SEQ ID NO: 46531 - protein, 558 aa, Pseudomonas aeruginosa
MPRAYAYVRWSTAEQGEEGRDSHDRQTTPLEAFTKATGIPVVETIIDKGVSAFKGANARIGQLKGLLDRIESGEIERGDYIIVESIDRLTRQKLNDSVDLIQSILKKGVRLHTVIDQKTYSHDDPSRDLETLLMVGVIAKRAHEESDTKSKRLKSSWLKKRDAAETTIIRKQCPYGLRYDEEAQAFTIVEDEAQEIRDIFENLKYMGILESIKRVNQYSKRRWTRKHIDELIKNKSPIGVLSLRRRNDEDGTKIFDRYVPGYYPKIIDETEFDAAVSAVKGRFNERKSGRRSPNNYNIFRHCIQCHEHKAGMLFNLQGLGVEKKRYAYLVCSNRAERVCECDNRIRFDLVFGTFLAFVKQLSENRYIDERTDKKRKDFTWFSQDNYKQMDAVNDAFSRFFSARDTNTPKEEIRAKKGQLTSEKTALEMLDASLAQFDGLIPKTFIKRIADTEARITALEVEIQNLEGSLAIEAETLEVTTYQDILDLYATEQGRLKLNTFFISRGITFEVNSDKESNMVGLQIKIKGDEKFSLYTSQFFTTKDPLTPFGIPDLSQIIK

SEQ ID NO: 46532 - DNA, 50 bp, Pseudomonas aeruginosa; identical to SEQ ID NO: 38407
  source 1..50: mol_type = genomic DNA

SEQ ID NO: 46533 - DNA, 40 bp, Pseudomonas aeruginosa; identical to SEQ ID NO: 46518
  source 1..40: mol_type = genomic DNA

SEQ ID NO: 46534 - DNA, 50 bp, Pseudomonas aeruginosa
  source 1..50: mol_type = genomic DNA
ttattagaaaccgctagaccattggccaacggacgggtattttctaataa

SEQ ID NO: 46535 - DNA, 40 bp, Pseudomonas aeruginosa; identical to SEQ ID NO: 46520
  source 1..40: mol_type = genomic DNA

SEQ ID NO: 46536 - protein, 568 aa, Arthrobacter zhaoguopingii
MKLVTQRAFIYTRISQDRNAEGLGVQRQEEACRRYALQHGMEVVEVFSDNSTSAFSNRTRPAYTAMLERLRAREVEAVICWRMDRLHRRPIDLEDYAEVCQGPRGSAPILTYSVTAGGEIDLSTADGLLRAGIMGQVARFESATKSERARAKASQLAEAGMWTGGRRPFGWQVENGRLTTEPREAAALASAHSDVLAGRSLGSIIKKWNEEGWDGEPLLTTADKPWGYAQLRQALLRPRNAGLYVFHGEVLSRDKIPAIVPEDVWRAVVAVLTAPERRRSQTNKAAHLLAGIAQCHCGEFVRSGNVYGRRDKTTGVKPKHTAYRCSSQGRGHVGKREEYVDAVVELWVFRLLSQTYREEPENPAARAEADAIRSRLEALHVREQGAGGLLAAGEMTLGQMRNFNEGIQRQRADLEDRLTKLGLDRGQELDTLARFDLEMGEVQERFNAWLAMPIDDRRDFIRSKLHIVLHPHSKGSPREFDPDTVSVHIKAPGETRRSLSAADIAALERVSLGENVAEMLRRFRTNRRGSEYSPAFKIRESFAKLAEEHPVLQKILDDQAARKNANRA

SEQ ID NO: 46537 - DNA, 50 bp, Arthrobacter zhaoguopingii
  source 1..50: mol_type = genomic DNA
cgtactgtgcatgaaatgggttcgggcagcccgataaacgatcaggcaca

SEQ ID NO: 46538 - DNA, 40 bp, Arthrobacter zhaoguopingii
  source 1..40: mol_type = genomic DNA
atggacgctgcacatcccgggaagaccgctgttcagtgcg

SEQ ID NO: 46539 - DNA, 50 bp, Arthrobacter zhaoguopingii
  source 1..50: mol_type = genomic DNA
cgtactgtgcatgaaatgggttcgcacagcccgataaacgatcaggcaca

SEQ ID NO: 46540 - DNA, 40 bp, Arthrobacter zhaoguopingii
  source 1..40: mol_type = genomic DNA
gtggactcagcacatcccccacagaccgctgtctaatgga

SEQ ID NO: 46541 - protein, 651 aa, Streptomyces coelicoflavus
MSHVSTALPFSADPGSTPSNLRALRAVDYLRVSTEEQKKGYGVARQSRKTTRHIAHKQWQHIGTYKDEGVSGSLEAADRGDLKRLMEDAQKNPRPFDIVVVPDGRVIGRKGRAFWRWVWALEDIGVYVAVVADDYDNTTSDGRKKMRRDADYAETEWETIRDRTQGGLQEKAELTPAAHIGGRPPYGYRIANKGTPGSYLMVDEAEANIIRYVYGLVVGEGLNLRKTTIRLNAEGITARSGRAWTRDNLRDRIMSSPVLDGSFLFRGKHAKTDGNGTPVWGDSVEIELPRILTPEESAELRRKVAETAKHSSGQREFYPLTGRIISLCRKTYTGISRAAERGGARYYRCAGNAPKDLGEKSCGCSYIDADALEGHVWQKVMEIASDSTKLQELAAEWIGTADGDKSALADRIANLDQQVEGMNASITAVIVATAKQSASAEAIEAATAALNEELQQLQNLRSEAAEWLMEIEESDQYAKDLRALASMARKSFPDMEPQQQAAILSLLELKITVTGPVPDGRRGGVPCTVRAWHASAGLGVPAASLSDGDWAKVAPLLPKGRMGTVRRSVDAIFYKARTGKPWPAVIKETGATIQASKHFNAWTSDDTWDLVNAALAHVARVPLPDPELLPPMIIEGRVDPSAMLHPEGRSR

SEQ ID NO: 46542 - DNA, 50 bp, Streptomyces coelicoflavus
  source 1..50: mol_type = genomic DNA
gctgcacccagaaggacgatcccgaacggaatcgtctccgaacgttcccg

SEQ ID NO: 46543 - DNA, 40 bp, Streptomyces coelicoflavus
  source 1..40: mol_type = genomic DNA
gcggaaggccgcgatgccgaaggggattccgatgatggtg

SEQ ID NO: 46544 - DNA, 50 bp, Streptomyces coelicoflavus; identical to SEQ ID NO: 46542
  source 1..50: mol_type = genomic DNA

SEQ ID NO: 46545 - DNA, 40 bp, Streptomyces coelicoflavus
  source 1..40: mol_type = genomic DNA
gcggccagccgcgatgcggaaggggattctgacggagtcg

SEQ ID NO: 46546 - protein, 625 aa, Eisenbergiella tayi
MISKLTDTPEIIDGYVRLSRDDNKRNYSSIENQKKIIQQYAEENNMIIRHIYEDDGISGYSFNRPDFQKMMASLDTINIIVAKDLSRIGRHNAKVLLFLEEMEEMGKRVILIDDNYDSFYSDDDIIGIKTWDNERHVKNTSRKVKRIKRMEQESGTLVSQTPFGYTRHPLNKQMILIDEEAAAILNLEKEIYLDGNGIRKTAEILSERGVPTPSMIDKERHESLGLVYNKQVAYQWSYGMVKDTLFNDYNNGVLRTHKRERVTINGKDKKVPKENQYIFPNHHPKIFDDDTMKLLNEVKDSRHHSKYRGQRAHVNLFSGCLYCKDCGWKLTAINRPNRGKYYVCGTYNKKGKQFCQHAHLVTEETLMDALVKYLVLCRDSLADIIQNFDLSKLKVETFTPTDSKQRLEAELEKVKEELKVLITQKVREITANPSMNEIITETYTALQSDKMERISAIEKTLQDLTKEPHIPSTTIKPSLQTALDILNEVLEKKELSRKDIEVLVEKIIVDKDGNVDIYLKHGLGNLAAYDFRADKENLKLTMLIESIRLLEKDETGFTSVKFLADSLKEMGYPMHKKKFVTYMEHLLDLGLVEKTGIYHYPYRIVASRQQLRDVEKMFIVVGQTG

SEQ ID NO: 46547 - DNA, 50 bp, Eisenbergiella tayi; identical to SEQ ID NO: 18962
  source 1..50: mol_type = genomic DNA

SEQ ID NO: 46548 - DNA, 40 bp, Eisenbergiella tayi
  source 1..40: mol_type = genomic DNA
ggttcttggaggaagggcaggcggaatgcccgagatggtc

SEQ ID NO: 46549 - DNA, 50 bp, Eisenbergiella tayi
  source 1..50: mol_type = genomic DNA
atgttcatcgtggtagggcagactttcggccgacctaagcatgatgtaac

SEQ ID NO: 46550 - DNA, 40 bp, Eisenbergiella tayi
  source 1..40: mol_type = genomic DNA
ggttgtaggaggaaagagattaggaatgattgaggtggtc

SEQ ID NO: 46551 - protein, 498 aa, Brevibacillus laterosporus
MSKYEKHDIRHVAIYLRKSRGDEDKDLDKHRDELVELCLRNDWQYIEYAEIGTGDSILARPKMQQLLVDVEAQSFDAVVVIHYDRLGRGDKVDQSRIEKTFAMSDTLIITPQKVFNLNDESDMMLADFQGMIARQEYKATSRRMRGGKRRGALAGNWSNGTPPFPYIYNRLTKKAEPSEINLPVYRNMIESVLNGYTTTDIAWDLNKKGIPSPRNQLWTPEVVRRIVCDEVHLGKVIVGKKTKHPTMGTIMLKPKEEWVVVNNAHKAVKTQREHDKIMFIISRERETPNAGKAGKHAFSGIIRCAICGNTLAIQKRSNRPHDLLKSCKHYDHWGNRCINMGSSMEIIEENVLQAILLKELELEEAIKKGVTLDDIRNLLAMSEKKLEEIKEQEKAIDRIYNAYEKGVYSDEVFAERKDKAEAVLYKLTQEYEFIQKESDNTQNARNEDMLVTIREVRDIITESKDPKTCNRAYKSIIHSIMWSRESIECKPTVKVNFL

SEQ ID NO: 46552 - DNA, 50 bp, Brevibacillus laterosporus
  source 1..50: mol_type = genomic DNA
ttggctctttcaacgacatcacacgggtgtgtagttgctgaaagatacca

SEQ ID NO: 46553 - DNA, 40 bp, Brevibacillus laterosporus
  source 1..40: mol_type = genomic DNA
tccggttgaaacaccggatggaagcgttatcttacccatt

SEQ ID NO: 46554 - DNA, 50 bp, Brevibacillus laterosporus
  source 1..50: mol_type = genomic DNA
ttggctctttcaacgacatcacacgagtgtgtagttgctgaaagatacca

SEQ ID NO: 46555 - DNA, 40 bp, Brevibacillus laterosporus
  source 1..40: mol_type = genomic DNA
tcctgttgaaaatcaggaggaaagtgttttcttctccttt

SEQ ID NO: 46556 - protein, 477 aa, Streptomyces anthocyanicus
MPRPKHREPTITPGEPAALYCRISQADDDDQTAVDRQERICREIAERRGLAIDPAHVFVDNSRSAWRRNRKRPGWDQLLERARRREFRHIIAYHPDRLMRQPRDLEELLQVSDEQEIVLHGEANRRNLSDPDDRFILRIEVAHACRSSDDTSRRLKSALAERAETGMPHSGKRRFGYEPDGMTVREDEAEIVREVFDRYLKGQSPVAIALVLHKRGIKTVYGKEWTQGTVRALLDSRHAAGIRMHRGEEVGAGKWPAIIDAGTWAEVRARREYRSAIHQTNLELRRFYLLRGLVMCKRCGTLMSGTKVGAVPSYLCTRKSRNDEKKCVRRIAAVKLEEFVTEAAIDLLGRLTVSGQLASATPTNALTEAVEADQRQLAELNQMWTAKEISTAEYRTMRKDITDRIAKAQRRMVVRPVKLLDGLTGPGARAAWEADEMTDERRNAVLRFLFSGVVIDASSKPSGVFDWDRIDIEQNQL

SEQ ID NO: 46557 - DNA, 50 bp, Streptomyces anthocyanicus
  source 1..50: mol_type = genomic DNA
gcgataggtgaacaaggcttgactgagcccaagccttgctcataccatcg

SEQ ID NO: 46558 - DNA, 40 bp, Streptomyces anthocyanicus
  source 1..40: mol_type = genomic DNA
cggatgccggaagttcggcgaggtgaccagggtgcccaga

SEQ ID NO: 46559 - DNA, 50 bp, Streptomyces anthocyanicus
  source 1..50: mol_type = genomic DNA
gcgataggtgaacaaggcttgactcagcccaagccttgctcataccatcg

SEQ ID NO: 46560 - DNA, 40 bp, Streptomyces anthocyanicus
  source 1..40: mol_type = genomic DNA
ccaatgtcggaagttaggccacgtcaccaggatgtccaag

SEQ ID NO: 46561 - protein, 513 aa, Anaerotruncus massiliensis
MTCAIYCRLSREDAEKIRESESIQNQKAMLADYAASQGWEVGAVYCDEDYSGADRDRPGWNAMLAAAERREFQIVLCKTQSRFTRDMELVEKYLHGLFPLWGIRFVAVVDHVDTDLKGNKKARQINGLINEWYLEDLSENIRAVFAQKRSAGKYIGSIPAYGYRKDPADHNHLLVEPEAAEVVRSIFSLCLEGFGKQKIAALLNERGIPSPSAYKRARGWTRGEAGADGWNRTTVGRILRSELYTGTMVQGTKRRVSYKSKACAGVPKEAWCRVEGTHEAIVDRASFDAAQALLDRRTRSGGTGEPHPLAGIARCADCGGPLVKVSQLYKGVRRSYLQCGRYASSRPHPNCTRHSVRLDALTGVVEERVRALVRTRYRLPSPERLLPPGEAEARLRRERAEALELQNQIARRSRALETLCLDRADGLIGREEFAGMSARFREERQALQARLDALEARMREAPPEPPGLLAKRAEALLRLDPMPRELLVLLVDTVTVGERRPDGTQEVSIRWLL

SEQ ID NO: 46562 - DNA, 50 bp, Anaerotruncus massiliensis
  source 1..50: mol_type = genomic DNA
gtattcgattccgcgacacccgcccacgcgggcgttcccaatataatcaa

SEQ ID NO: 46563 - DNA, 40 bp, Anaerotruncus massiliensis
  source 1..40: mol_type = genomic DNA
tgctgatggtacctccccccatgtgatcgaacccaaatat

SEQ ID NO: 46564 - DNA, 50 bp, Anaerotruncus massiliensis
  source 1..50: mol_type = genomic DNA
gtattcgattccgcgacacccgccgccgcgggcgttcccaatataatcaa

SEQ ID NO: 46565 - DNA, 40 bp, Anaerotruncus massiliensis
  source 1..40: mol_type = genomic DNA
tgcatctggtacctcccccgctggaaaggaaacctaatac

SEQ ID NO: 46566 - protein, 611 aa, Planobispora rosea
MSGWGAAAEDPFDGLRVAWCGRTSTEDLQDPTLSLPRQLDNSRAALPPGSLIVAHFYDIESGRKNLEDRGHGTAHERFDIAIPRDGGIQDLLSEAGSRNRRFDAVICESIDRISRRTFYGTKIEHELEQLGIPLFAADEPITLNGKRATAILTRRVKQGIAEWYAVQMMEASWDGLRTHTQQGWNVGRPPYGYRAQKVAHPVPAKAADGKHKSKLVPDPVRGPVITQIFMWRVMERLGYGDIADRLNADHDRYPPPESLNPNFRGRNAWSRSGIREMLLNPKYTGHMVWNRKATTSRRGSGRSMANPPSAWVWSEHPTHEPLITREMYEAAQGVGKERATSRTGSEANAHPQTCHTYLLRSFVHCDLCDRRMFGQTETRRKAGQYAYYCCQPSINHKGREDRFPGHPKVVRVREDSLADAVHDLFQRRVFGPDRHALLTADLPRTSHRAEAEWESRCKALRKGVAEITRRQDRLIAQIEDSDGDDEFPRRLRARFAELETDRRTRAEQLAEAEANPPARDHRTGLLDMIPMLSTRLADLPEYLRRELFAAFHLEVRYNDRAGVALLRITIEEDTVKGVADMTGRLADQPGKENRHPLEAGACAEDLRRAPG

SEQ ID NO: 46567 - DNA, 50 bp, Planobispora rosea
  source 1..50: mol_type = genomic DNA
gccgaagatttgagacgtgcccccggccgggcacggcgcaaatctacggc

SEQ ID NO: 46568 - DNA, 40 bp, Planobispora rosea
  source 1..40: mol_type = genomic DNA
aggtcacgatggtgcccccggcatgattcgaacatgcgac

SEQ ID NO: 46569 - DNA, 50 bp, Planobispora rosea
  source 1..50: mol_type = genomic DNA
gccgaagatttgagacgtgcccccctccgggcacggcgcaaatctacggc

SEQ ID NO: 46570 - DNA, 40 bp, Planobispora rosea
  source 1..40: mol_type = genomic DNA
aggtcacgagggtgcagccctcatgagtgaaatttgtgtc

SEQ ID NO: 46571 - protein, 500 aa, Priestia aryabhattai
MKQIEQKEYVAIYVRKSRDDKGDIQETLHNQKMSLINLADNKGYDYDLYQEVESSVDFHRPELNNMINNIKKSKYSRILVTHIDRLSRDERDSAELKEIFISYDILIETPDNIIDLTDENQELMYGFNAVLSAYEYRRIRQRLLKGKLDAVAIGNRWVGSVPPLGYDWDKNKKQLVVNKESSTVKKMIELALAGYSSNQIAFKLNDLGYRTKTGKPFKSDRILRTLKNRVYLGEAKFNYKRMKKSAIAIGCHEPLITEEQYNLIQNLIQSRKSKGSLASLGIKSCLNKILVCGVCGKGLTIQKNKRVSKVDERDLSFYHIRPCLHKVDVNVKCPNRGMKIKKVEDAVQQSLKMYKQELQQTLKQLLDKDITVIEHQIKNNIDSLKKDLVLQQNKNQKLLDLYLASSELTLKNYQEKKAEIDHIIENLEKEITTNNNKLSKINISTQINHIENIISMLDNFRNLELEEQNATLKLIITKVVFTKTAETNFEPKIDIHWREL

SEQ ID NO: 46572 - DNA, 50 bp, Priestia aryabhattai
  source 1..50: mol_type = genomic DNA
tagggtgtactacatgtatccatcttgacagttacacatagttcaccctc

SEQ ID NO: 46573 - DNA, 40 bp, Priestia aryabhattai
  source 1..40: mol_type = genomic DNA
tacctcagcctctacggttttgacaagagctgagcagcct

SEQ ID NO: 46574 - DNA, 50 bp, Priestia aryabhattai
  source 1..50: mol_type = genomic DNA
tagggtgtactacatgtatccatcatgacagttacacatagttcaccctc

SEQ ID NO: 46575 - DNA, 40 bp, Priestia aryabhattai
  source 1..40: mol_type = genomic DNA
gtcctcagcctctaaggtcatggctatccctgggcagcct

SEQ ID NO: 46576 - protein, 541 aa, Brevundimonas mediterranea
MTVLQTGIATRAALYLRVSTARQAEHDVSIPDQKRQGEAYCVTRSYQLVETFVEPGASATNDRRPEFQRMIEAGTSKPASFDIVVVHSFSRFFRDHFELEFYVRKLAKNGVKLVSMTQELGDDPMHVMMRQIMALFDEYQSKENAKHVLRALKENARQGFWNGSLPPIGYRVVAAEQRGTKVKKKLEIDPLHADTVRLIYRLALEGDGTSGPLGVKAITTYLNARRIFTRDGGRWGIGQLHRILTRKTYIGQHEFNKRSKTKELKPVSEVIAVAVPPLIDQATFDAVQAHLRSRNPKVMPARVVSGPTLLTGICFCADCGGAMTLRTGKSGRYRYYTCSIKARQGETGCKGRSIPMEKLDGLVASHIEDRLLEPERLEHVLASVLDRRQERSERRREHIAELNRRAAETDLRLKRLYDAIESGVADLDDPALKERIAGLKAIRDQSQVDAERASAMLESAGQQAITPKMVRKFAGTARSRIRLDGGGYRRDHLRALAQRVEVAEGEVRIMGSKSNLLRTLAAASGGKSAAIGVPSSVLKWR

SEQ ID NO: 46577 - DNA, 50 bp, Brevundimonas mediterranea
  source 1..50: mol_type = genomic DNA
tgcccagttctgttctgaagtggcgggccgcgccagacgatgatgagcac

SEQ ID NO: 46578 - DNA, 40 bp, Brevundimonas mediterranea
  source 1..40: mol_type = genomic DNA
gtaaaatcgacaggatggcggaagcggtgggattcgaacc

SEQ ID NO: 46579 - DNA, 50 bp, Brevundimonas mediterranea
  source 1..50: mol_type = genomic DNA
tgcccagttctgttctgaagtggcatgccgcgccagacgatgatgagcac

SEQ ID NO: 46580 - DNA, 40 bp, Brevundimonas mediterranea
  source 1..40: mol_type = genomic DNA
ggaaaatatacatgatggcatatgcactgtgatcccaacc

SEQ ID NO: 46581 - protein, 508 aa, Streptomyces sp 769
MASSYSGDVSNSKAISQVDDHSARARKLARMAEPKRVRRSRDQWAGEPAAIYCRISHVNDDDQTGVVRQERICRDLAKRLGLEIARPLVFVDNNRSAWQRSRKRPGWDALLEAARAGGVRHILTYHPDRLMRQPRDLEELLQISDDYDITLHGEANHRDLSDPDDRFFLRIEVAHACRSSDDTSRRLKDALIDRAKDGRPHTGKRRYGYDKSGMQIDPHEAEVVREIFTSYLDGESPGSIAVALNMRGEKTALGKQWNGYNVRAVLDSHHVAGIRVFRGEEIGHGDWPAIIDRGMWDEVRERRMLRASAAFGTNAPKRPYILRGVVICKACTLGMKGSGGKYVCNRSGRNDDQSCHRGAMAEPLEKFVVDAAIYKLKELKSAEQQAATSLSEEDQAAIKADRTELDELRDMWEAQELKTHEYRAMRKTVEERIAKIERKLVVRPTAEVLRGLVGPKAREEWQKLEKEEDYDRMNAVLRFLFRAVIIDKPKEAGNFFDFGRVDIQDNPL

SEQ ID NO: 46582 - DNA, 50 bp, Streptomyces sp 769
  source 1..50: mol_type = genomic DNA
ggtgtagccgaagaaggcttgaccgtagtcatggcttcttcatactctgg

SEQ ID NO: 46583 - DNA, 40 bp, Streptomyces sp 769
  source 1..40: mol_type = genomic DNA
cctgagcttgtccttgagcgtggtcatgccgtcgagtatg

SEQ ID NO: 46584 - DNA, 50 bp, Streptomyces sp 769
  source 1..50: mol_type = genomic DNA
ggtgtagccgaagaaggcttgaccatagtcatggcttcttcatactctgg

SEQ ID NO: 46585 - DNA, 40 bp, Streptomyces sp 769
  source 1..40: mol_type = genomic DNA
cctgagattgcccatgaggatggacatgcctttcagtcta

SEQ ID NO: 46586 - protein, 521 aa, Streptomyces coelicolor
MGKREEVISKLRGVPADVPSVEEVRSMLAADPNLKCVVCYARISFDGRVKDAHGIEDQHRDMSEAARRFGWLIVYRYTDNDKSASKESVVRDDFEQLLADLAAGATPEGYPVHGVMAVNDDRLYRRPSDWERYLKAFTSQDGRVYHDSNGLQDLYAEGFEIKGLVGVAMSLSETRKKQRRSRNSHRSRAIRGQSVSAWRPFGWEDDKVTLRPDEAEAIRTAVHDVIAGASISEITRRWKEAGFITSRGNPFQYQTVKQVLVNARLCGYREIKGEIVRDGDDQPIVGEWEAIVTPKQWFAVTAKIRERGHGTGTPRGGLVHKYLLTNILRCGNVLEDGTVCNNKMIGIKANDWLKYQHAYMCKKTVDGGCNKTYKRGDKTDKIIEELVIAKLERDAATKAQDVPDWDKAEALERALQSRRELERRWHDDEDTDIDDEAFFRNLPVLERRIKELRVDQKAHEALKAEAEEAEADIRKSWGAKTLTQKREAMKKVLGAVIALPGGKGNKTFDPDLLKPVWKTSE

SEQ ID NO: 46587 - DNA, 50 bp, Streptomyces coelicolor
  source 1..50: mol_type = genomic DNA
gtgatgctttgactaatcttcatcgagaagagcattattagaagcaccac

SEQ ID NO: 46588 - DNA, 40 bp, Streptomyces coelicolor
  source 1..40: mol_type = genomic DNA
gtcctgggagatcttcatcgagcagaacttgggcccgcac

SEQ ID NO: 46589 - DNA, 50 bp, Streptomyces coelicolor
  source 1..50: mol_type = genomic DNA
gtgatgctttgactaatcttcatcctgaagagcattattagaagcaccac

SEQ ID NO: 46590 - DNA, 40 bp, Streptomyces coelicolor
  source 1..40: mol_type = genomic DNA
gtcctcggacctgtgcagcctgcagaagaaggggccgcac

SEQ ID NO: 46591 - protein, 553 aa, Rhodococcus pyridinivorans
MNVPQRTDPADPAVAVSYIRVSTKEQAERDGDPEGYSIPAQREANRRKATAIGAVILEEFVDRGESARSADRPELQKLLRFIAANPVDYVLVHKVDRLARNRVDDVEINLAIRKSGATLVSATENIDETASGMLLHGIMSSIAEFYSRNLATEVLKGMEQKAKTGGTPGKAPLGYRNVAALNAEGREVRTVAVDPDRAPLITWAFQAYATGDWTLRRLAGALEARGLTSRPTTRSPGGPLALNSVHKILRAPYYKGEVTYRGVQYPGRHQPLIDDATWARVQEVLDARATGERFREHPHYLKSSVFCGGCGSRLIVTMSKNRYGTLYPYFICLGRHSKSNGCMRKAVLISVVEELVEDAYRTIQLDPEVRRQIETRLRAEIAATRASIDAEVRDLITQKERLLAERSRLLQAHYAEAVPLDLLKSEQDRIARQLGAIEERLSAANVAIDDVEANLQRALDYATHCYQGYLAAGPHVRRLYNQAFFEKIYVEDDDVRVTLQEPFKTLAGPVAIGDAEERVTGTAEPSAPSLTEVMSRNNKPSSWDEGLNEIILV

SEQ ID NO: 46592 - DNA, 50 bp, Rhodococcus pyridinivorans
  source 1..50: mol_type = genomic DNA
aggtttgaatgaaataattctggtgcgcctccgtggatccctttcaagcc

SEQ ID NO: 46593 - DNA, 40 bp, Rhodococcus pyridinivorans
  source 1..40: mol_type = genomic DNA
gtccgccggcggtcgaggtgcccccggcaggactcgaacc

SEQ ID NO: 46594 - DNA, 50 bp, Rhodococcus pyridinivorans
  source 1..50: mol_type = genomic DNA
aggtttgaatgaaataattctggtgggcctccgtggatccctttcaagcc

SEQ ID NO: 46595 - DNA, 40 bp, Rhodococcus pyridinivorans
  source 1..40: mol_type = genomic DNA
ggccaccgagtggggaggtggcccgggcaggattcgaccc

SEQ ID NO: 46596 - protein, 469 aa, Collinsella sp
MPKTAVIYARFSCSKQREASIDDQLRVCRDWCRREGYAIAAEYCDYAISGRTDDRPEFQRMIANAGESDIALVYMMDRFSRGEYDAPIYKRELAKHGVKLVSALEAIPDSPEGIIYEKLLEGLAACESKKTAIRTRRGMEGNALRCKTNGVRIFGYRRNEDDEYEIDPDQAALVREAFERKINRETTNAIAADFAQRGVRTRSGNPCGYSMVHQMLHNRRYTGRYEWGGIVREGGMPQIVDEATFMRAQGVRGVKQRSTEDWGDFALAGRAICAGCGRNLQGVSGRERRNVKYEYYSCAGGCMRNVRREELEGAIVGALRELLSDRAEAMRIARMVAERADGAEVQARRRQAAESLSAAERGLKNILNAIEQGIIAPGVKGRIAELEEQKARAEYDLQALREQRIDPERFADFLQCGARLDDSTLLKAFVWQASVSDGEVLVTLNYDAENDEPARLDIQRVRGKLEWCP

SEQ ID NO: 46597 - DNA, 50 bp, Collinsella sp
  source 1..50: mol_type = genomic DNA
gggttcgaggaaagttggaatggtgccccgtccgaacatcttctcgaacc

SEQ ID NO: 46598 - DNA, 40 bp, Collinsella sp
  source 1..40: mol_type = genomic DNA
gcttctcagtttaaatggtgcccccagcgggattcgaacc

SEQ ID NO: 46599 - DNA, 50 bp, Collinsella sp
  source 1..50: mol_type = genomic DNA
gggttcgaggaaagttggaatggtgtcccgtccgaacatcttctcgaacc

SEQ ID NO: 46600 - DNA, 40 bp, Collinsella sp
  source 1..40: mol_type = genomic DNA
gcttctcagttcccatggtgttcccaacgggcttcagttc

SEQ ID NO: 46601 - protein, 624 aa, Lachnospiraceae bacterium
MKTKQTGSGKITALYERLSRDDELTGDSNSIINQKKLLEDYAKSHGFTNCVHFTDDGWSGANFDRPNWKRMIESIESGEVSHVLVKDLSRVGRDYLQVGFYTEVMFRENGVRFIAIANGVDSDKRESSEFAPFLNIMNEWYVRDSSRKITTVLRAKGMSGAHLTNHCIYGYKKDPNDKNHWIIDEEAAEVVRRIYRMAIEGKGPYETARILALEKIERPSYYLAQRGMGNHKSNYNSTEPYAWRGNTISDILSKPEYMGHTVNFRTYKESYKDKRSKATPKEDLVIFEDTQEAIIDKETWERVQSLRKTIRRTDTIGEANPLTGLMFCADCGAKMYNHRGKAGKARDWAGRPNGKRRPDRDEYNCSRYDLGNQRYDTYCTTHLIRTVVVNELLLEAIKEVCNYAQNNEAAFIEQVCSASGERQKKAIKTIRQRKQRSEKRADELSRLIRKLYEDNVNGKLSDKLFEQMLHDFELELDGLNTSITQDQQELDRISSESVNAEKFIALVKRYTDFSELTPAMINEFIEKILVHQAEGKGASRTQEIEIFFNFVGKVEIPHEEVELTEEEIAAIAEQERRRAKKAEYNRRYMQKKRKQWKEQQEQAQEPQEPIELPLVQDEKGALSA

SEQ ID NO: 46602 - DNA, 50 bp, Lachnospiraceae bacterium
  source 1..50: mol_type = genomic DNA
aacacccttgacaaagcgtatcagatgttatatgctatgaaagggggata

SEQ ID NO: 46603 - DNA, 40 bp, Lachnospiraceae bacterium
  source 1..40: mol_type = genomic DNA
ccaccgaaacagtacacagaagataccctgctttctgcga

SEQ ID NO: 46604 - DNA, 50 bp, Lachnospiraceae bacterium
  source 1..50: mol_type = genomic DNA
aacacccttgacaaagcgtatcagaggttatatgctatgaaagggggata

SEQ ID NO: 46605 - DNA, 40 bp, Lachnospiraceae bacterium
  source 1..40: mol_type = genomic DNA
ccacataaaaagcacaccgaggatccacagctttctttga

SEQ ID NO: 46606 - protein, 540 aa, Sphingomonas taxi
MGNDTFAGKRVFVYARVSTTRQEKNDLSLPDQIATAERWVEDSGAQTVRVFSEAGSATDDNRRAFREMIALAESDERPVDIILAHSLSRLFRNALDFMQYRERLRRKKIRIISVTQNFGDDTTSDLAVSMLAIFDEYHSAENAKHVRRTMVANAVNGFWNGQTPPIGFRTYNVPQTRGKDRKKLEHDPETVDMIRYTFKSYLQGTADGPIGVTGLAHHLNERGYRIRGKRFSVGTLHNILTNTAYIGYVIFNRRDSRTGETRPEIEWVPIPVPPIIDEDTFYAVRQQMADRDPRMGEAAAKTNMNLLTSRAICGCGEDGCGAGMMTSTGKSGQYRYYACSARIKRGPDACPGRRVPMEHLDDLVVGAVTRHLVQPGRLTALLQTWLDRSETAVAERAAELKRLRARLTQLEGESARVIKLVRNETLSPDDPQVATELGNIRAQKASTQADIEVLERQLDAGDRRITPAIIAEFGNLLRHKLHEPDGRTRKEYIHLLIDCVEVGDRQIRITGRNAALERAVVASQKPDARVPKAERKWCTR

SEQ ID NO: 46607 - DNA, 50 bp, Sphingomonas taxi
  source 1..50: mol_type = genomic DNA
cgagtgcccaaagctgaacggaaatggtgcacccgaggtgaaagcggtgg

SEQ ID NO: 46608 - DNA, 40 bp, Sphingomonas taxi
  source 1..40: mol_type = genomic DNA
ggagatgataaatgaagtttggtgcacccgactggattcg

SEQ ID NO: 46609 - DNA, 50 bp, Sphingomonas taxi
  source 1..50: mol_type = genomic DNA
cgagtgcccaaagctgaacggaaatcgtgcacccgaggtgaaagcggtgg

SEQ ID NO: 46610 - DNA, 40 bp, Sphingomonas taxi
  source 1..40: mol_type = genomic DNA
ggagattctaactgaattttcgtgtagccacttggattct

SEQ ID NO: 46611 - protein, 471 aa, Brevibacterium aurantiacum
MTIRAALYLRQSTHREESISLELQEAACRRHCEERGYQVVMVESDPGISGRTFNRPAVKRVMEAVEAREVDAVILWKWSRLSRSRRDWAIAADRVDVAGGRIESATEDIDVSTSHGRLARGMMVEFAAFESERIGDQWKEAHQRRVSMGLPANGKPRFGYRRLDEGFEPDPETGPVLADMYRRYISGESFYALVKTLNDNSIDTVPGYGTSGGAWSQRSLQRVLDSGFGAGLIRSHEEYFPGAHEPIIDEDEWKDYRAARDRRRVHRGSERSTYLLSGMVRCHCGSSMVAGQFGWKRVPKFRCKAAAEKRAHDGGYVSAHVLDDEVKAWLRGIVSDLSEVATAEAGLQSKRSQASSNLSKLGSTLTRTEQAITRLTVSYAEGILDLEAYRSATKELEQKRDGLMSTINSAESERRAIPVSLEVVQSLLDDWDIIGIEQRREMLRGLVRHVVVKPQRPKSNVTVVPIWDAGV

SEQ ID NO: 46612 - DNA, 50 bp, Brevibacterium aurantiacum
  source 1..50: mol_type = genomic DNA
cgggtgcctgcaccgaccgtcacgttcgtgagagtctgcacagacaccca

SEQ ID NO: 46613 - DNA, 40 bp, Brevibacterium aurantiacum
  source 1..40: mol_type = genomic DNA
gggttgggtcctcatcactttgatgacggcagggttggtc

SEQ ID NO: 46614 - DNA, 50 bp, Brevibacterium aurantiacum
  source 1..50: mol_type = genomic DNA
cgggtgcctgcaccgaccgtcacgaacgtgagagtctgcacagacaccca

SEQ ID NO: 46615 - DNA, 40 bp, Brevibacterium aurantiacum
  source 1..40: mol_type = genomic DNA
gggctggatgtccaagaccaagatgtcggcagggttggtt

SEQ ID NO: 46616 - protein, 522 aa, Bacillus cereus; identical to SEQ ID NO: 42596

SEQ ID NO: 46617 - DNA, 50 bp, Bacillus cereus; identical to SEQ ID NO: 42597
  source 1..50: mol_type = genomic DNA

SEQ ID NO: 46618 - DNA, 40 bp, Bacillus cereus
  source 1..40: mol_type = genomic DNA
tgggtatggggaagtgaaccagtacaaccgccacagtaca

SEQ ID NO: 46619 - DNA, 50 bp, Bacillus cereus
  source 1..50: mol_type = genomic DNA
tggttacatccctgctaattaaactggtataatcgctcatcatctaccct

SEQ ID NO: 46620 - DNA, 40 bp, Bacillus cereus
  source 1..40: mol_type = genomic DNA
tgtgggtgggaatgtaaaatggtacaaccgctacagaaaa

SEQ ID NO: 46621 - protein, 494 aa, Microterricola viridarii
MDRDGRGEGIDRQRARCTALAESRGWELVQEYTDNDVSASKPRGKGTAWYRMMHDVKSGSIDTVIAVDQDRLLRTLSDLVTLMDMGVKVVTVDGEIDLSTAEGEFRASMGASMARFEVRRKSERQVRANAHRRGLGLPPGGRRAFGYTKLRNGASLDSATRLTADGNTYPDFGHQPTEPEASAVRRGFALLLSGASIQSIAKTWNAEGLTTTTGTPWQPYSVRAVLSNPRYAALVAPPRVSDTTSPGHYLSLDDLAVGSWEPLVSLETWQASRDLLADPVRKSNPGRLPRTLLSGIAWCETCRAPMRAGVTNGIKLYRCSTGIHISRKREDADYFIQHIVLNRLATPDAASALLDRRDDSDTQRLREELRAAQAAERNVLALVSQGLTTLTKASASLRDVRERVAAIETALSEVGKIDVVSELIGAADAAGASAPARWTAVATMWEGMDVERRRAIVAALLDIVMASPGKGSRAPKDAAGRLAHTERTMTLTWR

SEQ ID NO: 46622 - DNA, 50 bp, Microterricola viridarii
  source 1..50: mol_type = genomic DNA
atctcccccaaatcaatgttggtcacgcgctgtatatatctaagtcataa

SEQ ID NO: 46623 - DNA, 40 bp, Microterricola viridarii
  source 1..40: mol_type = genomic DNA
gtcggcgatcgaccaggcgacgcgcagaatgcggtcgtag

SEQ ID NO: 46624 - DNA, 50 bp, Microterricola viridarii
  source 1..50: mol_type = genomic DNA
atctcccccaaatcaatgttggtcgcgcgctgtatatatctaagtcataa

SEQ ID NO: 46625 - DNA, 40 bp, Microterricola viridarii
  source 1..40: mol_type = genomic DNA
ggcggcgctcggcccggcggcgggcatgctgcgggcgcag

SEQ ID NO: 46626 - protein, 561 aa, Citrobacter freundii; identical to SEQ ID NO: 37326

SEQ ID NO: 46627 - DNA, 50 bp, Citrobacter freundii; identical to SEQ ID NO: 37327
  source 1..50: mol_type = genomic DNA

SEQ ID NO: 46628 - DNA, 40 bp, Citrobacter freundii; identical to SEQ ID NO: 27553
  source 1..40: mol_type = genomic DNA

SEQ ID NO: 46629 - DNA, 50 bp, Citrobacter freundii
  source 1..50: mol_type = genomic DNA
ttaggttcttataataaaaatagcaggcagactttaggagaaaggccgta

SEQ ID NO: 46630 - DNA, 40 bp, Citrobacter freundii
  source 1..40: mol_type = genomic DNA
tttggctttattattcgttagccaattatgtatcccatag

SEQ ID NO: 46631 - protein, 495 aa, Streptomyces hygroscopicus
MTNDSQLVPVVAYARISADLARDGHGVEDQHRVNDETAATLGLKIVHYYTDNDLSAAKADLVRPDFEAMLRALKAGRLPDAQPVRGAIVVADDRLVRRVGDYERFVDALTYEDGRVYADAKGLKDLYNEDVESMGLFGVVIAKAEVRKIKRRTRRSHRRRAEEGIPVGGKRPFGWKDDKLTLEPDEAALLAEAARDVIAGKSLHSIQLRWNDAGVRTVHGNEWRSRSLKLALWNPRLCGWRKHNGELVRDVNGLPVVGKWESIITPKEWMAIDALFSARIGPNVKADGTVTDYRTPSYLLTGILRCGKPKGDGQICNAPLRVSARQDLSGGYVYQCPSRSMGGCGGSARNGAKVDEYITEAVLAKLEERTAAKTQLDAEWGGQEELDRLMLKQRKMLQAWQEDQISDELFFPENHKMESRIKVLRKERTQHALQVQRASVVTEDVRKQWYSGKLDMAQKRALIREALHAVIVLPVGGGGRRPFNPDLLVPKWTES

SEQ ID NO: 46632 - DNA, 50 bp, Streptomyces hygroscopicus
  source 1..50: mol_type = genomic DNA
tgttgcggtcaagatactgctggtggtactcctgtctctcgggcaatatt

SEQ ID NO: 46633 - DNA, 40 bp, Streptomyces hygroscopicus
  source 1..40: mol_type = genomic DNA
ttgtccaagtactgctggtgatatgcctcggcggggtaga

SEQ ID NO: 46634 - DNA, 50 bp, Streptomyces hygroscopicus; identical to SEQ ID NO: 46632
  source 1..50: mol_type = genomic DNA

SEQ ID NO: 46635 - DNA, 40 bp, Streptomyces hygroscopicus
  source 1..40: mol_type = genomic DNA
ttgctcaggtactgctggtggtagtcttccgcatagtaga

SEQ ID NO: 46636 - protein, 463 aa, Lysinibacillus sphaericus
MEKKKRVALYSRYSTHTQDGNYSIEIQLERMEAMCKSKGWEVTEYFSDAAYSGANMDRPELQNLLSRLSEFDVVMVYRLDRLSRSQRDTMTLIQDHFLLNDVAFVSVSETLDTTTAFGMAMIGILAVFAELERATITERMQSGIKKRIEAGYRLVSGNHMPTGYKKGSDGNGNNILVIDDTQAKKVQRIYELYEQYHSITKIQHVLKEEGYSGRRFTTIRQILSNRLYLGEVKYKNEYYEGIHESIISPEQFDRVQALLARHPKGANAGKAKESLFSGFIYCGCCGENYKTYSYKVENKVKGNYYVRSYLCRARRFPSEYDQKCMNQIVKNDTLEDLFIKNLDILISNRQTETVKSKRKTNYDLALKKVDEKIARLIDLYEDGELDKKTLNIRVEQRKKEKEDIILKKNLEAQYEAVNIEIKDVNNYLTKYEMMDFIEKRALVEKVLDRIVIEPNEINFEWNI

SEQ ID NO: 46637 - DNA, 50 bp, Lysinibacillus sphaericus
  source 1..50: mol_type = genomic DNA
attcggttttcatttcatgctccacaagagacgaataatgaagacggaat

SEQ ID NO: 46638 - DNA, 40 bp, Lysinibacillus sphaericus
  source 1..40: mol_type = genomic DNA
ctccgttttgcctgctccacatacagcatgaataagatgg

SEQ ID NO: 46639 - DNA, 50 bp, Lysinibacillus sphaericus
  source 1..50: mol_type = genomic DNA
attcggttttcatttcatgctccagtagagacgaataatgaagacggaat

SEQ ID NO: 46640 - DNA, 40 bp, Lysinibacillus sphaericus
  source 1..40: mol_type = genomic DNA
ttaagttttctgagctacagttacatcatcaataagatgg

SEQ ID NO: 46641 - protein, 566 aa, Streptomyces agglomeratus
MTEKPQVNTGGQSTHSHTGMNTTDALRGVSALRLSVLTDETTSPERQREANQGAATALGIDLADREAVDLGVSASKTTPFERPELGSWLRRPDDFDALVFWRFDRAVRSMDDMHALSTWARDHRKMIVFAEGPGGRLVLDFRDALNPMAQLMVTLFAFAAQMEAQAIRERVTGAQAAMRIMPLRWRGSRPPYGYIPAPMEGGGWTLVQDPETVPVIERIIRELMGDPSKGVPGKSAAAIAAGLNDDGIPSPRDYWSLRKGRETGGKTGGKAGETVTRERFAWRHGAVKGILTSERILGWKMHEDKPVRDSEGAPVMATAEPILTREEFDAVGALFAERSVDNKSADRTDTVALLLRVIVCAGCGERMYLHRPSKGGKSISKTETYKCGSYTRGTTCESRATVKREWAEEYVESEFVRMLGALNVTEVRTIPGYDPGPELVATLAEFEEHQRQEGRQKSKAAREAWQRRADALDARLAELESREKVEPRTEVIQSNETYADIWEARDTAGKRRMLLEAGARLTVKRGTQGGWRTLDVRRVSFDLQTPFFNDAAADLTAMAAELEATA

SEQ ID NO: 46642 - DNA, 50 bp, Streptomyces agglomeratus
  source 1..50: mol_type = genomic DNA
aactggaagtcacgagcctccggaaacccgaaggctccagactagtagtt

SEQ ID NO: 46643 - DNA, 40 bp, Streptomyces agglomeratus
  source 1..40: mol_type = genomic DNA
ggtgtcctgcggccgggacaacccgtacgggcatcccatg

SEQ ID NO: 46644 - DNA, 50 bp, Streptomyces agglomeratus
  source 1..50: mol_type = genomic DNA
aactggaagtcacgagcctccggaggcccgaaggctccagactagtagtt

SEQ ID NO: 46645 - DNA, 40 bp, Streptomyces agglomeratus
  source 1..40: mol_type = genomic DNA
ggtgtcgggcggccgggttggcccggccgggcaggctgtg

SEQ ID NO: 46646 - protein, 528 aa, Salmonella enterica; identical to SEQ ID NO: 37481

SEQ ID NO: 46647 - DNA, 50 bp, Salmonella enterica
  source 1..50: mol_type = genomic DNA
tgcggtgtacatactttacctactgggacagttagtgtatgatgtacgcc

SEQ ID NO: 46648 - DNA, 40 bp, Salmonella enterica
  source 1..40: mol_type = genomic DNA
tgcggccccatcagcagcatggaacagtcggtggtaccgc

SEQ ID NO: 46649 - DNA, 50 bp, Salmonella enterica
  source 1..50: mol_type = genomic DNA
tgcggtgtacatactttacctactcggacagttagtgtatgatgtacgcc

SEQ ID NO: 46650 - DNA, 40 bp, Salmonella enterica
  source 1..40: mol_type = genomic DNA
cgcggctcctccagcggcgcggagtagttggtggtcccgc

SEQ ID NO: 46651 - protein, 691 aa, Actinomyces sp oral taxon 448
MSYRTAPATHSGASYDASPAIPPSPDPLAAMAAQLTPKRAVSYIRVSTREQAQRGGSEEGFSLPAQREANKRKAQSMGALVVKEFADRGESARSANRPELQKMLTYLKQDGGIDYVIVHKLDRLARNRADDVEINRAFEQAGVRLVSTSENIDQTPGGMLLHGIMSSIAEFYSRNLANEVLKGMGEKARNGGTLGKAPLGYVNVRARDENGREIRTVALDEERAPLIRLAFTEYATGNWTVSQLATHLAGLGLDLPPTPTKPAKPITKGRLHTLLRHPYYKGIVTFQDVEYPGRHQALVDAATWQTVQDIMDSHRNGERQRLHNHHLKTTIACGLCGARLLVQNAKNGRGVIYPYFVCSRRHRTHDCTFRAVLIEKVEEQVAELYQQIHLSHEDRKDIERHLLAELEHIEKNSAHDIRSLTTRRTNLEDQRRRLLQAHYEGAIPLELLKEEQDRLTRELTAIQHHLNGYHADAHQVRQHLTQALDLLEDCHRLYQAAPNHLKKLLNTVFFEHILINPAVDEDGRVILPGGQNPTEDSAEQDPRGSTAQESTDRAKGEVAGTAGRVSSGDGDRSEAPAAAVDDEPQTEPPARPPLLIRDSSSRTSAASYLAWPFDQLTSHGLHHAAQQYTQAVTSDDGSSYDAAGGPGSPHSLYTAPSQRRTPTLTGERASSSETAPDTISHSACSYRSVVV

SEQ ID NO: 46652 - DNA, 50 bp, Actinomyces sp oral taxon 448
  source 1..50: mol_type = genomic DNA
gtgttcgtataggagcgtcgtggtgcgcctcggcacactcaatacgaaca

SEQ ID NO: 46653 - DNA, 40 bp, Actinomyces sp oral taxon 448
  source 1..40: mol_type = genomic DNA
ggcgagagcgcaatgttgtgcccccggcggggttcgaacc

SEQ ID NO: 46654 - DNA, 50 bp, Actinomyces sp oral taxon 448
  source 1..50: mol_type = genomic DNA
gtgttcgtataggagcgtcgtggtgagcctcggcacactcaatacgaaca

SEQ ID NO: 46655 - DNA, 40 bp, Actinomyces sp oral taxon 448
  source 1..40: mol_type = genomic DNA
ggctggagggcagtggtgtgacctccgtggggttcacacc

SEQ ID NO: 46656 - protein, 503 aa, Corynebacterium amycolatum
MTTRAAIYLRISLDAAMDGLAIDRQRQDCEALAEQRGWDVVHTYVDQSISASKKDVDRPDYDAMVASFERGEIDAIICWDLDRLTRQPWQLEEWIDRAEEQGLKLVTANGDADLATDGGRMYARIKAAVARGEIERKSMRQSRAQQQRAEQGRWYSGGVRPIGYTSTGEIIPSEAAAVLGMFRAVERGNSMRDIARALSGVDQPGLPDIPTTPRHMHTVVTERNARRRAAGQEEKPVPDAQPWAYTSLHSILRNPVYAGYSTYKKAKRKGVKDKYRRVTHIVRDPDTGEPVKGQWEPIVTPDLWWRVQNVLDDPDRLTNKERRNTRRHLGSGLYVCDECGNPVRTHADRYRCAACGLVRTHSVDDFVLAVIRARLGRDDLADLLPTADDDEVGAIDEELAELRAKLARVQADYDEELIEARDLKRARNRYEPQIEKLETRRARLAGASALLDTTGYASPVDAFDNAELAVQRRVINTLCQVRLRRGVRGSKTFNPESVQIVWN

SEQ ID NO: 46657 - DNA, 50 bp, Corynebacterium amycolatum
  source 1..50: mol_type = genomic DNA
ttatttatcgacgacactccgtcgagtttcgtttcaatgtaacctgaggc

SEQ ID NO: 46658 - DNA, 40 bp, Corynebacterium amycolatum
  source 1..40: mol_type = genomic DNA
cacgacggtgatgtggtggagttcaagttcaacgtgtagt

SEQ ID NO: 46659 - DNA, 50 bp, Corynebacterium amycolatum
  source 1..50: mol_type = genomic DNA
ttatttatcgacgacactccgtcggatttcgtttcaatgtaacctgaggc

SEQ ID NO: 46660 - DNA, 40 bp, Corynebacterium amycolatum
  source 1..40: mol_type = genomic DNA
caggagagtgctttggtgggattccagtgcaaagtatagg

SEQ ID NO: 46661 - protein, 494 aa, Eubacterium limosum
MLGVIYARYSEGPNQTDRSIEGQVSDCMAYAAENDIQIVDTYADRSKTGTNDNRDAFQRMLKDSSKKLFDCVIVWKIDRFGRNREEIAINKVKLKKNSVALYYAKEHIPEGPEGIILESMLEGMAEYYSANLSQNVKRGIRVAAEHCRATNGSLGYGFKKGPNKEYLIDEMQAPVVREIFTRYAGGESIAMIIDDLNARGIRTATDGPFNKNSIRVMLQNEKYIGIYHCGDVRIPGGVPAIIDPDTYQIALTRFLAAKHSRQPRRKLDRSRFFLTGKMYCAECGSSLIGESGKSKTGAMHYYYNCAGKRKKTAVCSGLRIKKDVIEKMVFDLTMSVVLDDKIINMIADKIMEIQEQSNNNARISALKNEKKEAQKKIDNIMTAIEQGILTPTTKDRLVQLEEQKASVEYAIETEKIKSAPITRDMVLFFLHQFRKAKINDELSFMSLIDAFIGRIDLSPKKITITYNYCDKNKKTCADLDKPDQNRVRLSSKWC

SEQ ID NO: 46662 - DNA, 50 bp, Eubacterium limosum
  source 1..50: mol_type = genomic DNA
gggttcgtctaagttcaaagtggtgcagtaaattagaccttaaccgaact

SEQ ID NO: 46663 - DNA, 40 bp, Eubacterium limosum
  source 1..40: mol_type = genomic DNA
gttttatataaaaagtggtgcggatgaagggagtcgaacc

SEQ ID NO: 46664 - DNA, 50 bp, Eubacterium limosum
  source 1..50: mol_type = genomic DNA
gggttcgtctaagttcaaagtggtttagtaaattagaccttaaccgaact

SEQ ID NO: 46665 - DNA, 40 bp, Eubacterium limosum
  source 1..40: mol_type = genomic DNA
ggtttcaacaaaaagttttttgggtgaagggagtggacac

SEQ ID NO: 46666 - protein, 553 aa, Roseomonas sp FDAARGOS 362
MPVRIKDMIEADGYGRHSDKGQDLGDSQRRQRTNIDKACAEKGVRLNTFHYDKGHSARDGANLLPGTYLWNYEEAARRGEKRGRWFVVEAQDRIARSDPDRATAFITNLTSSGVTILYANTGEIVSPGSGLREMIKPMIEAESANKSNEERIGRVIDNIQRRRTLEADSIYIARVPDWLTCPKKTRKGEVRSLDLIQPKPGAKALIEEICTWRAAGDGSVVIADRLNGLAVNNKGYRPWRGERWSGEVIKRLCGNPAIIGTYIPHTTKKQPGTKTLIRTPGEPKPDYYPRMIGDDLWQRVQAARRADVQVPSGRPSRSLVNLFQGLCVCDDCGSSMYLSGHNVRGRQDRLICSQKKKSGARACTNRTHYSVQRLEAAFLDQGLTAFSKASDFAAARADADALAAALTEAEAAVREAQDALKNVRALMLMAKTDRDRAVVMATLSDANEALERAENDRDVASLKLDQLRGNDPDRLYREAEELVATCLAGNMDARRRMAGLLRTLIARVRFGQEIASVVSARYARVEFGVYLGRDKTVPPKLFIDRPPVAMAAE

SEQ ID NO: 46667 - DNA, 50 bp, Roseomonas sp FDAARGOS 362
  source 1..50: mol_type = genomic DNA
ggtaccgaaagggggcagcactgattgtactgctatcggcattcgggcat

SEQ ID NO: 46668 - DNA, 40 bp, Roseomonas sp FDAARGOS 362
  source 1..40: mol_type = genomic DNA
atgcagcgccgagatgaggttgtagtgctcctcccggtcc

SEQ ID NO: 46669 - DNA, 50 bp, Roseomonas sp FDAARGOS 362
  source 1..50: mol_type = genomic DNA
ggtaccgaaagggggcagcactgagggtactgctatcggcattcgggcat

SEQ ID NO: 46670 - DNA, 40 bp, Roseomonas sp FDAARGOS 362
  source 1..40: mol_type = genomic DNA
atgcagtgccacgacctgggggaagtgctcctcacggtga

SEQ ID NO: 46671 - protein, 492 aa, Aeromonas caviae
MNAYLYQRISSKKQTAGVGLDRQLENALSYCKQHSLTVIDTQQDVASAFHAKHLDGHLGAFLAAIKDKLIEVPSALVVESLDRLGRDHTLSALSRFIDIIQAGVEIHEVSTGTVYNARDTHLLHLALAVMERAHNESYMKSKRSKDAIQRKLSAAKDGKIIRKNVPVWIDVIGDALQLNEHAVTVKRIFDLYLSGMSFRAIARELNSTCTPYPIKQAAKKLRVERWGSARVSTMLSSPAVYGQFTPKDGDVIEDYFPAVVDVATYEKVKSIRTTRQVKATKITGLLSIVSSCCVCAECKHSYICHYRSWTNAEGKEERINLRCNGRMSGTLCKGKSVPMEVVEQHILESLPNVDISKLNRNKMRTLDNLKAKREQLQAEMENLIDLVAMGSAVAKEKFKAIQERAEQLDTKIEKAAERILPEEVVQHNAAALNPENLELRRKVNSALQLMGLRVEIDAHAANSATLNIFLKHQHIETKKIQWNRKKRIDARS

SEQ ID NO: 46672 - DNA, 50 bp, Aeromonas caviae
  source 1..50: mol_type = genomic DNA
ttgcgcagttgtgtactacgctgcgagcatagtacactgctactgcacac

SEQ ID NO: 46673 - DNA, 40 bp, Aeromonas caviae
  source 1..40: mol_type = genomic DNA
ctgcggcggcgtgccgacggacgtgcgcatcaccacgcgc

SEQ ID NO: 46674 - DNA, 50 bp, Aeromonas caviae
  source 1..50: mol_type = genomic DNA
ttgcgcagttgtgtactacgctgcgtgcatagtacactgctactgcacac

SEQ ID NO: 46675 - DNA, 40 bp, Aeromonas caviae
  source 1..40: mol_type = genomic DNA
ctgcggcggcgcgcggccggtcgtgtgcaaacaaacacgc

SEQ ID NO: 46676 - protein, 545 aa, Gluconobacter kondonii
MTYLSGISSPLQPKASLRAALYLRVSTGRQAEHDLSIPDQKRQIETYCSAKGWEVAVVFIEPGASATDDRRPEFQKLMEAAAEKPKRFDVVLVHSFSRFFRDHFELEFNVRRLAKQDIRLVSITQELGDDPSAVMMRQIMALFDEYQSRENAKHTLRAMNENARQGFWNGSRPPFGYRTVEAERRGQKIKKKLEIDPIQSETVRLIFRLYRYGDGQSGGLGIKAIVSHLNAKGNRTQTGSRFSCKFIHDVLTRETYAGRHTFNVVEAKTGRKKASDEVITIKAPVIISRSEFLEVQQRLKQNAPRVTAPRIVNGPCLLTGLAVCATCGGGMTLRTGKYGRYRYYTCATQARQGKTACKGRSIRMDLLDTLVMEHLATRLLTKDRLGVILEALLTQYAANQNRDAARQESLRHASREAEQKLQRMYAAIENGVVDATDPTLRGRLDALKAQRDETSRLCARAEAPAMVVPVITDEMIERFSRDLRAKLADGPVDMRKEYLRAIVDRIEVDDREIRIFGRKDRLMNQLVSDRPKLNPKVPSFGREWC

SEQ ID NO: 46677 - DNA, 50 bp, Gluconobacter kondonii
  source 1..50: mol_type = genomic DNA
ttccaagttttggacgggagtggtgtgccgatggcaacgaaactgagaac

SEQ ID NO: 46678 - DNA, 40 bp, Gluconobacter kondonii
  source 1..40: mol_type = genomic DNA
attaccaaatagatttggtgtcccataggggattcgaacc

SEQ ID NO: 46679 - DNA, 50 bp, Gluconobacter kondonii
  source 1..50: mol_type = genomic DNA
ttccaagttttggacgggagtggtatgccgatggcaacgaaactgagaac

SEQ ID NO: 46680 - DNA, 40 bp, Gluconobacter kondonii
  source 1..40: mol_type = genomic DNA
actacagaatagatttggtatcccttaaggcagtggtccc

SEQ ID NO: 46681 - protein, 522 aa, Sphingobium yanoikuyae
MARAVRTKTKQKAQEVQTPKAVVYARVSSREQEREGFSIPAQLKLLREHAEASGFTVAAEYVDVETAKQSGRTNFDEMIRYLRKHKTIQTIMVEKTDRLYRNLKDWVTIDELDVEIHLVKEGIALSRESRSSEKFMHGIKVLMAKNYIDNLSEEVRKGMLEKAEQGLWPSAAPFGYQNLMGQDGKKRIVIDPDQGPIIRRLFEWYATGSYSLKEIGALARQEGLAYRKSQRPVPISTVHKILRSRLYAGEFEWLGKVYQGSHEPVISKDLWYCVQDILDGRNKKTRNAKTGGGVREFAFTGLISCGHCGCAVTAEIKKGKYIYYHCTGFRGKCPEKFVREEVLEEQFAVLMAKLRFDENVYDIIVEALKDSFEVERHDHDEAMTHLHAESERLRKRLEAVYVDKLDGTVTDDFYRRMALQWRDELDRCQRDLVRHQDASNNYMDEGVALLKLARKALGLFEGSNGIEKRRLLNFVLSNCTWKHGELSAEYRQPFDMLANTVNETDPSQGGSGAATPLNEIWS

SEQ ID NO: 46682 - DNA, 50 bp, Sphingobium yanoikuyae
  source 1..50: mol_type = genomic DNA
cgctacccccttaaatgagatttggtcggccttcgtgttgtcctatagaa

SEQ ID NO: 46683 - DNA, 40 bp, Sphingobium yanoikuyae
  source 1..40: mol_type = genomic DNA
agtccgggcgaataaattggtcggggaaagaggattcgaa

SEQ ID NO: 46684 - DNA, 50 bp, Sphingobium yanoikuyae
  source 1..50: mol_type = genomic DNA
cgctacccccttaaatgagatttgtccggccttcgtgttgtcctatagaa

SEQ ID NO: 46685 - DNA, 40 bp, Sphingobium yanoikuyae
  source 1..40: mol_type = genomic DNA
agaccagacgaatgaagtgtctggagaaagaggatctgag

SEQ ID NO: 46686 - protein, 589 aa, Cronobacter malonaticus; identical to SEQ ID NO: 12416

SEQ ID NO: 46687 - DNA, 50 bp, Cronobacter malonaticus; identical to SEQ ID NO: 12417
  source 1..50: mol_type = genomic DNA

SEQ ID NO: 46688 - DNA, 40 bp, Cronobacter malonaticus
  source 1..40: mol_type = genomic DNA
gcttggcgtgaccatcggcaataccgacggcaatattatc

SEQ ID NO: 46689 - DNA, 50 bp, Cronobacter malonaticus
  source 1..50: mol_type = genomic DNA
aattatacccattacacttcagtgatcactaaagtaaaatacacctcatt

SEQ ID NO: 46690 - DNA, 40 bp, Cronobacter malonaticus
  source 1..40: mol_type = genomic DNA
gctaggcctgaccatcttcattatcgccggcaaggccatc

SEQ ID NO: 46691 - protein, 589 aa, Flavonifractor plautii
MVAANPIVIYSRKSKFTGKGESIENQIEMCRQYIRLQFGDDAAEQALIYEDEGFSGGTLERPQFKKMMADAKEKNFRAIVVYRLDRISRNIGDFAKLIEQLNRMKIDFTSIKEQFDTSSPMGRAMMYISSVFSQLERETIAERIRDNMHELSKTGRWLGGNTPTGYESESVSHVTIDGKTKKACKLKILPEEIGIVKLIYDKFLETGSLTKTETYLLQKGYTTKNGKQFTRFAVKGILSNPVYLIADEFAYEYLTKNHVDLFAEQSDFDGVHGIMAYNRTLQQPGRAHQIKPMEEWIVSVGKHQGVIEGKAWVKVQTILERNKSKSYRKPRSNVALLSGLLICGNCGEYMRPKLSKRRNAKGEFIYTYLCSMKERSRGYVCNMKNCNGNTLDADIIEQLKHLSEDGSDFIRQLEQSKRALLGNRQSYDAEISNLESEIAANEEEIKGLVSALGKSSGTSAESYIMQQIDELHEKGEGLKRHLAELKELTSSHALADIEFDLLAQMLSTFKDTVDKMTVEQKRAAIRTFVKEIIWDGTDAHVVLFGSEYEYEFPKIPAGLGKRVVDGQTEENLAEAAERGLAEPSGAGSK

SEQ ID NO: 46692 - DNA, 50 bp, Flavonifractor plautii
  source 1..50: mol_type = genomic DNA
cggagccgtcaggagcaggtagcaaatgctacactatcgtaacggacttt

SEQ ID NO: 46693 - DNA, 40 bp, Flavonifractor plautii
  source 1..40: mol_type = genomic DNA
tgcgtcccgctgcattgaaaatgagatcctgatgcacttt

SEQ ID NO: 46694 - DNA, 50 bp, Flavonifractor plautii; identical to SEQ ID NO: 46692
  source 1..50: mol_type = genomic DNA

SEQ ID NO: 46695 - DNA, 40 bp, Flavonifractor plautii
  source 1..40: mol_type = genomic DNA
tgcctctggctccatggaaaatgagatccaaatgtgcctt

SEQ ID NO: 46696 - protein, 541 aa, Faecalibacterium prausnitzii
MEKDKKVTALYCRLSKDDGSNSESLSIRTQKAMLMEYATRNGFGNCQYYVDDGYSGTNSDRPAFQELLDDIREGKVATVITKDQSRLGRNHIETGTYMEIFFPEHGVRYIAINDGYDSNEQSQMDIAPFRNIINEMYAKDTSRKIKSALRTRKKSGKYISSGAPFGYQKDPADHNHLVIDPNTAPVVEYIYSMAEEGLGLHRIAKRLHDEKVLKPCYYKKEMFGRFIDDEKMYDWDSAYISQVLHSPVYAGHIIYEAKPTVSMKSKKRRYIPFEERAIVPNTHEAIIPQDRWENVQRILYSRSSSFMCDKTDYDNIFKGIVRCADCGRTMLVKVEHRRKRNSVLDQTFYCCSTYRKYGAKACDSHNLEARVLHEAVFADIQAHAKAAVSNREALVKKIANQMHLRVSSDRAQHKRDLKQCKARIAEIEDLYAKLYEDVSKGLLPEKRFQMLADRYDKEQAELTEKIEQYEREGRAEHGQLDKIQDFIDEVSKYAGITELNYKILHQLIDKILVSKAEKVDGEYVQKIQIFYRFIGPLDAIE

SEQ ID NO: 46697 - DNA, 50 bp, Faecalibacterium prausnitzii
  source 1..50: mol_type = genomic DNA
gtcacctccgagaactatcctacagatgcaggacagtgcggttgggtgac

SEQ ID NO: 46698 - DNA, 40 bp, Faecalibacterium prausnitzii
  source 1..40: mol_type = genomic DNA
cagtgtgaccgccgcaaccgatgcaggccgggagggagaa

SEQ ID NO: 46699 - DNA, 50 bp, Faecalibacterium prausnitzii
  source 1..50: mol_type = genomic DNA
gtcacctccgagaactatcctacaattgcaggacagtgcggttgggtgac

SEQ ID NO: 46700 - DNA, 40 bp, Faecalibacterium prausnitzii
  source 1..40: mol_type = genomic DNA
cagtgtcccctgggaaaccatggcaagcctggagagagaa

SEQ ID NO: 46701 - protein, 521 aa, Pseudomonas savastanoi
MKQAISYVRFSSFRQHGGSSIERQTAMIAEWLTRNPEYRLSGLKFEDLAKSGYHGDHIKAGGGFGKLLGAVEVGAIKEGDVVLVEAIDRTGRMDTVDMLDLLTPILKAGVSIVTLDDGNTYNRASVNGSHIYMLMAKIQAANQYSEALSRRVTASYRIREEKAKAGEQVKRWTPAWLTVEGVVIDRIAKHVRTAFELYAAGVGKATISVRMRETGEPELAKCSSPTIEGWLRNRTVLGYWNDIPNAYPAIIEPDLFFRAQQRGKEAKTTRPVKTAKHFLVGLVKCGHCGGNYIMQNKDGRPHSMRCLNRQRLKDSGCDNTRTIPKPVLDYVRVATTMRAIETAFQRQQLTVSQKRILAIQSELEAVKKKITDLATAIQTVGAIPEIISQLKARQAEREALDAELLVQERTESPVDRFAAVRIEEDLLDNDPVKLNALLKGVDYRITVHADGLMIVNAPDEIYPWLYVGSDRTAKKYLLHHLDDVIKIDPKPHLTTRVIETVDIDELIPTLQLLRRTIRRQP

SEQ ID NO: 46702 - DNA, 50 bp, Pseudomonas savastanoi
  source 1..50: mol_type = genomic DNA
aagggtcacattaaaaagtgttgctcccagcttcttcgtatgtgacactg

SEQ ID NO: 46703 - DNA, 40 bp, Pseudomonas savastanoi; identical to SEQ ID NO: 34408
  source 1..40: mol_type = genomic DNA

SEQ ID NO: 46704 - DNA, 50 bp, Pseudomonas savastanoi
  source 1..50: mol_type = genomic DNA
aagggtcacattaaaaagtgttgcggccagcttcttcgtatgtgacactg

SEQ ID NO: 46705 - DNA, 40 bp, Pseudomonas savastanoi
  source 1..40: mol_type = genomic DNA
catccccctgaggccctgaggcccgcccatgtcaacatgc

SEQ ID NO: 46706 - protein, 521 aa, Pseudomonas amygdali
MKQAISYVRFSSFRQHGGSSIERQTAMIAEWLTRNPEYRLSGLKFEDLAKSGYHGDHIKAGGGFGKLLGAVEVGAIKEGDVVLVEAIDRTGRMDTVDMLDLLTPILKAGVSIVTLDDGNTYNRASVNGSHIYMLMAKIQAANQYSEALSRRVTASYRIREEKAKAEEQVKRWTPAWLTVEGVVIDRIAKHVRTAFELYAAGVGKATISVRMRETGEPELAKCSSPTIEGWLRNRTVLGYWNDIPNAYPAIIEPDLFFRAQQRGKEAKTTRPVKTAKHFLVGLVKCGHCGGNYIMQNKDGRPHSMRCLNRQRLKDSGCDNTRTIPKPVLDYVRVATTMRAIETAFQRQQLTVSQKRILAIQSELEAVKKKITDLATAIQTVGAIPEIISQLKARQAEREALDAELLVQERTESPVDRFAAVRIEEDLLDNDPVKLNALLKGVDYRITVHADGLMIVNAPDEIYPWLYVGSDRTAKKYLLHHLDDVIKIDPKPHLTTRVIETVDIDELIPTLQLLRRTIRRQP

SEQ ID NO: 46707 - DNA, 50 bp, Pseudomonas amygdali; identical to SEQ ID NO: 46702
  source 1..50: mol_type = genomic DNA

SEQ ID NO: 46708 - DNA, 40 bp, Pseudomonas amygdali; identical to SEQ ID NO: 34408
  source 1..40: mol_type = genomic DNA

SEQ ID NO: 46709 - DNA, 50 bp, Pseudomonas amygdali; identical to SEQ ID NO: 46704
  source 1..50: mol_type = genomic DNA

SEQ ID NO: 46710 - DNA, 40 bp, Pseudomonas amygdali; identical to SEQ ID NO: 46705
  source 1..40: mol_type = genomic DNA

SEQ ID NO: 46711 - protein, 490 aa, Streptomyces agglomeratus
MSPTSTFLPAHDADTAIYARLSRDRSGLSENVNIQIAEARDYADEQTWPVIGVFKDNDISASKYSTKPREDYNRLLGAIRRGQINIILITEMPRLYRRLEELLELIKLAETTKLRRIQTTDGISYDLSTAEGIHAAINAVNNAMLEAGRISKRVKRKQKARALAGKTHGGGRPYGYEKDGLTVRESEAAVIRECAERFIAGESIRDIVLDLNARGVRTATGCEWRIENLQRTIMKKRYIGVREYDGQEYPAVWPPILTREQWDRMEARRLSRKHRWPKGQTGVRKYLLTGFIYCGRCGGVMVGSGRTRQSGQPAQMRYRCRRTDNHGRVIGCGKSFRVAEPVELLVKEAVCHVFDDPKVAITLAPQVDEDKMRLLVMEYERRKAKLDQLVTDYATDVLSRDQFIQAKGIAEASVQEAREALAHYQDASAAARIPADQTIREAWDTSGLEWRRSVVQLVVEKVVVRPGHPGSKRWRGYRFNPEFIGIEWKR

SEQ ID NO: 46712 - DNA, 50 bp, Streptomyces agglomeratus
  source 1..50: mol_type = genomic DNA
tgggtgcactggccgtccgtggcgtccgccacggacggccagtgcacccc

SEQ ID NO: 46713 - DNA, 40 bp, Streptomyces agglomeratus
  source 1..40: mol_type = genomic DNA
tccgctgaactcgggggcctcgtccaggaagagaatcccg

SEQ ID NO: 46714 - DNA, 50 bp, Streptomyces agglomeratus
  source 1..50: mol_type = genomic DNA
tgggtgcactggccgtccgtggcgcccgccacggacggccagtgcacccc

SEQ ID NO: 46715 - DNA, 40 bp, Streptomyces agglomeratus
  source 1..40: mol_type = genomic DNA
tctgttggccataggggccccgtcaaggaacagaatccag

SEQ ID NO: 46716 - protein, 562 aa, Enterobacter cloacae; identical to SEQ ID NO: 44326

SEQ ID NO: 46717 - DNA, 50 bp, Enterobacter cloacae; identical to SEQ ID NO: 44327
  source 1..50: mol_type = genomic DNA

SEQ ID NO: 46718 - DNA, 40 bp, Enterobacter cloacae
  source 1..40: mol_type = genomic DNA
cttctcgcgccctttggccaacactaaacgtacactcata

SEQ ID NO: 46719 - DNA, 50 bp, Enterobacter cloacae
  source 1..50: mol_type = genomic DNA
tttatcaggttttagtatttcgctctcactaaacgggaaaaccttgtaaa

SEQ ID NO: 46720 - DNA, 40 bp, Enterobacter cloacae
  source 1..40: mol_type = genomic DNA
ctgctgccaccctctggccctcacccaatgcacacacata

SEQ ID NO: 46721 - protein, 568 aa, Mycobacterium persicum
MRALIVIRLSRVTDATTSPERQLQACRELCAQRGYEVVGVAEDLDVSASASPFDRPQIGNWLTNRLGEFDVLVFYRMDRIVRRLLDLADLIRYCQEHAVSVVSATEQFLDLTMPFGDIVALLVAKVAEMELAAISDRNASAARYNIRAGKYRGGIPPWGYLPEQTEEGWRLVQDPEQVEVIREVVERALAGEPLRSVAHDLTSRRILTPKDRFAQSQGREVKGYAWHSGPLKRSLTSPTLLGQVVAREPLTDAQGRVRRDAKGRKVFGPEAVVVSDDGSPVVRAEPILTREVFDRLGVELADRENRKEPTKRSSGLLLQVIYCGVCGRPAYRLKGGAGRKPRYRCASAQYRDPCGNRSIPMAEADEAVEGLLLGLLGTSERLERMWDKGSDHSAELTEIDSTLADLTDQLGSGAFSRGTPQRARLDARIASLAARQAELSAQGRQTVRLDVATDRREVRRLVGPPGRNSTQCVASFDGRHARVCLLARREGADAEHGARRPRNADAAAGARWGGGRFTGDVRSHEGEWGSGHGTIPRVEGDRPHRWSEDRRIRFRSERSLTPSVSGYP

SEQ ID NO: 46722 - DNA, 50 bp, Mycobacterium persicum
  source 1..50: mol_type = genomic DNA
ccggtgtaatcctcgacattcgagtactcgattgtgtagctttacacccg

SEQ ID NO: 46723 - DNA, 40 bp, Mycobacterium persicum
  source 1..40: mol_type = genomic DNA
cggcatgtccaccgtcgagtacgccatcgggaccatcgcc

SEQ ID NO: 46724 - DNA, 50 bp, Mycobacterium persicum
  source 1..50: mol_type = genomic DNA
ccggtgtaatcctcgacattcgagagctcgattgtgtagctttacacccg

SEQ ID NO: 46725 - DNA, 40 bp, Mycobacterium persicum
  source 1..40: mol_type = genomic DNA
cgccatgtacgacgacgagagcgccatcgacttcagcgcc

SEQ ID NO: 46726 - protein, 695 aa, Rhizobium leguminosarum
MKSELVKPTHLARRAVVYVRQSTPHQVISNQESLRLQYALRERARELGWHEADIDVIDADLGISGASTTGRNGFKELVGRVGLSEIGLILSIDVTRLARNCSDWYPLLDICGLRGCLIADRDGVYDPGSANGRLLLGLKGTISELELHTIRSRLTAGLLAKAERGELALMLPVGLVRDASGVVVKDPDLGVQERLELVFRTFLKFRTVAKVMRVLNDRDLPLPRRDRFGELRWARATVSAVARILKNPAYAGAFVYGRTRFRAAGRDGGSEAKTPKDIKDWRIIVKDRYPHYIDWSTYEKIRDIVRDNRAEYMRAKTRGAPRDGELLLHGIAWCGRCGYKMYVRYKGGGEYACNHLHSHSGLPDCQRVRAAQIDAAVADAFLAALAPGELDALARARQAQQQVNKALRAGAERELERKRYAAALAERQFNRVDPDNRLVASELERRWEAALSELRAAEDAVAQRASTEPAKRTGFSKDLNNKVVALFDSLPQIWANDATTDAHRKALLRCLVEKVVLDRGERDVALARIVWRGGAVTDLHVKMKVNSVAKLTRGEELRARLLELALTGVPDDQIAEILTREGHHSPNCEDKVLPITVQRLRLAAGIKAKAQRNRWTHEPTLLSAVQLAARLDIPVNWIYVQIRRKRLLIDQQSTGAYLFQNSPAVVNAVRDLRNRTINHLDLRIIQPHQEGHQHA

SEQ ID NO: 46727 - DNA, 50 bp, Rhizobium leguminosarum
  source 1..50: mol_type = genomic DNA
tcggccacattgcaggcgcatgaccaactcatgcacgtgaacgagccgcc

SEQ ID NO: 46728 - DNA, 40 bp, Rhizobium leguminosarum
  source 1..40: mol_type = genomic DNA
tttcaacggggcaaggtcacagttaatccaaacgctgcgg

SEQ ID NO: 46729 - DNA, 50 bp, Rhizobium leguminosarum
  source 1..50: mol_type = genomic DNA
tcggccacattgcaggcgcatgacggactcatgcacgtgaacgagccgcc

SEQ ID NO: 46730 - DNA, 40 bp, Rhizobium leguminosarum
  source 1..40: mol_type = genomic DNA
ctgtaacggggaaaggccaggctttctccaaaagctgcag

SEQ ID NO: 46731 - protein, 587 aa, Raoultella terrigena; identical to SEQ ID NO: 17391

SEQ ID NO: 46732 - DNA, 50 bp, Raoultella terrigena; identical to SEQ ID NO: 45352
  source 1..50: mol_type = genomic DNA

SEQ ID NO: 46733 - DNA, 40 bp, Raoultella terrigena
  source 1..40: mol_type = genomic DNA
gtccacaaggttttttggacagccaagggagacgaagccg

SEQ ID NO: 46734 - DNA, 50 bp, Raoultella terrigena
  source 1..50: mol_type = genomic DNA
caatctttttcttggtgtttcgggaaccctaatgataaaaatccaatctt

SEQ ID NO: 46735 - DNA, 40 bp, Raoultella terrigena
  source 1..40: mol_type = genomic DNA
gtccacagggggactaggaaagccaaggtagacagagcct

SEQ ID NO: 46736 - protein, 507 aa, Eikenella corrodens
MKRAIIYVRVSTTRQADEGISIDAQTDQCKKKAKELGASVLQIFRDEGITGTSAVKRQAFQRAIHYCAVNDVDYFIVWSTSRFARNKLDAASYKLLLRESGTRLVYASMNIDSDTDEGWFTDSIMEIMDEQVSRQISRDTRRAMLKNAEEGWFNGGRAPFGYQITSQGKRRKLVPNDAEKTLVQEAFRRFAAGEGAIAIARSFTGRGYTRRGAEWQAASLSHMLKNRVYLGQTVYNKRSGNKPNPPEEWIIRQTHEPLVSEKDFEAVQKRYRPDYKQTGSPSSRFLFTGLLRCGHCGKAMSIETATSKTKRRYNYYNCSGFKKGCDCISRRISAEKLDDYLLNIVVDKLLTQEVVSDFIGEAYRKYVEKRTNNAEQHKLLQQELTELRRRRNTLFELVESGLSGSDSRSLLERVAGYDEREQTLLIELDKLAGAPDVDAIPEIDVDSALRTLKTILLNTANEKKLRILLQSFIRKIDINPTEVVIHYNPERIINDSIGVHSTESWHA

SEQ ID NO: 46737 - DNA, 50 bp, Eikenella corrodens
  source 1..50: mol_type = genomic DNA
tcatagtacggaaagttggcacgccgtactttccgtactacgaactcaga

SEQ ID NO: 46738 - DNA, 40 bp, Eikenella corrodens
  source 1..40: mol_type = genomic DNA
tattaagaatgtggcacgcccagggggaatcgaacccccg

SEQ ID NO: 46739 - DNA, 50 bp, Eikenella corrodens
  source 1..50: mol_type = genomic DNA
tcatagtacggaaagttggcacgctgtactttccgtactacgaactcaga

SEQ ID NO: 46740 - DNA, 40 bp, Eikenella corrodens
  source 1..40: mol_type = genomic DNA
aggtgagaatgtgacaggctgagggggactcccaccccca

SEQ ID NO: 46741 - protein, 507 aa, Eikenella corrodens
MKRAIIYVRVSTTRQADEGISIDAQTDQCKKKAKELGASVLQIFRDEGITGTSAVKRQAFQRAIHYCAVNDVDYFIVWSTSRFARNKLDAASYKLLLRESGTRLVYASMNIDSDTDEGWFTDSIMEIMDEQVSRQISRDTRRAMLKNAEEGWFNGGRAPFGYQITSQGKRRKLVPNDAEKTLVQEAFRRFAAGEGAIAIARSFTGRGYTRRGAEWQAASLSHMLKNRVYIGQTVYNKRSGNKPNPPEEWIIRQTHEPLVSEKDFEAVQKRYRPDYKQTGSPSSRFLFTGLLRCGHCGKAMSIETATSKTKRRYNYYNCSGFKKGCNCISRRISAEKLDDYLLNIVVDKLLTQEVVSDFIGEAYRKYVEKRTNNAEQHKLLQQELTELRRRRNTLFELVESGLSGSDSRSLLERVAGYDEREQTLLIELDKLAGAPDVDAIPEIDVDSALRTLKTILLNTANEKKLRILLQSFIRKIDINPTEVVIHYNPERIINDSIGVHSTESWHA

SEQ ID NO: 46742 - DNA, 50 bp, Eikenella corrodens; identical to SEQ ID NO: 46737
  source 1..50: mol_type = genomic DNA

SEQ ID NO: 46743 - DNA, 40 bp, Eikenella corrodens; identical to SEQ ID NO: 46738
  source 1..40: mol_type = genomic DNA

SEQ ID NO: 46744 - DNA, 50 bp, Eikenella corrodens; identical to SEQ ID NO: 46739
  source 1..50: mol_type = genomic DNA

SEQ ID NO: 46745 - DNA, 40 bp, Eikenella corrodens; identical to SEQ ID NO: 46740
  source 1..40: mol_type = genomic DNA

SEQ ID NO: 46746 - protein, 578 aa, Mycobacteroides abscessus
MARKNIKYRTGNKGMSYLRVSSKGQVETEYDSEGMSLPAQRRKLSERARAKELVIVDELIDAGITATNIEDRKSYQGLIERLKADESLAFVMVYSVNRLHRNWTEAGLMLMQLRSMGVRLISAMEDIDDSTAAGRLQLGVLFSTAGYQSESSSEDLEYKMTQKAVIGGTPGFVPIGYLNVSEQFEGRKVNTVAVDPERGQYIPMAFEWFATGHYTYAELRTKLTEAGLRTRPNRKYPSGAISIHSIEKVLRNRYYLGYVVWNGQEYQGRHEPLVSQELFDQVQSVLEVMPGAGNRQRRYHHFLKGFVWCARCERRLIVMRGRSKTGELYFYYLCRGRQQKLCDLPYLRAGHVENAVTERYHTVALGGELKQQLSALFAGAAGQWRSSRGGNRKQMKKRLTEIDRQEDRYIELALDPDWPKEKLTNKLRQLRDERKRLTEELAAGEQTVTEAHTNASRVLDYLEEPYELYQRSGIRTKTAMNRTIFTGLRIDADEVTNRPYVASDVLTEAFEAIVELRRNWQAHSVAEADAQAPETTHYERTNNGSAPVRDAAADVRVLSLLEQAFYSPECSSNSTLAE

SEQ ID NO: 46747 - DNA, 50 bp, Mycobacteroides abscessus
  source 1..50: mol_type = genomic DNA
gagtgttcaagtaacagcactctggcggaggtgcttaagccttacttgaa

SEQ ID NO: 46748 - DNA, 40 bp, Mycobacteroides abscessus
  source 1..40: mol_type = genomic DNA
ttgatgcggtcctgcagtggcggaggataggggatttgaa

SEQ ID NO: 46749 - DNA, 50 bp, Mycobacteroides abscessus
  source 1..50: mol_type = genomic DNA
gagtgttcaagtaacagcactctggaggaggtgcttaagccttacttgaa

SEQ ID NO: 46750 - DNA, 40 bp, Mycobacteroides abscessus
  source 1..40: mol_type = genomic DNA
gtaatggggtcctgcagtggaggagagaaagtgagctgaa

SEQ ID NO: 46751 - protein, 570 aa, Anaerotruncus massiliensis
MTETFTIAGYCRISVDEEMDRENTSIENQKAIIQDFVAKKFPGSGLTFFEDRDRSGYTFEQRESYQKMRPQLMGHKYDILVVKDFSRFARRNSRGLVELEDLRDAGVRIISIGDSIDYPTYDDWTAIQFRFLINEMPVTDASKKVKSVIQRRQNDGKWICAVPYGYVITNSKTMQFEIDEPAAVVVRDIYRLYNEGWGYKKIANHLTDLHIPTPRMAEKARKEAQGEDSKRKARPEWSIVTVQGILENDFYIGTLRQGKYTRKKINGADRKKDESDHIVFENHHEPILDYRTFALAQEGRKKRSTSCYRGIKIHDNVYSGFLFCGDCGQPMFSMSRRDLRPAYTCSSYHKRGLKGCTSHHTRVDLLDDLLKRYIRQVKENSADMLDKLNASLKAESAEVKNNEETSVILQKQLDDAWEELKATKRQRVRDVMKHPEKEELLEQTYDELEAELEAKISGLQNQIELTADKRNTIIQVNRIARTALDIFDEILAKDKLDKVDLELIIEKITVYEDHIEIQLKADIDQLLQCGTILEETAANFKQGTGHISQIAQSSQNRPDKVFRVSVISSG

SEQ ID NO: 46752 - DNA, 50 bp, Anaerotruncus massiliensis
  source 1..50: mol_type = genomic DNA
cgtgtcagtgttatcagcagcggcgatccgctgctgataacacggacaca

SEQ ID NO: 46753 - DNA, 40 bp, Anaerotruncus massiliensis
  source 1..40: mol_type = genomic DNA
aatgcgtatcagggagggcgacccccttgaaatatatacc

SEQ ID NO: 46754 - DNA, 50 bp, Anaerotruncus massiliensis
  source 1..50: mol_type = genomic DNA
cgtgtcagtgttatcagcagcggctttccgctgctgataacacggacaca

SEQ ID NO: 46755 - DNA, 40 bp, Anaerotruncus massiliensis
  source 1..40: mol_type = genomic DNA
aatgcgtaactggaagggcttcacacttgtgttatatcca

SEQ ID NO: 46756 - protein, 548 aa, Mycobacterium marseillense; identical to SEQ ID NO: 9226

SEQ ID NO: 46757 - DNA, 50 bp, Mycobacterium marseillense; identical to SEQ ID NO: 9227
  source 1..50: mol_type = genomic DNA

SEQ ID NO: 46758 - DNA, 40 bp, Mycobacterium marseillense
  source 1..40: mol_type = genomic DNA
tcagttgagtgtccgaggggggacttgaacccccacgccc

SEQ ID NO: 46759 - DNA, 50 bp, Mycobacterium marseillense
  source 1..50: mol_type = genomic DNA
cgtgtcgccggacgtgtccgagggacgacttggccacttacgacacgggt

SEQ ID NO: 46760 - DNA, 40 bp, Mycobacterium marseillense
  source 1..40: mol_type = genomic DNA
tcagttcagtggcagaggcacaaaataaaccaccaggccc

SEQ ID NO: 46761 - protein, 592 aa, Pseudomonas kunmingensis
MSAIQKPRAYSYIRFSNATQAAGDSYRRQRDEAEKYCAQHGLELVDAKEYSFFDQGKSAYKARHLDDTGELARFLSYVQDGTIPKGSTLLVESLDRLSRERVKDALPRFLDLLNQGINVVTLADGRLYTSQYNELDLIISIVQMSRAHEESATKGKRVSAAWRRKQASARTESVPIGKLRPLWLDYTPDGYVPIPERVEVVQRIYKLAQDGYGHRAIAAQLNQSGVPSFSADRKNASGLWANSSIARMLCNRSVLGEYQPHQFIEGKRVPVGAPIPGFYPPIITEDEFYAAQQAVSSRRQSQATKPGKRFNVWQGVSQCGICAGPMHISKRGNSRILRCFRNIQGLCPAKPVLLPRSEEVFREILAKVDSLSLVQSNQGKLQHQIAVCDGKIAETRERLESLQAQILNLSGSLPASIITVMQRLEDDLSQHQQEREALREDIAREQIIDKEEFFSRLDLVSYEGRARANSLLKSLGVQVAIERVGEARGKKAPVHYSIVVAEKYGFAFTDYSGQLEFLPLSSPTLELALQQGEAIPSAVRAHVLAREHLIAQEEQERTRLTALTKIHSFKEIAELEGISVREVKRRIEGRRG

SEQ ID NO: 46762 - DNA, 50 bp, Pseudomonas kunmingensis
  source 1..50: mol_type = genomic DNA
ttgagtgcaaagtagcaacacttcttcacattctggcacaatccacccat

SEQ ID NO: 46763 - DNA, 40 bp, Pseudomonas kunmingensis
  source 1..40: mol_type = genomic DNA
gtaggcggcgcagcacttcttgaatttcgaaccgctgccg

SEQ ID NO: 46764 - DNA, 50 bp, Pseudomonas kunmingensis
  source 1..50: mol_type = genomic DNA
ttgagtgcaaagtagcaacacttcaacacattctggcacaatccacccat

SEQ ID NO: 46765 - DNA, 40 bp, Pseudomonas kunmingensis
  source 1..40: mol_type = genomic DNA
gagagtggagcagcccttcaagaagttccaacctctgccc

SEQ ID NO: 46766 - protein, 568 aa, Bacteroides cellulosilyticus; identical to SEQ ID NO: 39716

SEQ ID NO: 46767 - DNA, 50 bp, Bacteroides cellulosilyticus
  source 1..50: mol_type = genomic DNA
gcaggcacatttgagaacttagctgaggcgatattttcaaatgtgctatg

SEQ ID NO: 46768 - DNA, 40 bp, Bacteroides cellulosilyticus
  source 1..40: mol_type = genomic DNA
gcatcaccatgcattagccgacgctgaggcctgcgcctgg

SEQ ID NO: 46769 - DNA, 50 bp, Bacteroides cellulosilyticus
  source 1..50: mol_type = genomic DNA
gcaggcacatttgagaacttagctcaggcgatattttcaaatgtgctatg

SEQ ID NO: 46770 - DNA, 40 bp, Bacteroides cellulosilyticus
  source 1..40: mol_type = genomic DNA
gtagcaccagacctttccccacgctgtggcctgtgcctgc

SEQ ID NO: 46771 - protein, 585 aa, Amycolatopsis thermoflava
MTAEINHDPWATLDDLLGVEVADPVDEGIGPVAFYGRCSTEDNQDPETSHGWQLSNARKFVEPLGGSVVAEFFDVGQSRSVPWERREAASRLLKALKDPGRRWQAVVVGEGTRCWFGNQFSLVAPKFAAYGVDLWVPELGGKFEARNPSHKMLMSVLGGMSESERQHVQARVRAAMDAQVINEGRHQGGRAPYGYKVVDGGPHPNPRKAAEGYRLRVLEIDEASAEAVRRIFAEYISGKGDRAIANGLNRDRIPCPSARRPDQNRHRLADGWQGSTVRSILENPRYTGYAFFGRWTKHETLLDPDDVAAGHVTRFRRSAPDRVVRSRLPAHPAIVSVEDFTQAQLLRRSKGSGGLRTARKAERSDRPTRRSYLFRGRIRCAYCQRKMEASPRKHGMYYRCPARTLAPGSPALAEHPPSVYLREEPLMDAVNTWLGGLFARDNVDRTVGALVASQGGEGATSGREVARQRLADAEARLERFRAAIGAGVDPAALVDAINEAQAQRAAARAELEDAPAPDLVTDAEVYAMIDSLGDVGRKLAKARTDSLAGLYEALNLAVRYDHDSQAAQVTIQPVIRVNSVRVRGG

SEQ ID NO: 46772 - DNA, 50 bp, Amycolatopsis thermoflava
  source 1..50: mol_type = genomic DNA
cgggtgaatagtgtgcgtgtccgaggggggagttgcacactaaccacacg

SEQ ID NO: 46773 - DNA, 40 bp, Amycolatopsis thermoflava
  source 1..40: mol_type = genomic DNA
gcgcagtggttgtgtccgaggggggacttgaacccccacg

SEQ ID NO: 46774 - DNA, 50 bp, Amycolatopsis thermoflava
  source 1..50: mol_type = genomic DNA
cgggtgaatagtgtgcgtgtccgaagggggagttgcacactaaccacacg

SEQ ID NO: 46775 - DNA, 40 bp, Amycolatopsis thermoflava
  source 1..40: mol_type = genomic DNA
tcccagtggttgtggccacaggggtacttgcatcaccaca

SEQ ID NO: 46776 - protein, 503 aa, Bacillus siamensis; identical to SEQ ID NO: 25896

SEQ ID NO: 46777 - DNA, 50 bp, Bacillus siamensis
  source 1..50: mol_type = genomic DNA
tattgggtacgggtagcttagcgaacttgtcattgatgccatgtccacta

SEQ ID NO: 46778 - DNA, 40 bp, Bacillus siamensis
  source 1..40: mol_type = genomic DNA
tgtcagcatcggctattcgacatgtcactggtgtcacgtc

SEQ ID NO: 46779 - DNA, 50 bp, Bacillus siamensis
  source 1..50: mol_type = genomic DNA
tattgggtacgggtagcttagcgatgttgtcattgatgccatgtccacta

SEQ ID NO: 46780 - DNA, 40 bp, Bacillus siamensis
  source 1..40: mol_type = genomic DNA
tggcatcttaggctattcgtgttgtcattgctgccatgtt

SEQ ID NO: 46781 - protein, 464 aa, Lachnoclostridium phocaeense
MATQKILRCAIYIRVSTAEQMMHGKSLEAQKEYLVRYAKEHGMIVVGVYADEGKTARKELKKRKAIHSLLEDVKAGKIDVILFWRLDRWFRNMSDFYKVQDVLDEYGVRWISASEPGINMETRDGRLQLNVVLSIGQNEVDTTSERIKFVNEASIRQGKVIFGDKNMPTGYMVGVVDGQKRMVKNPDEEDLVSAFFDYFEKHQSKQGTLRYIQQNYDPEFSHTMLRTMLASEFYKGTYRSIPYCPAYLSEDRWARIQKISNRNVKHTPSGRVYLFTGLIRCPVCGQLLAGTGSSSIINRKTKEKRSYCYYRCNRAMIDQLCSNRHRMSQNLLEKYLLDNLETEYKKYRIRCEKIEEQKAKIRKTRTPEKLQSELERLNLLFQKGRVQWEYYSSEYDRIEKEIRELSTIRPEPERDFTYLEELLQADLGTIYAKLTPENRRAFWRSTIREIQLNEDFTVKSVDFL

SEQ ID NO: 46782 - DNA, 50 bp, Lachnoclostridium phocaeense
  source 1..50: mol_type = genomic DNA
tcttgtactaactatatcgccccgtttggggtacgcatgttaggcaaaga

SEQ ID NO: 46783 - DNA, 40 bp, Lachnoclostridium phocaeense
  source 1..40: mol_type = genomic DNA
ggtcgaactggtgaatggttttggcgccgacaagacgatg

SEQ ID NO: 46784 - DNA, 50 bp, Lachnoclostridium phocaeense
  source 1..50: mol_type = genomic DNA
tcttgtactaactatatcgccccgcctggggtacgcatgttaggcaaaga

SEQ ID NO: 46785 - DNA, 40 bp, Lachnoclostridium phocaeense
  source 1..40: mol_type = genomic DNA
ggtctacctggagaatgttccaagtgctgacaagaagaag

SEQ ID NO: 46786 - protein, 567 aa, Intestinimonas massiliensis
MASQKYNILYGRLSQEDERQRDDRQKESNSIHNQKLFLEQYAADHGFENTLFLADDGYSGTNFDRPAWKQVIEMVERDEVETIIVKDLSRLGREYLQVGQYTEIYFPEKGVRFIAVNDGVDSLVESSNDFNPIRNWANELHAKDTSKKVRAIKKMQAERGERLGGKPPYGYKKKDKDSKEIIPDEETAPIVRQIFDLCAAGKGPNQIARILTREQVLNPTNQYYQATGAACTNLDTTRPYTWSGKTVAKILENKVYIGHTLNMKKTTLSYKNKKQIQKPESEQILVENTHEPLISMEVWEIVQDVRAHKRRPPKHMEEPNLFSGLVYCADCGKYMVLCRTEKMREDQYYFRCSTYSKRGKTACSPHQIREADLKAIVLDDLRRVTHFARMKERQFAQYINQRNTAELRREINRLQKDLDSMHRRYDELSALFKRLYEDNVLGRVSDEQFRMLSADYNAEQKSLSADIPAKEEQLEKLKASAANVDAFIEKAKRYTTIDELTPELLRLFIQRIEVGERSQKYSRSAGQSVKIVYRDIGRVDSPMQEGEHAPHITKQITNIEEIKRLLA

SEQ ID NO: 46787 - DNA, 50 bp, Intestinimonas massiliensis
  source 1..50: mol_type = genomic DNA
aaatgtacctgtgggaactatcagacgggataagccccataggtacacaa

SEQ ID NO: 46788 - DNA, 40 bp, Intestinimonas massiliensis
  source 1..40: mol_type = genomic DNA
atcaaaaacgcctctcccaacgggagaggcgtttttcttt

SEQ ID NO: 46789 - DNA, 50 bp, Intestinimonas massiliensis
  source 1..50: mol_type = genomic DNA
aaatgtacctgtgggaactatcagtggggataagccccataggtacacaa

SEQ ID NO: 46790 - DNA, 40 bp, Intestinimonas massiliensis
  source 1..40: mol_type = genomic DNA
ctcaaatgtgtttctcccatggagagaggtgttttttttg

SEQ ID NO: 46791 - protein, 587 aa, Klebsiella oxytoca; identical to SEQ ID NO: 17381

SEQ ID NO: 46792 - DNA, 50 bp, Klebsiella oxytoca
  source 1..50: mol_type = genomic DNA
caatctttttcttgatgtttcgggcaccctaatgataaaaatccaatctt

SEQ ID NO: 46793 - DNA, 40 bp, Klebsiella oxytoca; identical to SEQ ID NO: 24213
  source 1..40: mol_type = genomic DNA

SEQ ID NO: 46794 - DNA, 50 bp, Klebsiella oxytoca
  source 1..50: mol_type = genomic DNA
caatctttttcttgatgtttcgggaaccctaatgataaaaatccaatctt

SEQ ID NO: 46795 - DNA, 40 bp, Klebsiella oxytoca
  source 1..40: mol_type = genomic DNA
gtaccccagagttgtctggaatgccagagagacagaacca

SEQ ID NO: 46796 - protein, 587 aa, Klebsiella oxytoca; identical to SEQ ID NO: 17391

SEQ ID NO: 46797 - DNA, 50 bp, Klebsiella oxytoca; identical to SEQ ID NO: 45352
  source 1..50: mol_type = genomic DNA

SEQ ID NO: 46798 - DNA, 40 bp, Klebsiella oxytoca; identical to SEQ ID NO: 24213
  source 1..40: mol_type = genomic DNA

SEQ ID NO: 46799 - DNA, 50 bp, Klebsiella oxytoca; identical to SEQ ID NO: 46734
  source 1..50: mol_type = genomic DNA

SEQ ID NO: 46800 - DNA, 40 bp, Klebsiella oxytoca; identical to SEQ ID NO: 46795
  source 1..40: mol_type = genomic DNA

SEQ ID NO: 46801 - protein, 630 aa, Klebsiella oxytoca
MPQLYSYIRWSTDRQDKGTTRNRQLAAAKVYAAEAGLEMVEIEDPGVSAFRGKNTNTGKLGDFIDAVKQGAIASDSWLYVENLDRITRQNVTTAQKLFIELLELGLTLVTGMDKRVYTLDSVNKNPTELMISLLLFSRANEESETKSNRTIGNVVALVERHQAGLPVNIKSVGRHPFWIDDSGSQYEAVKEHPVYWSIAREAIDMFLDGNGIYTVKRYLDEKYPNGLKGKEWDYQVLKKMRDNRALIGERTINVGGATYKLDNYYPWLCKDEAEFLTLAERKQQNNYKAKKDKTEEIKLLSGLQVLRCSKCGGTMHSFMNHGSARYICTNGVHLQKNCSGWSISAQLVEQCTIISLLIGYMDKSRKDGIDTTAIEEEISRKEILITDLESRIANMAQAIAIAPDVSALAVQLNTFDLERKKTVLEVDKLKERLHSLKGKGSLEVDITDFLMLIQWSVFTNMEDADRNKIRKIISSIIESIIVEKADGCITIKIKCHHKDEWLVFGGVNRKPFWAFTIEYSTNDAKEIEGGDSSNFVSNTLFQKAVEQLDSIKQSYLKLFETANTMLGVVGYSDIRGASFWPNTGQYERANVEYEGITYSIAMNGRVSKAITAALEATGLSRKDFIERYKV

SEQ ID NO: 46802 - DNA, 50 bp, Klebsiella oxytoca
  source 1..50: mol_type = genomic DNA
taatttatttcttgattattagggcaccctaatgatataaatccaatctt

SEQ ID NO: 46803 - DNA, 40 bp, Klebsiella oxytoca; identical to SEQ ID NO: 24213
  source 1..40: mol_type = genomic DNA

SEQ ID NO: 46804 - DNA, 50 bp, Klebsiella oxytoca
  source 1..50: mol_type = genomic DNA
taatttatttcttgattattagggaaccctaatgatataaatccaatctt

SEQ ID NO: 46805 - DNA, 40 bp, Klebsiella oxytoca; identical to SEQ ID NO: 46795
  source 1..40: mol_type = genomic DNA

SEQ ID NO: 46806 - protein, 629 aa, Klebsiella oxytoca
MPQLYSYIRWSSDRQDKGTTRNRQLAAAKAYAEEAGLEMVEILEPGVSAFRGKNRAGKLGDFIDAVKNNAIPSDSWLYCENLDRLSRDQVDEALRLFLELIGLGLTIVTGMDRKVYNSKSIKQNPIDLMISILMFIRGNEESETKSNRTVGNVVALVERHKEGLPVNIKSVGRHPFWIDDSGSQYEAVKEHPVYWSIAREAIEMFLAGDGIYTVKRRLDDKYPNGLKGKEWDYQVLKKMRDNRALIGERTINVAGATYKLDNYYPWLCKDEAEFLTLAERKQQNNYKAKKDKTEEIKLLSGLQVLRCSKCGGTMHSFMNHGSARYICTNGVHLQKNCSGWSISAQLVEHCTMISLLIGYMDKSRKDGIDTTAIEEEISRKATLITDLESRISNMAKAIAIAPEVSELAVQLNVFDLERKSAVLEVDKLKERLHSLKGKGSLEVDITDFLMLIQWSVFTNMEDADRNKIRKIISSIIESIIIDKTDGCITIKIKCHHKDEWLVFGGVNRKPFWAFTIEYSTNDAKDVESEDSSNFVSNPLFQKAVEKLDSIKQSYLNLFETANTMLGVVGYSDIRGASFWPNTGQYERANVEYEGITYSIAMNGRVPKAITAALEATGLSRKEFIECYKV

SEQ ID NO: 46807 - DNA, 50 bp, Klebsiella oxytoca
  source 1..50: mol_type = genomic DNA
taatttattttttgattattagggcaccctaatgatataaatccaatctt

SEQ ID NO: 46808 - DNA, 40 bp, Klebsiella oxytoca; identical to SEQ ID NO: 24213
  source 1..40: mol_type = genomic DNA

SEQ ID NO: 46809 - DNA, 50 bp, Klebsiella oxytoca
  source 1..50: mol_type = genomic DNA
taatttattttttgattattagggaaccctaatgatataaatccaatctt

SEQ ID NO: 46810 - DNA, 40 bp, Klebsiella oxytoca; identical to SEQ ID NO: 46795
  source 1..40: mol_type = genomic DNA

SEQ ID NO: 46811 - protein, 587 aa, Klebsiella oxytoca
MPQLYSYIRWSSERQQKGTTRQRQVIGAKEFAIANGLELVEIEDPGVSAFRGKNTTHGKLGDFIDAVRQGAIPPDSWLYVENLDRLTRQEVTTAQKLFIELLDLGLTLVTGMDKRVYTLESVNKNPTDLMISLLLFSRANEESKTKQARTIGNVESLIERHRQGLPVNIKSCGKHPFWIDDSGSQYESVKRHAIYWEIAREAIELFLSGYGIYKVKRFLDEKYPNGLNGKEWGYQVLKKMRESRALIGERQINIGSHTYTLRDYYPCLCKNEVEFLHLQELKGQNRYKSKKNPLKEQIKLLSGLAILRCSKCGGTMSSFMNKGKPRYICLNGRHLQKGCVGWSLTAPLVDHCVIIALLMGYMDANRKERQDTSDISALIEAKNTSVGELNVSITNLVAVIEAGVNVSELASRLKVLSTERETFLKEIERLKERKALIDSKGSFEVSMMDFINLIHWNVFSDYAHESRDKIRSTINKIIEHVIIDKTDGCITIKIKCRGSDEQLIFCGIGRKPHWKFDIALYVEQDTDGDTTFEEKSILPIANQLMEEATKQFALIREGYISYFDKICKILAAIGYPDIDGSAFWPNR

SEQ ID NO: 46812 - DNA, 50 bp, Klebsiella oxytoca; identical to SEQ ID NO: 46792
  source 1..50: mol_type = genomic DNA

SEQ ID NO: 46813 - DNA, 40 bp, Klebsiella oxytoca; identical to SEQ ID NO: 24213
  source 1..40: mol_type = genomic DNA

SEQ ID NO: 46814 - DNA, 50 bp, Klebsiella oxytoca; identical to SEQ ID NO: 46794
  source 1..50: mol_type = genomic DNA

SEQ ID NO: 46815 - DNA, 40 bp, Klebsiella oxytoca; identical to SEQ ID NO: 46795
  source 1..40: mol_type = genomic DNA

SEQ ID NO: 46816 - protein, 562 aa, Citrobacter freundii
MKKPKAFSYVRFSTPKQAQGDSYRRQIQQAHDYCAANDLELEDKTIEDFGVSAFRGNNRTDGALGRFIDAVKSGEIERGSYLLVESVDRLSRQAIEDALTQFMEIVREGIVIVTLSDNQAFRRGEMDFTKLLVSIVYMARANDESEMKSRRSRAAWSNGRQQARDNNKVIANSRLPSWLKLEGDKIVPIPERVAIVNEMFQMARSGQGYQQIAKVFTENNYKTFGQGKVWRPAGIQSVIKSRTVIGEFQPHVIVEGKRVPEGEPILDYYPAIVPPSIFAEVQHIVDKRSNHSGSYRKGLYNNLFSGVIRCQCGELLRFHNKGSRGQVRNYLVCPMEGVTGCQLPYLLYNKIEPQLLQAISKLSVVMKQRIPQTEKKSVLKDELAVLRDQLEIETKKSKKAAQAMLELDDDAVFRSLYEECKVNCQSLEEKILQIENEIVGLELSARTLFQLLRPEDLSNTDQRQRFNSQLKLAVKIEFIYEHSGLVAVIKNLEDEPLLEQAFGHKLMNSVVHDFEGHIVVKTIASEPYIDAVWLDEEQSRYVKNLPESEGAVDKELGPWVED

SEQ ID NO: 46817 - DNA, 50 bp, Citrobacter freundii
  source 1..50: mol_type = genomic DNA
taaggtgcttatgataaaaactgctcgcagactttaggagaaaggccgta

SEQ ID NO: 46818 - DNA, 40 bp, Citrobacter freundii
  source 1..40: mol_type = genomic DNA
tcgggcttttttaatcgtatcgcagtttttaatgccgtaa

SEQ ID NO: 46819 - DNA, 50 bp, Citrobacter freundii
  source 1..50: mol_type = genomic DNA
taaggtgcttatgataaaaactgcctgcagactttaggagaaaggccgta

SEQ ID NO: 46820 - DNA, 40 bp, Citrobacter freundii
  source 1..40: mol_type = genomic DNA
tcacgcttttttcgtggtactgcggtttcaaattccctaa

SEQ ID NO: 46821 - protein, 480 aa, Streptococcus salivarius
MAMHKVAIYVRVSTTSQVDEGYSIDEQKAKLTSYCEIKDWNIYDIYTDGGFSGSNTERPALEQLIRDAKRKLFDTVLVYKLDRLSRSQKDTLYLIEDVFLENDIEFVSLLENFDTSTPFGKAMIGLLSVFAQLEREQIKERMQLGKLGRAKSGKSMQWAKTSFGYDYIKETGTLSVNPYQALIVRKMFEWYLSGMSITKLRDALNEQYGQDKEWNYRTVRVILSNPVYCGYNQFKGQIFPGTHEPIISEEDFNKTQEEIKTRQRTAAQRFNPRPFQAKYMLSGIAQCGYCSAPLAIKLGMKRKDGTRLVKYECKQRHPRKTKGVTVYNNNAKCDSGFYFKDDIEHFVLTEISKLQTDSDYIDKLFSNTDKETIDRASYQKQIDNLTAKISRLNDLYIDDRISLEELQKRSSDFMAERSALEKELDADTSLKAVERKKDIRRVLDTKDILTLDYEQQKAIARALISKVRVTSESIVILWKL

SEQ ID NO: 46822 - DNA, 50 bp, Streptococcus salivarius
  source 1..50: mol_type = genomic DNA
tagagcgttttagtaacccttatttcaatcaaggacactaaaattcttga

SEQ ID NO: 46823 - DNA, 40 bp, Streptococcus salivarius; identical to SEQ ID NO: 23378
  source 1..40: mol_type = genomic DNA

SEQ ID NO: 46824 - DNA, 50 bp, Streptococcus salivarius
  source 1..50: mol_type = genomic DNA
tagagcgttttagtaacccttattggaatcaaggacactaaaattcttga

SEQ ID NO: 46825 - DNA, 40 bp, Streptococcus salivarius
  source 1..40: mol_type = genomic DNA
gagaggcactccctgcagaggaaccagcgcaaaagcactg

SEQ ID NO: 46826 - protein, 474 aa, Blautia massiliensis
MQKRMAALYVRVSTEDQAELSPDAQKRLLLEYAKKNDLITCEEFIFCESVSGRHAQKRPEFQKMIAMAKQSSHPFDVILVWKFSRFARNQEESIVYKSMLKKDDVEVISISEPLVDGPFGSLIERIIEWMDEYYSIRLSGEVKRGMKEKALRHGYQSTPPLGYKAVGGGKPFVIDEASYAIVSYAMNLYDCENMDETAIARKCNDLGYRTKRGNLFERRSIDRILRNPFYCGTVTWNGMEFEGSHEVRISKERFQERQKLIQARMRPAKSRSVSTCRHWLSGLLKCSICGATLAYTGGGKDGYHYFNCWQYAKGYHRGTSSIPVKKAEEAVIEYFDKILEGADFSYVRKSNYSVNNEVTVDQIHKELSRIDMKSKRIHDAYESGIDSLQEYKENKERLNDDRSKLEFELHNLLRKKKEKFTDKSEVLKEIKSVNDVLKDPDVGYEEKGMLIRTIVDQIVWNKENNKMYFDIIVH

SEQ ID NO: 46827 - DNA, 50 bp, Blautia massiliensis
  source 1..50: mol_type = genomic DNA
ttttatctgctattgcactccggcccacctgagtacaataacagataatt

SEQ ID NO: 46828 - DNA, 40 bp, Blautia massiliensis; identical to SEQ ID NO: 28443
  source 1..40: mol_type = genomic DNA

SEQ ID NO: 46829 - DNA, 50 bp, Blautia massiliensis
  source 1..50: mol_type = genomic DNA
ttttatctgctattgcactccggcctacctgagtacaataacagataatt

SEQ ID NO: 46830 - DNA, 40 bp, Blautia massiliensis
  source 1..40: mol_type = genomic DNA
taatatttcttcatcctggcttccgtgcttgctggatata

SEQ ID NO: 46831 - protein, 559 aa, Corynebacterium aurimucosum
MTEKPLKALVVIRLSRLVEESSSPERQEAECRDLCKRMGWEVAGVASDLNVSAGATTPFERPELGKWLGSGALEDPGRSHEFDVIVFWRLDRLVRSMTQLSSLMTWCERHEVYLKSATENHIDTTTDMGRIMAMLVGSFAEVELAAIRERTGADQHHRIVSGKYRGAVPSWGYRPVKDPDKGWILELDPVQVAQVNKAAGWILQGVSMNETARRFNEAGELTPRDLHDKRMNREPRNRAWSGNRMKEMLVSKAMLGYAMIREPVLDKNGKPRRDSRGQKVYEPEARVAIKDGAPVRRAEPVLDRDTWERVCKELESREITVSARSHSLLLNVLFCGVCGRKTYKLTPNNGRKPTYRCSSAAKSGTPRCCDKTLQVDEEWVENAVTDSFLELLGDSVRAVRVWDDGVDNSSEVAELSDGIEELASELSRYRAGSTAFTAIADNIDKMQQRLDELEAEEARAPGWVWEPTGQSIRDWWENASVVERNAYLVECGVRVEFEHEENRKRGQHPRLSIVFENLPGVIEELSPGAAATRAMELLGTVQAGHSLVIQGEKTRIQPR

SEQ ID NO: 46832 - DNA, 50 bp, Corynebacterium aurimucosum
  source 1..50: mol_type = genomic DNA
aggaatcaaacattgactatcgagtactcaatcgtttaagattgattcca

SEQ ID NO: 46833 - DNA, 40 bp, Corynebacterium aurimucosum
  source 1..40: mol_type = genomic DNA
ggccaaactacccatggcatattcaatcgtggacatacca

SEQ ID NO: 46834 - DNA, 50 bp, Corynebacterium aurimucosum
  source 1..50: mol_type = genomic DNA
aggaatcaaacattgactatcgagatctcaatcgtttaagattgattcca

SEQ ID NO: 46835 - DNA, 40 bp, Corynebacterium aurimucosum
  source 1..40: mol_type = genomic DNA
ggcaaaactacccaaggaaatataaagactagacataaca

SEQ ID NO: 46836 - protein, 539 aa, Streptococcus pyogenes
MSRTKKYVAGLYCRLSKDDGNSVESMSIWSQKVMLKQYAESNGIAIYDYYVDDGYSGTNFERPSFKKMITDIENGKINCVITKDLSRLGRNYLQSGAYIEMYFPQKNIRYIAITDGIDTLNSNQNDIMPFKNILNEMYAKDTSKKVKSAIQSRMREGTYIGSKAPFGYLKDPNNKRRLIIDEKTKPIIELIYKLCLEGKGTQLISQELMKRKIPRPSAFVENAEKLYGLTEENKYQWSHRMVLNVLRDPVYCGNMARNKRPTLSFKNSKRMYIPKSDYIYARNTHEGIVSEEVWEQVQTMVDKRKCNNKKGLYYDNIFQGLVRCPKCGYALTPKTDYRLKKKELIDFVHFSCSTYKKYGVNACSSHRIEARDLYNIVLEDIQYHGSMALSAKEDFVEKIIEKIEVEKIDEGKELSNKLELKKNQLAELDRSYEQLYEDRLEGNITERNFNLMNVSISKKQDKLIEEIKVLEGDIEVSFETEDNYKKFMNNISKYAKIKSLNRYILNQIIDKIYVYDKEEIDGQISQKVEIHYKFIGKLN

SEQ ID NO: 46837 - DNA, 50 bp, Streptococcus pyogenes; identical to SEQ ID NO: 4042
  source 1..50: mol_type = genomic DNA

SEQ ID NO: 46838 - DNA, 40 bp, Streptococcus pyogenes
  source 1..40: mol_type = genomic DNA
aacaccccttctgtcggttgaagaagaacaccttggccca

SEQ ID NO: 46839 - DNA, 50 bp, Streptococcus pyogenes
  source 1..50: mol_type = genomic DNA
ttgaccacttcggactactcaccacttttggagtagttccaagtgggaca

SEQ ID NO: 46840 - DNA, 40 bp, Streptococcus pyogenes
  source 1..40: mol_type = genomic DNA
cacaccccttctgacggctctagaagataactcttgcctg

SEQ ID NO: 46841 - protein, 399 aa, Vibrio parahaemolyticus
MNVVLYIRVSSVRQVNEGHSLEGQLKDLRAYCSANSHTIVKEYIESGNSAYKGSRPIFNQMLNEVTSRVFNVDAVVVYSLSRFARDLLYQLSTIKRLEDSGIRLFSATENLPEDDTTFKYLTVMLGLVNEMNSKQNGINVQSRLTQTAKDGYFTGARVPLGYRSVKCEEGKKNTRKKLVIVEEEAAVVRKIFELSLTGTSGKGLGIKAIADFLNRHGFKYRGSSWSNNTVHKILTSTTYYGEFVFRKKTDSPIVISVPAIIDKNKFIEVRKSLKERDAQQLWVKAIRSNNLLTGLLKCGICGGGMTVCSGKSGRYKYYACTKKLKKSVDLCQSKWVPKQELDQLVESTIIEHVINVTNIQAIIDEVKTELLSGRERHKRQSLKTYSKAKSYRAKVGKHL

SEQ ID NO: 46842 - DNA, 50 bp, Vibrio parahaemolyticus; identical to SEQ ID NO: 15092
  source 1..50: mol_type = genomic DNA

SEQ ID NO: 46843 - DNA, 40 bp, Vibrio parahaemolyticus
  source 1..40: mol_type = genomic DNA
gcttttttctaaacgtggcggagagatagggatttgaacc

SEQ ID NO: 46844 - DNA, 50 bp, Vibrio parahaemolyticus; identical to SEQ ID NO: 15094
  source 1..50: mol_type = genomic DNA

SEQ ID NO: 46845 - DNA, 40 bp, Vibrio parahaemolyticus; identical to SEQ ID NO: 15065
  source 1..40: mol_type = genomic DNA

SEQ ID NO: 46846 - protein, 618 aa, Vibrio splendidus
MIYSYSRFSNIKQEKGHSLERQAKNAQKVINQLQDEYGLELDAELDMTDKGLSGFKGDHKKKGAFGVFLRSVEEGIVKPGSILLIESLDRMSREQPYKAQSTLNDLIDADITIVSTVDEKVYNKETVAQDPLGTLILAVLEMVRAHKESLRKQEMSVDSILKQVNAHLNGQVADVSGSIPFWTSRKSAPAKVKGGFELNEHESTIRLIVDMYFKQKMGLRPISRELLNRNIKSPKGRNVWGVSTLSSILANPALCGRKVFKLRFLQDGKQVEHDYRLDSYFPKIMDENDFDAMQAIKKRKAGSGKGDKSSRGGLVYLLTDYGKKAVCAKCGRGIGSQPQKQKNHIRRRLHCFTHKETENCCRSIIQDQIEDAFLITVSRYIDYSLINEDLNQNEIILVSERLQQIEVEIDNIQELFIYQNDPKKRSNLGNRIRDLEAEKNNLDKQRKDIYHINLSQEELNKFVSTVNEARDYRNNEARTYVKDILIKSIKRLAVHMERKPLSDYGYPNLFDNELVNVIDVEFYSDVSISIFIGFESQEALFTKIPNDLVDPPFGGLNEQELQYWNDNGGGDLDNLVSILGDNVEEVGELSSKNQAWLNCDVAEVMVNAMLTMNKSKSQ

SEQ ID NO: 46847 - DNA, 50 bp, Vibrio splendidus
  source 1..50: mol_type = genomic DNA
ttagtgatcagtgttcgattggggtctgtatggtgaacactgatcactga

SEQ ID NO: 46848 - DNA, 40 bp, Vibrio splendidus
  source 1..40: mol_type = genomic DNA
gaaataaccaaatgcgccatctgtccagtggatatcttgc

SEQ ID NO: 46849 - DNA, 50 bp, Vibrio splendidus
  source 1..50: mol_type = genomic DNA
ttagtgatcagtgttcgattggggtatgtatggtgaacactgatcactga

SEQ ID NO: 46850 - DNA, 40 bp, Vibrio splendidus
  source 1..40: mol_type = genomic DNA
gaaataaccaaaggtgccataagccaagtctgcatcttcc

SEQ ID NO: 46851 - protein, 538 aa, Vibrio lentus
MKVVVMDVLMKAYSYKRISSKKQIEGGGIQRQTQLAEDYCNKYELQLSDLNFEDLGVSGYHSRNTEEDAALGRFIRGVEEGSIPTPCYLLVESLDRLSRARVQTALRQLLHIAENDVVIVTLMDEKKFDKSSDAMDIMYSLMIIQRAWEESEIKSQRVSAYWEQKRQDPFSKKKGGSRPFWILINEEGTEFSVNEPKADTVRRIFELKLTGMGTMAIARRMAEEGHKSGFDKQWSGGTIANVLRSRAVIGDYLHRDGSVADYYPPIVDKDTFNKVQVMLIGNNKPKGSTSSHRNIVKDIATCRCGDTFSLSTKKTPTGKNKGKKVAYYRCNNVICNNLYNDRTFEIWLKQYFCAPPFHNSWVDTSDHEDQRQRLITDKKLELNASQEALQAILSVPDGLSNPLILKKVSELSEQQRDLEEGLEELEKAQVVSNRQLSYQETRELIDTAFEDSNEPDNIKARTQLRQLLNACFSKIVFWREDGYFYLDVKSGDQEYNYKSVFIRRKILDPLWTIPSDKPLQEVEDKQAVIDQFRYNPDA

SEQ ID NO: 46852 - DNA, 50 bp, Vibrio lentus
  source 1..50: mol_type = genomic DNA
aggttgtgtacttgcaatatttgcgggcagatgttattgctacacaacct

SEQ ID NO: 46853 - DNA, 40 bp, Vibrio lentus
  source 1..40: mol_type = genomic DNA
ttgtggtttggctgcgaatggacacaggtttaggccaata

SEQ ID NO: 46854 - DNA, 50 bp, Vibrio lentus
  source 1..50: mol_type = genomic DNA
aggttgtgtacttgcaatatttgcaggcagatgttattgctacacaacct

SEQ ID NO: 46855 - DNA, 40 bp, Vibrio lentus
  source 1..40: mol_type = genomic DNA
atgtggagtggctgtaaatagacacagggtgatgaaaata

SEQ ID NO: 46856 - protein, 502 aa, Bacillus amyloliquefaciens; identical to SEQ ID NO: 19936

SEQ ID NO: 46857 - DNA, 50 bp, Bacillus amyloliquefaciens
  source 1..50: mol_type = genomic DNA
cgggtagcttagcgaacatgtcattggtgccatgtccactaaactaacca

SEQ ID NO: 46858 - DNA, 40 bp, Bacillus amyloliquefaciens
  source 1..40: mol_type = genomic DNA
cggctattcgacttgtcactggtgccatgtaatggcccac

SEQ ID NO: 46859 - DNA, 50 bp, Bacillus amyloliquefaciens
  source 1..50: mol_type = genomic DNA
cgggtagcttagcgaacatgtcataggtgccatgtccactaaactaacca

SEQ ID NO: 46860 - DNA, 40 bp, Bacillus amyloliquefaciens
  source 1..40: mol_type = genomic DNA
aggctatcctacctgacacaggagccctctaatgggcaac

SEQ ID NO: 46861 - protein, 551 aa, Blautia schinkii; identical to SEQ ID NO: 9941

SEQ ID NO: 46862 - DNA, 50 bp, Blautia schinkii
  source 1..50: mol_type = genomic DNA
ccgttctaattagtgacaaccaaacatatggaagtaataatatagaacgg

SEQ ID NO: 46863 - DNA, 40 bp, Blautia schinkii
  source 1..40: mol_type = genomic DNA
aatcagtaagagtacggtacataaggactgtgtggaacgg

SEQ ID NO: 46864 - DNA, 50 bp, Blautia schinkii; identical to SEQ ID NO: 46862
  source 1..50: mol_type = genomic DNA

SEQ ID NO: 46865 - DNA, 40 bp, Blautia schinkii
  source 1..40: mol_type = genomic DNA
aaacattaagaataggttacataaggactgggaaggaggg

SEQ ID NO: 46866 - protein, 533 aa, Mycolicibacterium vanbaalenii
MGADEPRATLPPLRALVGARVSVVQGPQKVSHEAQIESTTRWASSKGYEIVGMFQDLGVSAEKRPEDRPELGRWLTDEGASEWDVIVWSKMDRAFRSTRHCVDFARWAEERHKMVVFADDGLTLDYRPGAAKGIDAMMAELFVYLGSFFAQLELNRFKSRATDSHRELRQRDRWASGVAPLGFKVVDHPSGKGKGLDTDPEGRELLHQMAEKLLAGWSFVRIATWLTETGALTNRDRALVAKGKEPRRKPWTVSVVSSALTSPKTQGIKTFKDKAVLDGDGEPVRLAPPTFDPDHWKQIQDAAARRKQNRRTPTGSVNPMLGVGFCGQCGASLSQQVSKDRNGSDKTWRVYRCSRTPQNCRGVSIRADDADSLLEETFLERWGDEKITRRVFVAGEDHSHELEQVLSSIDRLRRESDAGLIASEDDERVYLQRMKSLIDRRTELEGKPHRPAGWVTEETGQTYREVWHTERDDLAQYRRQLITDHGVRFELSSGKPLRWHIYRPEDGVPLADPRTVSRLTTSARTAGQIPFEV

SEQ ID NO: 46867 - DNA, 50 bp, Mycolicibacterium vanbaalenii
  source 1..50: mol_type = genomic DNA
taccgtcaatgcctagtgatttggtagcacatccgagtacgatgacggta

SEQ ID NO: 46868 - DNA, 40 bp, Mycolicibacterium vanbaalenii
  source 1..40: mol_type = genomic DNA
tactgacatgtagcaatgctagcgttccgccatgcaggtc

SEQ ID NO: 46869 - DNA, 50 bp, Mycolicibacterium vanbaalenii
  source 1..50: mol_type = genomic DNA
taccgtcaatgcctagtgatttggtggcacatccgagtacgatgacggta

SEQ ID NO: 46870 - DNA, 40 bp, Mycolicibacterium vanbaalenii
  source 1..40: mol_type = genomic DNA
tacaggcatgtagcagagatggggtttctccatgttggtc

SEQ ID NO: 46871 - protein, 487 aa, Bacillus toyonensis
MKYAVYVRVSTDKDEQVSSIQNQIEICRYWIEKNGFEWDENSIYKDEAVSGTAWLERRAMQLILGKARKKELDTVVFKSIHRLGRDLRDALEIKEILLGHGVRLVTIEEGYDSYYEGKNDLKFEMYAMFASQLPKTLSVSISAALAAKVRRGEYTGGTVPYGYKIVDKKYVINQEEAEIVREMYELYDNGLGYLRISNALNDVGKYKRSGKLWTYSAVKLIITNPMYKGDYVMGRSTEVKVDGRKKRIQEPREKWVVFENHHPAIIERPLWDKINNPKINKKIKRRVAVTNELRGIARCIHCGSPFVLHTYKYKNKEGEELNYGYLTCGTYKLTGGRGCVKHSGLRYERLRSLVLRKLKEKERDLEKVFKLNDKDKHQEKQKKLRKEKKELEIKRERLLDLYLDGGSIDKETFTKRDANFAKNIKEKELEILKLDDVKALIVEQQKVKDAFKLLEDSENLYPVFKKLIAGIDISQNGAVDIRYRFEE

SEQ ID NO: 46872 - DNA, 50 bp, Bacillus toyonensis
  source 1..50: mol_type = genomic DNA
ttttgtctgtattggctgtccgcatctgcggtatgcttatagggacaaaa

SEQ ID NO: 46873 - DNA, 40 bp, Bacillus toyonensis
  source 1..40: mol_type = genomic DNA
cttctctcgaatttcagcatctgcatggcgcatcacatat

SEQ ID NO: 46874 - DNA, 50 bp, Bacillus toyonensis
  source 1..50: mol_type = genomic DNA
ttttgtctgtattggctgtccgcagttgcggtatgcttatagggacaaaa

SEQ ID NO: 46875 - DNA, 40 bp, Bacillus toyonensis
  source 1..40: mol_type = genomic DNA
cttctctggagatgcagcagttgcattcctccacacatct

SEQ ID NO: 46876 - protein, 577 aa, Lysinibacillus sphaericus
MTLEVKDIFSVENKYRKSIEKNSNNGFEKEKIVIGVHKRVSTDKQFQDGDSLEMQQELANKHANEIGGVIYKYYEENGLSAKKNPLNKRPVMQEIIQDIEDGKINYLIAYRRDRLFRNQAENMWFWSLLAEHDCKIFLTASGETQVNIEEIKKAGTTKMMESILAMLAEMESEITSTRVSDTMISKAKKGEYTGGATPIGYERIEGRFTPKNGVKELFYMVEDLYLQGFGLLSIAKWLNGEKVADLPQLESSIKKPIDSHKDTLWNHRNINTILFNPFYTGHVSYQSKKNIEMNRIIKEVDYIEPIRTLERQKQINAFKKKKEEGKKAPRAYNTSFLLTGILYCGECGAKMLGSTTQKKGSEKKYCYYSCPTKKSYYGGMKKCENVHYNKDALEAVVIKATKEKTKFIMSDDFYKKASKKIKDDKKTYASQYDLISEEVTKKEKELSRLIKMTTQIEDAELQKVYFAEQSQLITKINEMKDSMLLVAEKANGEVSDDFNFESFVELSKDYSKMIGVAPIGIQKQLIENLFADIRIDKNGEVSMQWNIGLVELLSPVKEVDDSNNTDEVMFYTTVGSP

SEQ ID NO: 46877 - DNA, 50 bp, Lysinibacillus sphaericus
  source 1..50: mol_type = genomic DNA
gttatgttctatacaacggtcggttcgccaatagttacaaagaacataac

SEQ ID NO: 46878 - DNA, 40 bp, Lysinibacillus sphaericus
  source 1..40: mol_type = genomic DNA
tttcttagacatcatcggttcgccacctgtgatactaagc

SEQ ID NO: 46879 - DNA, 50 bp, Lysinibacillus sphaericus
  source 1..50: mol_type = genomic DNA
gttatgttctatacaacggtcggtgtgccaatagttacaaagaacataac

SEQ ID NO: 46880 - DNA, 40 bp, Lysinibacillus sphaericus
  source 1..40: mol_type = genomic DNA
tttcttaaacattgtctgtgtgccaggtaccattctaagc

SEQ ID NO: 46881 - protein, 577 aa, Lysinibacillus sphaericus
MTLEVKDIFSVENKYRKSIEKNSNNGFEKEKIVIGVHKRVSTDKQFQDGDSLEMQQELANKHANEIGGVIYKYYEENGLSAKKNPLNKRPVMQEIIQDIEDGKINYLIAYRRDRLFRNQAENMWFWSLLAEHDCKIFLTASGETQVNIEEIKKAGTTKMMESILAMLAEMESEITSTRVSDTMISKAKKGEYTGGATPIGYERIEGRFTPKNGVKELFYMVEDLYLQGFGLLSIAKWLNGEKVADLPQLESSIKKPIDSHKDTLWNHRNINTILFNPFYTGHVSYQSKKNIEMNRIIKEVDYIEPIRTLERQKQINAFKKKKEEGKKAPRAYNTSFLLTGILYCGECGAKMLGSTTQKKGSEKKYCYYSCPTKKSYYGGVKKCENVHYNKDAIEAVVIKATKEKTKFIMSDDFYKKASKKIKDDKKTYASQYDLISEEVTKKEKELSRLIKMTTQIEDVELQKVYFAEQSQLITKINEMKDSMLLVAEKANGEVSDDFNFESFIELSKDYSKMIGVAPIGIQKQLIENLFADIRIDKNGEVSMQWNIGLVELLAPVKEVDDSNNTDEVMFYTTVGSP

SEQ ID NO: 46882 - DNA, 50 bp, Lysinibacillus sphaericus
  source 1..50: mol_type = genomic DNA
gttatgttctatacaacggtaggttcgccaatggttacaaagaacataac

SEQ ID NO: 46883 - DNA, 40 bp, Lysinibacillus sphaericus; identical to SEQ ID NO: 46878
  source 1..40: mol_type = genomic DNA

SEQ ID NO: 46884 - DNA, 50 bp, Lysinibacillus sphaericus
  source 1..50: mol_type = genomic DNA
gttatgttctatacaacggtaggtgtgccaatggttacaaagaacataac

SEQ ID NO: 46885 - DNA, 40 bp, Lysinibacillus sphaericus; identical to SEQ ID NO: 46880
  source 1..40: mol_type = genomic DNA

SEQ ID NO: 46886 - protein, 503 aa, Escherichia coli
MNNRIDAIYARQSVDKKDSISIESQIEFCKYELKGGNCKEYKDKGYSGKNTERPQFQQLMRDIESGLVRKVVVYKLDRISRSILDFAKMMDFFQKYEVEFVSSTEKFDTSTPMGRAMLNICIVFAQLERETIQKRVTDAYYSRSQRGFKMGGKAPYGFHTEPIKMDGINTKKLVVNPDEAANIRLMFEMYAQPTTSYGDITRYFAEQGILFNGKELIRPTLAQMLRNPVYVQTDLDVYEFFKSQGTVIANDAADFTGMNGCYLYQGRGVKPSKKNDLKDQMLVLAPHEGIVPSDIWLTCRKKLMNNMKIQSARKATHTWLAGKIKCGNCGYALMSINNPVGKQYLRCTKRLDNKSCAGCGKIITSELEAVVYQQMVKKLASYKTLTGRKKAAKTNPKIAALQVELLHVDSEIEKLVDSLTGANNVLLSYVNVKIAELDGRKQELVKQIAELTVEAISPEQVNQISGYLDTWDNVSFDDKRRVVDLMITTIAATSDSLNITWKI

SEQ ID NO: 46887 - DNA, 50 bp, Escherichia coli; identical to SEQ ID NO: 12
  source 1..50: mol_type = genomic DNA

SEQ ID NO: 46888 - DNA, 40 bp, Escherichia coli
  source 1..40: mol_type = genomic DNA
tgttgttttgagagtttccttatggcgttgttaatcacta

SEQ ID NO: 46889 - DNA, 50 bp, Escherichia coli; identical to SEQ ID NO: 15049
  source 1..50: mol_type = genomic DNA

SEQ ID NO: 46890 - DNA, 40 bp, Escherichia coli
  source 1..40: mol_type = genomic DNA
tgttgtttttcttttttccatatggcttcatttatcactc

SEQ ID NO: 46891 - protein, 515 aa, Bacillus thuringiensis; identical to SEQ ID NO: 42696

SEQ ID NO: 46892 - DNA, 50 bp, Bacillus thuringiensis
  source 1..50: mol_type = genomic DNA
tgtcgtcaccttcttggtgtaattaggttgacgccaacatggtagcaaca

SEQ ID NO: 46893 - DNA, 40 bp, Bacillus thuringiensis
  source 1..40: mol_type = genomic DNA
tgttgccattaggcgcatgagatttaccccatttaaccct

SEQ ID NO: 46894 - DNA, 50 bp, Bacillus thuringiensis
  source 1..50: mol_type = genomic DNA
tgtcgtcaccttcttggtgtaattacgttgacgccaacatggtagcaaca

SEQ ID NO: 46895 - DNA, 40 bp, Bacillus thuringiensis
  source 1..40: mol_type = genomic DNA
tgatgcaatgaggggcatgacattatccatatagaaccct

SEQ ID NO: 46896 - protein, 515 aa, Bacillus thuringiensis
MKTAIYLRKSRADLEAEARGEGETLAKHRSTLLKIAKEMNLNVLSVREEIVSGESLVKRPEMLALLEEIEDNKYDVVLCMDMDRLGRGGMKEQGIILETFKRSNTKIMTPRKTYDLNDEWDEEYSEFEAFMARKELKIITRRMQRGRVASVEAGNYLGTHAPFGYDIHRLNKRERTLTINPEEASVVRMIFDWYANEDMGANAIRSKLNDLGYKSKLGNEWNPYSILDILKNNVYIGKVTWQKRKEVKRPDAVKRSCARQDKSDWIIADGKHEPIIPESLFEQVQEKLNSRYHIPYNTNGIKNPLAGIIKCAKCGYSMVQRYPKNRKETMDCKHRGCENKSSYTELIEKRLLEALKEWYINYKADFEKHKQDDKLKETQVIQMNEAALRKLEKELVDVQKQKNNLHDLLERGVYTVDMFLERSNVISDRITEITSTMENLKKEIKTEIKKEKVKKDTIPQVEHVLDLYFKTDDPKKKNSLLKSVLEKAVYKKEKWQKLDDFELVLYPKLPQDGDI

SEQ ID NO: 46897 - DNA, 50 bp, Bacillus thuringiensis; identical to SEQ ID NO: 36457
  source 1..50: mol_type = genomic DNA

SEQ ID NO: 46898 - DNA, 40 bp, Bacillus thuringiensis; identical to SEQ ID NO: 46893
  source 1..40: mol_type = genomic DNA

SEQ ID NO: 46899 - DNA, 50 bp, Bacillus thuringiensis
  source 1..50: mol_type = genomic DNA
tgtcgtcaccttgttggtgtaattacgttgacgccaacagggtgatgaca

SEQ ID NO: 46900 - DNA, 40 bp, Bacillus thuringiensis; identical to SEQ ID NO: 46895
  source 1..40: mol_type = genomic DNA

SEQ ID NO: 46901 - protein, 515 aa, Bacillus cereus
MKTAIYLRKSRADLEAEARGEGETLAKHRTTLLKIAKEMNLNVLSVREEIVSGESLVKRPEMLALLEEIEDNKYDVVLCMDMDRLGRGGMKEQGIILETFKRSNTKIMTPRKTYDLNDEWDEEYSEFEAFMARKELKIITRRMQRGRIASVEAGNYLGTHAPYGYDIHRLNKRERTLTINPEEASVVRMIFDWYAHEDMGANAIRSKLNDLGYKSKLGNEWNPYSILDILKNNVYIGKVTWQKRKEVKRPDAVKRSCARQDKSDWIIADGKHEPIIPASLFEQVQEKLNLRYHIPYNTNGIKNPLAGIVKCAKCGYSMVQRYPKNRKETMDCKHRGCENKSSYTELIEKRLLEALKEWYINYKADFEKHKQGDRLKETQVIQMNEAALRKLEKELVDVQKQKNNLHDLLERGVYTVDMFLERSNVVSDRITEITSTMENLKKEIKTEIKKEKVKKDTIPQVEHVLDLYFKTDDPKKKNSLLKSVLEKAVYKKEKWQRLDDFELVLYPKLPQDGDI

SEQ ID NO: 46902 - DNA, 50 bp, Bacillus cereus; identical to SEQ ID NO: 36447
  source 1..50: mol_type = genomic DNA

SEQ ID NO: 46903 - DNA, 40 bp, Bacillus cereus; identical to SEQ ID NO: 46893
  source 1..40: mol_type = genomic DNA

SEQ ID NO: 46904 - DNA, 50 bp, Bacillus cereus
  source 1..50: mol_type = genomic DNA
tgtcgtcaccttgttggtgtaattacgttgacgccaacatggtagcgaca

SEQ ID NO: 46905 - DNA, 40 bp, Bacillus cereus; identical to SEQ ID NO: 46895
  source 1..40: mol_type = genomic DNA

SEQ ID NO: 46906 - protein, 515 aa, Bacillus cereus
MKTAIYLRKSRADLEAEARGEGETLAKHRSTLLKIAKEMNLNVLSVREEIVSGESLVKRPEMLALLEEIEDNKYDVVLCMDMDRLGRGGMKEQGIILETFKRSNTKIMTPRKTYDLNDEWDEEYSEFEAFMARKELKIITRRMQRGRVASVEAGNYLGTHAPFGYNIHRLNKRERTLTINSEEASVVRMIFDWYANEDMGANAIRSKLNDLGYKSKLGNEWNPYSILDILKNNVYIGKVTWQKRKEVKRPDAVKRSCARQDKSDWIIADGKHEPIIPESLFEQVQEKLNSRYHIPYNTNGIKNPLAGIIKCAKCGYSMVQRYPKNRKETMDCKHRGCENKSSYTELIEKRLLEALKEWYINYKADFEKHKQDDKLKETQVIQMNEAALRKLEKELVDVQKQKNNLHDLLERGVYTVDMFLERSNVVSDRITEITSTMENLKKEIKTEIKKEKVKKDTIPQVEHVLDLYFKTDDPKKKNSLLKSVLEKAVYKKEKWQRLDDFELVLYPKLPQDGDI

SEQ ID NO: 46907 - DNA, 50 bp, Bacillus cereus; identical to SEQ ID NO: 40972
  source 1..50: mol_type = genomic DNA

SEQ ID NO: 46908 - DNA, 40 bp, Bacillus cereus; identical to SEQ ID NO: 46893
  source 1..40: mol_type = genomic DNA

SEQ ID NO: 46909 - DNA, 50 bp, Bacillus cereus
  source 1..50: mol_type = genomic DNA
tgtcgtcaccttgttggtgtaattacgttgacgccaacatggtagcaaca

SEQ ID NO: 46910 - DNA, 40 bp, Bacillus cereus; identical to SEQ ID NO: 46895
  source 1..40: mol_type = genomic DNA

SEQ ID NO: 46911 - protein, 515 aa, Bacillus cereus
MKTAIYLRKSRADLEAEARGEGETLAKHRSTLLKIAKEMNLNILTVREEIVSGESLVKRPEMLALLEEIEDNKYDVVLCMDMDRLGRGGMKEQGIILETFKRSNTKIMTPRKTYDLNDEWDEEYSEFEAFMARKELKIITRRMQRGRIASVEAGNYLGTHAPYGYDIHRLNKRERTLTINPEEASVVRMIFDWYANEDMGANSIRSKLNDLGYKSKLGNEWNPYSILDILKNNVYIGKVTWQKRKEVKRPDAVKRSCARQDKSDWIIADGKHEPIIPESLFEQVQEKLNSRYHIPYNTNGIKNPLAGIIKCAKCGYSMVQRYPKNRKETMDCKHRGCENKSSYTELIEKRLLEALKEWYINYKADFEKHKQNDKLKETQVIQMNEAALRKLEKELVDVQKQKNNLHDLLERGVYTVDMFLERSNVVSDRITEITSTMENLKKEIKTEIKKEKVKKDTIPQVEHVLDLYFKTDDPKKKNSLLKSVLEKAVYKKEKWQRLDDFELVLYPKLPQDGDI

SEQ ID NO: 46912 - DNA, 50 bp, Bacillus cereus; identical to SEQ ID NO: 36457
  source 1..50: mol_type = genomic DNA

SEQ ID NO: 46913 - DNA, 40 bp, Bacillus cereus; identical to SEQ ID NO: 46893
  source 1..40: mol_type = genomic DNA

SEQ ID NO: 46914 - DNA, 50 bp, Bacillus cereus; identical to SEQ ID NO: 46899
  source 1..50: mol_type = genomic DNA

SEQ ID NO: 46915 - DNA, 40 bp, Bacillus cereus; identical to SEQ ID NO: 46895
  source 1..40: mol_type = genomic DNA

SEQ ID NO: 46916 - protein, 515 aa, Bacillus cereus
MKTAIYLRKSRADLEAEARGEGETLAKHRTTLLKIAKEMNLNVLAVREEIVSGESLVKRPEMLALLEEIEDNKYDVVLCMDMDRLGRGGMKEQGIILETFKRSNTKIMTPRKTYDLNDEWDEEYSEFEAFMARKELKIITRRMQRGRIASVEAGNYLGTHAPYGYDIHRLNKRERTLTINSEEASVVRMIFDWYANEDMGANAIRSKLNDLGYKSKLGNEWNPYSILDILKNNVYIGKVTWQKRKEVKRPDAVKRSCARQDKSDWIIADGKHEPIIPVSLFEQVQEKLNSRYHIPYNTNGIKNPLAGIIKCAKCGYSMVQRYPKNRKETMDCKHRGCENKSSYTELIEKRLLEALKEWYINYKADFEKHKQDDKLKETQVIQMNEAALRKLEKELVDVQKQKNNLHDLLERGVYTVDMFLERSNVVSDRITEITSTMENLKKEIKTEIKKEKVKKDTIPQVEHVLDLYFKTDDPKKKNSLLKSVLEKAVYKKEKWQRLDDFELVLYPKLPQDGDI

SEQ ID NO: 46917 - DNA, 50 bp, Bacillus cereus; identical to SEQ ID NO: 36457
  source 1..50: mol_type = genomic DNA

SEQ ID NO: 46918 - DNA, 40 bp, Bacillus cereus; identical to SEQ ID NO: 46893
  source 1..40: mol_type = genomic DNA

SEQ ID NO: 46919 - DNA, 50 bp, Bacillus cereus; identical to SEQ ID NO: 46899
  source 1..50: mol_type = genomic DNA

SEQ ID NO: 46920 - DNA, 40 bp, Bacillus cereus; identical to SEQ ID NO: 46895
  source 1..40: mol_type = genomic DNA

SEQ ID NO: 46921 - protein, 515 aa, Bacillus cereus
MKTAIYLRKSRADLEAEARGEGETLAKHRTTLLKIAKEMNLNVLSVREEIVSGESLVKRPEMLALLEEIEDNKYDVVLCMDMDRLGRGGMKEQGIILETFKRSNTKIMTPRKTYDLNDEWDEEYSEFEAFMARKELKIITRRMQRGRVASVEAGNYLGTHAPFGYDIHRLNKRERTLTINPEEASVVRMIFDWYANEDMGANAIRSKLNDLGYKSKLGNEWNPYSILDILKNNVYIGKVTWQKRKEVKRPDAVKRSCARQDKSDWIIADGKHEPIIPESLFEQVQEKLNSRYHIPYNTNGIKNPLAGIIKCAKCGYSMVQRYPKNRKETMDCKHRGCENKSSYTELIEKRLLEALKEWYINYKADFEKHKQGDRLKEIQVIQMNEAALRKLEKELVDVQKQKNNLHDLLERGVYTVDMFLERSNVVSDRITEITSTMENLKKEIKTEIKKEKVKKDTIPQVEHVLDLYFKTDDPKKKNSLLKSVLEKAVYKKEKWQRLDDFELVLYPKLPQDGDI

SEQ ID NO: 46922 - DNA, 50 bp, Bacillus cereus
  source 1..50: mol_type = genomic DNA
tgtcgtcaccttgttggtataattaggttgacgccaacagggtgatgaca

SEQ ID NO: 46923 - DNA, 40 bp, Bacillus cereus; identical to SEQ ID NO: 46893
  source 1..40: mol_type = genomic DNA

SEQ ID NO: 46924 - DNA, 50 bp, Bacillus cereus
  source 1..50: mol_type = genomic DNA
tgtcgtcaccttgttggtataattacgttgacgccaacagggtgatgaca

SEQ ID NO: 46925 - DNA, 40 bp, Bacillus cereus; identical to SEQ ID NO: 46895
  source 1..40: mol_type = genomic DNA

SEQ ID NO: 46926 - protein, 515 aa, Bacillus cereus
MKTAIYLRKSRADLEAEARGEGETLAKHRTTLLKIAKEMNLNVLAVREEIVSGESLVKRPEMLALLEEIEDNKYDVVLCMDMDRLGRGGMKEQGIILETFKRSNTKIMTPRKTYDLNDEWDEEYSEFEAFMARKELKIITRRMQRGRVASVEAGNYLGTHAPFGYDIHRLNKRERTLTINPEEASVVRMIFDWYANEDMGANAIRSKLNDLGYKSKLGNEWNPYSILDILKNNVYIGKVTWQKRKEVKRPDAVKRSCARQDKSDWIIADGKHEPIIPESLFEQVQEKLNSRYHVPYNTNGIKNPLAGIIKCSKCGYSMVQRYPKNRKETMDCKHRGCENKSSYTELIEKRLLEALKEWYINYKADFEKHKQDDKLKETQVIQMNEAALRKLEKELVDVQKQKNNLHDLLERGVYTVDMFLERSNVISDRITEITSTMESLKKEIKTEIKKEKVKKDTIPQVEHVLDLYFKTDDSKKKNSLLKSVLEKAVYKKEKWQRLDDFELVLYPKLPQDGDI

SEQ ID NO: 46927 - DNA, 50 bp, Bacillus cereus; identical to SEQ ID NO: 36472
  source 1..50: mol_type = genomic DNA

SEQ ID NO: 46928 - DNA, 40 bp, Bacillus cereus; identical to SEQ ID NO: 46893
  source 1..40: mol_type = genomic DNA

SEQ ID NO: 46929 - DNA, 50 bp, Bacillus cereus
  source 1..50: mol_type = genomic DNA
tgtcgtcaccttgttggtgtaattacgttgacgccaacagggtaataaca

SEQ ID NO: 46930 - DNA, 40 bp, Bacillus cereus; identical to SEQ ID NO: 46895
  source 1..40: mol_type = genomic DNA

SEQ ID NO: 46931 - protein, 515 aa, Bacillus cereus
MKTAIYLRKSRADLEAEARGEGETLAKHRSTLLKIAKEMNLNVLSVREEIVSGESLVKRPEMLALLEEIEDNKYDVVLCMDMDRLGRGGMKEQGIILETFKRSNTKIMTPRKTYDLNDEWDEEYSEFEAFMARKELKIITRRMQRGRIASVEAGNYLGTHAPYGYDIHRLNKRERTLTINPEEASVVRMIFDWYANEDMGANAIRSKLNDLGYKSKLGNEWNPYSILDILKNNVYIGKVTWQKRKEVKRPDAVKRSCARQEKSDWIIADGKHEPIIPESLFEQVQEKLNSRYHVPYNTNGIKNPLAGIIKCSKCGYSMVQRYPKNRKETMDCKHRGCENKSSYTELIEKRLLEALKEWYINYKADFEKHKQDDKLKETQVIQMNEAALRKLEKELVDVQKQKNNLHDLLERGVYTVDMFLERSNVVSDRITEITSTMENLKKEIKTEIKKEKVKKDTIPQVEHVLDLYFKTDDPKKKNSLLKSVLEKAVYKKEKWQRLDDFELVLYPKLPQDGDI

SEQ ID NO: 46932 - DNA, 50 bp, Bacillus cereus
  source 1..50: mol_type = genomic DNA
tgtcgtcaccttgttggtgtaattagtttgacgccaacagggtgataaca

SEQ ID NO: 46933 - DNA, 40 bp, Bacillus cereus; identical to SEQ ID NO: 46893
  source 1..40: mol_type = genomic DNA

SEQ ID NO: 46934 - DNA, 50 bp, Bacillus cereus
  source 1..50: mol_type = genomic DNA
tgtcgtcaccttgttggtgtaattactttgacgccaacagggtgataaca

SEQ ID NO: 46935 - DNA, 40 bp, Bacillus cereus; identical to SEQ ID NO: 46895
  source 1..40: mol_type = genomic DNA

SEQ ID NO: 46936 - protein, 515 aa, Bacillus cereus
MKTAIYLRKSRADLEAEARGEGETLAKHRTTLLKIAKEMNLNVLAVREEIVSGESLVKRPEMLALLEEIEDNKYDVVLCMDMDRLGRGGMKEQGIILETFKRSNTKIMTPRKTYDLNDEWDEEYSEFEAFMARKELKIITRRMQRGRIASVEAGNYLGTHAPYGYDIHRLNKRERTLTINSEEASVVRMIFDWYANEDMGANAIRSKLNDLGYKSKLGNEWNPYSILDILKNNVYIGKVTWQKRKEVKRPDAVKRSCARQDKSDWIIADGKHEPIIPESLFEQVQEKLNSRYHVPYNTNGIKNPLAGIIKCSKCGYSMVQRYPKNRKETMDCKHRGCENKSSYTELIEKRLLEALKEWYINYKADFEKHKQDDKLKETQVIQMNEAALRKLEKELVDVQKQKNNLHDLLERGVYTVDMFLERSNVVSDRITEITSTIENLKKEIKTEIKKEKVKKDTIPQVENVLDLYFKTDDPKKKNSLLKSVLEKAVYKKEKWQRLDDFELVLYPKLPQDGDI

SEQ ID NO: 46937 - DNA, 50 bp, Bacillus cereus; identical to SEQ ID NO: 36457
  source 1..50: mol_type = genomic DNA

SEQ ID NO: 46938 - DNA, 40 bp, Bacillus cereus; identical to SEQ ID NO: 46893
  source 1..40: mol_type = genomic DNA

SEQ ID NO: 46939 - DNA, 50 bp, Bacillus cereus; identical to SEQ ID NO: 46899
  source 1..50: mol_type = genomic DNA

SEQ ID NO: 46940 - DNA, 40 bp, Bacillus cereus; identical to SEQ ID NO: 46895
  source 1..40: mol_type = genomic DNA

SEQ ID NO: 46941 - protein, 515 aa, Bacillus cereus
MKTAIYLRKSRADLEAEARGEGETLAKHRTTLLKIAKEMNLNVLAVREEIVSGESLVKRPEMLALLEEIEDNKYDVVLCMDMDRLGRGGMKEQGIILETFKRSNTKIMTPRKTYDLNDEWDEEYSEFEAFMARKELKIITRRMQRGRVASVEAGNYLGTHAPFGYDIHRLNKRERTLTINPEEASVVRMIFDWYTNEDMGANAIRSKLNDLGYKSKLGNEWNPYSILDILKNNVYIGKVTWQKRKEVKRPDAVKRSCARQDKSDWIIADGKHEPIIPESLFEQVQEKLNSRYHVPYNTNGIKNPLAGIIKCSKCGYSMVQRYPKNRKETMDCKHRGCENKSSYTELIEKRLLEALKEWYINYKADFEKHKQDDKLKETQVIQMNEAALRKLEKELVDVQKQKNNLHDLLERGVYTVDMFLERSNVISNRITEITSTMENLKKEIKTEIKKEKVKKDTIPQVEHVLDLYFKTDDPKKKNSLLKSVLEKAVYKKEKWQRLDDFELVLYPKLPQDGDI

SEQ ID NO: 46942 - DNA, 50 bp, Bacillus cereus
  source 1..50: mol_type = genomic DNA
tgtcgtcaccttgttggcgtaattaggttgacgccaacatggtagcgaca

SEQ ID NO: 46943 - DNA, 40 bp, Bacillus cereus; identical to SEQ ID NO: 46893
  source 1..40: mol_type = genomic DNA

SEQ ID NO: 46944 - DNA, 50 bp, Bacillus cereus
  source 1..50: mol_type = genomic DNA
tgtcgtcaccttgttggcgtaattacgttgacgccaacatggtagcgaca

SEQ ID NO: 46945 - DNA, 40 bp, Bacillus cereus; identical to SEQ ID NO: 46895
  source 1..40: mol_type = genomic DNA

SEQ ID NO: 46946 - protein, 515 aa, Bacillus cereus
MKTAIYLRKSRADLEAEARGEGETLAKHRSTLLKIAKEMDLNVLAVREEIVSGESLVKRPEMLALLEEIEDNKYDVVLCMDMDRLGRGGMKEQGIILETFKRSNTKIMTPRKTYDLNDEWDEEYSEFEAFMARKELKIITRRMQRGRIASVEAGNYLGTHAPYGYDIHRLNKRERTLTINSEEASVVRMIFDWYANEDMGANAIRSKLNDLGYKSKLGNEWNPYSILDILKNNVYIGKVTWQKRKEVKQPDAVKRSCARQDKSDWIIADGKHEPIIPESLFEQVQEKLNSRYHVPYNTNGIKNPLAGIIKCSKCGYSMVQRYPKNRKETMDCKHRGCENKSSYTELIEKRLLEALKEWYINYKADFEKHKQDDKLKETQVIQMNEAALRKLEKELVDVQKQKNNLHDLLERGVYTVDMFLERSNVVSDRITEITSTMENLKKEIKTEIKKEKVKKDTIPQVEHVLDLYFKTDDPKKKNSLLKSVLEKAVYKKEKWQRLDDFELVLYPKLPQDGDI

SEQ ID NO: 46947 - DNA, 50 bp, Bacillus cereus
  source 1..50: mol_type = genomic DNA
tgtcgtcaccttgttggtgtaattagattgacgccaacatggtagcgaca

SEQ ID NO: 46948 - DNA, 40 bp, Bacillus cereus; identical to SEQ ID NO: 46893
  source 1..40: mol_type = genomic DNA

SEQ ID NO: 46949 - DNA, 50 bp, Bacillus cereus
  source 1..50: mol_type = genomic DNA
tgtcgtcaccttgttggtgtaattacattgacgccaacatggtagcgaca

SEQ ID NO: 46950 - DNA, 40 bp, Bacillus cereus; identical to SEQ ID NO: 46895
  source 1..40: mol_type = genomic DNA

SEQ ID NO: 46951 - protein, 497 aa, Zhihengliuella halotolerans
MPNAIIYTRQSKHRDESITHENQEDACRKYAASKGYDVVEVVNEKGKSGRTIDKRTEFRRTLKLIEDGHAEIMLVWRWSRFARNTLDGLITLKSVEEEAGGKVESALEPIDRSAMGKFQLTILLAMAELESEQKSEDWKSYLNSRLDSGTAPAGRNYFGYRRVMDATGKKHVGYEIVPEQAEAIREAAKRVVAGHSLRKVAFWLNEQGFRTTQGKPFVSIQVRRVLLQPFVRGKIGWKGKEVDGAHEAILSEGTYRKVAAELSDNTMPRRSEVPSSRLRGIVECAKCGRKLSYQRGHNKDRPKAPSRFRCPTRVSKGTSICDFGSVLAEEVGNALAWAAQRRWNDVEKAVPQQDVQQKLDDKRAQVDSLQHQITQMLLTAQAAGLSTEQVQEALTTLREQSETAQTELSELEAAALTQARPWHEIEDVIHGDDVGAANATIKQFVRRIVADAETLSIEFVEGLPYVWYLGSGPSPGAKDRFKDYADKQGLTPPIPEP

SEQ ID NO: 46952 - DNA, 50 bp, Zhihengliuella halotolerans
  source 1..50: mol_type = genomic DNA
ggggatcctatcataacgaagtcccacgattccgttgcgtcatactgtcg

SEQ ID NO: 46953 - DNA, 40 bp, Zhihengliuella halotolerans
  source 1..40: mol_type = genomic DNA
aggagtgagaacgaagtcccacgggtcggaattgatgctg

SEQ ID NO: 46954 - DNA, 50 bp, Zhihengliuella halotolerans
  source 1..50: mol_type = genomic DNA
ggggatcctatcataacgaagtcctccgattccgttgcgtcatactgtcg

SEQ ID NO: 46955 - DNA, 40 bp, Zhihengliuella halotolerans
  source 1..40: mol_type = genomic DNA
aggaggtagaagcaattcctctgggttggaattctggctg

SEQ ID NO: 46956 - protein, 522 aa, Rhizobium pusense
MKRAAIYARYSTDLQNDKSVEDQIRLCEAHAQRIGARIVKNFHDRAKSGASMFGRAGLSQLMQEAEKGTFEILISESPDRVSRDIADLAHIHKTLKFRGIEMNCVNGGVMDTMQIGMYGVVGQMQREEGAKKVKRGMMGVVRSGRNAGGKAYGYEPVPGKPGELAIIEEQAAIIRRIFKQFAAGVSARSIAGALNDENVPPPRGSKWNASTINGNGARGYGILRNPIYDGRIIWNRVRMVKDPSTGRRVSRVNDASEHETIEAPHLRIVEEKLFAAVQKRKEDATEFAMPLVRSRRILSGLLRCRSCGGGMSIVGSDRSGPRVMCSTHRESRTCDNDARYYIEKIEQKVLNTLRQQFADSDMIKAYVNTYEEERRRTSADLKRNRASIERQLDEAKRAIARVVEKVAKGIIEDDDAAAILPGLREERDRHSADLSKMEKPNNVIELFPLAVRRFKENLEKLTEILSAAGEIPDADAVLTFRELVASVIVDPRKAGEDYVVEIKGYLSSLIQPEMSAVVVVAG

SEQ ID NO: 46957 - DNA, 50 bp, Rhizobium pusense
  source 1..50: mol_type = genomic DNA
gtcggctgttgttgtggtagcgggagaccgttctggtttcgacagccgac

SEQ ID NO: 46958 - DNA, 40 bp, Rhizobium pusense
  source 1..40: mol_type = genomic DNA
gaagaaaagtggtagcgggagagggacttgaacccccgac

SEQ ID NO: 46959 - DNA, 50 bp, Rhizobium pusense
  source 1..50: mol_type = genomic DNA
gtcggctgttgttgtggtagcgggacaccgttctggtttcgacagccgac

SEQ ID NO: 46960 - DNA, 40 bp, Rhizobium pusense
  source 1..40: mol_type = genomic DNA
gaagaaccagggcacctggacagggacttggtcccccgag

SEQ ID NO: 46961 - protein, 511 aa, Cellulomonas hominis
MSRADARLRAVPERAERALLLIRVSKEREGMIAPELQRDATREHCARRGYEVVDTIEGIDESGSRARSAWWPRLDAAIARVVAGEVDVIVVWELSRTARNRLRWAVALDQVEAAGGRIESATEPIDQTTAAGRFQRGMLAEMHAYRAEAIGEGWKATIARRRRAGLPHSGGQRFGYRPGDDGRFEPDPETAPILAEAYRRYSAGAGLRALCTWLTALGIRTSRGGLYSHDTLGRMLDSGFGAGLLRVHDPDCTDRHPAGTDVGRCPQRTYLPGAHTAVIDTATWDAYLDARADRTTIAPRHRRASTPLSGVARCGACGYTLTYEREKTRKRGTQAPRFSCLRAGCRRSSVRYSVAEAAVVAWLSTVEAQMGAASASAEQSSAAAQVQAERAARAVTDAARALAQLTVDHARRIVPTSAYEAARDALVAEQSAAQATLERLIRRASASADHAMAAARLLETWGSAPAEDLAPMLRGLCTVWVVRREGARGCDVRIVGAWEPSPEPTRPIPRD

SEQ ID NO: 46962 - DNA, 50 bp, Cellulomonas hominis
  source 1..50: mol_type = genomic DNA
ataccgaggttgcgcgcgtgcacggtcgtgcacgcgctctacctcggtat

SEQ ID NO: 46963 - DNA, 40 bp, Cellulomonas hominis
  source 1..40: mol_type = genomic DNA
cgcggcgttggcgtgcacggtggtgcagccgccgtcgtgc

SEQ ID NO: 46964 - DNA, 50 bp, Cellulomonas hominis
  source 1..50: mol_type = genomic DNA
ataccgaggttgcgcgcgtgcacgcgcgtgcacgcgctctacctcggtat

SEQ ID NO: 46965 - DNA, 40 bp, Cellulomonas hominis
  source 1..40: mol_type = genomic DNA
agcggcgctgctgtgaccgcgggtgcggcggccctggtgc

SEQ ID NO: 46966 - protein, 606 aa, Streptomyces anulatus
MVASVLVKPGSGNPPVPTGDMHSAPRNPIAGTVYETRTLRGVRCVRLSVLTDETTSPERQREADDRVAAELNIDFGTGDALREAVDLDVSASTFGPFERPELGGWLNRPDEYDALVWWRFDRAIRSMAHMHELAKWAREHRKMLVFAEGIGGGKLVFDFRNPMDPMAEFQMMMLAFAAQVESQSIKDRVTGAMAAIRRMPLRWRGGGRPPYGYMPAAMPKEHGGIGWTLVPDPDAVVIIERIVRELLEGATVSAVAAGLNVDGKASPRDHWAVKMEREKGGKTGGAKGSHVVREAFKWTPAVISRMLRNPTMLGWKMHKGKPVRDAEGNPIMATETPIMTRTEFDRIGALLASRSIENGERKDTDALLLRVIHCNSCEGRMYMSKPTKNGASVNPFYKCNSHARGDQCALPASIRASWVDEYVEAEFLRVLGPVQTTHVVEIPGYDPEPELRATVAEFEEHQRQEGRQKSKHAARAWQERADALDNRIATLEAAEKVEPQRIVTNTGRTFADEWAEKDTAGRRAMLIEAGVRLNVRRGVRGGWRKLDVRRVDFTMRGELDPAAEALAGEVTELASETRGDSPTPGASVRLVEPATVAEPVRELVAA

SEQ ID NO: 46967 - DNA, 50 bp, Streptomyces anulatus
  source 1..50: mol_type = genomic DNA
aactggtagtcaggagtgttggggtctcccaacacacggaactagtagtt

SEQ ID NO: 46968 - DNA, 40 bp, Streptomyces anulatus
  source 1..40: mol_type = genomic DNA
gaactcgttgccctcgggatcggcgagcgtcgcccagccg

SEQ ID NO: 46969 - DNA, 50 bp, Streptomyces anulatus
  source 1..50: mol_type = genomic DNA
aactggtagtcaggagtgttgggggctcccaacacacggaactagtagtt

SEQ ID NO: 46970 - DNA, 40 bp, Streptomyces anulatus
  source 1..40: mol_type = genomic DNA
gcccgcggagccggcgggagccgcgcgcgccgcccagccg

SEQ ID NO: 46971 - protein, 542 aa, Enterococcus faecium
MIYQKGSNLFNVAIYIRLSREDGDKEESDSVGNQRKLLTEYVNKHDDFILYDVYIDDGFTGTNFNRPDFHRMIADIEDNKVNCVVVKDLSRFGRDYIDTGRYLERIFPELNVRFISVTDNIDSMKQAYDMLLPIKNIFNEQYARDISNKIQATVKSKQKAGEFIGAFTSYGYKKSPANKNKLVIDEYASEVVKRVFTMYAQGIGKQSIAKILNAEGILCPSEYKKLNGENYKNCNRLEKTSYWTYSTIKVMLQNELYIGNMVQGKKHQRMRSKQRPVEKENWIRVENTHEPIIDRQLWDKVQKLLTKKHRDIDLETNKNIFAGFIKCGDCGRAMMKNFWRRADGSKSYSFYCGTYKRSGKDYCTPHTLPFQVLNDIVLGDLKQIIRNVENLQELVKSQSFTATKIRKSTDIELTKLKAELERVKKLKKSIYEDYKDELISKEEFLSYREDYQQKETLYSKQIETLEEKKKESVTEDVFETPWLRRLLELKDIEELDRDIIVEMIDQITVYENHKLKISYNFGNELEHLFSSVYCEDLEKKVI

SEQ ID NO: 46972 - DNA, 50 bp, Enterococcus faecium; identical to SEQ ID NO: 35852
  source 1..50: mol_type = genomic DNA

SEQ ID NO: 46973 - DNA, 40 bp, Enterococcus faecium
  source 1..40: mol_type = genomic DNA
gattgtattagatcctgggcatggcggaaatgatactggg

SEQ ID NO: 46974 - DNA, 50 bp, Enterococcus faecium
  source 1..50: mol_type = genomic DNA
aatttgcgtaaactacaatcagcagctgggggttgtagataacgcaagtg

SEQ ID NO: 46975 - DNA, 40 bp, Enterococcus faecium
  source 1..40: mol_type = genomic DNA
tcatgttttatttcctggggctgggggaagtgctgctggg

SEQ ID NO: 46976 - protein, 542 aa, Enterococcus faecium
MIYQKGSNLFNVAIYIRLSREDGDKEESDSVGNQRKLLTEYVNKHDDFILYDVYIDDGFTGTNFNRPDFHRMIADIEDNKVNCVVVKDLSRFGRDYIDTGRYLERIFPELNVRFISVTDNIDSMKQAYDMLLPIKNIFNEQYARDISNKVQATVKSKQKAGEFIGAFTSYGYKKSPANKNKLVIDEYASEVVKRVFTMYAQGIGKQSIAKILNAEGILCPSEYKKLNGENYKNCNRLEKTSYWTYSTIKVMLQNEIYIGNMVQGKKHQRMRSKQRLVEKENWIRVENTHEPIIDRQLWDKVQKLLTKKHRDIDLETNKNIFAGFIKCGDCGRAMMKNFWRRADGSKSYSFYCGTYKRSGKDYCTPHTLPFQVLNDIVLGDLKQIIRNVENLQELVKSQSFTATKIRKSTDIELIKLKAELERVKKLKKSIYEDYKDELISKEEFLSYREDYQQKETLYSKQIETLEEKKKESVTEDVFETPWLRRLLELKDIEELDRDIIVEMIDQITVYENRKLKISYNFGNELEHLFSSVYCEDLEKKAI

SEQ ID NO: 46977 - DNA, 50 bp, Enterococcus faecium; identical to SEQ ID NO: 35852
  source 1..50: mol_type = genomic DNA

SEQ ID NO: 46978 - DNA, 40 bp, Enterococcus faecium; identical to SEQ ID NO: 46973
  source 1..40: mol_type = genomic DNA

SEQ ID NO: 46979 - DNA, 50 bp, Enterococcus faecium; identical to SEQ ID NO: 46974
  source 1..50: mol_type = genomic DNA

SEQ ID NO: 46980 - DNA, 40 bp, Enterococcus faecium; identical to SEQ ID NO: 46975
  source 1..40: mol_type = genomic DNA

SEQ ID NO: 46981 - protein, 542 aa, Enterococcus faecium
MIYQKGSNLFNVAIYIRLSREDGDKEESDSVGNQRKLLTEYVNKHDDFILYDVYIDDGFTGTNFNRPDFHRMIADIEDNKVNCVVVKDLSRFGRDYIDTGRYLERIFPELNVRFISVTDNIDSMKQTYDMLLPIKNIFNEQYARDISNKIQATVKSKQKAGEFIGAFTSYGYKKSPANKNKLVIDEYASEVVKRVFTMYAQGIGKQSIAKILNAEGILCPSEYKKLNGENYKNCNRLEKTSYWTYSTIKVMLQNELYIGNMVQGKKHQRMRSKQRPVEKENWIRVENTHEPIIDRQLWDKVQKLLTKKHRDIDLETNKNIFAGFIKCGDCGRAMMKNFWRRADGSKSYSFYCGTYKRSGKDYCTPHTLPFQVLNDIVLGDLKQIIRNVENLQELVKSQSFTATKIRKSTDIELTKLKAEFERVKKLKKSIYEDYKDELISKEEFLSYREDYQQKETLYSKQIETLEEKKKESVTEDVFETPWLRRLLELKDIEELDRDIIVEMIDQITVYENRKLKISYNFGNELEHLFSSVYCEDLEKKAI

SEQ ID NO: 46982 - DNA, 50 bp, Enterococcus faecium
  source 1..50: mol_type = genomic DNA
aatttgcgtaaactacaatcagcacatggcggttgtagataacgcaagtg

SEQ ID NO: 46983 - DNA, 40 bp, Enterococcus faecium; identical to SEQ ID NO: 46973
  source 1..40: mol_type = genomic DNA

SEQ ID NO: 46984 - DNA, 50 bp, Enterococcus faecium
  source 1..50: mol_type = genomic DNA
aatttgcgtaaactacaatcagcagctggcggttgtagataacgcaagtg

SEQ ID NO: 46985 - DNA, 40 bp, Enterococcus faecium; identical to SEQ ID NO: 46975
  source 1..40: mol_type = genomic DNA

SEQ ID NO: 46986 - protein, 542 aa, Enterococcus faecium
MIYQKGSNLFNVAIYIRLSREDGDKEESDSVGNQRKLLTEYVNKHDDFILYDVYIDDGFTGTNFNRPDFHRMIADIEDNKVNCVVVKDLSRFGRDYIDTGRYLERIFPELNVRFISVTDNIDSMKQAYDMLLPIKNIFNEQYARDISNKIQATVKSKQKAGEFIGAFTSYGYKKSPANKNKLVIDEYASEVVKRVFTMYAQGIGKQSIAKILNAEGILCPSEYKKLNGENYKNCNRLEKTSYWTYSTIKVMLQNELYIGNMVQGKKHQRMRSKQRPVEKENWIRVENTHEPIIDRQLWDKVQKLLTKKHRDIDLETNKNIFAGFIKCGDCGRAMMKNFWRRADGSKSYSFYCGTYKRSGKDYCTPHTLPFQVLNDIVLGDLKQIIRNVENLQELVKSQSFTATKIRKSTDIELTKLKTELERVKKLKKSIYEDYKDELISKDEFLSYREDYQQKETLYSKQIETLEEKKKESVTEDVFETPWLRRLLELKDIEELDRDIIVEMIDQITVYENRKLKISYNFGNELEHLFSSVYCEDLEKKAI

SEQ ID NO: 46987 - DNA, 50 bp, Enterococcus faecium; identical to SEQ ID NO: 35807
  source 1..50: mol_type = genomic DNA

SEQ ID NO: 46988 - DNA, 40 bp, Enterococcus faecium; identical to SEQ ID NO: 46973
  source 1..40: mol_type = genomic DNA

SEQ ID NO: 46989 - DNA, 50 bp, Enterococcus faecium
  source 1..50: mol_type = genomic DNA
aatttgcgtaaactacaatcagcagctgacggttgtagatagcgcaagta

SEQ ID NO: 46990 - DNA, 40 bp, Enterococcus faecium; identical to SEQ ID NO: 46975
  source 1..40: mol_type = genomic DNA

SEQ ID NO: 46991 - protein, 502 aa, Amedibacillus dolichus
MLRYNAKEKGFIVVGEYVDDGYSGTTFNRPDLNRMIKDAMEDTEPSGIMVKDMSRFGRNNAMFMYYVEEIFPNNDILFIALNDDVDTRFDENEMMPFKSIMNEYYARDTSKKIRSVKKTTALNGGFCGSFAPYGYRLDPQNKQKLLIDEETAPIVKRIFELSKQGNGIHQIARILCEDGILIPRAYRAMKNGTLETSTGFKFPTDWVAKNVKMILENQVYLGHMVSHKTQTKSFKNRKLVPVPKEDWIIVKNTHEPIIDEDTFELVQKFISVKKQPNKTRKPNMFVGLVKCPDCGRNMALSGRADSSRWLRCRTYTRNTNLCTSHSISYNALQQIVMNDIQKHIKNMEALGDQFLEEMKELSEKGGNEKIQHLKQSLEVAEKRIEEIDNVIMKLFEQNALGKISDERFEKMSISYENEQSELKLKRNDLKDKIESEEKKTQSTNQFLETIRKYENVTELNRAMLVELIDSIYVYQAEGTGQEKTQKVEINYRFLAGSQCGIA

SEQ ID NO: 46992 - DNA, 50 bp, Amedibacillus dolichus; identical to SEQ ID NO: 13727
  source 1..50: mol_type = genomic DNA

SEQ ID NO: 46993 - DNA, 40 bp, Amedibacillus dolichus
  source 1..40: mol_type = genomic DNA
tgttgcacaccctttcagagaaggaaacggacgcagcact

SEQ ID NO: 46994 - DNA, 50 bp, Amedibacillus dolichus
  source 1..50: mol_type = genomic DNA
caggttctcaatgtggtattgcatgttggtaatgtaacattgagatattg

SEQ ID NO: 46995 - DNA, 40 bp, Amedibacillus dolichus
  source 1..40: mol_type = genomic DNA
tgctgcatactctttcaaagtagtaaactgacttaagact

SEQ ID NO: 46996 - protein, 497 aa, Streptococcus agalactiae; identical to SEQ ID NO: 2311

SEQ ID NO: 46997 - DNA, 50 bp, Streptococcus agalactiae; identical to SEQ ID NO: 2312
  source 1..50: mol_type = genomic DNA

SEQ ID NO: 46998 - DNA, 40 bp, Streptococcus agalactiae; identical to SEQ ID NO: 34733
  source 1..40: mol_type = genomic DNA

SEQ ID NO: 46999 - DNA, 50 bp, Streptococcus agalactiae
  source 1..50: mol_type = genomic DNA
tgtgtcagttgcttgacatgagaggtgtttcgtgtcataataatgacaca

SEQ ID NO: 47000 - DNA, 40 bp, Streptococcus agalactiae
  source 1..40: mol_type = genomic DNA
cttctgtgactcaggtgttgtttcctgtcacttctttgct

SEQ ID NO: 47001 - protein, 497 aa, Streptococcus agalactiae; identical to SEQ ID NO: 14076

SEQ ID NO: 47002 - DNA, 50 bp, Streptococcus agalactiae; identical to SEQ ID NO: 14077
  source 1..50: mol_type = genomic DNA

SEQ ID NO: 47003 - DNA, 40 bp, Streptococcus agalactiae; identical to SEQ ID NO: 34733
  source 1..40: mol_type = genomic DNA

SEQ ID NO: 47004 - DNA, 50 bp, Streptococcus agalactiae
  source 1..50: mol_type = genomic DNA
tgtgtcagtcgcttgacacgagaggtgtttcgtgtcataataatgacaca

SEQ ID NO: 47005 - DNA, 40 bp, Streptococcus agalactiae; identical to SEQ ID NO: 47000
  source 1..40: mol_type = genomic DNA

SEQ ID NO: 47006 - protein, 497 aa, Streptococcus agalactiae; identical to SEQ ID NO: 2311

SEQ ID NO: 47007 - DNA, 50 bp, Streptococcus agalactiae
  source 1..50: mol_type = genomic DNA
tgtgtcagttgcttgacatgagaggggtttcgtgtcacacaggcaaatag

SEQ ID NO: 47008 - DNA, 40 bp, Streptococcus agalactiae; identical to SEQ ID NO: 34733
  source 1..40: mol_type = genomic DNA

SEQ ID NO: 47009 - DNA, 50 bp, Streptococcus agalactiae
  source 1..50: mol_type = genomic DNA
tgtgtcagttgcttgacatgagaggtgtttcgtgtcacacaggcaaatag

SEQ ID NO: 47010 - DNA, 40 bp, Streptococcus agalactiae; identical to SEQ ID NO: 47000
  source 1..40: mol_type = genomic DNA

SEQ ID NO: 47011 - protein, 497 aa, Streptococcus agalactiae; identical to SEQ ID NO: 18071

SEQ ID NO: 47012 - DNA, 50 bp, Streptococcus agalactiae; identical to SEQ ID NO: 14077
  source 1..50: mol_type = genomic DNA

SEQ ID NO: 47013 - DNA, 40 bp, Streptococcus agalactiae; identical to SEQ ID NO: 34733
  source 1..40: mol_type = genomic DNA

SEQ ID NO: 47014 - DNA, 50 bp, Streptococcus agalactiae; identical to SEQ ID NO: 47004
  source 1..50: mol_type = genomic DNA

SEQ ID NO: 47015 - DNA, 40 bp, Streptococcus agalactiae; identical to SEQ ID NO: 47000
  source 1..40: mol_type = genomic DNA

SEQ ID NO: 47016 - protein, 497 aa, Streptococcus agalactiae
MSKIALYIRLSVEDQMKKDESESIINQRQYLNDYLNRNEEFKSFQREEYIDDGYTGTNEKRPSFQRMLEEAKSGKINAIIVKDLSRFMRDYIALGDYLENIFPFLGIRFIAINDGYDSAKEKGNGTDLDIQFKGLLYDFYTKDISQKIKSVSTELKKQGKFLAWSPPLGYMKDPVDKYNIIIDEKTSWIVRKVFDLALSGMATRKIAAVMNAENIPTPNERKKELTNMDYEYNIVSSENRKNPTWTNGTVTDMLSNENYTGTYVFNMQEKSVLTPRSFKFHPKEEWGRVHNHHEAIISQEEFDKVQAIKESRRFIKGKNTDYPWRQHSPLQGFAKCPTCNHILGFVQSKRPRLDGSVRVHKYFHCRICKCNNVEHKNSRAEKLEEQVLALIKEKYGEVKAEQKDKISVKDLEKQVERLEAKKTSDFEKYKLGKMTKLKFIESKKSIDKALESLSERIAELSKQDEVVKDNELTRELMEKYIDSVLCEGSIVQKIIWK

SEQ ID NO: 47017 - DNA, 50 bp, Streptococcus agalactiae
  source 1..50: mol_type = genomic DNA
tgtgtcattcgcttgacacgagaggggtttcgtgtcataataatgacaca

SEQ ID NO: 47018 - DNA, 40 bp, Streptococcus agalactiae; identical to SEQ ID NO: 34733
  source 1..40: mol_type = genomic DNA

SEQ ID NO: 47019 - DNA, 50 bp, Streptococcus agalactiae
  source 1..50: mol_type = genomic DNA
tgtgtcattcgcttgacacgagaggtgtttcgtgtcataataatgacaca

SEQ ID NO: 47020 - DNA, 40 bp, Streptococcus agalactiae; identical to SEQ ID NO: 47000
  source 1..40: mol_type = genomic DNA

SEQ ID NO: 47021 - protein, 584 aa, Streptococcus gordonii
MKKNNVEIIKADSLVRRRGVNVERHLKRVAAYCRVSSDSDDQKNSYESQVRHYKDYISQRSDWELVEIYADEGISGTQVGKRQDFQRLINDCVNGEIDYIVTKAIARFARNTLDTLKYVRMLKDMQIGVYFEEENIDTLTMDGELLLTILSSVAQQEVENTSAHVKKGLKMKMQRGELIGFQGCLGYDYDVETKQLSINKKEAKIVRYIFARYLEGIGGKIIARELDELGYKSPRGLDHWNDTTVLGIIKNEKYKGDILMGKTFTVDPISKRRLSNFGEEDKYYIKDNHEPIVSKEDFEKAQEIRLRRAGNKKTAANVNGKRERYSKMYAFSSMLECGFCGSILSRRSWHCRSDYRKVVWHCVTSIKKGKRFCRHSKGLEELAIEGAFMEAYRQLYHSNEKIVSDLLETIESELNDNSLNKELKKITNKLRTLLKKEENLVNLRLEGKISDSIYNEKYTEISSEKEYLSEEKVNVETTLKSEIDVKKRLTEFKQLLSSQKLLTEFDRTVFESIVDKIIVGGVNSDGEIDPAMLTIIFKTGETQNKDGKQFKSKRKNAKLESDKLCPQNSDEDKKLYSQVTDNTC

SEQ ID NO: 47022 - DNA, 50 bp, Streptococcus gordonii
  source 1..50: mol_type = genomic DNA
atacggaaagtccgaaccgctgggtgtgtagtgttgctacaacgaagaaa

SEQ ID NO: 47023 - DNA, 40 bp, Streptococcus gordonii
  source 1..40: mol_type = genomic DNA
acagacgcatcacgtggagtgtgtaagcttgttagagaaa

SEQ ID NO: 47024 - DNA, 50 bp, Streptococcus gordonii
  source 1..50: mol_type = genomic DNA
atacggaaagtccgaaccgctgggagtgtagtgttgctacaacgaagaaa

SEQ ID NO: 47025 - DNA, 40 bp, Streptococcus gordonii
  source 1..40: mol_type = genomic DNA
tgaaaggcatcacgtggagagagaaagcaagcaagagaaa

SEQ ID NO: 47026 - protein, 507 aa, Vibrio splendidus
MGKVYSYIRFSKKEQGAGSSTARQLKYAEEYAKKHGLVLDSTLVDDGLSAYHAKHLSKGALGLFLAAVESGDVEPDSTLIIERLDRLSRQKPRQAQALLSQIIDYGITVVTASDGAVYNEKTIDNDPMKLVYSLLIAIRANEESETKAQRSKAAIQHNINQFQKHKIRSLGGAVPAWFDRFNAAQGWEYKLNEKAGTVRRIVELSLNGTGAKTIARIINSEGHTTFGKSENWGMTSVVSVLKNPALFGRRVVNSNGSIMLDDYYPAVVSRKDFDAVQYRLNKRKNTKGSEKFVNLITGLGKGFCTCGYCGSAIATQNQIFKTKSGERIVRRMHCTATKESGQCHSSKRIEKVEEAVLMFMMERNLDTLKTGDTQSYEIEIDTIDKKIKKMVSLQLALETSELPDDFLDSLAQLRARKAELSDKAAKGGIDIELNEQFKALGEKAIKLENSEARTTVRQIIRDSVASIRIWTCGIELVNEPDIAIEFKNGTRGLISIRGQEIIAQQLS

SEQ ID NO: 47027 - DNA, 50 bp, Vibrio splendidus
  source 1..50: mol_type = genomic DNA
cagttcaattggttacactggacagacgctcaacgtaaccaatcacacaa

SEQ ID NO: 47028 - DNA, 40 bp, Vibrio splendidus
  source 1..40: mol_type = genomic DNA
gcaagatatccactggacagacggctcatttggttatttc

SEQ ID NO: 47029 - DNA, 50 bp, Vibrio splendidus
  source 1..50: mol_type = genomic DNA
cagttcaattggttacactggacaagcgctcaacgtaaccaatcacacaa

SEQ ID NO: 47030 - DNA, 40 bp, Vibrio splendidus
  source 1..40: mol_type = genomic DNA
gcaagatatgcacaggacaaggggctcatattcagaattt

SEQ ID NO: 47031 - protein, 459 aa, Deinococcus indicus
MLGHTLPAAIYLRVSGKLQAGPDRFGLQSQEHECRAYAARLGLSVARVYVDQITGVSDDREQFQQLLRDAEAYSAVILGVQDRLARNVPLSYMMLEALQAVGLQVHSAGEGRLDLEDDTNALGFGIRAVIADQERRRITKRMYGGKLAKVRAGQPVAPIRAYGWKDGRPDPETAPRLRWIFEQMETQGANQVIYTLEAEGVPSPAGRPRWTKTTLLKIIGNPVYKGEYGFARKGERLTIPVEPLVTPEQWERVNAAVHARHRNQGRAGTQAHIYQLQGVARCGRCGSVITSTGVQQLKSGEKLRYYYCRGTLRIEGAHCEHRTYYRIEDVHAVIEDALTALAQDDRAVMQAVQAPAPTPRTQDGALARLDAEWDRWKGALRAGAITPEELATERRRIDATRARLLEVPAAAPALDVKAWQAALLEQRANLPLGQALRAAGITVLLDVGGAVTFKIRGSG

SEQ ID NO: 47032 - DNA, 50 bp, Deinococcus indicus
  source 1..50: mol_type = genomic DNA
ctataaagtgcgtgcccacatagttacctacgggtgatcagtcgctgcat

SEQ ID NO: 47033 - DNA, 40 bp, Deinococcus indicus
  source 1..40: mol_type = genomic DNA
acatgaaggcaatgatcgtcacctacgggtgtcagatgaa

SEQ ID NO: 47034 - DNA, 50 bp, Deinococcus indicus
  source 1..50: mol_type = genomic DNA
ctataaagtgcgtgcccacatagtgtcctacgggtgatcagtcgctgcat

SEQ ID NO: 47035 - DNA, 40 bp, Deinococcus indicus
  source 1..40: mol_type = genomic DNA
acatcaaggaaatgttagtgtcatccagttgtcagttaaa

SEQ ID NO: 47036 - protein, 540 aa, Klebsiella pneumoniae
MPKAISYIRFSSKIQASGDSTKRQNKYIYEWLKNNPDYQLDESLRFQDLGISGYSGANAKSGAFGEFLAAVESGVIQSGSVLLVESLDRVSRQDIDTARERLRKILLAGVDVVTLADNSWYKKESLNDPLSLIKAVLIMQRANEESATKSKRLRSAWDAKREDAAKGKIMTRRCVAWLRVSGDMSHFELIPDNVKAVQRVFQLRLEGLPFVRIARQMNEEGFYTLNQRNPVKGAWSHTTVKALLDNRSVIGFKVPSNCTVTQGVKEIPNYYPAVISEEQFYAVQQLKQGAGRRPSSEKPLLTNLFKGVMRCGECGFVTVVNCATEKWHGVYRCSMRYEGRCDAKSINRRLADKALVQGLLYNTNRLSLNRGNGSAIGSLQSELEQLQKQRERLIKLAMLADDTESMAKDLKALNSQIKDAEKSVSEVHQREQSSQLETISHLDLTVKKDRIEAQIIIKRIIKEIRLNTAGKKCDVFLHSGLRLLNFPLDRVVDGGQWIEILPLIDGDEFDFEGFTTKPRHIALEEAPEWVKELEFNSKIQ

SEQ ID NO: 47037 - DNA, 50 bp, Klebsiella pneumoniae
  source 1..50: mol_type = genomic DNA
gtaagttattagagagttgtaattaggactacacatctcttatgataaac

SEQ ID NO: 47038 - DNA, 40 bp, Klebsiella pneumoniae; identical to SEQ ID NO: 32718
  source 1..40: mol_type = genomic DNA

SEQ ID NO: 47039 - DNA, 50 bp, Klebsiella pneumoniae
  source 1..50: mol_type = genomic DNA
gtaagttattagagagttgtaattaagactacacatctcttatgataaac

SEQ ID NO: 47040 - DNA, 40 bp, Klebsiella pneumoniae
  source 1..40: mol_type = genomic DNA
attggtgacccgggtggagaaccccataccacagctcttg

SEQ ID NO: 47041 - protein, 503 aa, Nocardiopsis dassonvillei
MATQRALIYARLSSSNDNSTSIERQLKACRDLAESRGWAVVGEHVDDGVSGAVPPSERPAMSELLAAMPHVDAVIAWKVDRISRSLLDFATLLKLGDNTGTAIVSCTETIDTSTAMGTAFAQLIAMFAELERGMMTERLANARRHLRNTTRHVSGRPPYGLKIVPAPDGKGKVLVRDADAVKVIREIIRRLRVREPRSVIADDLDARGVTSPREQTSLKPNPKPARWSGQGIDAIIRHPSLLGHRVDEHGHVRRDDEGQEIEFWEPADDPKHIAEARAAMDARSFSSRAAANTSHWLSAAAICGTCGRTLTYGNNKPYPTSPNAEPIMRCQGRRGDRCKGTRVTVTQLEKFVAAEFLASAGDMEAVQTVFVPGTDNAAELEATERAITNLRDDRDLGLFDDDEDDYRARMKALVARRSRLRAEPSRPPRWETRGVGSTVAQVWERSDGEGRASLIRSMGRVCVVYSANRKRNVATADRAEFMPAEVAAKLYPDTFGSADADAA

SEQ ID NO: 47042 - DNA, 50 bp, Nocardiopsis dassonvillei
  source 1..50: mol_type = genomic DNA
taagtgaatcatggtaagtactttgggagaatcttcgtcagattcacttg

SEQ ID NO: 47043 - DNA, 40 bp, Nocardiopsis dassonvillei
  source 1..40: mol_type = genomic DNA
gaaggactccaagaacttcgggcgcctgttcgtgcacttc

SEQ ID NO: 47044 - DNA, 50 bp, Nocardiopsis dassonvillei
  source 1..50: mol_type = genomic DNA
taagtgaatcatggtaagtactttttgagaatcttcgtcagattcacttg

SEQ ID NO: 47045 - DNA, 40 bp, Nocardiopsis dassonvillei
  source 1..40: mol_type = genomic DNA
gaaagagtccaagatcttcttgaggctttacttggaattc

SEQ ID NO: 47046 - protein, 540 aa, Roseburia faecis
MKQPYNTTIYNTALYMRLSRDDENYGDSVSIETQRTILQQYAKEQGLHVVGEYVDDGWSGTNFERPDFQRMMDDVEAGKVNCIVTKDLSRFGREHVMMDYYLEFLFPEKRVRYIAVAENEDTEKGLSDFVPFKNLFNEWFAKDTSRKVKAAFKAKFATGQRIGAYAPIGYRKHPEIKNKLIIDEETRWIVEKIFDLAIHGRGAASITRILITEKVPTPGFINFQRDGTFANIYAGAPEEKSYAWTIAQVKSIMKDETYIGHTIHYRETNISFKNKRRVRKPQSEWVRVENTQEPIISEQVFRQVQEQIANRRRKCKDGTTQIFSGLVKCADCGWSLSYGENRQNSKPYGHYHCSKYGQGTRQCSMHYIRYDVLYAYVLSRLQYWSGLVQHDEERLLKRLLNATDKGQAAARKKQAAELKKAEKRKTEVDTLFARMYEDWAAGRITEYNFSMLSGKYQSEQAELDEKIEQLQSAIATESQNAADAEKWIALMKECVNPTELTAELLNTLIEKIVVHEAVKGEDGSREQEVEIFYRFIGKID

SEQ ID NO: 47047 - DNA, 50 bp, Roseburia faecis
  source 1..50: mol_type = genomic DNA
caatatctttaactatgtgataccggggtatcacttagataaagatacca

SEQ ID NO: 47048 - DNA, 40 bp, Roseburia faecis
  source 1..40: mol_type = genomic DNA
aatgtccggattgtatacaggctttccatacttccgtatt

SEQ ID NO: 47049 - DNA, 50 bp, Roseburia faecis
  source 1..50: mol_type = genomic DNA
caatatctttaactatgtgataccatggtatcacttagataaagatacca

SEQ ID NO: 47050 - DNA, 40 bp, Roseburia faecis
  source 1..40: mol_type = genomic DNA
aagttcaggattatatagaatctttccctaaaaccgtaat

SEQ ID NO: 47051 - protein, 455 aa, Rhodococcus erythropolis
MRAAIYTRISSDQTGEGLGVSRQLEDCQDLAKSLNWEVVEHFSDNNISAYSGRVRPGFEAMLDGMKNGQYDALICWHPDRLHRNMKDLERLITLADEGGIELRTVRGGNFDLSTPAGRMIASVMGAIARQESEHTSERRKRANEQKAASGVWSASRRPFGYSPSGEPHEPEASAVSTAAADVLAGTSLRQVAREWNQSGLRTTHGGIEWRATSVRRVLANPRYAALVVHRGRVVGAGNWKPLIDQDSHHALLALFNDPSRTSAVSFERKHQGSGVYRCGECGQRLILHVATGGVRSYRCPQHHVRRQLAALDEYIDALVIGRLTAPDAQLVLDEPERDLPAMQIARDGLQARADELSSLFAEGAIDASQLRRGTSELRDKIAVIDAELAAARMVSPLADLVLTGDQLSRRWAELSPDIRGKVIDALITVTVHKSPKGLRRFDPTYVDIGWNTASE

SEQ ID NO: 47052 - DNA, 50 bp, Rhodococcus erythropolis
  source 1..50: mol_type = genomic DNA
gagcgtctaattcgtacattcctcggaacggtaagtcaagcgggacgctt

SEQ ID NO: 47053 - DNA, 40 bp, Rhodococcus erythropolis; identical to SEQ ID NO: 22613
  source 1..40: mol_type = genomic DNA

SEQ ID NO: 47054 - DNA, 50 bp, Rhodococcus erythropolis
  source 1..50: mol_type = genomic DNA
gagcgtctaattcgtacattcctctgaacggtaagtcaagcgggacgctt

SEQ ID NO: 47055 - DNA, 40 bp, Rhodococcus erythropolis
  source 1..40: mol_type = genomic DNA
atgtggtgacacatttttctggctggaggtggcccctcag

SEQ ID NO: 47056 - protein, 450 aa, Rhodococcus erythropolis
MRTAIYTRISLDRTGERLGVERHFEDCVELAESLNWEVVEHYSDNDISASKDLVRPRYEDMLADIQAGKIDAVVVYHADRLYRSPLELERLIDFIAHTQIRTVKSGPLDLTTYSGRMLARILGSVARAEVDAMSDRRKRANDQKAASGIWIASRRPFGYTIDGELLEPEATAIREAVQSVLSGMSVRQVAREWNAAGLRTAHGGQEWKSTSVRRVLKNPRYAALRVHRGAVVGTGRWPAIIDVDAHYGIVAFLDDPKRSSGLGFERKWQGSGVYRCGVCDERMVVHVDANKRRSYKCPQNHVRRQGVALDELVDGVVIARLSMPDAAVVLQSDEIDVAGLQVERDSLQARAEQIAGMFGSGAMDAGQFEAANAALQLQVDRVDAELGKARMGDPLVELVLAGDRLVEVWESKSPDLRGKIIDALMVVRVHPSDKGLRRFDPRFIEIERKV

SEQ ID NO: 47057 - DNA, 50 bp, Rhodococcus erythropolis
  source 1..50: mol_type = genomic DNA
cagtggtccaccttgacatccgttggaactgattgtcaagtactacacgc

SEQ ID NO: 47058 - DNA, 40 bp, Rhodococcus erythropolis; identical to SEQ ID NO: 22613
  source 1..40: mol_type = genomic DNA

SEQ ID NO: 47059 - DNA, 50 bp, Rhodococcus erythropolis
  source 1..50: mol_type = genomic DNA
cagtggtccaccttgacatccgtttgaactgattgtcaagtactacacgc

SEQ ID NO: 47060 - DNA, 40 bp, Rhodococcus erythropolis; identical to SEQ ID NO: 47055
  source 1..40: mol_type = genomic DNA

SEQ ID NO: 47061 - protein, 562 aa, Enterobacter hormaechei; identical to SEQ ID NO: 44326

SEQ ID NO: 47062 - DNA, 50 bp, Enterobacter hormaechei; identical to SEQ ID NO: 44327
  source 1..50: mol_type = genomic DNA

SEQ ID NO: 47063 - DNA, 40 bp, Enterobacter hormaechei
  source 1..40: mol_type = genomic DNA
cttctcgcgccctttggctaacactaaacgtacactcata

SEQ ID NO: 47064 - DNA, 50 bp, Enterobacter hormaechei; identical to SEQ ID NO: 44327
  source 1..50: mol_type = genomic DNA

SEQ ID NO: 47065 - DNA, 40 bp, Enterobacter hormaechei
  source 1..40: mol_type = genomic DNA
cttctcttgcactgtgcctaacacacaatggacactcaaa

SEQ ID NO: 47066 - protein, 455 aa, Enterobacter hormaechei
MEKRKLYSYIRWSSDKQAKGSSLQRQLETARRVAHENDLELVEIIDAGLSAFRSKHLEKGSLGAFIEAVKVGQIASDSWLTVESLDRISRDAILKAQGLFMELLELGITIYTGMDNRIYTKSSVTDNPMELMLSIMTFSRANQESMVKSQRQKSATQLKINKFNASVRADNGYPHAIRNSGANVFWSDVSDGTVRPHEYYFPIAKLIVSLRLKGWGYMRIAKHLNENYTPPKGTAKRKHFKDLWSPKLICNFLQSRTLMGEKSIRVDGVEHILKGYYPQVISENEFYSLQNVINRKLANEPNNYIPLLTGIRRFKCGCGAAMVAFFQYDKIRYRCDGMKSLDKRMHCGAKSFNGASIENAIVQICADKIFKDVKTHTSNVGAIQAMLVEAKRKYNRGMDMLLEDTAPQGLNIKLIELEKQIEELQKKLNDELVTEAGVNSSVSWGAVPKDYRDVF

SEQ ID NO: 47067 - DNA, 50 bp, Enterobacter hormaechei; identical to SEQ ID NO: 44327
  source 1..50: mol_type = genomic DNA

SEQ ID NO: 47068 - DNA, 40 bp, Enterobacter hormaechei; identical to SEQ ID NO: 47063
  source 1..40: mol_type = genomic DNA

SEQ ID NO: 47069 - DNA, 50 bp, Enterobacter hormaechei; identical to SEQ ID NO: 44327
  source 1..50: mol_type = genomic DNA

SEQ ID NO: 47070 - DNA, 40 bp, Enterobacter hormaechei; identical to SEQ ID NO: 47065
  source 1..40: mol_type = genomic DNA

SEQ ID NO: 47071 - protein, 618 aa, Mediterraneibacter faecis; identical to SEQ ID NO: 11111

SEQ ID NO: 47072 - DNA, 50 bp, Mediterraneibacter faecis; identical to SEQ ID NO: 11112
  source 1..50: mol_type = genomic DNA

SEQ ID NO: 47073 - DNA, 40 bp, Mediterraneibacter faecis
  source 1..40: mol_type = genomic DNA
acatacgggaggatcaacagatgtcggtgatgtccagcac

SEQ ID NO: 47074 - DNA, 50 bp, Mediterraneibacter faecis; identical to SEQ ID NO: 41484
  source 1..50: mol_type = genomic DNA

SEQ ID NO: 47075 - DNA, 40 bp, Mediterraneibacter faecis
  source 1..40: mol_type = genomic DNA
acataaaggaggatgaagaactgtctgagattcccagaag

SEQ ID NO: 47076 - protein, 458 aa, Intrasporangium calvum
MSTRPPRRAAVYLRISLDATGEGLAVDRQRKECLAIVKARGWDVTREYVDNSISASDARKNRPGYDALVRDFQAGHYDALVCYDLDRLTRQPRQLEDWIDAAEARGLALVTANGEADLTTDAGRLFARIRLAVARAEVERKSARQRSAARQRSELGKPPLGVRLTGYTPRGELVPEEAAVVRRIFDEFLEVRNLRRVARSLTEDGIVTRRGKPWHPSTVQTILRNPRYAGRAVYQGQQTGQRGAWVPIVTDDEYEAVQAILDNPERVANSTGSTERKHLGSGLYLCAVCRQPLSAWSGARYRCRDGAHVNRSRGPVDQYVRAVIAARLSRPDVADLLAPTTATTAPLQEEVARLRKRLARLDADYDADFIDGPRYKAARDRGREELVKAQAALAAAQTRGELSAVVTAPDPAEAFLAAPLATQRAVVDALAVVALAKGTRYSRTFDPATVVIEPKGEK

SEQ ID NO: 47077 - DNA, 50 bp, Intrasporangium calvum
  source 1..50: mol_type = genomic DNA
gtagttgcagagtgtcggaactcgaccggatcacctgagaaggcaacact

SEQ ID NO: 47078 - DNA, 40 bp, Intrasporangium calvum
  source 1..40: mol_type = genomic DNA
cacgttgaagcggaactccacgacatcgccgtcctgcatc

SEQ ID NO: 47079 - DNA, 50 bp, Intrasporangium calvum
  source 1..50: mol_type = genomic DNA
gtagttgcagagtgtcggaactcggacggatcacctgagaaggcaacact

SEQ ID NO: 47080 - DNA, 40 bp, Intrasporangium calvum
  source 1..40: mol_type = genomic DNA
cacgtagacgatgaactccgaggcctccccgccctgcgtg

SEQ ID NO: 47081 - protein, 538 aa, Coprobacillus cateniformis
MTKQQARLRVRLYARLSKDDGDADKESNSITNQLQMLRYYSKEKGFEIIDEYVDDGYSGTTFNRPDLNRMIEDAMEDTQPSGIMVKDMSRFGRNNAMFMYYVEEIFPNNDILFIALNDDVDTRYEDNEMMPFKSIMNEYYARDTSKKIRSVKKTTALSGGFCGSFAPYGYRVDPNNKRKLLIDPETAPIVKRIFEMSKQGNSVHQIARTLCEEKILIPRAYRAMKNGTLETSTGFRFPTDWVGKNVKMILENQVYLGHMVSHKTQTKSFKNRKLVAVPKEDWIVVKNTHEAIIDEETFELVQKFISVKKRPNKTGRPNMFVGGLVKCPDCGRNMAFSNPNGREPRFRCRTYARNSNLCTTHAISYDALVKIVMDDIQKHIKNMETLGDQFIEEMRVLSESGGGKKIKQFKQELELAEKRIAEIDSIIMKLFEQNVAGKISDGRFEKMSVTYENEQRELEERRKALKEKIEAEDYKTKNTNKFLETIRKYENVTELNRSMLVELIDSIYVYQAEGTGKERTQKVEINYRFLCESQCGIA

SEQ ID NO: 47082 - DNA, 50 bp, Coprobacillus cateniformis; identical to SEQ ID NO: 14597
  source 1..50: mol_type = genomic DNA

SEQ ID NO: 47083 - DNA, 40 bp, Coprobacillus cateniformis
  source 1..40: mol_type = genomic DNA
tatagcacatccatttcgtgaaggcaatggacgtagtaca

SEQ ID NO: 47084 - DNA, 50 bp, Coprobacillus cateniformis
  source 1..50: mol_type = genomic DNA
gtgagtcccaatgtggtattgcatgctggtaatgtaccattgagatacca

SEQ ID NO: 47085 - DNA, 40 bp, Coprobacillus cateniformis
  source 1..40: mol_type = genomic DNA
tattgaacatccattgcgtgcaggcactgtaccaggaact

SEQ ID NO: 47086 - protein, 537 aa, Coprobacillus cateniformis; identical to SEQ ID NO: 14596

SEQ ID NO: 47087 - DNA, 50 bp, Coprobacillus cateniformis; identical to SEQ ID NO: 14597
  source 1..50: mol_type = genomic DNA

SEQ ID NO: 47088 - DNA, 40 bp, Coprobacillus cateniformis; identical to SEQ ID NO: 47083
  source 1..40: mol_type = genomic DNA

SEQ ID NO: 47089 - DNA, 50 bp, Coprobacillus cateniformis; identical to SEQ ID NO: 47084
  source 1..50: mol_type = genomic DNA

SEQ ID NO: 47090 - DNA, 40 bp, Coprobacillus cateniformis; identical to SEQ ID NO: 47085
  source 1..40: mol_type = genomic DNA

SEQ ID NO: 47091 - protein, 505 aa, Candidatus Thiodiazotropha endolucinida
MTNNNKKAVIYCRVSNKTQTTRGDGLGSQETRCREYAKFKGIEVEAVFTDDVSGSLIKRPGMQAMLRHLSKHRKTPRVAIIDDISRLARGLDAHLQLRSAIAKAGATLESPSIEFGEDSDSVLVENLLASVSQHQRQKNSEQTLNRMKSRLKNGYWVFQAPVGYRYQKTSGQGKILVRDEPVASIIKEALEGYASGRFQLQVEVKRFLESFPEYPKDRKGKVHPQRVINLLTRVFYAGYVESEDWNVSLRPGRHEELISLETYKTIQDRMKSTAKAPARKDLSTDFPLRGFVTCGECGHTLTACWSKGRTARHPYYMCFHKGCSSYRKSIRRDVIEGEFERFLLSLKPSQELFNAALSMFKDLWNYRLEFQKTHNKSLALEISKTERKIEQLLDRIVDAESNAVVSAYEKRIGQLQLEQQVMKEKIAQCGRPVRDFDETFRTAMTFLGNPHELWASGRMEDRHAVLKLTFADRLAYVRGEGFRTPKTTLPFKALAGFSGGENKMA

SEQ ID NO: 47092 - DNA, 50 bp, Candidatus Thiodiazotropha endolucinida
  source 1..50: mol_type = genomic DNA
aggtttttcagggggtgaaaacaaaatggcgcacttcgaaggagaaactt

SEQ ID NO: 47093 - DNA, 40 bp, Candidatus Thiodiazotropha endolucinida
  source 1..40: mol_type = genomic DNA
tacaggtgatacttgagaaaatggcgcgcccggaaggatt

SEQ ID NO: 47094 - DNA, 50 bp, Candidatus Thiodiazotropha endolucinida
  source 1..50: mol_type = genomic DNA
aggtttttcagggggtgaaaacaaagtggcgcacttcgaaggagaaactt

SEQ ID NO: 47095 - DNA, 40 bp, Candidatus Thiodiazotropha endolucinida
  source 1..40: mol_type = genomic DNA
taaaggtgatactagagaaagtggggtggaaggaggggta

SEQ ID NO: 47096 - protein, 510 aa, Phascolarctobacterium succinatutens
MVKCMKSVAERAVPAVIYARYSSSHQREESIEGQVRECREYAEREGYSVLQVYADRAITGRTDERPEFQRMLADVSKGVFQAILIYKYDRFSRNRYSFAVWETKLKKHGVKVISARENVAEGAAGIVLKSVLQGMAEWYSVDLSEKVTRGMKENALKAKWTSGTVPFGYTRDAEQRLIVDPERGEYVRQIFEKVLAGEKYVDIARWLNMLGVRTARGAAWNKSSFTWMLKNVVYTGLFRWKDIEIKNAGPPIVSKELFEAVQRKLKTYGRRGINVQKSDKYLLTPNIICGECGGPMHGMSGKSRSGELYYYYACANKRAKRTSCSISSLNRDELEQAVYNCAREVLLHEENIKLIAEQAEAVAEAQVDNELAEMKAERSRVKKSIANYAAAIANGATSGTIIELINAAEAKAAALDEAIAERELVAAPPKISKEAIEYFLRNIAAAPDDKMKEKVISTMVNSVVVERVPDEGTKKDSDEKYSITVRFNFTDTPQLSALQSFDVREKSKMV

SEQ ID NO: 47097 - DNA, 50 bp, Phascolarctobacterium succinatutens
  source 1..50: mol_type = genomic DNA
ccttcgatgttcgcgaaaagtctaaaatggtgatgttattgcagcgaaga

SEQ ID NO: 47098 - DNA, 40 bp, Phascolarctobacterium succinatutens
  source 1..40: mol_type = genomic DNA
ttttgcggtgtcgatttcaaaatggtgacctcggcaggac

SEQ ID NO: 47099 - DNA, 50 bp, Phascolarctobacterium succinatutens
  source 1..50: mol_type = genomic DNA
ccttcgatgttcgcgaaaagtctagtatggtgatgttattgcagcgaaga

SEQ ID NO: 47100 - DNA, 40 bp, Phascolarctobacterium succinatutens
  source 1..40: mol_type = genomic DNA
ttttgctgtgtaaatttatgtatggtgagctcagatggat

SEQ ID NO: 47101 - protein, 597 aa, Pseudomonas rhodesiae
MTSRPKAYSYVRFSTPEQAKGDSRRRQYKAAIEYADRHDLELVKDSNYAFLDAGVSAYRGTNVNRVTSSLGRFYDYVKQGKIVPGSYLLVESLDRLSREQVTEALPRFLDLLNSGIVVVTFGDGTVYRKSAEPMQLVMSIFHMSRAHSESSVKGKRVSEAWQQKQSLARSEGLPLGAACPQWLSFDGEAYRVIADRANIVKRVFDLTVQGYGQRAIVKLFNSEGVPVFGSENRNKSGLWGNSSIAKILANRSVLGEYQPNIWTEGQRRISGEPIKGFYPAVIDDELYYAALDGRRSRNVSKITKTTSNFNVWAKVALCAYCKSPMHLVNKGAPPKGQKYLRCSKSAKGACINRSVRLDVSELVFKEMLAKLNMTSLIKDNAQSLRKRISELVGRLESARVKLVEMSALMQSHPSRTLAEAAANIEGNMSKMEIELDQCKLDLSSEYVADKFDFFKKLDLVSYEGRYLANQQVQRLGVKVRIKHDDFRVQYGVMVGEFPKFFYMVDHGQGLLFVPFSSELLRAGIRQNDMQATRFITKPDGMLKEALSDESMAAYKINMPDDIDVHQFQFSAADNEAANKKLLKIFVKQSRGEDKGGN

SEQ ID NO: 47102 - DNA, 50 bp, Pseudomonas rhodesiae
  source 1..50: mol_type = genomic DNA
attggtgttttgtcgcacaaccttagcaagttgtggtaaaatacaccaaa

SEQ ID NO: 47103 - DNA, 40 bp, Pseudomonas rhodesiae
  source 1..40: mol_type = genomic DNA
gccgggcgggccgctgaacagcaggttatgtgcgccagcc

SEQ ID NO: 47104 - DNA, 50 bp, Pseudomonas rhodesiae; identical to SEQ ID NO: 47102
  source 1..50: mol_type = genomic DNA

SEQ ID NO: 47105 - DNA, 40 bp, Pseudomonas rhodesiae
  source 1..40: mol_type = genomic DNA
gcaggggcgccagatgaacagtagggtatgtgggccagca

SEQ ID NO: 47106 - protein, 539 aa, Pseudomonas putida
MAKNGARVYSYLRFSDPRQATGSSADRQLQYAQNWAASKGLILDNTLSLRDEGLSAYHERHVKQGALGVFLEAIENGRIAHGSVLVVEGLDRLSRAEPIQAQAQLAQIINAGITVVTASDGREYNRAGLKAQPMDLVYSLLVMIRAHEESDTKSKRVKAAIRRQCEGWKAGTFRGLIRNGKDPQWLRWTGEAWELISERVAAVQRALELYRQGMGAGRAAKIMHQEGFILSDWGIAGQQIYRLIKLPALRGVKRLSLDGEEYELEDYYPRILSEAEWGELQHLAGQRLRRRGHGEIPGIVTGIGLAICGYCGTALVGQNLMSRRRADGTLADGHRRLHCVSYSKNGGCSAGGSCSVVPIERALLNFCSDQFNLQRLLQDGDDGRGLQHQLIAARAEFDKLSNQLAKVTDALLADDTGAAPLAFVRKARELEQLQNAADQKVKDLEHQVSAFSSIERPAHAERWAELAAQVDAGDYAAREQVRQLVMDTFERIVIYMRGVDAIDRTSRTIDVQLFSRTGQLRVLQINRRTGAWVASEDWD

SEQ ID NO: 47107 - DNA, 50 bp, Pseudomonas putida
  source 1..50: mol_type = genomic DNA
ggtttattttgaatatcttaagggcaccctaaggatatcattcctatacg

SEQ ID NO: 47108 - DNA, 40 bp, Pseudomonas putida
  source 1..40: mol_type = genomic DNA
gtcgaccaaggcttttgggcaacccaggcttacgaaacct

SEQ ID NO: 47109 - DNA, 50 bp, Pseudomonas putida
  source 1..50: mol_type = genomic DNA
ggtttattttgaatatcttaagggaaccctaaggatatcattcctatacg

SEQ ID NO: 47110 - DNA, 40 bp, Pseudomonas putida; identical to SEQ ID NO: 15240
  source 1..40: mol_type = genomic DNA

SEQ ID NO: 47111 - protein, 579 aa, Streptomyces spectabilis
MERDDLPALRALGFTDDELKELDLWEPATGDPADLAEAYIRRSKKKDTLTNLRGHLRDICRRAREEGKKIRRVWFEQRSASKAHIRREEFEQACDAVLVGLSKTLYVWRTDRLSRRGMGAVDRLIDDFERKQRARIVSASEGLDSSQSGMRIVFGILADRAREEAKSITERTQSSTDSHKLEGKWHGGVAPYGLHSPKGSGKLKRLAEEYPTARRIAEWLLARKVPAWIADTLNREQKRTRKGKMWRAQTILNLAHSPSWAGLVPNRERVHDSDGNPLDKWVRRSEPLLDAKGRPVSCGEGVVTYAEWLKIQSILHGRTGKAEPTAHLMKARKNGFGTRKGTRQPKTVMGWILQCPFCKGPMSNGGYNYRCEARATMGESACQGTSTARNRVDDAVATLWIQHILDLPPESDTIHEIARRWLSYQDPTKEQRKQEVTALYDAAIERQAKLRKEYFVLGRISEAQFESLRRDQDMSVSELKTEYDALTQENDLTPLMDPESLAAIWNAEGIEGRRALWKAASKRIVLKPPVEPGDRTPILDRLTVEWRDGKNPVVLAASDSGVESVERCRQQRKAVESAA

SEQ ID NO: 47112 - DNA, 50 bp, Streptomyces spectabilis
  source 1..50: mol_type = genomic DNA
cctgttggtcccacactcatcgcgtgggagtggattgagggtccaacagg

SEQ ID NO: 47113 - DNA, 40 bp, Streptomyces spectabilis
  source 1..40: mol_type = genomic DNA
cctggtgatgttcatggcgtggtcgtggtaccaccactgg

SEQ ID NO: 47114 - DNA, 50 bp, Streptomyces spectabilis
  source 1..50: mol_type = genomic DNA
cctgttggtcccacactcatcgcgccggagtggattgagggtccaacagg

SEQ ID NO: 47115 - DNA, 40 bp, Streptomyces spectabilis
  source 1..40: mol_type = genomic DNA
catggtggtggtcatggcgccatcttggaaccttccctga

SEQ ID NO: 47116 - protein, 530 aa, Enterobacter hormaechei
MKVPVWSYARVSTLSQIDGFGIQRQVQTINQFIQYLVLDHRLPYTLDVDNITQMVAEGRSAFKGKNWNPKTKLGQYRKMVMDGVVPDSVLIVENIDRLTRLDPFQAVEIISGMINRGTTILEIETGMTYSRYIPESITVLTMQINRANGESKRKSIMMQKSHQNRYGNVSKVRPRWFDVVELDGVKQYRTNDTAKAIQRMYSDYANGIGAAQIVRTYGKTDNGKSWTLVTVLRALSDKRVADDPRYPPIIDKPLYEKVQAMKLATGKKGNTHQRNMLNIFSGMARCPVCKQSIIVKRNSHGGLYTVCLGKRTNKDCEAKGMAYNALERPLLTAIKGLDFSEVYNREESNVITLRDQWIQNERDIAAFRERLAKASRHEKFAILDELETISKEQEDLTIRLKSVDAPKDVQLDFNDDKLDLNVDYRIELNNRMKKLIQRIDVVRVDTSKSTYTIYCSIKYWTDAITHLVIIDAESVRTGKGGTNQLTTTLRSVSSISEDGTISGNPDLEALEYWEGVFEKAVVMVESQLKQ

SEQ ID NO: 47117 - DNA, 50 bp, Enterobacter hormaechei
  source 1..50: mol_type = genomic DNA
tggtgaacttactgtactaactacgagcagtcgtgttagtatgtacgcca

SEQ ID NO: 47118 - DNA, 40 bp, Enterobacter hormaechei
  source 1..40: mol_type = genomic DNA
cggacccatcagcagtaatgaacagtccgtcgtaccaccg

SEQ ID NO: 47119 - DNA, 50 bp, Enterobacter hormaechei
  source 1..50: mol_type = genomic DNA
tggtgaacttactgtactaactacgcgcagtcgtgttagtatgtacgcca

SEQ ID NO: 47120 - DNA, 40 bp, Enterobacter hormaechei
  source 1..40: mol_type = genomic DNA
cgtacccatcagcagtcatgcccattcctccctctcactg

SEQ ID NO: 47121 - protein, 530 aa, Enterobacter hormaechei
MKVPVWSYARVSTLSQIDGFGIQRQVQTINQFIQYLVLDHRLPYTLDVDNITQMVAEGRSAFKGKNWNPKTKLGQYRKMVMDGVVPDSVLIVENIDRLTRLDPFQAVEIISGMINRGTTILEIETGMTYSRYIPESITVLTMQINRANGESKRKSIMMQKSHQNRYGNVSKVRPRWFDVVELDGVKQYRTNDTAKAIQRMYSDYANGIGAAQIVRTYGKTDNGKSWTLVTVLRALSDKRVADDPRYPPIIDKPLYEKVQAMKLATGKKGNTHQRNMLNIFSGMARCPVCKQSIIVKRNSHGGLYTVCLGKRTNKDCEAKGMAYNALERPLLTAIKGLDFSEVYNREESNVITLRDQWIQNERDIAAFRERLAKASRHEKFAILDELETISKEQEDLTIRLKSVDAPKDVQLDFNDDKLDLNVDYRIELNNRMKKLIQRIDVVRVDTSKSTYTIYCSIKYWTDAITHLVIIDAESVRTGKGGTNQLTTTLRSVSSISEDGTISGNPDLEALEYWEGVFEKAVIMAEGQLDQ

SEQ ID NO: 47122 - DNA, 50 bp, Enterobacter hormaechei; identical to SEQ ID NO: 43287
  source 1..50: mol_type = genomic DNA

SEQ ID NO: 47123 - DNA, 40 bp, Enterobacter hormaechei; identical to SEQ ID NO: 47118
  source 1..40: mol_type = genomic DNA

SEQ ID NO: 47124 - DNA, 50 bp, Enterobacter hormaechei
  source 1..50: mol_type = genomic DNA
cggtgtacatactttaccaactaggcgcagtcgtgttagtatgtacgcca

SEQ ID NO: 47125 - DNA, 40 bp, Enterobacter hormaechei; identical to SEQ ID NO: 47120
  source 1..40: mol_type = genomic DNA

SEQ ID NO: 47126 - protein, 561 aa, Nocardia elegans
MARRTQPSWSKVSDKAVLLLRVSTKKQLDTAIDIDPDGLSISTQRTQGHAKADAMGVDVVEEFIEPGYSAKTIDKRPVFRELLKYLADHPDVRYVIVYMRSRAFRNRFDAAIVETQLNKMGVRIISAKEDFGEGPHAVAMEGMLDVMNHLMNTLQGLDIQEKMRTKARNGGTIGFAKVGYLNVRVEYEGKQINTIALDPERAPLVHKAFELYATGDYGLEQLEATMTDLGLTARARGTIPERPVSFKLLHRMLQDPYYAGWIEVDGELRPGRHEPIVTQELFDRVQDVMDMRSRRGQRDRIHQHYLKGALFCDRCHNRGRTSRFIYTEARGRNGRLYGYFLCRGRQDNHCDMPHIPAEQVERAIVDHYATLSLPSSFHTTIRRLLDEALAHEQSSVRTMHTTLTTRLKELDAKEERLLDLAADGTLPQAKIKSRLRAIETDRASVQASLAATGAELAVGVDVLKRGLDLLTEPAQLYRTRTDAVRRHLNHAFFERFYLDIDGVRTDRLNQPFADLHHAAGTRSICEQPTTSPSQATSRNGKSGPTLHDVLKDPVSSKAAVV

SEQ ID NO: 47127 - DNA, 50 bp, Nocardia elegans
  source 1..50: mol_type = genomic DNA
cgtttcgagtaaggccgctgtggtggaccttgcaggaaactattcgaaac

SEQ ID NO: 47128 - DNA, 40 bp, Nocardia elegans
  source 1..40: mol_type = genomic DNA
caggtgaggggcctgtcgtggagctgccgggaattgaacc

SEQ ID NO: 47129 - DNA, 50 bp, Nocardia elegans
  source 1..50: mol_type = genomic DNA
cgtttcgagtaaggccgctgtggtgcaccttgcaggaaactattcgaaac

SEQ ID NO: 47130 - DNA, 40 bp, Nocardia elegans
  source 1..40: mol_type = genomic DNA
caggtgcgtggccgggcgggcagcaggcgggcactggacc

SEQ ID NO: 47131 - protein, 416 aa, Flavonifractor plautii
MQNMEIPINGLMNDRYAARTSEDVRRTFRTKRNKGEFIGAFAPFGYLKNPENKNAFIIDEEAAETVKEIFEKYLDGMSKLAIVRYLNDHCIPCPTVYKQKHLGMKYQNPHSDPAKNPLWSERTVGEILKNRMYCGDMVQGRYRIKSYKVHIQEQVPEDEWFIKENTHEPIIERETFEKVQRLLQKDTRTSPKKNTLYLFSGFLRCADCQKAMIRSEVKGHVYYYCSTYKSRSKNACTKHTIQHERLEAAVLFAIQQYVYLAIDYTKTIEQINRAPIVKSQDKKLAEAISQKERELTKVIRYKQAIYQDWKDNEISQTDYRRMREDYEEQEREINEKLKKLQDERAEQEQGVDTENPFLVAFRKYENITTLSREVLIELVDSIVVHEGSNISIILRFADELRRVQEFIEANTHSEAV

SEQ ID NO: 47132 - DNA, 50 bp, Flavonifractor plautii
  source 1..50: mol_type = genomic DNA
tttcttattattcatggagccacgggtgcgaccggaccaatcataataag

SEQ ID NO: 47133 - DNA, 40 bp, Flavonifractor plautii
  source 1..40: mol_type = genomic DNA
ggggcccactggcctgacgggtccgacgggcccgaccggc

SEQ ID NO: 47134 - DNA, 50 bp, Flavonifractor plautii
  source 1..50: mol_type = genomic DNA
tttcttattattcatggagccacgtgtgcgaccggaccaatcataataag

SEQ ID NO: 47135 - DNA, 40 bp, Flavonifractor plautii
  source 1..40: mol_type = genomic DNA
gggacacactggcatcacgtgcccgcctggcaggaccggg

SEQ ID NO: 47136 - protein, 545 aa, Sphingomonas koreensis
MPPFAAGRFPERNQWVQTVIYARYSSKFQDSRSIEGQLADCRARCAREGWTIIGEFHDAAISGNKGITEEARPGFYAMMQRVMAGGIDQVLCDTTSRIARNERDSIEIREDLKFVGCRLFTLQKGVIEGITASIEAAVDAEQRRALAHNIRRGQRTSVDQGRVPAGIAYGYKQANRLTERGEVIRGLREIDDDQAEVVRRIFREAAAGRSAFAIAKGLNLDGIAGPRGNYWMAPTIYGNPKFGNGILRNRAYIGELVVGRTVSVENPRTRKVSYRPLAKEEWRTKQVPELRIVEQEVWDAVQAEIARRSIGPAHAQRRPRHWLSGLGVCSECGSPYTRAGRDQWSCAKRSKGGACTNGHTVETKRYMAALLDALTNDLMHPDAFDEYEAEYREARKERLSSQRREQQKLERKRGEITRKIQRLADAIANGAGDVSEIVTLLATLRAERSDIERQLDQIEAVELIPLLPGVREKYRREMAALEEALASPEASLEAVPRFRALIHRVVLSPNPAGRGALITVEPRIDEALRLATGEAPPQALRRKAG

SEQ ID NO: 47137 - DNA, 50 bp, Sphingomonas koreensis
  source 1..50: mol_type = genomic DNA
aggcaggataatagataattcccgttagagactcattcgctaaccggcct

SEQ ID NO: 47138 - DNA, 40 bp, Sphingomonas koreensis
  source 1..40: mol_type = genomic DNA
gcacgatcacaacttcccgttcctgacctatggctatttg

SEQ ID NO: 47139 - DNA, 50 bp, Sphingomonas koreensis
  source 1..50: mol_type = genomic DNA
aggcaggataatagataattcccgagagagactcattcgctaaccggcct

SEQ ID NO: 47140 - DNA, 40 bp, Sphingomonas koreensis
  source 1..40: mol_type = genomic DNA
ccacgtgcccaacttcctgagccagacccagggctacctg

SEQ ID NO: 47141 - protein, 522 aa, Sphaerotilus natans
MQYAARWAAEHGMQLDDKLSMRDEGLSAYHQQHVKTGALGVFLRAIAEGRIVPGSVLIVEGLDRLSRAEPVLAQAQLSQIITAGITVVTASDGKTYTRESLRTQPMDLVYSLLIMIRAHEESATKSRRVSAALIRQVEGWQAGTYRGPIRAGHDPAYLSWDAQAGCWAVDPVRAAAVRRMIELYRLGLGSTHIVRRLLEEGLSPTGGVMPPSHIYRIIRSRALYGDRELVLDGQAHVLSGYYPALMTRVEWDELQLLAEERSGVSRRVRGELPHMLTGSGIARCGYCGSALAGQHMYKRRKPGELLADGYRRLLCSGKTMQVQCPRPGSCSVAPVERAIMRYCSDQIQLDDLLRGTDTSGADRAQLAKLRASSADRQRQIDRLTAALAQDDGAAPLAVLRQIRALEAEQQRDQAESERLERALAASAAGTLTHDQAAEWAALAEAAVERHDFDARVRAREMIATTFAGITVYHHGLVEPDTGAIDILLRTRSGVTRSLTIDRRTGDRRVQITRQRPPTSPAG

SEQ ID NO: 47142 - DNA, 50 bp, Sphaerotilus natans
  source 1..50: mol_type = genomic DNA
ggtatagataccgacgcattcgggcaccctagcgaaaccatacctatact

SEQ ID NO: 47143 - DNA, 40 bp, Sphaerotilus natans
  source 1..40: mol_type = genomic DNA
gtcggtcagggccttcgggcagcccaggctgacaaagccg

SEQ ID NO: 47144 - DNA, 50 bp, Sphaerotilus natans
  source 1..50: mol_type = genomic DNA
ggtatagataccgacgcattcgggtgccctagcgaaaccatacctatact

SEQ ID NO: 47145 - DNA, 40 bp, Sphaerotilus natans
  source 1..40: mol_type = genomic DNA
gctggtgagggccctggggtggacctggcggccaaagccc

SEQ ID NO: 47146 - protein, 491 aa, Streptomyces sp CMB-StM0423
MENVDLYLRKSKRPRSGERNLSFEAQEERGRRWAADNGYTVRHVWRDNLSGWSDVVRPEFDKALAGLLADEVPCLWCYALDRWTRQGAAAVIPILDSGKRIVFDFERLDSSEPRDRRWIIDRAENAREYSDLVSTRVRGTKKVQRDSGAWLGAAPYGLAVGPGRKLMHGEAWRHVVRVIGLVAEGYSGRGAARAMNEDGIPAPNGGAWAAGTIRRMVHNPVYEGWQVRAKSRKHTWPVPYLNESGQRVRVFAEGVEPVDSALVQRARRVMSGHQPGRQGARPGRATHLLTDLLRCEGCGARMPASGRSYACNGHAMGKPCPRPASVMRVLADEAVTREWFGFMGTRDLQDPVLGIVAERWHAINAPEQSAEAAETQAAVKAATASLEQLMRDRQAGLYAGLDKLFRNLHADARATLETAEERAAKLKPRVVDITFLLEDELLEWTWDAAGLPTRREMLRLAVEDVTVRQGTRGQKWDPEERLTIRWVSYEG

SEQ ID NO: 47147 - DNA, 50 bp, Streptomyces sp CMB-StM0423
  source 1..50: mol_type = genomic DNA
taatgacagggtggttgaacaactttggctgttcgcttaccctgtcattc

SEQ ID NO: 47148 - DNA, 40 bp, Streptomyces sp CMB-StM0423
  source 1..40: mol_type = genomic DNA
catgcccggccacgccgacttcgtgaagaacatggtcacc

SEQ ID NO: 47149 - DNA, 50 bp, Streptomyces sp CMB-StM0423
  source 1..50: mol_type = genomic DNA
taatgacagggtggttgaacaactacggctgttcgcttaccctgtcattc

SEQ ID NO: 47150 - DNA, 40 bp, Streptomyces sp CMB-StM0423
  source 1..40: mol_type = genomic DNA
catgtcctgggactccgtcaccatgaagcacaaggtcagc

SEQ ID NO: 47151 - protein, 553 aa, Rhodococcus ruber
MNPSPRTDPAEPAVAVSYIRVSTKEQAERDGDPEGYSIPAQREANRRKATAIGAVVVEEFVDRGESARSADRPELQKLLRFIAAHPVDYVLVHKVDRLARNRVDDVEINLAIRKSGATLVSATENIDETASGMLLHGIMSSIAEFYSRNLATEVLKGMEQKAKTGGTPGKAPLGYRNVAAVNPEGREVRTVAIDPDRAPLITWAFQAYATGDWTLRRLAVALEERGLTSRPTTRSPGGPLALNSVHKILRAPYYKGEVTYRGAQYPGRHQPLIDEATWARVQEVLDARATGERSREHPHYLKSSVFCGGCGSRLIVTMSKNRYGALYPYFICLGRHSKGNGCTRKAVLISVVEELVEDAYRTIQLDPEVRRQIETRLITEIAATRAGIDAEVRDLTTQKERLLTERTRLLQAHYAGAVPLDLLKSEQDRIARQLGAIEERLSAANVAIDDVEANLRRALDYATNCYQGYLAAGPHVRRLYNQAFFEKIYVEDDDVRVMLQEPFKTLTDPTATGEAGERVTASNEPDRPSLTEVMSRNNKPSSWDEGLNGTILV

SEQ ID NO: 47152 - DNA, 50 bp, Rhodococcus ruber
  source 1..50: mol_type = genomic DNA
acgaaggtttgaatggaacaattctggtgcgcctccatgaaactctttca

SEQ ID NO: 47153 - DNA, 40 bp, Rhodococcus ruber
  source 1..40: mol_type = genomic DNA
ccggaggccggcagtgtcacggtgcccccggcaggactcg

SEQ ID NO: 47154 - DNA, 50 bp, Rhodococcus ruber; identical to SEQ ID NO: 47152
  source 1..50: mol_type = genomic DNA

SEQ ID NO: 47155 - DNA, 40 bp, Rhodococcus ruber
  source 1..40: mol_type = genomic DNA
gcgggggccggcggcgtcctggtgcccgcggcaggctcca

SEQ ID NO: 47156 - protein, 548 aa, Agrobacterium rhizogenes
MTRAGLYARYSDDKQSEASIEDQFRLCREHALREGWEIAGSYEDAAISGASTVLRRGIQRLIRDAQRGEFTIVVAEALDRISRDQADVATLYKHLKFAGVTIVTLAEGEISELHVGLKGTMNALFLKDLAMKTHRGLRGRVEKGKAGGGLCYGYKVVRKFDVNGEPIRGDREIIPHEADTIRRIFREFASGKSPKAIAIDLNNGGIPGPLGRAWGDTSIRGHVSRGKGILNNELYTGVLVWNRQRFLKDPSTGKRVSRPNPESQWIRTEVPHLKIVDDDLWNAARARQTQISALFGPNPANTREGRMKRLHLANRPTALLSGLLTCGCCGGKFGIIVPNRYACLNHHRRGTCENGHSITRDKIEARVLAGLKDRLVSAEAVAEAVRAYAEEMNRLNHDRRAQAATDQKALQKIERAIAGIMAAIEDGMYQPSMKARMDDLERQKVEIMARQQEAPADIPDVHPNIANLYRRRVERLTEALNDPDGGRQAAEALRSLIDDIVLTPGGKRGEVHATLCGELFGILDFVRSEESRSPGETMPAAIARPRNQ

SEQ ID NO: 47157 - DNA, 50 bp, Agrobacterium rhizogenes
  source 1..50: mol_type = genomic DNA
aactatgccagcggcaatagcgcgcccccgcaaccaattcctacatactt

SEQ ID NO: 47158 - DNA, 40 bp, Agrobacterium rhizogenes
  source 1..40: mol_type = genomic DNA
aggaatcgttggttgcgagcccccgcaaccaaccttccca

SEQ ID NO: 47159 - DNA, 50 bp, Agrobacterium rhizogenes
  source 1..50: mol_type = genomic DNA
aactatgccagcggcaatagcgcgcacccgcaaccaattcctacatactt

SEQ ID NO: 47160 - DNA, 40 bp, Agrobacterium rhizogenes
  source 1..40: mol_type = genomic DNA
aggaatctttggttgcaagcaacagaaactgaccttggct

SEQ ID NO: 47161 - protein, 548 aa, Agrobacterium rhizogenes
MTRAGLYARYSDDKQSEASIEDQFRLCREHALREGWEIAGSYEDAAISGASTVLRRGIQRLIRDAQRGEFTIVVAEALDRISRDQADVATLYKHLKFAGVTIVTLAEGEISELHVGLKGTMNALFLKDLAMKTHRGLRGRVEKGKAGGGLCYGYKVVRKFDVNGEPIRGDREIIPHEADTIRRIFREFASGKSPKAIAIDLNNGGIPGPLGRAWGDTSIRGHVSRGTGILNNELYTGVLVWNRQRFLKDPSTGKRVSRPNPESQWIRTEVPHLKIVDDDLWNAARARQTQISALFGPNPANTREGRMKRLHLANRPTALLSGLLTCGCCGGKFGIIVPNRYACLNHHRRGTCENGHSITRDKIEARVLAGLKDRLVSAEAVAEAVRAYAEEMNRLNHDRRAQAATDQKALQKIERAIAGIMAAIEDGMYQPSMKARMDDLERQKVEIMARQQEAPADIPDVHPNIANLYRRRVERLTEALNDPDGGRQAAEALRSLIDDIVLTPGGKRGEVHATLCGELFGILDFVRSEESRSPGETMPAAIARPRNQ

SEQ ID NO: 47162 - DNA, 50 bp, Agrobacterium rhizogenes; identical to SEQ ID NO: 47157
  source 1..50: mol_type = genomic DNA

SEQ ID NO: 47163 - DNA, 40 bp, Agrobacterium rhizogenes; identical to SEQ ID NO: 47158
  source 1..40: mol_type = genomic DNA

SEQ ID NO: 47164 - DNA, 50 bp, Agrobacterium rhizogenes; identical to SEQ ID NO: 47159
  source 1..50: mol_type = genomic DNA

SEQ ID NO: 47165 - DNA, 40 bp, Agrobacterium rhizogenes; identical to SEQ ID NO: 47160
  source 1..40: mol_type = genomic DNA

SEQ ID NO: 47166 - protein, 535 aa, Brevibacillus borstelensis
MHTLPIGKYAAYLRKSRVDLEAEARGEEDTYKRHKRILQELAKRYGITLDKIYREKPATSGERISERPEMICLLEDVENEQWTGILVVEVERLARGDTMDQGIVANAFKYSNTLIVTPMRVYDPQNPDDEEYFEFGLFMSRREFKTITRRLQSGRVDGVRDGRYVGNTPPYGYQRVKLPGKGWTLEPHPEQAPIVQLIFSLYTDPNPERRMGTARLARKLNAMGVPTARKSRWTVATINGLLRNPVYIGRVRWGARPQVKRRDGKSRPRKPRDQWVEAKGMHTPLIDEDTFALAQTIMEENRHTPLPKGKISNPLAGLIRCDMCGGPMVLRPYGEKNPAAMICPAQDCVNVSSYFHVVEDRLLRSLQEWLKSYKAQWKEKQPKPNRNDQMKWKAHEEMLKSLRKKLTALEAQKNEVHNLLELKVYSIDIYKERSQSLAKQINDTRQAISQTEQEMELEQKRIAARTETIPQVEHVLEAYHKTDDPAKKNALLKSVVEQATYRKEKGGRWNPEAVNQFTLVLYPKLPKRRDRPSHR

SEQ ID NO: 47167 - DNA, 50 bp, Brevibacillus borstelensis
  source 1..50: mol_type = genomic DNA
catcgataactgtcatgtaccgattcttcggcacactgctgttgtcgttg

SEQ ID NO: 47168 - DNA, 40 bp, Brevibacillus borstelensis
  source 1..40: mol_type = genomic DNA
catttcaagatgagcgaactcttccgtcccgatatctgtc

SEQ ID NO: 47169 - DNA, 50 bp, Brevibacillus borstelensis
  source 1..50: mol_type = genomic DNA
catcgataactgtcatgtaccgatgattcggcacactgctgttgtcgttg

SEQ ID NO: 47170 - DNA, 40 bp, Brevibacillus borstelensis
  source 1..40: mol_type = genomic DNA
cctttccaggtgagtgaacgattctgtctcgctagcgttc

SEQ ID NO: 47171 - protein, 535 aa, Brevibacillus borstelensis
MHTLPIGKYAAYLRKSRVDLEAEARGEEDTYKRHKRILQELAKRYGITLDKIYREKPATSGERISERPEMICLLEDVENEQWTGILVVEVERLARGDTMDQGIVANAFKYSNTLIVTPMRVYDPQNPDDEEYFEFGLFMSRREFKTITRRLQSGRVDGVRDGRYVGNTPPYGYQRVKLPGKGWTLEPHPEQAPIVQLIFSLYTDPNPERRMGTARLARKLNAMGVPTARNSRWTVATINGLLRNPVYIGRVRWGARPQVKRRDGKSRPRKPRDQWVEAKGMHTPLIDEDTFALAQTIMEENRHTPLPKGKISNPLAGLIRCDMCGGPMVLRPYGEKNPAAMICPAQDCVNVSSYFHVVEDRLLRSLQEWLKSYKAQWKEKQPKPNRNDQMKWKAHEEMLKSLRKKLTALEAQKNEVHNLLELKVYSIDIYKERSQSLAKQINDTRQAISQTEQEMELEQKRIAARTETIPQVEHVLEAYHKTDDPAKKNALLKSVVEQATYRKEKGGRWNPEAVNQFTLVLYPKLPKRRDRPSHR

SEQ ID NO: 47172 - DNA, 50 bp, Brevibacillus borstelensis; identical to SEQ ID NO: 47167
  source 1..50: mol_type = genomic DNA

SEQ ID NO: 47173 - DNA, 40 bp, Brevibacillus borstelensis; identical to SEQ ID NO: 47168
  source 1..40: mol_type = genomic DNA

SEQ ID NO: 47174 - DNA, 50 bp, Brevibacillus borstelensis; identical to SEQ ID NO: 47169
  source 1..50: mol_type = genomic DNA

SEQ ID NO: 47175 - DNA, 40 bp, Brevibacillus borstelensis; identical to SEQ ID NO: 47170
  source 1..40: mol_type = genomic DNA

SEQ ID NO: 47176 - protein, 531 aa, Bacillus licheniformis
MSTDKQVDHGTSLEYQREACLRKAGELGIPNEFILEYEERGFSGEDIERPRMDELREDVKKEKIERIIIVHPDRLSRNMIDRLLVCTEFEKNNVELVFVDTEYKNTEEGKLFFNIQSSIAEYELALIKKRTRRGSIKAVKNGFVMPMRVPPYGYDYVDRQLVINKEEAKFVRKIYQWYVYDKLKIREIGERLSILGAKTKMKKSHLWNQSTINKILKNETYIGKFYYNKKKMKKIKGEKTKSGKPKRAYENRDKEEWIEVSVPPIVDFATFTLAENQRVKNTSHSGNVKHQYLLRKMIRCAHCGAKYSSYTTTSKTRSRVTGEVTSTHSYKNYRCVNKNGRVFGEGAKSCCSKILKANEIEKQIWEMVYDFIFDPSKIVHAGKEERANDSVRQAYDLLKFKLEEISKERKRILQLFKKGYIEENEMDLDIQKLNEKEKLIKIEISKYEDQIQDKEIDHQNKKDLIKFIGQIKNEIKNQDKISFEAKQKIISSLIDEIIVEWEGEQYNVSIVGMIGNLIKRRKEQTETFLAS

SEQ ID NO: 47177 - DNA, 50 bp, Bacillus licheniformis
  source 1..50: mol_type = genomic DNA
tatgctagttgacaacacaacggcaaagcgttgtaaccacaactaacata

SEQ ID NO: 47178 - DNA, 40 bp, Bacillus licheniformis
  source 1..40: mol_type = genomic DNA
tcttgtcacctataacggcaaagcgttcgactggccccag

SEQ ID NO: 47179 - DNA, 50 bp, Bacillus licheniformis
  source 1..50: mol_type = genomic DNA
tatgctagttgacaacacaacggcccagcgttgtaaccacaactaacata

SEQ ID NO: 47180 - DNA, 40 bp, Bacillus licheniformis
  source 1..40: mol_type = genomic DNA
tcctgtttcctatacctgcccaccatttgcttggccccag

SEQ ID NO: 47181 - protein, 531 aa, Bacillus licheniformis
MSTDKQVDHGTSLEYQREACLRKAGELGIPNEFILEYEERGFSGEDIERPRMDELREDVKKEKIERIIIVHPDRLSRNMIDRLLVCTEFEKNNVELVFVDTEYKNTEEGKLFFNIQSSIAEYELALIKKRTRRGSIKAVKNGFVMPMRVPPYGYDYVDRQLVINKEEAKFVRKIYQWYVYDKLKIREIGERLSILGAKTKMKKSHLWNQSTINKILKNETYIGKFYYNKKKMKKIKGEKTKSGKPKRAYENRDKEEWIEVSVPPIVDFATFTLAENQRVKNTSHSGNVKHQYLLRKMIRCAHCGAKYSSYTTTSKTRSRVTGEVTSTHSYKNYRCVNKNGRVFGEGAKSCCSKILKANEIEKQIWEMVYDFIFDPSKIVHAGKEERANDSVRQAYDLLKFKLEEISKERKRILQLFKKGYIEENEMDLDIQKLNEKEKLIKVEISKYEDQIQDKEIDNQNKKDLIKFIGQIKNEIKNQDKISFEAKQKIISSLIDEIIVEWEGEQYNISIVGMIGNLIKGRKEQSETYLAS

SEQ ID NO: 47182 - DNA, 50 bp, Bacillus licheniformis
  source 1..50: mol_type = genomic DNA
tatgctagttgataatataacggcaaagcgttgtaaccacaactaacata

SEQ ID NO: 47183 - DNA, 40 bp, Bacillus licheniformis; identical to SEQ ID NO: 47178
  source 1..40: mol_type = genomic DNA

SEQ ID NO: 47184 - DNA, 50 bp, Bacillus licheniformis
  source 1..50: mol_type = genomic DNA
tatgctagttgataatataacggcccagcgttgtaaccacaactaacata

SEQ ID NO: 47185 - DNA, 40 bp, Bacillus licheniformis; identical to SEQ ID NO: 47180
  source 1..40: mol_type = genomic DNA

SEQ ID NO: 47186 - protein, 531 aa, Bacillus licheniformis
MSTDKQVDHGTSLEYQREACLRKAGELGIPNEFILEYEERGFSGEDIERPRMDELREDVKKEKIERIIIVHPDRLSRNMIDRLLVCTEFEKNNVELVFVDTEYKNTEEGKLFFNIQSSIAEYELALIKKRTRRGSIKAVKNGFVMPMRVPPYGYDYVDRQLVINKEEAKFVRKIYQWYVYDKLKIREIGERLSILGAKTKMKKSHLWNQSTINKILKNETYIGKFYYNKKKMKKIKGEKTKSGKPKRAYENRDKEEWIEVSVPPIVDFATFTLAENQRVKNTSHSGNVKHQYLLRKMIRCAHCGAKYSSYTTTSKTRSRVTGEVTSTHSYKNYRCVNKNGRVFGEGAKSCCSKILKANEIEKQIWEMVYDFIFDPSKIVHAGKEERANDSVRQAYDLLKFKLEEISKERKRILQLFKKGYIEENEMDLDIQKLNEKEKLIKIEISKYEDQIQDKEIDNQNKKDLIKFIGQIKNEIKNQDKISFEAKQKIISSLIDEIIVEWEGEQYNISIVGMIGNLIKGRKEQSETYLAS

SEQ ID NO: 47187 - DNA, 50 bp, Bacillus licheniformis; identical to SEQ ID NO: 47182
  source 1..50: mol_type = genomic DNA

SEQ ID NO: 47188 - DNA, 40 bp, Bacillus licheniformis; identical to SEQ ID NO: 47178
  source 1..40: mol_type = genomic DNA

SEQ ID NO: 47189 - DNA, 50 bp, Bacillus licheniformis; identical to SEQ ID NO: 47184
  source 1..50: mol_type = genomic DNA

SEQ ID NO: 47190 - DNA, 40 bp, Bacillus licheniformis; identical to SEQ ID NO: 47180
  source 1..40: mol_type = genomic DNA

SEQ ID NO: 47191 - protein, 510 aa, Pantoea ananatis
MIDKTYKIHKVRVAQYLRMSTNLQEFSLDNQAQFIKKYADEHNMEILHTYDDAGKSGVSTTGRHDFNKLVNDVLTKEINIDAVLVYDVSRFGRFKDPQEGIYYKYLLKMNNVDVIYCAENLPENSETETFILSSLMYAAGAYSKNLSIKVFAGHVNLVKRGYYQGGTPGYGLKRKLLDNNNKPKMLLAHGERKSLQTDRIVLVPGTKKEIELIKKIFNMFIFDGLNEYLIASRLNQEGYRFSDKTEWTRGRIHSVLINSRYTGRYIYNRTSQKLKTKRIKNPEEDWVEYNSFFKPIISEEKFRLAKEIIDNRSIKMSDEKILDCLRKILSKHGKISGFIIDEENSSPSSSVIANRFGGLLNAYKLIDYTPERDYQYLEVNSYLRKKHSDIVNKIQNEIIISEVKILENKLISVNKALSFSIVLSRCKKTGLNKHRWVVRLDRSLNPEISIIARMNSLNTEPVDYYILPSIEFLEHELKIKDNNTLLFEMYRFDDIKPFFNMLSTDDKDVI

SEQ ID NO: 47192 - DNA, 50 bp, Pantoea ananatis
  source 1..50: mol_type = genomic DNA
gataaggacttttcaacccacacgccaatgatgcagcagtacctatgaat

SEQ ID NO: 47193 - DNA, 40 bp, Pantoea ananatis
  source 1..40: mol_type = genomic DNA
ggacttgagtactcacacgcccatgatgcagcaatattta

SEQ ID NO: 47194 - DNA, 50 bp, Pantoea ananatis
  source 1..50: mol_type = genomic DNA
gataaggacttttcaacccacacgtaaatgatgcagcagtacctatgaat

SEQ ID NO: 47195 - DNA, 40 bp, Pantoea ananatis
  source 1..40: mol_type = genomic DNA
ggactttagtaatcataattacatgaggcttcgacattta

SEQ ID NO: 47196 - protein, 486 aa, Cellulosimicrobium aquatile
MARRRTLAPVPDTPPRAVAYLRQSTYREESISLELQETACRDYAARHGYQIVAVESDPGVSGRTWARPAVQRVMEMIESGDADVIVLWRWSRLSRNRKDWAIAADRVDVAGGRIESATEPNDTATAAGRFARGVMTELAAFESERISEQWKEVHGSRVARGLPPGGKLPWGWRWVDGAVTPDPDTGPYIVEAYRRYLAGAGNRDLADWFNGSGVRPMRAKQWYFSTITQCLDSPIHAGLIAYHGQTLPGAHDGIIDVATWEAYRRERERRAGERQVKRRYLLSGILTCTCGSPMRGFTQDQAGRPRTGRTRSPWSCYRCTTAKSTAVHGPWSISLRMVEQPVMDWLHQVAADVENKVPRAAARRDDAHREAQRLAREITALDAQLTALTGHLASGLVPESAYVTTRDEILARRGELERGLAEAERLVLHVPEDPSAIAREALADWDTLPIDAKRAALRQLVRAVVVDYEQRTARAIPVWEPIRGEG

SEQ ID NO: 47197 - DNA, 50 bp, Cellulosimicrobium aquatile
  source 1..50: mol_type = genomic DNA
acctatacgcggcgagggataacggacgttcacccacgttgcacataggt

SEQ ID NO: 47198 - DNA, 40 bp, Cellulosimicrobium aquatile
  source 1..40: mol_type = genomic DNA
gctgcacgtcgtcatccccgacgtcacgcgcagcgagtgg

SEQ ID NO: 47199 - DNA, 50 bp, Cellulosimicrobium aquatile
  source 1..50: mol_type = genomic DNA
acctatacgcggcgagggataacgtccgttcacccacgttgcacataggt

SEQ ID NO: 47200 - DNA, 40 bp, Cellulosimicrobium aquatile
  source 1..40: mol_type = genomic DNA
gctgctcttcgtcatcctctctatcgccctctgcaagtgg

SEQ ID NO: 47201 - protein, 603 aa, Butyricimonas virosa
MKNAALLLRVSTDIQDIDSQKEALLPVAKSMGYNVSEEWIFGQHITGKDDIRKGERVSIKKLKELCKTGIIDVIIIWEVSRLSRSGIAGRQFIQDFNEMKIPIYFKDRNIWTLNPDTLEEDVNSKMIIGLYLDIAESELKTLKDRTNRGKRKNVEHGLSTGGFQNYGYKVNPETNKIEIDEEEAKFVRDLFAKYASGKYSTAALTKYANTTSYLPRYNKTSRKGNFRTNSGRERDTSTIRWGRSVITKMLHNRRYIGERVYKDMITKVPAIVDEETFNKAQTFFKKNPNKIEKAKKYIHLLGKKVVCGQCGNSYYSHVGITGSVYLCTSYSSKSKDCDNIRINYEKSEAVIWDYLKNYSYYFKKIDETEKERITNEIDEKKQELLEQQLKINQLIDEENVKVRNLLNLVKNSGGAFKMEDIIQDKINIDREIANYNIDLNKIHSELALLDNRLKQIVDTNLTDIAIERIEADRNQMKKIIDSVIDVITVYKAGVDRILLQVELYGRVVNILMRRRVKVNCRYCFIDNSVAEFQNPMKYEKEMLLPSEIVTMVPVFDVTSNNNEVFDEDIFGGYSFDEMWDILIKYGCYRDYTPLPPVRRECRI

SEQ ID NO: 47202 - DNA, 50 bp, Butyricimonas virosa
  source 1..50: mol_type = genomic DNA
acctgcataattgtatcttccgttttctctgattatactattttgtaggt

SEQ ID NO: 47203 - DNA, 40 bp, Butyricimonas virosa
  source 1..40: mol_type = genomic DNA
agtatatgaacttcccgagttcgctgataatcgtgagctt

SEQ ID NO: 47204 - DNA, 50 bp, Butyricimonas virosa
  source 1..50: mol_type = genomic DNA
acctgcataattgtatcttccgttggctctgattatactattttgtaggt

SEQ ID NO: 47205 - DNA, 40 bp, Butyricimonas virosa
  source 1..40: mol_type = genomic DNA
agaatatgaacttcatgaggggggtgatttttgtcagttt

SEQ ID NO: 47206 - protein, 605 aa, Butyricimonas synergistica
MIMKNAALLLRVSTDIQDIDSQKEALLPVAKSMGYNVSEEWIFGQHITGKDDIRKGERESIKKLKELCKTGIIDVIIIWEVSRLSRSGIAGRQFIQDFNEMKIPIFFKDRNIWTLNPDTLEEDINSKMIIGLYLDIAESELKTLKDRTNRGKRKNVEHGLSTGGFQNYGYKVDPETNKIEIDEEEAKFVRDLFAKYASGKYSTASLTKYANTTGYLPRYNKTSRKGSFRTNSGIDRNTSTVRWSRSVITKMLHNRRYIGERVYKDMITKVPAIVDEEIFNKAQTFFRENPNKIEKAKKYIHLLGRKVVCGQCGSSYYSHVGITGSVYLCTTYSSKSKDCDNIRINYEKSEAVVWDYLKNYSYYFKRIDETEKERITEEIDKKRRELLERQNKFNQLVDEENVKVKNLLNLVKNSGGAFKMEDIIQDKINIDKTIENYNIDLNKIHSELALLDNRLNQIVNTNLTNIAIERIEADRNQMKNIIDSVIDVITVYKGGTDRIILQIELYGRVVNILMRRRVKVNCIYCFIDDTVATFQNPDKFRKETPLPSEIIDQIPIFDVGSNNNNVFDEMIFGGYSFDEMWNILIKYGCYREYTPFQPVRREKKN

SEQ ID NO: 47207 - DNA, 50 bp, Butyricimonas synergistica
  source 1..50: mol_type = genomic DNA
accttcataattgtaccttccgttttcgctggttatactattttgtatat

SEQ ID NO: 47208 - DNA, 40 bp, Butyricimonas synergistica; identical to SEQ ID NO: 47203
  source 1..40: mol_type = genomic DNA

SEQ ID NO: 47209 - DNA, 50 bp, Butyricimonas synergistica
  source 1..50: mol_type = genomic DNA
accttcataattgtaccttccgttggcgctggttatactattttgtatat

SEQ ID NO: 47210 - DNA, 40 bp, Butyricimonas synergistica; identical to SEQ ID NO: 47205
  source 1..40: mol_type = genomic DNA

SEQ ID NO: 47211 - protein, 596 aa, Leclercia adecarboxylata
MKTQLYSYVRWSSDKQTGNSSLERQTRKSKEYAARNGLEWAELRDEAVSAYRGANWDEKKSALGGFIGAVKKGLVPSDSWLYVESLDRLSRQNVLDATEWFISVLKLGITIVTGMDEHVYNKESIAANATGLMMSIMLFARANEESETKSKRVVSHAKQLIERHKEGKPATIKSAGSHVWWIDSTGDEREGVKPHPEMWEPAKLIVEMFKEGESIFRIVAALRERYPYGFKGRDWSGSTIKNMRVNPALYGCRTLKFGLEENKLENYYPALCTEAEFYRIQEVKSNNKFRANKSSSISLLAGMRLIRCGQCGGTMNTLTTTDGKLRYVCSSGLATKGGGCTRSWSLSGILIEHCLMIVLSHAYFDASIRNQNSATDLDTQIEKFEIRIAELNIEIKNIASGIAKHYSEALVELLAAAEKERKKLVQELDRTNQKKLLLTANTVFEKDMLNFFELIQWGIISDPTHETRVKLREIVRRLMQSVVIHKRDGIVSLHYSYKEGEYFVFEGAGKRHEWTYYIKGDKQADNTVSPEIIEQVKNHRLIKDIETSLYNLETDHEGMFNLVLDMLAIVNYPKLKGSQFWPKKSSTERTVFKKPA

SEQ ID NO: 47212 - DNA, 50 bp, Leclercia adecarboxylata
  source 1..50: mol_type = genomic DNA
ttatctactggctggctaatgggcaagcctgttatactattcagtagata

SEQ ID NO: 47213 - DNA, 40 bp, Leclercia adecarboxylata
  source 1..40: mol_type = genomic DNA
tatcatcagccatccgggtaacccgaaataccctatcgac

SEQ ID NO: 47214 - DNA, 50 bp, Leclercia adecarboxylata
  source 1..50: mol_type = genomic DNA
ttatctactggctggctaatgggcgtgcctgttatactattcagtagata

SEQ ID NO: 47215 - DNA, 40 bp, Leclercia adecarboxylata
  source 1..40: mol_type = genomic DNA
tctgatcagctagaggggtgtccagaaatcccctagctac

SEQ ID NO: 47216 - protein, 564 aa, Paeniclostridium sordellii
MPRSRKSQMSRLTNNRTIWKVAVYIRLSREDGNDESLSVINQKKILKEYLEEMFEEEYVLVDFYVDDGLTGTDDERESFQRMIKDVKQGKVNCIICKTLARAFRNYSDQGYFLEEFLPLHRTRFICLGSPKFDTYLNPEAITDGLDVPITGLMNDRYAARASADIRRTFNTKRRNGEFIGAFAPYGYKKSPDNKNKLIIDEEAAQVIRDIFRWRVEEGINKLGIVRRLNELGTLTPTKYKHCKGLMLKNPKLDKQDGMWSMNTISTILKNRMYIGDMVQGRQRVISYKVHKTICTPENEWFIVENTHEAIIDKDTYLKAQELDQRDIRMSPKGRNVYLFSGFLRCADCKRSMTKKTNKNKLNDGTVKEYNYYICSTYALKSKFKCSRHSIKLEILEEAVLKAIQIQIAMVENMSEVISEINKQATIVNQSSRLKKQLNEKQKELEKIICVTDNLYMDWKSEEISRNEYARMKSRFEIKAEEIRRIISNIEAEIQSSSKGVGDNDPYLKTFLKYKNIKELNRGILIELIDTIYIHENNEITIQFKFADQCKRLKEFIKDNHFSKN

SEQ ID NO: 47217 - DNA, 50 bp, Paeniclostridium sordellii; identical to SEQ ID NO: 11272
  source 1..50: mol_type = genomic DNA

SEQ ID NO: 47218 - DNA, 40 bp, Paeniclostridium sordellii
  source 1..40: mol_type = genomic DNA
atatggactattaggacctaatggagcaggaaaaacatca

SEQ ID NO: 47219 - DNA, 50 bp, Paeniclostridium sordellii
  source 1..50: mol_type = genomic DNA
acttgtctatacgtcaatggttcagatgaaccgtaaaggtatagataata

SEQ ID NO: 47220 - DNA, 40 bp, Paeniclostridium sordellii
  source 1..40: mol_type = genomic DNA
atagggactaataggaactgaataagcaggccaaacttct

SEQ ID NO: 47221 - protein, 465 aa, Staphylococcus schleiferi
MNVAIYCRVSSQEQANEGYSIHEQERKLKSFCEVNNWKNYKVFVDAGVSGGTINRPAFNNLLANLDKFDLVLVYKLDRLTRSVRDLLSLLETFEEHGVSFRSATEVFDTTSAIGKLFITIVGAMAEWERSTIRERSLFGSHAAVREGNYIRVAPFCYDNIDGKLVPNEHKKVIEYIVKKLLEGVTATEIARRLNNANNYPPTIKNWSKTTVIRLVNNPVMRGHTKHGDLFIENTHEPIITEHDYKRISERLSSRVNYKKQTHTSVFRGVLECPQCGHKLHYFKSKLKNKSKTYYSEGYRCDYCRTDKTARNIAITFSEIEREFIEYMSNIRLSDNYGIEVEPKNEVVKIDINKIMRKRSRFQEAYGDGLMTKEEFKQKMFETQKLIDEYEEMENEKDVDDHITKEQVQAIQNLFRHIWDSPSVSREDKEEFVRQSIKKIDFDFIPKSKVNKTPNTLKINNIDLHF

SEQ ID NO: 47222 - DNA, 50 bp, Staphylococcus schleiferi
  source 1..50: mol_type = genomic DNA
catgtatggtttagcacattgtaggtggctatggttacgaaccatacata

SEQ ID NO: 47223 - DNA, 40 bp, Staphylococcus schleiferi
  source 1..40: mol_type = genomic DNA
taaataagggacgagtaaagtcgcgccagtaccacccatt

SEQ ID NO: 47224 - DNA, 50 bp, Staphylococcus schleiferi; identical to SEQ ID NO: 47222
  source 1..50: mol_type = genomic DNA

SEQ ID NO: 47225 - DNA, 40 bp, Staphylococcus schleiferi
  source 1..40: mol_type = genomic DNA
taaggaaggggtgagtgaagtcactgcaggacaacccatt

SEQ ID NO: 47226 - protein, 493 aa, Mycobacteroides chelonae
MGESLRALVGARVSVLRGEQKVSHIAQKETGTKWVTDRGHTIVGTFEDLDVSASISPFNRRDLGPWLTAEREHEWDVVVFSKIDRMFRSTRDCVRFAEWAEEHKKILVFAEDGMTLNYRDKDASGSIESMMSELFIYIGSFFAQLELNRFKSRTSDSHRVLRTTARWAGGTAPLGYQVVDHPDGKGKVLDTDPDGKALLHDIAGKLFDGWSLIRIAQWLNDTGVPSNRDKARIVNGKEAKERPWAVSTLTRTLTSYKTQGFKMHRQKPLLDASGEMIRMAPPTFDDDTWKKIQEAIALRQATKSRTNSPNPMLGIGYCDICGASLAQKFRRKGDVAYRYYRCGRSPVQCPGVNIRADEADETLENSFIANYGNENTSHKVFVPGEDNSHDLEQVRATIERLRRESDMGLVVTPEDEEIYLQRMKSLIERRTVLEATPVRPAGWATVVSDKTYADAWETEDHHKLLVDRGVKYFLISGTPRRFRLYVPELEGAT

SEQ ID NO: 47227 - DNA, 50 bp, Mycobacteroides chelonae
  source 1..50: mol_type = genomic DNA
attagtcaatgtgttgcaatctgtgtgcagatggctatacactgactaaa

SEQ ID NO: 47228 - DNA, 40 bp, Mycobacteroides chelonae
  source 1..40: mol_type = genomic DNA
cttcccgatggccttcggggtgcacatcgcgatggcgacg

SEQ ID NO: 47229 - DNA, 50 bp, Mycobacteroides chelonae
  source 1..50: mol_type = genomic DNA
attagtcaatgtgttgcaatctgtaagcagatggctatacactgactaaa

SEQ ID NO: 47230 - DNA, 40 bp, Mycobacteroides chelonae
  source 1..40: mol_type = genomic DNA
cttcctgttggcctttgagaagcaaattgccatggtgtgg

SEQ ID NO: 47231 - protein, 489 aa, Neobacillus sedimentimangrovi
MKVAAYIRVSTEEQAQEGYSIPAQRSRLEAYALSQGWEIVQWYVDEGESAKDLNRTELKRMLKALEQNIFDCVLVYRLDRLTRSVLDLYQLLNKFEKHNVKFKSATEVYDTTTAIGRLFITLVAALAQWERENLAERVRMGMQQKAKEGKWTVSTPPFGYDAHDSILKINSTEAAVVKEIYKLYLSGKGMLNIARDLNQRGLWTKRGKPWSSGTIEYILTNPIYAGTLRYNYRVNKDQYFEVDGVAPAIVSEEDFNLAQKIISSRRQVHPRQATSKFIFSKVLKCGRCGKTLIGKTCQSKRGDKVYSSYNYFCPNRRRALCDMPLINQNFMEQKFLEMMDSWQMEQEAAELLQDQVAATVEDRTETIRQLEQELKEIEKRRSKWQYAWVNNMFSSDDAKNDSEFKKRMTEENENEKLIRQELESLSYHETPSQDSNILEYLTDIKLNWEYMDNKAKKQFILIAINSMTVDKISKEKSPDSIEIKEVRFN

SEQ ID NO: 47232 - DNA, 50 bp, Neobacillus sedimentimangrovi
  source 1..50: mol_type = genomic DNA
actatgcctattatcaccacaagatgcctagtaataacaataggcacatg

SEQ ID NO: 47233 - DNA, 40 bp, Neobacillus sedimentimangrovi
  source 1..40: mol_type = genomic DNA
catagtactaagcactaaatgtcccgttaaagaagcccta

SEQ ID NO: 47234 - DNA, 50 bp, Neobacillus sedimentimangrovi
  source 1..50: mol_type = genomic DNA
actatgcctattatcaccacaagaggcctagtaataacaataggcacatg

SEQ ID NO: 47235 - DNA, 40 bp, Neobacillus sedimentimangrovi
  source 1..40: mol_type = genomic DNA
atttttactaagcactagaggtcattttcaagaagcacta

SEQ ID NO: 47236 - protein, 520 aa, Collinsella intestinalis
MARSKKFERNDNNLAIAYYRFSSHAQNEASIDQQRELAHAWAEANGFKIVREYEDAAISGTLEERPGFQQMLSEVGKIKPNTLVLWKTDRLGRDRYVLSMAKHAIRKAGCGIHLLAEAIPTETPEGVLMEGMMESFAEYYSLQLSMNVRRGMMYNAQNALYNGNKLFGYDVDKATKKYVVDEATAPFVQRMFSEYAEGVPMQDIAEELNGSGVRTVRGREFTVKALNKMLKNRAYIGEYHHSGVVVEGGMPALVDEETFERVQARMTLNKRHGSQRARGKGEDGAPRYWLTGKLYCGECGARMQGMYGTGKMGKRYYYYNCSDQRRKLCAKKKIRKEAVEGLVEILLREVLADTENLASLAVDAAAYYRKNCLDTHYLEGLEAKRKEAERSIANLLKVIEGGVLSDAVMGRLAKLEEQKSALSEAIEAENVKAALLEDEHSIRVYFERFMNADFGNPETRNMVMEYFVDKLYLYDDKLVATFFYSEDKTELAWDEQGRLSISPFVDGEAAKFGRFPFGST

SEQ ID NO: 47237 - DNA, 50 bp, Collinsella intestinalis
  source 1..50: mol_type = genomic DNA
agtttggccgtttcccctttggttctaccagcgacggaagagtcgaactc

SEQ ID NO: 47238 - DNA, 40 bp, Collinsella intestinalis
  source 1..40: mol_type = genomic DNA
ggttcgagtcccaccgcctctaccaggatgaaaaagccct

SEQ ID NO: 47239 - DNA, 50 bp, Collinsella intestinalis
  source 1..50: mol_type = genomic DNA
agtttggccgtttcccctttggtttgaccagcgacggaagagtcgaactc

SEQ ID NO: 47240 - DNA, 40 bp, Collinsella intestinalis
  source 1..40: mol_type = genomic DNA
ggttaaagtcagaactccttggcctggctgacaaagccct

SEQ ID NO: 47241 - protein, 638 aa, Klebsiella aerogenes; identical to SEQ ID NO: 9251

SEQ ID NO: 47242 - DNA, 50 bp, Klebsiella aerogenes; identical to SEQ ID NO: 9252
  source 1..50: mol_type = genomic DNA

SEQ ID NO: 47243 - DNA, 40 bp, Klebsiella aerogenes
  source 1..40: mol_type = genomic DNA
gcatggggtgttggccggcttgccgtcaggcattccggga

SEQ ID NO: 47244 - DNA, 50 bp, Klebsiella aerogenes; identical to SEQ ID NO: 9252
  source 1..50: mol_type = genomic DNA

SEQ ID NO: 47245 - DNA, 40 bp, Klebsiella aerogenes
  source 1..40: mol_type = genomic DNA
acatggtgtgttggccagtttggggtctggcttgctggga

SEQ ID NO: 47246 - protein, 638 aa, Klebsiella aerogenes
MKPKLYSYVRFSSVKQREGNSLERQQDTALRIASRYDLELDTTAFHDLGMSAFKGKNAHEGKLSEFIKQIGVKVPVGSWLVVENLDRISRDDAWSALDIFKSILSKGIVVVTGMDEKVYKYADVKNNPTDLIISLLMFTRAHDESLTKKNRVESQARSLIRHNLTREPGTPARAIESVGQNVWWVDTKSGYVTPHPTYFAAAQKIIELKQSGETLLGIQRYLNEHYPAPKKRVYKDQTGQALTSKTEQWGKHLIRTFLNPTVHGQKVFTLDKRDESGIVIYDPDSEKPLKETFTIPDYYPVLMSEIDYLTLSKLDRHRAVTRSSSKYPEGNPDPEIPLLSGIGILFCGKCGSFMFKSGSNKNKYRYICGSKIVQGKPCGKKGFTSYQLEHTILQLIADHVWNNHQEDKTAWYESEIAKASESIDKLLKLATLTDSLEELAEQINSNKHKKVTLEREFHQYKINRSEIQTTGWEQFQHFDVHDTKNPNRKQIRLKVKQAIKRIDCYDINGRHDHFEVTFVDETKQRIVIKFNRNRSPGVSYVESQTVNDHDLLKMQGLVLHSFIDELISPDKFAQHIKEKHEASLLNPTYITELENSTSRDKGNGMAIIVDGSTSKTYATVNGTKYEINSLEDLEKLSH

SEQ ID NO: 47247 - DNA, 50 bp, Klebsiella aerogenes; identical to SEQ ID NO: 9252
  source 1..50: mol_type = genomic DNA

SEQ ID NO: 47248 - DNA, 40 bp, Klebsiella aerogenes; identical to SEQ ID NO: 47243
  source 1..40: mol_type = genomic DNA

SEQ ID NO: 47249 - DNA, 50 bp, Klebsiella aerogenes; identical to SEQ ID NO: 9252
  source 1..50: mol_type = genomic DNA

SEQ ID NO: 47250 - DNA, 40 bp, Klebsiella aerogenes; identical to SEQ ID NO: 47245
  source 1..40: mol_type = genomic DNA

SEQ ID NO: 47251 - protein, 638 aa, Klebsiella aerogenes
MKPKLYSYVRFSSVKQREGNSLERQQDTALRIASRYDLELDTTAFHDLGMSAFKGKNAHEGKLSEFIKQIGVKVPVGSWLVVENLDRISRDDAWSALDIFKSILSKGIVVVTGMDEKVYKYADVKNNPTDLIISLLMFTRAHDESLTKKNRVESQARSLIRHNLTREPGTPARAIESVGQNVWWVDTKSGYVTPHPTYFAAAQKIIELKQSGETLLGIQRYLNEHYPAPKKRVYKDQTGQALTSKTEQWGKHLIRTFLNPTVHGQKVFTLDKRDESGIVIYDPDSEKPLKETFTIPDYYPVLMSEIDYLTLSKLDRHRAVTRSSSKYPEGNPDPEIPLLSGIGILFCGKCGSFMFKSGSNKNKYRYICGSKIVQGKPCGKKGFTSYQLEHTILQLIADHVWNNHQEDKTAWYESEIAKASESIDKLLKLATLTDSLEELAEQINSNKHKKVTLEREFHQYKINRSEIQTTGWEQFQHFDVHDTKNPNRKQIRLKVKQAIKRIDCYDIDGRHDHFEVTFVDETKQRIVIKFNRNRSPGVSYVESQTVNDHDLLKMQGLVLHSFIDELISPDKFAQHIKEKHEASLLNPTYITELENSTSRDKGNGMAIIVDGSTSKTYATVNGTKYEINSLEDLEKLSH

SEQ ID NO: 47252 - DNA, 50 bp, Klebsiella aerogenes; identical to SEQ ID NO: 9252
  source 1..50: mol_type = genomic DNA

SEQ ID NO: 47253 - DNA, 40 bp, Klebsiella aerogenes; identical to SEQ ID NO: 47243
  source 1..40: mol_type = genomic DNA

SEQ ID NO: 47254 - DNA, 50 bp, Klebsiella aerogenes; identical to SEQ ID NO: 9252
  source 1..50: mol_type = genomic DNA

SEQ ID NO: 47255 - DNA, 40 bp, Klebsiella aerogenes; identical to SEQ ID NO: 47245
  source 1..40: mol_type = genomic DNA

SEQ ID NO: 47256 - protein, 518 aa, Azotobacter vinelandii
MRVAIYARYSSDKQAETSIADQVAICQARALREGWQVVFSHSDNAVSGSTAVGSRPGGAALLADALAGRFDVLLLEGLDRLSRDQVEQERIVRRLEHRDIRIVGLADGYDSQHAGRKVMRGVRGLINELYLDDLRHKTQRGMHGQVDRGYIAGGKCYGYRIMREEGGSRYEIDEAQAHWVRWIFEQAASGRAFRGIVYELNERAVPSPRDSSWTLSAIYGSPVKGSGLLNNCLYVGRYIWNRSQWLKDPDTGRRQRVDRPRSEWRETAVPELRIVPDELWLRVRDRIDEGRDEFGRKRSQRPPGTLLGGLMRCPYCGGPMIALNQLYYGCNVGHDRGPTVCRGFRIRRDLAERRLVTAVREDLLSSAAAEEFERAFLEQVAMLAGQDSAMTAMQRRVDELAAEVGRLVEAIAVVGVSSALAARLQAAEREQAGLMREIELMSKANADSPDIRGVFRRLLINLGDALRRDAVQGRAALAEIIERVDIELRGDEVWGHIATGPALQIAVGASCYNDGCGG

SEQ ID NO: 47257 - DNA, 50 bp, Azotobacter vinelandii
  source 1..50: mol_type = genomic DNA
agttgctataacgatggttgcgggggcccgctttgtacgttatcgatacg

SEQ ID NO: 47258 - DNA, 40 bp, Azotobacter vinelandii
  source 1..40: mol_type = genomic DNA
cgtcgtatttggttgcgggggctggatttgaaccaacgac

SEQ ID NO: 47259 - DNA, 50 bp, Azotobacter vinelandii
  source 1..50: mol_type = genomic DNA
agttgctataacgatggttgcgggatcccgctttgtacgttatcgatacg

SEQ ID NO: 47260 - DNA, 40 bp, Azotobacter vinelandii
  source 1..40: mol_type = genomic DNA
cgtagtgtttgctggagtgatctgaattttaaccaaaaac

SEQ ID NO: 47261 - protein, 562 aa, Pseudomonas panacis
MPKVFSYVRFSSAKQSTGDSKARQLKSAKAFADEHGYELADPKDYLFFDAGRSAYKGRHLDDTGELARFLAFVEDGTVPTGSILVIESLDRLSRERVRDALPRFLDLLAKGINVYTSTDRRLYTSDYNEIDLIVSIITMSRAHEESATKGSRVSSAWQNKHKEARETGKPLGKLRPLWLDLTPDGYVLNPDHAQVVQRIFDLSAKGYGSRVIAATLNQDGIPTFSADRKNSSGLWGFSTIRHILESRTTLGEYQPHTFIDGVRTPDGEPIKSYFPPVVTEEQFYLAAAARASRRLHKVTKVTKNFNVLAGIFFCQKCGGAMHLQGFKNRKYFKCANKQKGMCDSGVVGAERSELVFQEVLAKIDSLSLVRSSSGSLTQKIQVMDGRVEELRAKQANAESSHQEFPSRITAKLLQQIEIGLEALNAEREALAQNLATDQVVSKSDFFERLDLTSYEGRAAANNLVKRLGVRIGVTKLERTNECYAVSIEGNVSFLIYHREAALTIRSVDSNILDKQVMHGEITQDQRVRLEQIREMGDVQGPTSLVRALFNWEHVVASKVDNG

SEQ ID NO: 47262 - DNA, 50 bp, Pseudomonas panacis
  source 1..50: mol_type = genomic DNA
agtagtgaattgttgtacaacttcaagaagtgctgccacaattacctaca

SEQ ID NO: 47263 - DNA, 40 bp, Pseudomonas panacis
  source 1..40: mol_type = genomic DNA
cggcagtgggcaaaaattcaagaagtgttgttccagctat

SEQ ID NO: 47264 - DNA, 50 bp, Pseudomonas panacis
  source 1..50: mol_type = genomic DNA
agtagtgaattgttgtacaacttcaggaagtgctgccacaattacctaca

SEQ ID NO: 47265 - DNA, 40 bp, Pseudomonas panacis
  source 1..40: mol_type = genomic DNA
ttgcagtgggcagaaaaccagcaagtgtttctccaattat

SEQ ID NO: 47266 - protein, 458 aa, Blautia wexlerae
MAGIKEEKKIYLVGIYCRLSKDDGTDNESASIATQKSILTDYVKKQGWHIAKTYVDDGYSGTNFQRPSFQNMIKDIESGLINCVITKDLSRLGRNYLDCGLYLEVFFPEHNVRYIAVNDGVDTLNKSAMDITPFRNILNEMYAADISVKIKSAYRARFQQGKFMGTTAPYGYIKDPADHNHLLIDDKVAHVVKEIFDLALKGNGVAKICRHLNKQHILRPAAYAAERGETGFERHFEGNEDKRYIWSGNSVRSILRSPIYAGNLVGYKRIAANMKSKKRPSKLPEEWEVIPNTHEGIVTQEEFDIVQQLITSRRLPQNKGGFVNIFAGVIKCVDCGCALRAMNVHRRKRPEIIDCVQYSCNNYARNGRSECSAHNIEARDLFNAVLADINCFADMAVNDEKAVRAIEKRLTETDQSRAKALEKERKKLNKRLAELDRLFSSLSTRIRSWSVLPSGILR

SEQ ID NO: 47267 - DNA, 50 bp, Blautia wexlerae; identical to SEQ ID NO: 11112
  source 1..50: mol_type = genomic DNA

SEQ ID NO: 47268 - DNA, 40 bp, Blautia wexlerae
  source 1..40: mol_type = genomic DNA
tgtgccttggcgtccttctgacattgaacagcaggagggg

SEQ ID NO: 47269 - DNA, 50 bp, Blautia wexlerae; identical to SEQ ID NO: 13229
  source 1..50: mol_type = genomic DNA

SEQ ID NO: 47270 - DNA, 40 bp, Blautia wexlerae
  source 1..40: mol_type = genomic DNA
tttggctctgtttcctcctggcatttatcagctggagggg

SEQ ID NO: 47271 - protein, 522 aa, Clostridium symbiosum
MNTKSKVAIYCRLSEEDRNKQHETDDSNSIQNQKSMLIQYVLEQGWEVYNIYSDDDYTGSDRRRPEFNKLLNDAEHRKFDIILCKTQSRFTRELELVEKYIHGLFPIWGIRFISIVDNADTANKGNKKSRQINGLVNEWYLEDMSENIRSVLTDRRKNGFHIGAFALYGYKKDPEQKGHLIIDEKAAAVVREVFTLFSQGYGKTAIARMLNDRGIPNPTEYKRLHGLRYKQPTRKNSTLWKYFAISDMLTNEIYIGNMVQGKYGSVSYKTKQNKPRPKEEWYRVEGTHEPIIDRELWDKVQSMVAEKAKPFTVGTIGLFARKARCMNCGYTMRSNKQTDGRHYLQCSNRHVAKDACIGSFISVKKLEQAVISELNKLSQEYLDKDELEQNVEFHSNVKEKKTSLETQLTTYQKKIEEDAKVIRELYLDKVKGILSENDFLNLSKDFTNDRERLEKLVIETQKQLDVIERKIQTGDNRRQLIEQYTNLEHLDRETVETLIDYILVGKRIPGTRNVPIEIHWNF

SEQ ID NO: 47272 - DNA, 50 bp, Clostridium symbiosum
  source 1..50: mol_type = genomic DNA
tgttgcacatacgcagtcgtaccatctggcacgaccttgtaagtacaaca

SEQ ID NO: 47273 - DNA, 40 bp, Clostridium symbiosum
  source 1..40: mol_type = genomic DNA
agtggatcttgccttttgttcagccgccatatcctcaaag

SEQ ID NO: 47274 - DNA, 50 bp, Clostridium symbiosum
  source 1..50: mol_type = genomic DNA
tgttgcacatacgcagtcgtaccaagtggcacgaccttgtaagtacaaca

SEQ ID NO: 47275 - DNA, 40 bp, Clostridium symbiosum
  source 1..40: mol_type = genomic DNA
agtggatctttccttttccaggccctccaaatccctgaag

SEQ ID NO: 47276 - protein, 551 aa, Ruminococcus sp; identical to SEQ ID NO: 41831

SEQ ID NO: 47277 - DNA, 50 bp, Ruminococcus sp; identical to SEQ ID NO: 15517
  source 1..50: mol_type = genomic DNA

SEQ ID NO: 47278 - DNA, 40 bp, Ruminococcus sp
  source 1..40: mol_type = genomic DNA
taacatcggtatttccgtacagaaaggcaacactgagctt

SEQ ID NO: 47279 - DNA, 50 bp, Ruminococcus sp; identical to SEQ ID NO: 15517
  source 1..50: mol_type = genomic DNA

SEQ ID NO: 47280 - DNA, 40 bp, Ruminococcus sp
  source 1..40: mol_type = genomic DNA
gaacagcgttattgaacttcagaaagagaacactgagctt

SEQ ID NO: 47281 - protein, 528 aa, Sphingobium xenophagum
MRTVIYARFSKESQNPRSTADQISLCRKRAEQEGWTIVGTFEDAAISGAAGIGEDQRPGLNAMMRMVEGGGVDQVLAESTDRIARHVADAHNLRERMEFAGARLFTLFDGTVTPMVSLVKGFMDAQFRTDLAQRVRRGQIGTVQQGRASGGIPYGYVQANRLDEKGGLVRGLRDIDPEKAQIVQRIFTEYAGGKSPFAIVSDLNRDGIPGPRGKLWYSTSLHGEKNHKRGILRNEIYIGVLTYGRSRQVVNPQTRRRLMRYNGEEEVMRVPVPAMRIIDDDLWHRVQAMLEEKSTTQPHRARRPKHILSQLATCGVCGADFVRTTGFHWGCSVRRYGGACDNNRLIRTDDFERRVLADLKTGMLAPDVVSAYVREYHRDFARASADLGRDRARIERKLEETERRKERLLKAFADGGSEFEEIRDMLTSARKTVDQLSRELANMDAVPTVLTLHPHMEEVYRRQVEDLEQALAAPEAKLEAIPRLRAMIARIIVSPNPEKKRGVIVEVVRQMDEILAMATRTDKAAQLR

SEQ ID NO: 47282 - DNA, 50 bp, Sphingobium xenophagum
  source 1..50: mol_type = genomic DNA
aattacgctaatgcccgatgagtttccgcacatcggctgttagcggaatt

SEQ ID NO: 47283 - DNA, 40 bp, Sphingobium xenophagum
  source 1..40: mol_type = genomic DNA
cagatatttcccatggctttctgcgaactcgtcgcaatag

SEQ ID NO: 47284 - DNA, 50 bp, Sphingobium xenophagum
  source 1..50: mol_type = genomic DNA
aattacgctaatgcccgatgagttcccgcacatcggctgttagcggaatt

SEQ ID NO: 47285 - DNA, 40 bp, Sphingobium xenophagum
  source 1..40: mol_type = genomic DNA
catttctttctctttgcttcctgcgtactcgtccccacag

SEQ ID NO: 47286 - protein, 609 aa, Vibrio alfacsensis
MKKAYSYIRYSSPQQAKGDSFRRQLSATQAYCNANGYVLDEEISVYQELGVSGFKGDQENLKRFINDCVSGRIKKGSLLIVENLDRLSRQTINVALRQFLEILEYVDIYTLQDEKYYSSDIAHSDNQLLDIMTSLIVMSRAYNESATKQKRLKDKWDEKRKNINSKKLTTVCPHWLTLSDDWSKFDIKPDRVRIIEKIFELCLSGRGFNQILRFLNSDLENYPTPSTKSKVWARTTVARILSDRRVIGEFQPYIGDHSNREPFGEPIPDYFPQVIDEKTFLDAQISLKQRQIGAGKTNGEHFSNVFRGFLFCGTCGSKIEYVNKGKPPKSGSYLTCTNAKRGGECSQSKHFRYDPIEHMLIHLSTVNGFIPKPEQPSDIKRQLEKVEILRETTNNKLSVLLEQDFTLPIISAKVKELSAQIVDFDNQITSFKDKLDDTRHIYEYDQLYADTIIEPDNLKRYTNRTIFHNYLTKQIKKAYIFTEGRCALMLFEMVDSSLHSVILDEKYNFGGVSMPNGQDAFKRLNGDSLSVVDENLWKIQKQYLDFIQSLKEISLNDEDKELVSASLITISKTLSKIISDYKHVKLFDVVMDELLLLESILIKCQKHLI

SEQ ID NO: 47287 - DNA, 50 bp, Vibrio alfacsensis
  source 1..50: mol_type = genomic DNA
ctatggtgtaattgacacgagagaatttaatcgtgataatatcaccacaa

SEQ ID NO: 47288 - DNA, 40 bp, Vibrio alfacsensis
  source 1..40: mol_type = genomic DNA
agccgggggctttgacgatatcttccttggtacgccagag

SEQ ID NO: 47289 - DNA, 50 bp, Vibrio alfacsensis; identical to SEQ ID NO: 47287
  source 1..50: mol_type = genomic DNA

SEQ ID NO: 47290 - DNA, 40 bp, Vibrio alfacsensis
  source 1..40: mol_type = genomic DNA
tgcagggcgctttgacgttatctcccttggttctccatca

SEQ ID NO: 47291 - protein, 611 aa, Vibrio jasicida
MEMKKAYSYIRYSSPQQAKGDSFRRQLSATQAYCSANGYELDEEVSVYQELGVSGFKGDQENLKRFINDCISGRIKKGSLLIVENLDRLSRQTINVALRQFLEILEYVDIYTLQDEKYYSSDVAHSDNQLLDIMTSLIVMSRAYNESATKQKRLKDKWNEKRENINSKKLTTVCPHWLTLNKDWSRFDVKQDRVRIIEKIFELCLSGRGFNQILRFLNSDLENYPTPSKKSKVWARTTVARILSDRRVIGEFQPYIGDNSNREPFGDPIPDYFPPIIDENIFLNAQISLKQRQIGAGKTNGEHFSNVFRGFLYCGTCGSKIEYVNKGTPPKSNSYLTCTNAKRGGECPQSKHFRYTPIEHMLIHLSTVNGFIPKPEQPSDIKRQLEQVEALRDAANNKLSVLLEQDFSLPIISAKVKELSCQIVDFDNQITSFQDKLNSNMQDYEYEQLYFDTVLEPDNLKKYTNRTIFHNYLTKKIKKALLFSEGRCALLFFEMTDSTLHSVILDEKYNFGGVSMSDGKDAFKRLNGNGLTVVDENLWKIQKQFLDFVQSSKEISLTIEDKEIVSSCLISISKTLSKIISNYKHTKLFDLVMDELLLLESVLSKYQKKLI

SEQ ID NO: 47292 - DNA, 50 bp, Vibrio jasicida
  source 1..50: mol_type = genomic DNA
tattggtgatattgacctaacataattttattgtgataatatcaccataa

SEQ ID NO: 47293 - DNA, 40 bp, Vibrio jasicida
  source 1..40: mol_type = genomic DNA
ttccggagtacctaggaagatatcgtcaaagccccccgct

SEQ ID NO: 47294 - DNA, 50 bp, Vibrio jasicida; identical to SEQ ID NO: 47292
  source 1..50: mol_type = genomic DNA

SEQ ID NO: 47295 - DNA, 40 bp, Vibrio jasicida
  source 1..40: mol_type = genomic DNA
tgatggagaaccaagggagataacgtcaaagcgccctgca

SEQ ID NO: 47296 - protein, 560 aa, Flavonifractor plautii
MARRSRAVVETTRPKYRVWRIAIYIRLSKEDMRCLDESESVTNQRQIIEDHIAGFNDGDEYIIVDEYVDDGISGTTDDEREDFQRMLSDIKRGRVNCVIVKDLARSFRNYSDQGYYLDDWFPRYNVRFISLYHQPLDSYKEPQNMRSIAVPIQGVLNENHCAETSDKVREVFDMKRRNGEHIGSFAAYGYVKDPNDKNALVIDEEAAAIVRDIYNMFLDGMSKNAIVRYLNEHGILSPAAYKRERLGLKYQNPSVDPAKPPLWCAMSVTTILKNRIYCGDMVQGRYRMKSYKVHVQEVVPEDEWYIVENTHEAIIDRETFEKVQRLLIRDTRTGPQQKKLYLFSGFLKCADCGKAMTRSKVGNVVYYYCRTYKDQSKTACTKHTIKHDRLEAAVLYAIQQQVYLAVDYTKTIERINRAPLVKSQSKKLMDAIEQKERELSKITRYKQAIYQDWKDGEISHSDYRHMKEDYERQAEALEEVIGKLRAEQAELENGIDTENPFLAAFRQYQNIDKLTRDILIELVDHIKIHEGGYISIVFRFADELRRIQEFIEVNTHNEAV

SEQ ID NO: 47297 - DNA, 50 bp, Flavonifractor plautii
  source 1..50: mol_type = genomic DNA
acctttcctaaataaagcgcccccgtcggggcgatgttaaaaggaaagtg

SEQ ID NO: 47298 - DNA, 40 bp, Flavonifractor plautii
  source 1..40: mol_type = genomic DNA
agtgggaccggacgcccccgtgggaccggttgcccctgcc

SEQ ID NO: 47299 - DNA, 50 bp, Flavonifractor plautii
  source 1..50: mol_type = genomic DNA
acctttcctaaataaagcgcccccgccggggcgatgttaaaaggaaagtg

SEQ ID NO: 47300 - DNA, 40 bp, Flavonifractor plautii
  source 1..40: mol_type = genomic DNA
cgtggggccgggagtccgcgcggccccggcagcccctgcc

SEQ ID NO: 47301 - protein, 525 aa, Brevibacterium linens
MSMNTTTTNTNTTTTNRLLELPLLTPELRTAVERLREMAEDDWTASILYGRASQDRHKLMRSIDDQLTDMVGWCLPIEWYPEAIVRDADRSASQWRRREREGFDEAMALIESGRYGGFASWEPSRAGRDMEVYVQLRKACQRAGVLYLTHGRVYDFSRSDDTFMMGFEFLRAEADANTMRERQLRTVKLNADKGRPHGRLPYGYRRVYDQHTGVLLRQEPDPHTGQIVRDAARDVLAGKSMYSIAMRLQDAGEPTPKKPWAESPRGWDTYTVRQVLQNPTIAGKRVYRGEVIGQAQWEALIEWEDFQKIQRLFADPGRLVKGGGGMAAKTLMVHIARCHYCGRPLKRATMRKKERTPAVKYQCQFRGCYKTMISQPGLDAYVEQVVLEWFQNPTNLAWLTGDDDGDWLKVAEAAEQKRAALQARLDEVIAQYAAGSLNLDTLTKLEAALRPQIAEAEQALIPPVTDERVRALVTAEDVPAAWAGLPLLERRKIIKATFNVRIQQTQNRGQNAFEPERVLIEPRAL

SEQ ID NO: 47302 - DNA, 50 bp, Brevibacterium linens; identical to SEQ ID NO: 35987
  source 1..50: mol_type = genomic DNA

SEQ ID NO: 47303 - DNA, 40 bp, Brevibacterium linens
  source 1..40: mol_type = genomic DNA
gtcgagacctgtggtcggttcgtcgaagagcagcagctgc

SEQ ID NO: 47304 - DNA, 50 bp, Brevibacterium linens
  source 1..50: mol_type = genomic DNA
gtatctcccttgagcatcttcggcgggtcgatcaagttcaaggggcagag

SEQ ID NO: 47305 - DNA, 40 bp, Brevibacterium linens
  source 1..40: mol_type = genomic DNA
gtggaagcctgtggtgggaggggacagcagcagcagctgc

SEQ ID NO: 47306 - protein, 522 aa, Anaerobutyricum hallii; identical to SEQ ID NO: 36056

SEQ ID NO: 47307 - DNA, 50 bp, Anaerobutyricum hallii; identical to SEQ ID NO: 36057
  source 1..50: mol_type = genomic DNA

SEQ ID NO: 47308 - DNA, 40 bp, Anaerobutyricum hallii
  source 1..40: mol_type = genomic DNA
ggtagtgcgggccttctgttctgcagccatatcctccatc

SEQ ID NO: 47309 - DNA, 50 bp, Anaerobutyricum hallii
  source 1..50: mol_type = genomic DNA
tgttgcacttatgcagttgcaccaagtggggcgaccttgtaagtacaaca

SEQ ID NO: 47310 - DNA, 40 bp, Anaerobutyricum hallii
  source 1..40: mol_type = genomic DNA
tgttttggaggccctctgtagtgcatcagtatcccccatc

SEQ ID NO: 47311 - protein, 503 aa, Fusicatenibacter saccharivorans
MNNRIDAIYARQSVDKKDSISIESQIEFCKYELKGGNCKEYKDKGYSGKNTERPQFQQLMRDIESGLVRKVVVYKLDRISRSILDFAKMMDFFQKYEVEFVSSTEKFDTSTPMGRAMLNICIVFAQLERETIQKRVQDAWHSRCQRGFKMGGKTPYGFRTEPYVMDGVRTKKLVIEPTEAAFVRQMYEMYADPQVSLHDITKKLTADGMRTYHGRPLSRATLSVILRNPIYVMADLDIYEFYKSQGTDIYNDAADFAGTNGCYYYQGKGNTEDKHKHLQGQTLVLAPHEGFIPSELWLKCRKKLLASHTYQPARKARNTWMAGKIKCGKCGYALMSAHSNGILYLRCTVHADSKACPGCGCVKLHELEAVVYRAMVKKLKDFKTLTGRNKAAKISPKLTAKRLELAQVESEIEKLLDTLTGASPVLLSYANSKIEELDARRQSIANEIAKLSADAVPMEKMESISGYLDDWENVSFEDKRQVVDALITVIRATNEKVEIEWKI

SEQ ID NO: 47312 - DNA, 50 bp, Fusicatenibacter saccharivorans
  source 1..50: mol_type = genomic DNA
ttttgtgctcttgtctataatagtgaaacattatggacaaggacaaaaaa

SEQ ID NO: 47313 - DNA, 40 bp, Fusicatenibacter saccharivorans
  source 1..40: mol_type = genomic DNA
gcaggtagggttttacacggaaatgctgttccctcaaaag

SEQ ID NO: 47314 - DNA, 50 bp, Fusicatenibacter saccharivorans
  source 1..50: mol_type = genomic DNA
ttttgtgctcttgtctataatagttcaacattatggacaaggacaaaaaa

SEQ ID NO: 47315 - DNA, 40 bp, Fusicatenibacter saccharivorans
  source 1..40: mol_type = genomic DNA
gaaggtagcattttaaacatcaattcagtcccatcaaaaa

SEQ ID NO: 47316 - protein, 479 aa, Streptomyces hygroscopicus
MARPTRVGIYVRISKDRKGQELGIQRQEKACRELCERMGWGVLKVYPENDTSASTTSKRRRPAYTEMLRDAREGLIDGIVVYSIDRLTRRIAELTHFLEEQKEHGFAFATTEGEDTATANGRMILTIKGAVAQQETERMSERVNNSLLQRREQGKPHAGGSRLFGFKEGSNLQEVEPGEVELIRLGYQILLDRGTPGDVARAWNERGARTPEAGTAWDIQKVKRVYRSERIGGIVSYKGQDIGDSIYPHPLTREEWENVQTILDSRATPARKGSGKRKHLYSGFLKCGHCGSTMRIQWATIQGRTFRRTACHSSQVGANGERGCGKVIRRLDWIEARINEVVEAALAKRKPQAQAAPSEDLSGEIKILEGRIRALRNRWKDGGMDDEDYYDSLTHLRSDLQTLRTREAASVVRETRTETDALAVWKDEDMQNLERRRAIVAGVIDHVEVFSVGRGRKKPPELDSIRIWPVGAEPDGSKG

SEQ ID NO: 47317 - DNA, 50 bp, Streptomyces hygroscopicus
  source 1..50: mol_type = genomic DNA
gtgcatactgattgtccagcaacgttcgtaaccgctccctgagtatgtac

SEQ ID NO: 47318 - DNA, 40 bp, Streptomyces hygroscopicus
  source 1..40: mol_type = genomic DNA
cagcgactgaccggccacgttggtggcggtcctcatcatg

SEQ ID NO: 47319 - DNA, 50 bp, Streptomyces hygroscopicus
  source 1..50: mol_type = genomic DNA
gtgcatactgattgtccagcaacggccgtaaccgctccctgagtatgtac

SEQ ID NO: 47320 - DNA, 40 bp, Streptomyces hygroscopicus
  source 1..40: mol_type = genomic DNA
cggtggctgaatagccacggcgctgccggtcttcatcacg

SEQ ID NO: 47321 - protein, 593 aa, Intestinimonas butyriciproducens
MAHSTKITALYERLSRDDELQGPSNSILNQQAFLEDYAKRNGFTNVRHFTDDGVSGTTFDREGFKAMIAEVEAGNVATIIVKDMSRFGRDYLKVGFYTDVMFRDKGVRFIAVNNGIDSDKQGDNDFTPFLNIMNEFYARDSSRKIQAIFKARMQDGKRVSPSVPYGYRRDPQDKQHLIVDEEAAAVVRRIFQMVIEGYGVQGIANALTADRVLIPSAYAKLHNPENDHSKGFHDPYRWSSTAVGYILEKQEYMGHTVLGKTVSENYKTKKRRKAKPEELMIFHNTHEAIVDEETWQLAHRLKKTIRKPNYPDRPANPLTGLLYCADCGCKMTHHQPSPTKKKVFDADDYYGCGSYRQLTRDCTMHYIKTSTVEKLILTAIREVSAYVREDEKAFIRIVRDAASAGQEQTAREQKKRLHKAEKRIAELDELIKKLYEGNATGKIPDKHFNRLLVEYDTEQSALEQEAAELKEGITAQAEDGMRAQRFVSLVRRYTSFDELTAPMLNEFIEKVVVHEADKSTGDRRQKVDIYFNFIGCFVPPRPEVVLTAEEEAKAQKALAARNREREQNKLRMRRVREAQRAAKEAEKTSSPAG

SEQ ID NO: 47322 - DNA, 50 bp, Intestinimonas butyriciproducens
  source 1..50: mol_type = genomic DNA
ctccctccttgacatactgaccgaaaagggataatatcgtaagggtggag

SEQ ID NO: 47323 - DNA, 40 bp, Intestinimonas butyriciproducens
  source 1..40: mol_type = genomic DNA
ttcctcggttatcgtgactaaagaagcggtagacgcagta

SEQ ID NO: 47324 - DNA, 50 bp, Intestinimonas butyriciproducens
  source 1..50: mol_type = genomic DNA
ctccctccttgacatactgaccgatgagggataatatcgtaagggtggag

SEQ ID NO: 47325 - DNA, 40 bp, Intestinimonas butyriciproducens
  source 1..40: mol_type = genomic DNA
ttcctgggtgaggttgacatgagaatcggtagactaagga

SEQ ID NO: 47326 - protein, 500 aa, Bacillus amyloliquefaciens
MIAIYVRVSTEEQAIKGSSIDSQIEACIKKAGTKDVLKYADEGFSGELLERPALNRLREDASKGLISQVICYDPDRLSRKLMNQLIIDDELRKRNIPLIFVNGEYANSPEGQLFFAMRGAISEFEKAKIKERTSSGRLQKMKKGMIIKDSKLYGYKFVKEKRTLEIFEEEAKIIRMIFNYFTDHKSPFFGRVNGIALHLTQMGVKTKKGAKVWHRQVVRQILMNSSYKGEHKQYKYDTEGSYVSKQAGNKSIIKIRPEEEQITVAIPAIVPAEQWDYAQELLGQSKRKHLSISPHNYLLSGLVRCAKCGNTMTGKKRKSHGKDYYVYTCRKNYSGAKDRGCGKEMSENKLNRHVWNEIFKFITNPQKYASFKEIEQSNHLSDELELIQKEIEKTKKGRKRLLTLISLSDDDDLDIDEIKAQIIELQKKQNQLTEKCSEIQSKMKVLDDTSSSENALKRAIDYFQSIGADNLTLEDKKTIVNFIVKEVTVVDSDTVYIETY

SEQ ID NO: 47327 - DNA, 50 bp, Bacillus amyloliquefaciens; identical to SEQ ID NO: 12727
  source 1..50: mol_type = genomic DNA

SEQ ID NO: 47328 - DNA, 40 bp, Bacillus amyloliquefaciens
  source 1..40: mol_type = genomic DNA
gcgcagatgcattaaaatctcattctcaatacatcgtgcg

SEQ ID NO: 47329 - DNA, 50 bp, Bacillus amyloliquefaciens
  source 1..50: mol_type = genomic DNA
caccccccttttgtaattacaatcacattattaattacaaaaggggggtg

SEQ ID NO: 47330 - DNA, 40 bp, Bacillus amyloliquefaciens
  source 1..40: mol_type = genomic DNA
aggcagaagtatcaaaatcacattgtcaaaagagcatgcg

SEQ ID NO: 47331 - protein, 500 aa, Bacillus amyloliquefaciens
MIAIYVRVSTEEQAIKGSSIDSQIEACIKKAGTKDVLKYADEGFSGELLERPALNRLREDASKGLISQVICYDPDRLSRKLMNQLIIDDELRKRNIPLIFVNGEYANSPEGQLFFAMRGAISEFEKAKIKERTSSGRLQKIKKGMIIKDSKLYGYKFFKEKRTLEILEEEAKIIRMIFNYFTDHKSPFFGRVNGIALHLTQMGVKTKKGAKVWHRQVVRQILMNSSYKGEHRQYKYDTEGSYVSKQAGNKSIIKIRPEEEQITVAIPAIVPAEQWDYAQELLGQSKRKHLSISPHNYLLSGLVRCGKCGNTMTGKKRKSHGKDYYVYTCRKNYSGAKDRGCGKEMSENKLNRHVWGEIFKFITNPQKYASFKEIEQSNHLSDELELILKEIEKTKKGRKRLLTLISLSDDDDLDIDEIKVQIIELQKKQNQLTEKCNEIQSKMKVLDDTSSSENALKRAIDYFQSIGADNLTLDDKKTIVNFIVKEVTVVDSDTVYIETY

SEQ ID NO: 47332 - DNA, 50 bp, Bacillus amyloliquefaciens; identical to SEQ ID NO: 12727
  source 1..50: mol_type = genomic DNA

SEQ ID NO: 47333 - DNA, 40 bp, Bacillus amyloliquefaciens; identical to SEQ ID NO: 47328
  source 1..40: mol_type = genomic DNA

SEQ ID NO: 47334 - DNA, 50 bp, Bacillus amyloliquefaciens; identical to SEQ ID NO: 47329
  source 1..50: mol_type = genomic DNA

SEQ ID NO: 47335 - DNA, 40 bp, Bacillus amyloliquefaciens; identical to SEQ ID NO: 47330
  source 1..40: mol_type = genomic DNA

SEQ ID NO: 47336 - protein, 428 aa, Blautia massiliensis
MHVRFIAINDNVDSMKYESGMPGIDVGFRNIINEHHSIDTSVKVKKTLLQRQKAGKYMGARAPYGYLKPDEDVTSLVINPETAPVVRMIFQKYLEGMNITQLARYLNEQKIMSPGQYKREVLKTGVKKTTEKYIWYPVTVRLILMTETYTGTMIGGKWKVASVGSNKHLKTKEEDWIVVEGTHEAIVSKETFDAVQKKLELNSRKKSKTHNNNYPLKGLVKCGGCGQKLQHVTRCNPHFKCPRKFNTANKDCVTDNLYDDEFNEMIFRAIKLFAKISDDAEPILELQKAELKSKVDEAAKNIRNSKDSISRYKHQKTELYMRYAMEEISEEEFTRKNDRLDKQIEKETLAIVQIEIEQSEAAERLFELPPDGRQCLTDLIEGNEQLTREIAVTFIRGIKVYNDKRIEIEWNFADELVKYVEQAQKICS

SEQ ID NO: 47337 - DNA, 50 bp, Blautia massiliensis; identical to SEQ ID NO: 39837
  source 1..50: mol_type = genomic DNA

SEQ ID NO: 47338 - DNA, 40 bp, Blautia massiliensis
  source 1..40: mol_type = genomic DNA
gatgaatattttaaacgggggaaagcatgcggacaatacg

SEQ ID NO: 47339 - DNA, 50 bp, Blautia massiliensis
  source 1..50: mol_type = genomic DNA
tgtgtcattagcttgacacaaggggatgcttgtgttattataatgacaca

SEQ ID NO: 47340 - DNA, 40 bp, Blautia massiliensis
  source 1..40: mol_type = genomic DNA
catgaatattataaaaggagaaatgcgtgcgcacaattga

SEQ ID NO: 47341 - protein, 535 aa, Blautia massiliensis
MSDGKCIVKYLRLSLEDEDMLDESNSITNQRIVIGQYIASKQEFKNAEVLEFKDDGYSGTNFERPGFQSMMELVRDGQVSTIIVKDLSRFGRNHIEVDTYLEQIFPFLNVRFIAINDNVDSMKYESGMPGIDVGFRNIINEHHSIDTSVKVKKTLLQRQKAGKYMGARAPYGYLKPDEDVTSLVINPETAPVVRMIFQKYLEGMNITQLARYLNEQKIMSPGQYKREVLKTGVKKTTEKYIWYPVTVRLILMTETYTGTTIGGKWKVASVGSNKHLKTKEEDWIVVEDTHEAIVSKETFDAVQKKLELNSRKKSKTHNNNYPLKGLVKCGGCGQKLQHVTRCNPHFKCPRKFNTANKDCVTDNLYDDEFNEMIFRAIKLFAQISDDAEQVLELQKAELKSKVDEAAKNIRNSKDSISIYKHQKTELYMRYAMEEISEEEFTRKNDRLDKQIEKETLAIAQIEIEQSEAAERLFELPPDGRQCLTDLIEGNEQLTREIAVTFIRGIKVYNDKRIEIEWNFADELVKYVEQAQKICS

SEQ ID NO: 47342 - DNA, 50 bp, Blautia massiliensis; identical to SEQ ID NO: 39837
  source 1..50: mol_type = genomic DNA

SEQ ID NO: 47343 - DNA, 40 bp, Blautia massiliensis; identical to SEQ ID NO: 47338
  source 1..40: mol_type = genomic DNA

SEQ ID NO: 47344 - DNA, 50 bp, Blautia massiliensis; identical to SEQ ID NO: 47339
  source 1..50: mol_type = genomic DNA

SEQ ID NO: 47345 - DNA, 40 bp, Blautia massiliensis; identical to SEQ ID NO: 47340
  source 1..40: mol_type = genomic DNA

SEQ ID NO: 47346 - protein, 650 aa, Clostridioides difficile
MNFNRPSFQELIKEVEAGNVATIIVKDMSRLGRNYLQVGFYTEVLFPQKDVRFLAINNSIDSNNASDNDFAPFLNIMNEWYAKDTSNKIKAVFDARMKDGKRCSGSIPYGYNRLATDKQTLVVDPVASEVVKRIFLLANEGKSPRAIAELLTEEKVLIPAAHAKEYHPEQYNGTKFSDPYTWGMSTIRAILSRQEYLGHTVLRKSVSTNFKLHKRKNTDEDEQYVFYNTHEPIISQELWDSVQKRKKRANRTAARGTHSNRLSGYLFCADCGRRMTLQTHYSKKDRSLQYSYRCGGYASRVNSCTAHSISADNVEALILSTVKRLSRFVLNDEEAFAKELQVLWNEKQTEKPKHNKSELQRFQKRYDELSKLIRGLYENLVSGLLPERQYKQLMKQYDDEQAELETKIEEMQKELTEEKANTVDIKHFISLIRKCKEPTEISDLMFAELIEKIVVYEAEGVGKARTQKVDIYFNYVGQVDIAYTEEELAEIKAQEEQIEMERLAKQREREKVYREKRKAKKLAENGGEIVKAKVCPHCQKEFVPTSNRQIFCSKDCCYQARQDQKKADREAEKGNHYYRQRVCAVCGSTYWPTHSQQKFCSEECQKQNHNEKSLEFYHKKQKEKSKCKDLLQTKEPVSSTNSSEIITIPA

SEQ ID NO: 47347 - DNA, 50 bp, Clostridioides difficile
  source 1..50: mol_type = genomic DNA
aatcatcttgacaaactcgttcccgagggctatactttagtaggacgata

SEQ ID NO: 47348 - DNA, 40 bp, Clostridioides difficile
  source 1..40: mol_type = genomic DNA
ctcctttgaactatctcctgaaggaacaggatatagggta

SEQ ID NO: 47349 - DNA, 50 bp, Clostridioides difficile
  source 1..50: mol_type = genomic DNA
aatcatcttgacaaactcgttcccacgggctatactttagtaggacgata

SEQ ID NO: 47350 - DNA, 40 bp, Clostridioides difficile
  source 1..40: mol_type = genomic DNA
caccctgaaaccatcccctacataaataggatatatggta

SEQ ID NO: 47351 - protein, 584 aa, Nocardia farcinica
MVSAYVGPGNDADDDLASELPSLPAPLKAGDRAVIYLRVSSPGQFKTDYDPEGISIPAQRVACQNKANQLGLTIVDEYIEPGRSATEMSKRVEFQKLLARIRNHQDVDYVIVYKLSRMARNRFDDAIVMADLRKRNVTLVSATESIDDSPVGQLMHGILATFNEYQSRESGADISYKMGQKARNGGTLGRARLGYLNIFDRFDGREIRTIGVDPERAPLVQLAFQLYATGDYTLDELSEELYDRGLRTRPTHRHPAQRVSKNKLSTMLRDRYYLGYVIYKGEEMQGRHEPLIDENLFDNVQEILESRTNAHERRRVHHHYLKGSLFCGRCQRTGTVGRMIIQRTTNRHGNEYLYFFCRNKQKGTCNAPHINVALVEDAVEAHYATIRFRSDFITSIRNQIAEAINAQETADRLLQKQLTTELQALDAQEENLIDLAADATLPQPKIKAKLRDIAHQRRRLTERLATTTEDLSSSARLIDAALTLLENPQELYRRCNEHQRRLFNQAIFQQLYIDDEQINGHRLHEPFGQLHAAQRAQAGTCGATRHKTSRDAPESGNSRMKGGVGVLLQGVHSAPGSSSDPMVE

SEQ ID NO: 47352 - DNA, 50 bp, Nocardia farcinica
  source 1..50: mol_type = genomic DNA
gggttctagtagtgaccctatggtggaggttaggggaccttactcgaaca

SEQ ID NO: 47353 - DNA, 40 bp, Nocardia farcinica
  source 1..40: mol_type = genomic DNA
tcgttgagaatcagatggtggagctaaggggaatcgaacc

SEQ ID NO: 47354 - DNA, 50 bp, Nocardia farcinica
  source 1..50: mol_type = genomic DNA
gggttctagtagtgaccctatggtaaaggttaggggaccttactcgaaca

SEQ ID NO: 47355 - DNA, 40 bp, Nocardia farcinica
  source 1..40: mol_type = genomic DNA
tctttgagaatcagagggcaatccttaggggatttggaca

SEQ ID NO: 47356 - protein, 591 aa, Tritonibacter mobilis
MHLLDGNMSDKPLAYSYLRISTDNQRHGSGIERQMKAGAAWAEANGYELAETISDIGLSAYTSTHAKKGGFGRFLAAIETGQVPAGSILIVESLDRLSRAKVTEAFTQLVGLLKHGIKIVTLVDNQVYTESSLNENFGQLFMSLGVLLRANDESETKSKRGKAAWNHRRQNAAKKKITKNAPAWLELSENRSEFVIKPDRAKTVQKIFELAAAGQGAYSITKYLNGNLKKHPGFGHSGNWADSYINKILNSEAVIGELQSYSGTGKNRVKVGDPIPNYYPRVISDDLYYLVQAGIKERKTGAAGRKGDYFSNLFSGLLECGNCGGTIFMRNKGKEPRGYRFLRCSNSLKGNGCNCPAWRYDEFERQFINFVKDISFAEVFSGKSADTQMLELRGRKAVELDKIAQAEQKYSAVVEQFTDANLPEMLKESLIKKSVELENEIGAAKEAVEIIEVELTKLSTSNVEADQSEFLESYEQLLSGDKDKLREVRFAMHSILRRNIDSISVHNGTYCEPWEEMPASLRAELADKGIISQNDIETYLSKPHGKRLRDKHDRHFLVHFKNGVRRRVGAEYTLLDVSKSDLALIEKFESK

SEQ ID NO: 47357 - DNA, 50 bp, Tritonibacter mobilis; identical to SEQ ID NO: 38782
  source 1..50: mol_type = genomic DNA

SEQ ID NO: 47358 - DNA, 40 bp, Tritonibacter mobilis
  source 1..40: mol_type = genomic DNA
gctgggccagaatggatttgaccaagcacgctggcctgct

SEQ ID NO: 47359 - DNA, 50 bp, Tritonibacter mobilis
  source 1..50: mol_type = genomic DNA
ggtattcaagttgaccacgggttcttgataccatatataaattgcatacc

SEQ ID NO: 47360 - DNA, 40 bp, Tritonibacter mobilis
  source 1..40: mol_type = genomic DNA
gcatggccaaaaaggatgtttccatccaagctgggctgtt

SEQ ID NO: 47361 - protein, 591 aa, Tritonibacter mobilis
MHLLDGNMSDKPLAYSYLRISTDNQRHGSGIERQMKAGAAWAEANGYELAETISDIGLSAYTSTHAKKGGFGRFLAAIETGQVPAGSILIVESLDRLSRAKVTEAFTQLVGLLKHGIKIVTLVDNQVYTESSLNENFGQLFMSLGVLLRANDESETKSKRGKAAWNHRRQNAATKKITKNAPAWLELSEDRSEFVIKPDRAKTVQKIFELAAAGQGAYSITKYLNANLSQHPGFGHSGNWADSYINKILNSEAVIGELQSYSGTGKNRVKVGDPIPNYYPRVISDELYHLVQAGIKERKTGAAGRKGDYFSNLFSGLLECGNCGGTIFMRNKGKEPRGYRFLRCSNSLKGNACNCPAWRYDEFESQFINFVKDISFAEVFSGKTADTQMVELRGRKAVELDKIAQAEQKYSALVEQFTDANLPEMLKESLIKKSVELENEIVAAKEAVETIDAELTKLSTSNVEADQNEFLESYEQLLSGDKDKLREVRFAMHSILRRNIDKISVHNGTYFEPWEEMPASLRAELADKGIISQNDIEGYLSKPHGKRLRDKHDRHFVVHFKNGVRRRVGAEYSLLDVSKNDLALIEKFESK

SEQ ID NO: 47362 - DNA, 50 bp, Tritonibacter mobilis; identical to SEQ ID NO: 38782
  source 1..50: mol_type = genomic DNA

SEQ ID NO: 47363 - DNA, 40 bp, Tritonibacter mobilis; identical to SEQ ID NO: 47358
  source 1..40: mol_type = genomic DNA

SEQ ID NO: 47364 - DNA, 50 bp, Tritonibacter mobilis; identical to SEQ ID NO: 47359
  source 1..50: mol_type = genomic DNA

SEQ ID NO: 47365 - DNA, 40 bp, Tritonibacter mobilis; identical to SEQ ID NO: 47360
  source 1..40: mol_type = genomic DNA

SEQ ID NO: 47366 - protein, 509 aa, Clostridium sporosphaeroides
MLARKSRKNFIENKTEENNLLRAAGYIRLSVNKADQPSDSIENQKKIIGGYSETNFDLQLEKFYIDDKASGRDFNRPAFNEMIEDIRAGKINCVIVKDLSRLGRSLIDVGYYVQMFFPGQKIRFISIANGIDTLDGMRNIIFGKLPGDHISLTSLMDEQYAIDISKKTQSVLKNYIEEGKHVAPRAPYGYRKSDCDYHTLVPDAESAIVVKKIFSMAFVRISINEIVRQLNAKGIPTPISYAVSQGLKGNYNRGNGLWNSRTVKDILLNRTYVGDLEQGKDKHVVQDTHEPLVCRDVFDVVQQLISEGASISPNKTNAPCEDNILRGKVICGCCGRKMQRRKGSGNANWHFFTCISNNRLGAGHCTGMYIRESDIMDAIFREVKSYIHDNEAAFITYVDRKSVLEVNEKQLARQINEQREVSRSRYENFIRGIVDKEDYTFERNKRETLHTELQNINNQIKWQNEKYEQYLLFCNALNDKEKIGQLVADCILNVSVLANGQINVKWRDS

SEQ ID NO: 47367 - DNA, 50 bp, Clostridium sporosphaeroides
  source 1..50: mol_type = genomic DNA
cggtgtgtgcttgacatacgggtgcctaagaccgtgtaagcggaatttcg

SEQ ID NO: 47368 - DNA, 40 bp, Clostridium sporosphaeroides
  source 1..40: mol_type = genomic DNA
tattggttgctgccgtatgccgtaaatcatggaaacgaat

SEQ ID NO: 47369 - DNA, 50 bp, Clostridium sporosphaeroides
  source 1..50: mol_type = genomic DNA
cggtgtgtgcttgacatacgggtgtgtaagaccgtgtaagcggaatttcg

SEQ ID NO: 47370 - DNA, 40 bp, Clostridium sporosphaeroides
  source 1..40: mol_type = genomic DNA
tcttggtggctgccatatgtggtacttcttcaaaaagagt

SEQ ID NO: 47371 - protein, 544 aa, Streptococcus suis
MKQLNIQSSSKITALYCRLSRDDELQGTSNSILNQKMMLEKYARDNNFTNLEFFIDDGYSGTNFNRPDWSRLQSLIDEGKIGCIIVKDMSRLGRDYLRVGYYTDIVFPEADIRFIAINNGIDSNESTENDLTPFINIINEFYAKDTSKKIRAVFKAKGESGKPLATIPPYGYLKDKEDKYKWVIDEEASKVVKKIFQLCVQGYGPSQIASELIKEGIPTPTEHFDKLGINVSSPLSEIKGNWQPKTISLILEKMEYLGHTVNFKTYKKSYKSKKKLDNPKEKWQIFENTHEAIIDQETFDIVQRIRQGRRVRNNLGEMPALSGMLYCADCGAKLYQVRGKGWEHEKEYFVCASYRKHKGLCTSHQIKNVQVEELLLHELKKITEYARQYEDDFVKLVQSKTQNELNKSLKESKKDLVHVKERINKLDTIIQRLYEDMVEGKLSEDRFQKLSSNYETEQCELEKKATMLEKIIHDTEQTTLNTTAFLKQVREHTTINKLTPEIIRMFVDKIIVEKPEKIEGTRTKKQTIWIYWNYIGILDIEKTA

SEQ ID NO: 47372 - DNA, 50 bp, Streptococcus suis; identical to SEQ ID NO: 2302
  source 1..50: mol_type = genomic DNA

SEQ ID NO: 47373 - DNA, 40 bp, Streptococcus suis
  source 1..40: mol_type = genomic DNA
tatcaaaaaaacgcggacgttagtctgcgtttttttttag

SEQ ID NO: 47374 - DNA, 50 bp, Streptococcus suis; identical to SEQ ID NO: 2304
  source 1..50: mol_type = genomic DNA

SEQ ID NO: 47375 - DNA, 40 bp, Streptococcus suis
  source 1..40: mol_type = genomic DNA
tttcaaaaaagagagaaagagagactacgtttctttgtag

SEQ ID NO: 47376 - protein, 599 aa, Eubacterium rectale; identical to SEQ ID NO: 38771

SEQ ID NO: 47377 - DNA, 50 bp, Eubacterium rectale; identical to SEQ ID NO: 36102
  source 1..50: mol_type = genomic DNA

SEQ ID NO: 47378 - DNA, 40 bp, Eubacterium rectale
  source 1..40: mol_type = genomic DNA
cgctcgtcttgctgcagcacaggctgctatcgcagagcag

SEQ ID NO: 47379 - DNA, 50 bp, Eubacterium rectale
  source 1..50: mol_type = genomic DNA
cccccatatttttacctatctgcaccggctgctattgcaaataggtagga

SEQ ID NO: 47380 - DNA, 40 bp, Eubacterium rectale; identical to SEQ ID NO: 15485
  source 1..40: mol_type = genomic DNA

SEQ ID NO: 47381 - protein, 599 aa, Eubacterium rectale
MNTAVNEYNYRFKLTDYSLFDRNRARKVAIYGRVSTEHEAQLSALENQLQWYDDQVKYHPNWTVCERYIDEGITGTQAKKRPAFLKMIEDAKQGKFDLIVTREVCRFARNVVDTLVVTRELKGIGVEVFFIDDNIWTMDGDGELRLSLMATLAQEESRKTSERVKAGQKISRDNGVLYGNGNILGYDRVGDTYVINEEQAETVRMIYDLYLQGYGSMKIAKILTERKRKTASGLIKWSVSNIMRAIKNATYTGTKCYNKSRSNNFLEQKRINNLDMSTYEYVEGDFPSIISQEIWNKAQAIRESRVKPVCVSAGKNTHSKRDSRDIWVNKLRCSCGSSYRKNKWHTKLDGKTSYGYQCYNQLNNGIKRKRAEIGLDTEGYCDSRMITDWKLDFMAKALLEHLWTERKESVLIALDLIKYYYKEEKSNETQSDTVTIQAKLDKANSRLTNLIAMRADGEISKDEYQAMRSPVDEEIKKLQKALDEIPQEKSNPKGLDIEGIRSTLNSFIDFSGSTISHDVVNQFVYLITPTSDTTFDWYVNLNGTADVKATFTAEGRKKNCIIKLEEIEKISSVHREKNEDNAHFIKNPHIFTYLHRLLS

SEQ ID NO: 47382 - DNA, 50 bp, Eubacterium rectale; identical to SEQ ID NO: 36102
  source 1..50: mol_type = genomic DNA

SEQ ID NO: 47383 - DNA, 40 bp, Eubacterium rectale; identical to SEQ ID NO: 47378
  source 1..40: mol_type = genomic DNA

SEQ ID NO: 47384 - DNA, 50 bp, Eubacterium rectale; identical to SEQ ID NO: 47379
  source 1..50: mol_type = genomic DNA

SEQ ID NO: 47385 - DNA, 40 bp, Eubacterium rectale; identical to SEQ ID NO: 15485
  source 1..40: mol_type = genomic DNA

SEQ ID NO: 47386 - protein, 520 aa, Phocea massiliensis
MKKAVIYARYSSDLQRGESIDAQVRACKYFAQRYGYEVEKVYADRAESGRTTANRAQWMSMMEDASRREFEVILVHKLNRFSRSGLDTLNYKGQLAQYGVELVSVTERLDDSPEGRLMLYVIAGMNEFYSANLATEVMKGLKENAYKGRSTGGRPPLGYDLDPETKKLVINEFEAQAVRIIFDMYAGGFGYGAIIDRLNREGYRTKRGGQFGKNSLYDILKNEKYIGVYTFDKSTPKGKGPRSDRHKYKTEYIRAEGQCPAIVDRDVFEFVQKAMEANRHMTAKGKATTNYLLTGKLICGECGHKMVGEKRGYDGRTYFYYVCNAAKRKGTCTKAAVRKELVEEMVLDALNQMAFSQQSVDAMAEAAFSTYSDDQQGATARALDQQLVETEKNISNLVRAIMKGIDDPAVQDELQKQRLRKDTLQVQRAALEDIPDQRMDLEQLKDYFKNFLDIKNLSEEAQKSVIQRYVDRVYLYDLPHTPDDPKGKQYEIKLVLNPNQEDLTGLIDFKDMRGSSLSPP

SEQ ID NO: 47387 - DNA, 50 bp, Phocea massiliensis
  source 1..50: mol_type = genomic DNA
tttaaggatatgagggggagcagtctctctccgccaatcgtatccacaac

SEQ ID NO: 47388 - DNA, 40 bp, Phocea massiliensis
  source 1..40: mol_type = genomic DNA
atcgagggttcgaatccctctctctccgccaagaaaaacc

SEQ ID NO: 47389 - DNA, 50 bp, Phocea massiliensis
  source 1..50: mol_type = genomic DNA
tttaaggatatgagggggagcagtggctctccgccaatcgtatccacaac

SEQ ID NO: 47390 - DNA, 40 bp, Phocea massiliensis
  source 1..40: mol_type = genomic DNA
aggcagggtttgactccctggctctccttgaagaaaaaaa

SEQ ID NO: 47391 - protein, 489 aa, Sulfitobacter mediterraneus
MRAGRVDVIVFYKVDRLTRSLADFAKMVDVFDAAGVSFVSVTQAFNTTSSMGRLTLNVLLSFAQFEREVTAERIRDKVTASKRKGMWMGGAVPLGYDVKDKALVVNTKEASAIRTIFAEYIDLGSARQLSARLDDLGVVSKERTNRYGHVSGGTSFSRGALYNILRNPIYIGKVRHKEELHVGLHDAIIDTETWDAVQAQLADHGGRKINAKRQSANRLLDGVLFDSQDREMRTTYASKSIRSEGIKRTKRYWYYITANPSSEHTTGVERLPADEIERVVLSGLRERLADKSWLADQIHGQEKDPNEVSDILRAVDACQTERGGGGDAALLQTFPNLIDRIDAQKGHLRISLNLSAMIKTDSDSDPIIATFDVPFQKRQNGRAKPIVIAAKEAPKQDLDLIALVADARRWARELLEGKAVSVQQITDREKRRSGSVSRILPLAWLAPDISAAILEGRHPQHLTAKTLRSLPELPMDWVQQRQILGFVHL

SEQ ID NO: 47392 - DNA, 50 bp, Sulfitobacter mediterraneus
  source 1..50: mol_type = genomic DNA
gtggttttactgagactgagtggtggtggtcacagtctgcatcgaacccg

SEQ ID NO: 47393 - DNA, 40 bp, Sulfitobacter mediterraneus
  source 1..40: mol_type = genomic DNA
tgaaaaatggtttgatggtgggcgaccctggaatcgaacc

SEQ ID NO: 47394 - DNA, 50 bp, Sulfitobacter mediterraneus
  source 1..50: mol_type = genomic DNA
gtggttttactgagactgagtggttttggtcacagtctgcatcgaacccg

SEQ ID NO: 47395 - DNA, 40 bp, Sulfitobacter mediterraneus
  source 1..40: mol_type = genomic DNA
ttaaaaattcattgaaggtttgcaaccctgaaaagtaacc

SEQ ID NO: 47396 - protein, 479 aa, Veillonella seminalis
MPKIKVGIYIRVSTQEQANEGYSIDAQTDRLTSYCKSRDWKIYNTYIDGGFSGSNTNRPALHQLMQDIQEKKLNCVLVYKLDRLSRSQKDTLYLIEDVFLKNKIDFVSLNENFDTSSPFGRAMIGILSVFAQLEREQIKERSLMGRIERAKNGLWHGGGFDPFGYDYIDGKLVINEYQAAIVQEAFDLFLKKIPIHRIHKIINEKYDREIHETVLRSILTTRLYTGKISYAGGIYDGQHDPIISEETFKAAEELFAIREKKFNKNPFRTTKLLGGILYCAHCGARYLAKGNYSGHGDKKVYRPYYTCYSRAKSSKKYIVDPDCKNPSYAVVVLDEIIINEIRKLFSNKEYLNLAMNSSKDTSGKTTNKRKALLKQIDNIQSQIGRLLDLYQIDGFPISDIQDRIKTLQHEKEVLESTLSSLTISKKKKLTSKDVLSMEASFNEIIENGTDMEKQALVRTLIEKIIVHEEWNSFEIIWNF

SEQ ID NO: 47397 - DNA, 50 bp, Veillonella seminalis
  source 1..50: mol_type = genomic DNA
cctgacaagttttgatgtcacttccacatgcatggtagtgacatcaaaac

SEQ ID NO: 47398 - DNA, 40 bp, Veillonella seminalis
  source 1..40: mol_type = genomic DNA
acatcaaacaaatagtctccacgtgcgcggtcatcgggaa

SEQ ID NO: 47399 - DNA, 50 bp, Veillonella seminalis
  source 1..50: mol_type = genomic DNA
cctgacaagttttgatgtcacttcctcatgcatggtagtgacatcaaaac

SEQ ID NO: 47400 - DNA, 40 bp, Veillonella seminalis
  source 1..40: mol_type = genomic DNA
acatcaaacaaaaagtctccttgttatgggttatggctaa

SEQ ID NO: 47401 - protein, 457 aa, Mycobacterium marinum
MATVTALYLRQSFDRTRDEAAIDRQRAECRALAQRKGWTDCVEYVDNDRSATNTKKPRPAYQQLLADMAAGHVHAVVAWDLDRLHRRPIELETFMPLADRMNVKLATVSGEVDLSTAQGRLTARLKGSVAAHEGEHKAARQRAAARQMAERGLPKWKSAFGYTDDHQPHPVESGLVRKGYETILGGGSLSGLAREWNAKGFYGRNGKPWTASTLSLFIRKPRNAALRAHNNVIVGPGTWPALVDESTWRATQALLDDPARKPGPKTVRKHFLTGVLRCGKCEDGGRIGGYQGPQGQERYRCWKCLGVAISKPETDDYIRGLVAARLARPDAKELLIDRDAADLDKLTAEANTLRARIDELAVAFADGDMTPTQVRTATQRLQAKLTAVGSRMASASAKLVFADVPLGTDRVYQAFARMDLDRQRAIVNAILVATIMPVGKRGRVPFDPERIAIEWRR

SEQ ID NO: 47402 - DNA, 50 bp, Mycobacterium marinum
  source 1..50: mol_type = genomic DNA
gtgggttatctagccagtcggtaacattacccgctggctgtataaccttc

SEQ ID NO: 47403 - DNA, 40 bp, Mycobacterium marinum
  source 1..40: mol_type = genomic DNA
gaagtgctactgccgcacccaccatctggtcaagaccttt

SEQ ID NO: 47404 - DNA, 50 bp, Mycobacterium marinum
  source 1..50: mol_type = genomic DNA
gtgggttatctagccagtcggtaatgttacccgctggctgtataaccttc

SEQ ID NO: 47405 - DNA, 40 bp, Mycobacterium marinum
  source 1..40: mol_type = genomic DNA
gaagtgttaatattgtacatgccatttggtccagacattt

SEQ ID NO: 47406 - protein, 455 aa, Mycobacterium kansasii
MATALYLRQSFDRTRDEAAIDRQRAECRALAERKGWTDLREYVDNDRSATNTKKPRPAYQQLLTDMAAGHVQAVVAWDLDRLHRRPIELETFMPLADRMNVKLATVSGEVDLSTAQGRLTARLKGSVAAHEGEHKAARQRAAAKQMAERGLPKWKSAFGYTDDHQPHPVESELVRKGYETILGGGSLSGLAREWNAKGFYGRNGKPWTASTLGLFMRKPRNAGLRAHNDVIVGPGSWPPLVDESTWRATQALLDDPARKPGPKTVRKHFLTGVLRCGKCEDGGRIGGYQGPRGQERYRCWKCLGVAISKPETDDYIRGLVAARLAREDAKQLLIDQEAPDLDRLTSEANTLRARIDELAVAFADGDLTAGQVRTATQRLQAKLTAAESRMASASAKLVFTDVPLGTERVHAAFARMDLDRQRAIVNTVLTGTVMPVGKRGRVPFDPERIAIEWRR

SEQ ID NO: 47407 - DNA, 50 bp, Mycobacterium kansasii
  source 1..50: mol_type = genomic DNA
atgggtgattaagacagtcggtgacattacccgctggctgtataaccttc

SEQ ID NO: 47408 - DNA, 40 bp, Mycobacterium kansasii
  source 1..40: mol_type = genomic DNA
caagtgctactgccgaactcaccatttggtcaagaccttt

SEQ ID NO: 47409 - DNA, 50 bp, Mycobacterium kansasii
  source 1..50: mol_type = genomic DNA
atgggtgattaagacagtcggtgatgttacccgctggctgtataaccttc

SEQ ID NO: 47410 - DNA, 40 bp, Mycobacterium kansasii; identical to SEQ ID NO: 47405
  source 1..40: mol_type = genomic DNA

SEQ ID NO: 47411 - protein, 455 aa, Mycobacterium attenuatum
MATALYLRQSFDRTGDEAAIDRQRAECRALAERKGWTDLREYVDNDRSATNAKKPRPAYQQLLTDMAAGHVQAVVAWDLDRLHRRPIELETFMPLADSMNVKLATVSGEVDLSTAQGRLTARLKGSVAAHEGEHKAARQRAAAKQMAERGLPKWKSAFGYTDDHQPHPVESELVRKAYETILGGGSLSGLAREWNAQGFYGRNGKPWTASTLGLFMRKPRNAGLRAHNDVIVGQGSWPPLVDESTWRATQAVLNDPARKPGPKTVRRHFLTGVLRCGKCDDGGRIGGYQGPRGQERYRCWKCLGVAISKPETDEYIRGVVAERLAQPDAKQLLIDRDAPNLDRLTGEANTLRSRIDELAVAFADGDLTASQVRTATQRIQAKLSEVESRMASASAKLVFADIPLGTERVYAAFTRMDVDRQRAIVNTMLTATVMPVGKHGRVPFNPDRITIEWQR

SEQ ID NO: 47412 - DNA, 50 bp, Mycobacterium attenuatum
  source 1..50: mol_type = genomic DNA
gtgggttatctagccagtcagtgacattacctgttggctagatgacctac

SEQ ID NO: 47413 - DNA, 40 bp, Mycobacterium attenuatum; identical to SEQ ID NO: 47408
  source 1..40: mol_type = genomic DNA

SEQ ID NO: 47414 - DNA, 50 bp, Mycobacterium attenuatum
  source 1..50: mol_type = genomic DNA
gtgggttatctagccagtcagtgatgttacctgttggctagatgacctac

SEQ ID NO: 47415 - DNA, 40 bp, Mycobacterium attenuatum; identical to SEQ ID NO: 47405
  source 1..40: mol_type = genomic DNA

SEQ ID NO: 47416 - protein, 540 aa, Hungatella hathewayi; identical to SEQ ID NO: 39796

SEQ ID NO: 47417 - DNA, 50 bp, Hungatella hathewayi; identical to SEQ ID NO: 39797
  source 1..50: mol_type = genomic DNA

SEQ ID NO: 47418 - DNA, 40 bp, Hungatella hathewayi; identical to SEQ ID NO: 26403
  source 1..40: mol_type = genomic DNA

SEQ ID NO: 47419 - DNA, 50 bp, Hungatella hathewayi
  source 1..50: mol_type = genomic DNA
caatatctttaactaagggaaaatacagtttcccatagttaaagataccg

SEQ ID NO: 47420 - DNA, 40 bp, Hungatella hathewayi
  source 1..40: mol_type = genomic DNA
ggtttcaaatttggaaacgacatgatccaatgtggagatg

SEQ ID NO: 47421 - protein, 554 aa, Blautia massiliensis; identical to SEQ ID NO: 9936

SEQ ID NO: 47422 - DNA, 50 bp, Blautia massiliensis
  source 1..50: mol_type = genomic DNA
ccgttctaattagtgacaaccaaacacaaggtagtgacaatatagaacgt

SEQ ID NO: 47423 - DNA, 40 bp, Blautia massiliensis
  source 1..40: mol_type = genomic DNA
aatcagtaagagtacggtacataaggattgcgtagaacgc

SEQ ID NO: 47424 - DNA, 50 bp, Blautia massiliensis
  source 1..50: mol_type = genomic DNA
ccgttctaattagtgacaaccaaaaacaaggtagtgacaatatagaacgt

SEQ ID NO: 47425 - DNA, 40 bp, Blautia massiliensis
  source 1..40: mol_type = genomic DNA
aatcaataagactaatgtaaagagtgattgggtagaaaac

SEQ ID NO: 47426 - protein, 525 aa, Dorea longicatena
MTDHRKTAVYIRLSAEDDNVDGRVKKESDSVTSQRILLKSFVIDQLGVAEADILEYVDDGVSGTHFKRQGFQQLQDDMKSGEIGCVVVKDFSRFGRDYLEVGFYIEYIFPLLQIRFISINDSYDSAASSGMTGGMNVALQNLVYNMYSLDLSKKISSALQTRTRNGTRLPVNARYGYKKGKDGRLEVDPEAAKVVKMIFRMAAEGTSFADITRELNRQAIATCDEQKLSRGDQVQFQRFDTIKKKHWSPTTVAAIVRDEIYIGTRIWGKTRCSMHTGHKAVLNDETEWIRLENHHTAIIDRALFEKANEMHPKKKRSVAESRTNFTLERRKKQPALLICANCGHSLLKETEHLLKCSDARTNGDPVCRSLVIRREPLEENILGLVHQYAASMLEKEKKVSSNRQCDDKEINTAELQKQSRQLTSEKMKLYDAYKDGRIDRDSYKQRAGKISVQLEEIKRKIEDAENSKKLLEQNELSDKIKLKDFLGIQKFDTEKLREIIKVIRVHSQDEIEIEWNFDDIFSEQR

SEQ ID NO: 47427 - DNA, 50 bp, Dorea longicatena
  source 1..50: mol_type = genomic DNA
tttgtcctatacttgacacatccacatggtcgagttataataaggacaag

SEQ ID NO: 47428 - DNA, 40 bp, Dorea longicatena
  source 1..40: mol_type = genomic DNA
gatgcctgtcattacaccgcatgtatgccggcacacctat

SEQ ID NO: 47429 - DNA, 50 bp, Dorea longicatena
  source 1..50: mol_type = genomic DNA
tttgtcctatacttgacacatccatttggtcgagttataataaggacaag

SEQ ID NO: 47430 - DNA, 40 bp, Dorea longicatena
  source 1..40: mol_type = genomic DNA
gatgcttcccatttctctgtttctctgcctgcacacctgt

SEQ ID NO: 47431 - protein, 559 aa, Streptococcus pyogenes; identical to SEQ ID NO: 20396

SEQ ID NO: 47432 - DNA, 50 bp, Streptococcus pyogenes
  source 1..50: mol_type = genomic DNA
ccttttgactcccgcagacccatcacgtggagacggtagcacttttgtcc

SEQ ID NO: 47433 - DNA, 40 bp, Streptococcus pyogenes
  source 1..40: mol_type = genomic DNA
cccaatcaaaagacaacgcacgtcgagtgcgtagtgttgc

SEQ ID NO: 47434 - DNA, 50 bp, Streptococcus pyogenes
  source 1..50: mol_type = genomic DNA
ccttttgactcccgcagacccatcctgtggagacggtagcacttttgtcc

SEQ ID NO: 47435 - DNA, 40 bp, Streptococcus pyogenes
  source 1..40: mol_type = genomic DNA
ctcaatttaaagaaaacgccttccgagtgaggagtgaggc

SEQ ID NO: 47436 - protein, 537 aa, Salinispora tropica
MPGNPTPTSPPKRRGRRAPTTPPEDSTGPCRVCIYIRRSTDDEHQPFSLLAQRTALKKYVDNHPGWVIVCEFEDDASGATTERPGLKKALDAAKVGLYDVLLVYRVDRFSRSLAHFVDLAATLDAANVRFSSATEPVDTGGAIGRMMLQFLAVFAEFERNMIIDRVKSGMTAKASKGQWAGGTRPYGYLVDKDTQRLVPHPDEAPILRDIFHLYTRDRLGTRAIATDLNERGVPNRTGKKWSGHTINRILDNPAYTGDIAYRDVYIPDAHEALIDRDTFRRAQDIAAARGDVQTQRAMSDSDYYLTGLLTCPQCGQRYIGTSANGRTRRYRYYTCFTRTRYGKHATCTAPRLPADDLDHMILQALHDFYTTAEPVLAAMIERANSQHNSTTDDRRAELTAIAHQITTTENAIDRYHTAFENGAMDDATAGPRIRELRHRLAQLQARHTELDAGLTSQPEPPPPGTVARIRDHLSTIMTSGSTTERKAAIETLIAEVQLTDQGVVPVFKIPTDTTMPPPETDGGISGVPPVRTMVRSV

SEQ ID NO: 47437 - DNA, 50 bp, Salinispora tropica
  source 1..50: mol_type = genomic DNA
ggttcgcacaatggtgcggtcggtgggccggaggtaccaccatgcgaacc

SEQ ID NO: 47438 - DNA, 40 bp, Salinispora tropica
  source 1..40: mol_type = genomic DNA
cctgcagccgcgacacagtgggtcgccggggactcgaacc

SEQ ID NO: 47439 - DNA, 50 bp, Salinispora tropica
  source 1..50: mol_type = genomic DNA
ggttcgcacaatggtgcggtcggtccgccggaggtaccaccatgcgaacc

SEQ ID NO: 47440 - DNA, 40 bp, Salinispora tropica
  source 1..40: mol_type = genomic DNA
cctgaagtcccaacacagtcctgtgcctgggactaggacc

SEQ ID NO: 47441 - protein, 522 aa, Bacillus thuringiensis
MNYNNDKVAIYTRVSTDEQANEGFSLQAQEDHLRQYAKAKGYEVYDIYSDEGYSGKDYNRPEIQRLFKDLSQDKFKGILVKSVDRISRRLSDVTKLIDDVLVPRNSYIVISDANLDSSTTGGIAIIHLLATFAQLERSMIVQRVKAGMGKRAELGYWNGGRVLGYDVKNKELKVNKEEAEIVRKIFHLRTEGKGYKSIAIMLNQQGFKTKRGGLFSIGTIKTILENPLYIGYCRWGRHKNWNVERRKGKTDEYKFVKGKHEPIVSEDLWKRVQGVNYAHKKSISKNRNFNGEFVLSGILRCPSCGAGMVMCKTKKRDKSGYHLYYMCQAFHSKGKLACKSNLIRKEDIEEKVLQCINKIILIPSIVDKTFERIQEKKERGIERIKNDLLYINEELKRKKKFIKKLNKDYFDEKIRVEAYTELSEPLREEIDELESEKGKLDREIESVEIPITKEEVIKALENFANLYENATYEQKKSLLRAIIKKIEVQPNRKEIKGITYWFDCDNGQDDALLVSKEGRTVS

SEQ ID NO: 47442 - DNA, 50 bp, Bacillus thuringiensis; identical to SEQ ID NO: 14487
  source 1..50: mol_type = genomic DNA

SEQ ID NO: 47443 - DNA, 40 bp, Bacillus thuringiensis
  source 1..40: mol_type = genomic DNA
gtttcggattaatcgtggggaaccgtatcataagtaagat

SEQ ID NO: 47444 - DNA, 50 bp, Bacillus thuringiensis; identical to SEQ ID NO: 42809
  source 1..50: mol_type = genomic DNA

SEQ ID NO: 47445 - DNA, 40 bp, Bacillus thuringiensis
  source 1..40: mol_type = genomic DNA
gctttggagtaatagggggaaaatatatcatgagtaatat

SEQ ID NO: 47446 - protein, 515 aa, Bacillus cereus
MNKKVKAGIYIRVSTEEQKQGHSLEAQESMLKEFADKKGYEIYDVYNDGGYSGKNFNRPEIQRLLRDLKDDKIDVILVWKVDRLSRNNTDVMLLIDTELTPRKKSLIITSIDMDSSSPTGHMFISLLSTFARYERATIIDRVKAGMQKRAEKGYWNGGSILGYDSVDKKLIINENESKIVREIFQLRAEGKGYKFIVNILNDKGIKTKTGKNFSIPAIKLIVNNYIYSGKMVWKKHQDWGTRRRAGKAEPIIVEGIHDAIIDEGLWERVQKVNELQKNSFSSNRNFNGKFLLTGILKCPKCGAGTVISKTKKRNSDDYYLYYTCQAYHNKGPSVCRANLIRKEQVEQQVLNIISLLVNENDIINALIDELNSGNNKTNELHIAHVKMLKKQLGKAYDKRKKLDNDYFEGNIEGSTYNRLMNELQLDINKLKRNVRESESEIIKNDSTINKEEVIYALENFNKLFKMVNDEEKKLLIRSLIREIQMEANRKDIKEITFWFLPGSVLPSNKARRTVS

SEQ ID NO: 47447 - DNA, 50 bp, Bacillus cereus
  source 1..50: mol_type = genomic DNA
ttttaccatctaataaagcgcgcagaaccgtatcacaaatgatggtaaac

SEQ ID NO: 47448 - DNA, 40 bp, Bacillus cereus
  source 1..40: mol_type = genomic DNA
gtttcggattaatcgtggggaaccgtatcataagtaatgt

SEQ ID NO: 47449 - DNA, 50 bp, Bacillus cereus
  source 1..50: mol_type = genomic DNA
ttttaccatctaataaagcgcgcaaaaccgtatcacaaatgatggtaaac

SEQ ID NO: 47450 - DNA, 40 bp, Bacillus cereus; identical to SEQ ID NO: 47445
  source 1..40: mol_type = genomic DNA

SEQ ID NO: 47451 - protein, 522 aa, Bacillus cereus
MNYNNDKVAIYTRVSTDEQANEGFSLQAQEDHLRQYAKAKGYEVYDIYSDEGYSGKDYNRPEIQRLFKDLSQDKFKGILVKSVDRISRRLSDVTKLIDDVLVPRNSYIVISDANLDSSTTGGIAIIHLLATFAQLERSMIVQRVKAGMGKRAELGYWNGGRVLGYDVKNKELKVNKEEAEIVRKIFHLRTEGKGYKSIAIILNQQGFKTKSGGLFSIGTIKTILENPLYIGYCRWGRHKNWNVERRKGKTDEYKFVKGKHEPIVSEDLWKRVQGVNYAHKKSISKNRNFNGEFVLSGILRCPSCGAGMVMCKTKKRDKSGYHLYYMCQAFHSKGKLACKSNLIRKEDIEEKVLQCINKIILIPSIVDKTFERIQEKKERGIERIKNDLLYINEELKRKKKFIKKLNKDYFDEKIRVEAYTELSEPLREEIDELESEKGKLDREIESVEIPITKEEVIKALENFANLYENATYEQKKSLLRAIIKKIEVQPNRKEIKGITYWFDCDNGQDDALLVSKEGRTVS

SEQ ID NO: 47452 - DNA, 50 bp, Bacillus cereus; identical to SEQ ID NO: 14487
  source 1..50: mol_type = genomic DNA

SEQ ID NO: 47453 - DNA, 40 bp, Bacillus cereus; identical to SEQ ID NO: 47448
  source 1..40: mol_type = genomic DNA

SEQ ID NO: 47454 - DNA, 50 bp, Bacillus cereus; identical to SEQ ID NO: 42809
  source 1..50: mol_type = genomic DNA

SEQ ID NO: 47455 - DNA, 40 bp, Bacillus cereus; identical to SEQ ID NO: 47445
  source 1..40: mol_type = genomic DNA

SEQ ID NO: 47456 - protein, 512 aa, Pseudacidovorax intermedius
MKTAVIYARVSTQRQADEGVSLDAQVEQCRGRAEQLGAEVLKVFRDEGVSGRSTKGRHGFQAAVDFCGQAGVHFFITWATSRVARNAVDLIMAQETLRDGGTRLECLNADVNDDTDAGFINRTFMAAMDELHSRNISRDTLRSQKRVAAEGFFTGGRVPYGYTVVDEGKRRRMVPDADAAATVRRAFDLCLQEGLGAQAIAHALNDAGLFRAGARWGKNSVQYLLNNRVYTGVKTYNRKHSRTGRAKPLDEWVSVDAHEPLISKEAFERAQTMIKDRTPHEGGGTPRSEFVFAGKLTCGICSSLLQITNGTSRSGALYSYYSCVAHKHGRPQCLFRPIRADLMDEWLTQTILERVLTPEVVSKALDDVAAMTETWLRDREAARGRLVRDLRAVEGKRDGLLDFVAEHGRATPADVIGKLNEARAQIDELQAELDRLERAKVPRRNRHIDPEVAIEVMHETIMAADAKKKRAFMGAFLDQITVSNSEVEVAYRADALLQTGPVKDVHSGLDWL

SEQ ID NO: 47457 - DNA, 50 bp, Pseudacidovorax intermedius
  source 1..50: mol_type = genomic DNA
gttcacagtggccttgattggctcccgaggcagctatcactacgaacaac

SEQ ID NO: 47458 - DNA, 40 bp, Pseudacidovorax intermedius
  source 1..40: mol_type = genomic DNA
caagtgcttcgtttggctccccgacctgggctcgaaccag

SEQ ID NO: 47459 - DNA, 50 bp, Pseudacidovorax intermedius
  source 1..50: mol_type = genomic DNA
gttcacagtggccttgattggctcaggaggcagctatcactacgaacaac

SEQ ID NO: 47460 - DNA, 40 bp, Pseudacidovorax intermedius
  source 1..40: mol_type = genomic DNA
caagtgattcttctgcctcagcctcctgggcgtgcaccac

SEQ ID NO: 47461 - protein, 511 aa, Mesorhizobium australicum
MLQPRDLKGRNAISYARWSSGKQSQGDSAARQSENAKKFCSAYGLTLDDQLVDEGISAFKGLNLEARLGQFISDVKAGKIPSNVVLILENLDRFTRINPVDALPVLLELLKTGLTLVTLQDERVHTRVGYADNTMHIMMSLMSMQAAYEYSAKLSDRVGAAWSRKAEKAREAVASGASRVKVAKLPFWIDRETYGLNARADDARLIFELAKEGHGQQAITQILNSRGIPSPAGNSWAQVVVGDVLRSPAAYGCLVLKGEEVPGYFPALISETEWLATRQRTKARLHSRQVGRTSNLFSRMVHCGHCGSSMALTSSKKGGVSWGYFICTGKAFKSRVCTAPNWRYDQFEREMLDRLGFLAVPIPQDQTAPDLSKGLEETIGALEAKRENALAGALDAETAETRKAFSGKADELTRQMEAKRREIIAIRENDARCRESAAAVIDFEEYQEEIGRLAKEDRKGAQKLISNLVSRIDLESDDLSARSRKGLRRASVTMRNGYTHALVFDDTGEPA

SEQ ID NO: 47462 - DNA, 50 bp, Mesorhizobium australicum
  source 1..50: mol_type = genomic DNA
attccgtaaaataaaagctaagtctggcatagactgtaactctgcatagt

SEQ ID NO: 47463 - DNA, 40 bp, Mesorhizobium australicum
  source 1..40: mol_type = genomic DNA
gatctgcaagagccagacctggcacaagctctaagcgacc

SEQ ID NO: 47464 - DNA, 50 bp, Mesorhizobium australicum
  source 1..50: mol_type = genomic DNA
attccgtaaaataaaagctaagtcgtgcatagactgtaactctgcatagt

SEQ ID NO: 47465 - DNA, 40 bp, Mesorhizobium australicum
  source 1..40: mol_type = genomic DNA
gctctataagaaccagacagtgcaccagctcccagggact

SEQ ID NO: 47466 - protein, 478 aa, Streptococcus suis
MSKVALYLRLSVDEAGTDESNSIVNQRYLLHHFLDNSSDFQNFLREEFVDDGFSGTSVNRPAFQRLMVRVKSGEIRHIIVKDLSRFMRDYLELGNYLENIFPFLGVRFVALNDQYDSLTSENNGVEIDVPFKNLLNEFYAKDVSEKVKSAMNSMKRSGKNMSWLPPFGYIKDPEDRFKIIIDEAVAPIVRRIFTLYLDGNSYQKIARILNEEQVITPAERKMQISQARYEKSLRLTIEQERNVWSVVNVAQILKNEAYVGTYLYNTRTYIRGKHISLPKSEWERIENNHEAIISAELFEQVARLKAKKVTRKKYPQPPKIPSILTGLIRCKHCDHSLIGHYNHQGYQYFSCRYCKGQGEKMKSCRVDRIEKSIKEKLGNEEGKPRKKTSKTRFLREIEGLKKQKLSFFQDYKDNLMTREDYITKKIEIDESVKNLEEQLNEANKVQILTNDKLTKEIVNTHIEKVVVDCLGFFTVIYK

SEQ ID NO: 47467 - DNA, 50 bp, Streptococcus suis; identical to SEQ ID NO: 35397
  source 1..50: mol_type = genomic DNA

SEQ ID NO: 47468 - DNA, 40 bp, Streptococcus suis; identical to SEQ ID NO: 29078
  source 1..40: mol_type = genomic DNA

SEQ ID NO: 47469 - DNA, 50 bp, Streptococcus suis
  source 1..50: mol_type = genomic DNA
agtgtcagttacttgacataagagtcggattgtgtcataataatgacagg

SEQ ID NO: 47470 - DNA, 40 bp, Streptococcus suis
  source 1..40: mol_type = genomic DNA
tggttttgattttacaggttcataggtgaaagaaagtgag

SEQ ID NO: 47471 - protein, 586 aa, Listeria innocua
MKEVEVIKANSSTSKSKRGKQIERIRVSAYCRVSTDSEDQLSSYISQKTYYTDLIQKNSDWIFAGIYADEAITGTQVTKREDFQRMINDCMNGEIDMVITKSISRFARNTLDTLKYVRMLKEKDIAVYFEDEKINTLTMDGELLLVVLSSVAQQEVENISANVKKGLKMKMKRGELVGFQGCLGYDYHPEDKSITINEEEAEIVRYIFKRYVEGAGGSVIGQELENLGYKTKYGNSTWVPTTVLGIIKNEKYKGDLLLGKTFTVDPISKRRLENMGEEDQFYIRNHHEPIISEEIFEKAHEILNRRNKNRGKIGDGNTKREKFSRKYAFSCLLECGFCKGTLTRRKWHSGSQYDKVIWQCVTSTKKGKKHCPESKGIPEQAIEDAFVESYRILCDSNKDVLDEFLRTMNETLSSSSVNKQLSKVEKEIEALEKKKSKLVDMRLEDVIDSETYEYKFSSLTSKQDELLNEREKLQTTAMNEKDIKRRLQEFKRTLEQNEVLHEFDRYVFESIVEKVIVGGYDEDGNIDPAQLVFVYKTGFKNSLDGNRFKPMRKNARGNRKTNELCSQTNNEVQSLSSHSSSDTCRD

SEQ ID NO: 47472 - DNA, 50 bp, Listeria innocua; identical to SEQ ID NO: 37522
  source 1..50: mol_type = genomic DNA

SEQ ID NO: 47473 - DNA, 40 bp, Listeria innocua
  source 1..40: mol_type = genomic DNA
tatgttcccgcaaacagctcatgtcgagacagtaacatta

SEQ ID NO: 47474 - DNA, 50 bp, Listeria innocua
  source 1..50: mol_type = genomic DNA
tgtcttcccatagtagttccgacatgtgtggagactattgtgttgctaca

SEQ ID NO: 47475 - DNA, 40 bp, Listeria innocua
  source 1..40: mol_type = genomic DNA
tttgttcctgcaaaatgaatgtgttgagataggaacattt

SEQ ID NO: 47476 - protein, 538 aa, Streptococcus suis
MQVEGFSLDAQEAKIQQYANAFDIEIVKTYQDAGKSGKTMLGRTEFMNMISDIEAEKDKVDYVLVFKLSRFGRNAADTLKSLAIMESHGVNLICVDDGLDSSKDSGKLVITILSAVAEMERENIISQAMEGRRQKARAGQWNGGFAPVGYSLVNGQLQVNHEEAESVKMIFDLFANSDMGTIAIAKHLANLDIKKPIRHNSTLPYFSSSGIARILDNPVYNGKIAFGRRESTRDKISGETKVTQSENYILTDGIHEAIIDDETWKKVRKKREANAHKYKRENPNKGDSIYILSGLIKCPLCNAGLYGNKSIKRNKNKKDEYYKNYYYYACKHRKHVDGHKCTFNKQLKTGNLDHEVLSIISKLVSRPDFARKLQEKINIQVDTSRIDSEIEQYKSLFRQLSATKMNLIQQIDSLNFEDPHFQQKSIDLDMRLNTIYDKLADVEMLIETSESKREVILKDKMTADNIYKILVNFASFMDVMEDIDKKRLCQMLIEKVEIYDDKNKAGRWVKAIHFKLPIIEEDLEISLDNSTPVEAVVK

SEQ ID NO: 47477 - DNA, 50 bp, Streptococcus suis; identical to SEQ ID NO: 42097
  source 1..50: mol_type = genomic DNA

SEQ ID NO: 47478 - DNA, 40 bp, Streptococcus suis
  source 1..40: mol_type = genomic DNA
tccccacacagcacggaccgaggcggttgttaaactaaac

SEQ ID NO: 47479 - DNA, 50 bp, Streptococcus suis
  source 1..50: mol_type = genomic DNA
agtttggacaatagtacaccggttagggcggttgttaaattgtccaaacg

SEQ ID NO: 47480 - DNA, 40 bp, Streptococcus suis
  source 1..40: mol_type = genomic DNA
ttgcctcacagcacagagcagggcagtggtaaaaccaaaa

SEQ ID NO: 47481 - protein, 536 aa, Streptococcus suis
MQVEGFSLDAQETRIHQYANAFDIEIVKTYQDAGKSGKTILGRTEFMAMISDIEAEKDKVDYVLVFKLSRFGRNAADTLKSLAIMESHGVNLICVDDGLDSSKDSGKLVITILSAVAEMERENIISQAMEGRRQKARAGQWNGGFAPVGYSLVNGQLQVNQEEAESVKMIFDLFANSDMGTIAIAKYLANLDIKKPIRHNSTLPYFSSSGIARILDNPVYNGKIAFGRRESTRDKISGETKVTQSENYILTDGIHEAIIDDETWNKVRKKREANAHKYKRENPSKGDSIYVLSGLIKCPLCNAGLYGNKSIKRNKNKKDEYYKNYYYYACKHRKHVDGHKCTFNKQLKTGNLDHEVLSIISKLVSRPDFARKLQEKINIQVDTSRIDSEIEQYKSLFRQLNATKLNLIQQIDSLNFEDPHFQQKSIDLDMRLNTIYDKLADVEMLIETSESKREVILKDKMTADNIYKILVNFASFMDVMEDIDKKRLCQMLIEKVEIYDDKNKAGRWVKAIHFTLPIIEEDLEISLDNSTPVEAV

SEQ ID NO: 47482 - DNA, 50 bp, Streptococcus suis; identical to SEQ ID NO: 42092
  source 1..50: mol_type = genomic DNA

SEQ ID NO: 47483 - DNA, 40 bp, Streptococcus suis; identical to SEQ ID NO: 47478
  source 1..40: mol_type = genomic DNA

SEQ ID NO: 47484 - DNA, 50 bp, Streptococcus suis
  source 1..50: mol_type = genomic DNA
agtttggacaatagtacaccggttagggcggttgtgaaattgtccaaacg

SEQ ID NO: 47485 - DNA, 40 bp, Streptococcus suis; identical to SEQ ID NO: 47480
  source 1..40: mol_type = genomic DNA

SEQ ID NO: 47486 - protein, 536 aa, Streptococcus suis
MQVEGFSLDAQEAKIQQYANAFDIEIVKTYQDAGKSGKTMLGRTEFMNMISDIEAEKDKVDYVLVFKLSRFGRNAADTLKSLAIMESHGVNLICVDDGLDSSKDSGKLVITILSAVAEMERENIISQAMEGRRQKARAGQWNGGFAPVGYSLVNGQLQVNHEEAESVKMIFDLFANSDMGTIAIAKHLANLDIKKPIRHNSTLPYFSSSGIARILDNPVYNGKIAFGRRESTRDKISGETKVTQSENYILTDGIHEAIIDDETWKKVRKKREANAHKYKRENPNKGDSIYILSGLIKCPLCNAGLYGNKSIKRNKNKKDEYYKNYYYYACKHRKHVDGHKCTFNKQLKTGNLDHEVLSIISKLVSRPDFARKLQEKINIQVDTSRIDSEIEQYKSLFRQLSATKMNLIQQIDSLNFEDPHFQQKSIDLDMRLNTIYDKLADVEMLIETSESKREVILKDKMTADNIYKILVNFASFMDVMEDIDKKRLCQMLIEKVEIYDDKNKAGRWVKAIHFKLPIIEEDLEISLDNSTPVEAV

SEQ ID NO: 47487 - DNA, 50 bp, Streptococcus suis; identical to SEQ ID NO: 42092
  source 1..50: mol_type = genomic DNA

SEQ ID NO: 47488 - DNA, 40 bp, Streptococcus suis; identical to SEQ ID NO: 47478
  source 1..40: mol_type = genomic DNA

SEQ ID NO: 47489 - DNA, 50 bp, Streptococcus suis; identical to SEQ ID NO: 47484
  source 1..50: mol_type = genomic DNA

SEQ ID NO: 47490 - DNA, 40 bp, Streptococcus suis; identical to SEQ ID NO: 47480
  source 1..40: mol_type = genomic DNA

SEQ ID NO: 47491 - protein, 551 aa, Streptococcus suis
MKRKKAYIYTRVSTNMQVEGFSLDAQETRIHQYANAFDIEIVKTYQDAGKSGKTMLGRTEFMAMISDIEAEKDKVDYVLVFKLSRFGRNAADTLKSLAIMESHGVNLICVDDGLDSSKDSGKLVITILSAVAEMERENIISQAMEGRRQKARAGQWNGGFAPVGYSLVNGQLQVNHEEAESVKMIFDLFANSDMGTIAIAKHLANLDIKKPIRHNSTLPYFSSSGIARILDNPVYNGKIAFGRRESTRDKISGETKVTQSENYILTDGIHEAIIDDETWKKVRKKREANAHKYKRENPNKGDSIYILSGLIKCPLCNAGLYGNKSIKRNKNKKDEYYKNYYYYACKHRKHVDGHKCTFNKQLKTGNLDHEVLSIISKLVSRPDFARKLQEKINIQVDTSRIDSEIEQYKSLFRQLNATKLNLIQQIDSLNFEDSHFQQKSIDLDMRLNTIYDKLADVEMLIETSESKREVILKDKMTADNIYKILVNFASFMDVMEDIDKKRLCQMLIEKVEIYDDKNKAGRWVKAIHFKLPIIEEDLEISLDNSKPIEAV

SEQ ID NO: 47492 - DNA, 50 bp, Streptococcus suis
  source 1..50: mol_type = genomic DNA
agtttggacaatagtaaaccgattgaggcggttgtgaaattgtccaaacg

SEQ ID NO: 47493 - DNA, 40 bp, Streptococcus suis; identical to SEQ ID NO: 47478
  source 1..40: mol_type = genomic DNA

SEQ ID NO: 47494 - DNA, 50 bp, Streptococcus suis
  source 1..50: mol_type = genomic DNA
agtttggacaatagtaaaccgattagggcggttgtgaaattgtccaaacg

SEQ ID NO: 47495 - DNA, 40 bp, Streptococcus suis; identical to SEQ ID NO: 47480
  source 1..40: mol_type = genomic DNA

SEQ ID NO: 47496 - protein, 551 aa, Streptococcus suis
MKRKKAYIYTRVSTNMQVEGFSLDAQETRIHQYANAFDIEIVKAYQDAGKSGKTMLGRTEFMAMISDIEAEKDKVDYVLVFKLSRFGRNAADTLKSLAIMESHGVNLICVDDGLDSSKDSGKLVITILSAVAEMERENIISQAMEGRRQKARAGQWNGGFAPVGYSLVNGQLQVNQEEAESVKMIFDLFANSDMGTIAIAKHLANLDIKKPIRHNSTLPYFSSSGIARILDNPVYSGKIAFGRRESTRDKITGETKVTQSENYILADGVHEAIIDDETWNKVRKKREANAHKYKRENPNKGDSIYILSGLIKCPLCHAGLYGNKSIKRNKNKKDEYYKNYYYYACKHRKHVDGHKCTFNKQLKTVNLDHEVLSIISKLVSRPDFARKLQEKINLQVDTSRIDSEIEQYKSLFRQLSATKMNLIQQIDSLNFEDPHFQQKLIDLDMRLNTIYDKLADVERLIETSESKREVILKDKMTADNIYKILVNFASFMDVMEDIDKKRLCQILIEKVEIYDDKNKAGRWVKAIHFKLPIIEEDLEISLDNSTSVEAV

SEQ ID NO: 47497 - DNA, 50 bp, Streptococcus suis
  source 1..50: mol_type = genomic DNA
agtttggacaatagtacatcggttgaggcggttgtgaaattgtccaaacg

SEQ ID NO: 47498 - DNA, 40 bp, Streptococcus suis; identical to SEQ ID NO: 47478
  source 1..40: mol_type = genomic DNA

SEQ ID NO: 47499 - DNA, 50 bp, Streptococcus suis
  source 1..50: mol_type = genomic DNA
agtttggacaatagtacatcggttagggcggttgtgaaattgtccaaacg

SEQ ID NO: 47500 - DNA, 40 bp, Streptococcus suis; identical to SEQ ID NO: 47480
  source 1..40: mol_type = genomic DNA

SEQ ID NO: 47501 - protein, 536 aa, Streptococcus suis
MQVEGFSLDAQEAKIQQYANAFDIEIVKTYQDAGKSGKTMLGRTEFMNMISDIESEKDKVDYVLVFKLSRFGRNAADTLKSLAIMESHGVNLICVDDGLDSSKDSGKLVITILSAVAEMERENIISQAMEGRRQKARAGQWNGGFAPVGYSLVNGQLQVNHEEAESVKMIFDLFANSDMGTIAIAKHLANLDIKKPIRHNSTLPYFSSSGIARILDNPVYNGKIAFGRRESTRDKISGETKVTQSENYILTDGIHEAIIDDETWKKVRKKREANAHKYKRENPNKGDSIYILSGLIKCPLCNAGLYGNKSIKRNKNKKDEYYKNYYYYACKHRKHVDGHKCTFNKQLKTGNLDHEVLSIISKLVSRPDFARKLQEKINIQVDTSRIDSEIEQYKSLFRQLSATKMNLIQQIDSLNFEDPHFQQKSIDLDMRLNTIYDKLADVEMLIETSESKREVILKDKMTADNIYKILVNFASFMDVMEDIDKKRLCQMLIEKVEIYDDKNKAGRWVKAIHFKLPIIEEDLEISLDNSTPVEAV

SEQ ID NO: 47502 - DNA, 50 bp, Streptococcus suis; identical to SEQ ID NO: 42092
  source 1..50: mol_type = genomic DNA

SEQ ID NO: 47503 - DNA, 40 bp, Streptococcus suis; identical to SEQ ID NO: 47478
  source 1..40: mol_type = genomic DNA

SEQ ID NO: 47504 - DNA, 50 bp, Streptococcus suis; identical to SEQ ID NO: 47484
  source 1..50: mol_type = genomic DNA

SEQ ID NO: 47505 - DNA, 40 bp, Streptococcus suis; identical to SEQ ID NO: 47480
  source 1..40: mol_type = genomic DNA

SEQ ID NO: 47506 - protein, 578 aa, Faecalibacterium sp
MGYVTKKAAQRFEEKKAAIYVRVSTQYQVDRASLPVQREELINYAKYALGISDYVIFEDAGYSAKNTDRPDYQQMMARMRTGEFSHLLVWKIDRISRNLLDFSVMYAELKELGVVFVSKNEQFDTSSAMGEAMLKIILIFAELERKTTSERVSAVFVSRANDGIWNGGKVPYGYSYDKESKTFSIAEDEAKIVRLIYSLYESEKSIVRVARIMNERGLKSRAGNDWSPTTVHMILSSPFYSGTYRYNYRDESNTKRFREKGKDEWVLVENHHPAIVSPERQAAVGVILESKHYNKNATYQRKNVHVFAGLLTCGCCGSTMAATTDKVRADGWRPSMYICSRRRKSDDCTNKYISDVSLGPFVLNFFANLIKASNSFGRTTSIETLEKKLLRGEALSRVDHIERPGLEELYNHLRSGFDEKRFEPPTIAATETSADLSERDLLLSEKRRLERALNRLKTIYLYGDDEMASKDFNIERERITKALSEVDSRINELDIANAFDLSLSDEAFMQKASQFILTQQLLDKRYVNYERFIRKIDPKIVKDFLNETVSNFCIKDGLTTSILLKNGIELRFSYKTAE

SEQ ID NO: 47507 - DNA, 50 bp, Faecalibacterium sp
  source 1..50: mol_type = genomic DNA
ttcccgcctcgtataaacatcgcatcccccatactgacgggagtcgggat

SEQ ID NO: 47508 - DNA, 40 bp, Faecalibacterium sp
  source 1..40: mol_type = genomic DNA
ttacaagatcagcatcgcatcgccaaagctgaagaaacga

SEQ ID NO: 47509 - DNA, 50 bp, Faecalibacterium sp
  source 1..50: mol_type = genomic DNA
ttcccgcctcgtataaacatcgcatgccccatactgacgggagtcgggat

SEQ ID NO: 47510 - DNA, 40 bp, Faecalibacterium sp
  source 1..40: mol_type = genomic DNA
ttacaagataagaatctaatggctcaacttcaagaaacaa

SEQ ID NO: 47511 - protein, 547 aa, Methylobacterium currus
MPRIKAYSYIRLSSEKQLKGDGETRQIELRDRFVAQHDLDLDETLRDLGVSAFDRDNVERGALGKFLRKVKAREIPRGSYLLVENLDRLSRDNVMRAFRVFMDILEAGIVIATLGDDRIYSEESINQNWTELIISLAVMSRAHEESMRKVQTLRGVWVRKRADRGRKMTRKCPSWLTVSDDGTEWIVNRKRVELIERMLHELASGIGRDKIARRLNADGVKPWGHGREWHGGTVTKFTDNEALIGRLQPCTVERKVVDGVRIEKRIPVGDPIEDYYPKVISDKLWQDARKASDKVARQGKGNTGGRRGTILSNLFGGLAKCDACESPMNYRDRGPRSTPCLRCSGNRNGTCDNESRPRYLPLERTVLSWAKLADEPATQHGIPENEALATAERLRDQAAAIVERLVVAIEQGASLDGRLIQRQTELAQAEEAVVAARRAARAAVPTSSPEARCGIISAVEASRDLPEKERFDVRSAAAQELRDLITEIRCHADGSVTVWTGDMGFRIHIQGDEAWIDGGVEFPSGTMALRWESRDGVVTQPALPVSR

SEQ ID NO: 47512 - DNA, 50 bp, Methylobacterium currus
  source 1..50: mol_type = genomic DNA
ctgccggccaaccttcccaacagggtcgtatgaggaaggttgaccggcac

SEQ ID NO: 47513 - DNA, 40 bp, Methylobacterium currus
  source 1..40: mol_type = genomic DNA
ggccggcatctatcacgtcgtctcgatttccggcctccac

SEQ ID NO: 47514 - DNA, 50 bp, Methylobacterium currus
  source 1..50: mol_type = genomic DNA
ctgccggccaaccttcccaacaggtgcgtatgaggaaggttgaccggcac

SEQ ID NO: 47515 - DNA, 40 bp, Methylobacterium currus
  source 1..40: mol_type = genomic DNA
ggccggcctcgctcaggcctgctccttgtcagccctccac

SEQ ID NO: 47516 - protein, 493 aa, Akkermansia muciniphila
MKAVIYARYSSDSQREESIEGQLRECTAFAEKNGITVLRHYIDRAYSAKTDNRPEFQSMIKDSGKRLFDIVIVWKLDRFARNRYDSVRYKATLKKNGVKVVSATEIISEGAEGIILESVLEGYAEYYSADLSEKVIRGMTDNALKCKFNGGMMPIGYVIDAEQHFQIDPLTAPFVLEAFKRYDGGETISSIMNWLNEQGLTNTRGRKMTFNSVGHILHNRRYIGEFRYRDVIVPDGIPAIVPQDLFDRVQEKLAKNKKAPARHKAEDDYLLTTKLFCGYCGAYLCGESGTSRTGKVHHYYKCVSVKKKRTECHKRPVRKEWIEDLVVGETMKMVMDDKAIEAIVSMLMDLQDRDNVNVPLYEQQLREADTAIGNLLNAIQQGILTRSTKARLEELENRRDELENRLACEKLAKPRVSAEFMTFWLHRFRKLDVRQKSHRKMLIDTFINAIFLYDDKMVITFNYKEGTKTITFAELQEAISNKNGSDLDCLAAP

SEQ ID NO: 47517 - DNA, 50 bp, Akkermansia muciniphila; identical to SEQ ID NO: 41452
  source 1..50: mol_type = genomic DNA

SEQ ID NO: 47518 - DNA, 40 bp, Akkermansia muciniphila
  source 1..40: mol_type = genomic DNA
ggttcgagtcctgccaggcgcaccatttatgcccctcctt

SEQ ID NO: 47519 - DNA, 50 bp, Akkermansia muciniphila
  source 1..50: mol_type = genomic DNA
ggttcggatttggattgccttgcttaaccaaaccaatataatccgaacca

SEQ ID NO: 47520 - DNA, 40 bp, Akkermansia muciniphila
  source 1..40: mol_type = genomic DNA
agctggggtcctgccaggctaaccctggttgccactcctg

SEQ ID NO: 47521 - protein, 554 aa, Nesterenkonia jeotgali
MTATTTAQQPPAATALDRIGETTTLAVSYLRVSTKEQASKGGRDEGFSIPAQREANLRKARELNAIITEEFVDAGESARKADRPELMRMIEYVKTHQVAYCIVHKVDRLARNRADDVTIHLALKEAGVMLVSATENIDETPSGMLLHGIMSTIAEFYSRNLAGEVSKGMNQKAQGGGTNGKAPMGYLNVTKRDELGREVRTVEVDPDRAPLITWAFEAYATGNYSTISLREELIDRGLTTVPTPKRPSKPPVLSTIHKMLTNPYYKGSVRFRGASYDGLHEPLVAPEVWYRVQAVLTAHQTSGEKTQSHDHYLKGSLYCGQCGSRLTLTNAKSRRGVIYPYFMCTGRHARRTNCERKSMFVPDIEAAVEDYYRHVQIPEHVVTALRELVTSEFDRLHQVAKHEAQGYKAERDALRDERTKLMQAHYAGAVPLDLLGTEQDRIARRLAFLDAQINAGDIEYDQAKAHLDDCLALAGDMHAIYMSIDDSLRRIANQAFFDKLIVTDDDAIHGEPGVPFNVFLDRDVQTLAVRQQGRTAESGTQTGDVVGLNNDLLV

SEQ ID NO: 47522 - DNA, 50 bp, Nesterenkonia jeotgali
  source 1..50: mol_type = genomic DNA
ggtttgaacaacgaccttctggtggacctccgtagcagcttctcaaaccc

SEQ ID NO: 47523 - DNA, 40 bp, Nesterenkonia jeotgali
  source 1..40: mol_type = genomic DNA
ggttctctagcctcgggtggaggcaaggggactcgaaccc

SEQ ID NO: 47524 - DNA, 50 bp, Nesterenkonia jeotgali
  source 1..50: mol_type = genomic DNA
ggtttgaacaacgaccttctggtggccctccgtagcagcttctcaaaccc

SEQ ID NO: 47525 - DNA, 40 bp, Nesterenkonia jeotgali
  source 1..40: mol_type = genomic DNA
ggctctctggtggcgggtggcggaaacaggacgcaaaccc

SEQ ID NO: 47526 - protein, 654 aa, Enterobacter cloacae
MKPKLYSYVRFSSAKQRDGNSLERQQDTAAKIAERYDLELDSTAYHDLGMSAFKGKNAYEGKLSEFISQIGKKVPKGSWLVVENLDRISRDDAWSALDIFKSLLKKGIIVVTGMDEKVYKYADVKNNPTDLIISLLMFTRAHDESLTKKNRVEAQARTLIRYNLSRQPGTAAKAIESIGQNVWWVDTKSGNVEPHPVYYNIAQKIIELKQSGETLLGIQRYLNEHYPAPKKRVYKNQEGNIQPPKTEKWGKHLLRTFLNPTVHGQKTFTLDKRDESGAVIYDTDTDEPLKETYTIPDYYPALMSEIDYLTLSQLDHHRAVTRSSFNHPEGNPEPEIPLLSGLGILFCGNCGSFMFKSGSSKNKYRYICGSKIVQGKPCGKKGFTSYQLEHAVLQLIADHVWTNHLEDKTDWYKSEIAKESERIEKLLKLAILTDDIDALAEQINDRKKIKAQLENEFKRYKISRSETQTSGWEQFKHFDVHDTKNPDRKRIRLRVRQAIKRIDCYDINDRYGHFSILFADDKKQRIAIKFNRNRSPGTTYVESQTIKNHDLIKTQGLVLHSFIDELIDPEKFASQLKKDQEASILKPTFITELEEGLHQEIEGKVATYVVTSNESGKATVIIDGVIHDINSLEDIDKFEVDKKHVLLNPQTNHR

SEQ ID NO: 47527 - DNA, 50 bp, Enterobacter cloacae; identical to SEQ ID NO: 36612
  source 1..50: mol_type = genomic DNA

SEQ ID NO: 47528 - DNA, 40 bp, Enterobacter cloacae; identical to SEQ ID NO: 21528
  source 1..40: mol_type = genomic DNA

SEQ ID NO: 47529 - DNA, 50 bp, Enterobacter cloacae
  source 1..50: mol_type = genomic DNA
actgcgaataattgactattaggcctgccaaaagtacaattattcattgt

SEQ ID NO: 47530 - DNA, 40 bp, Enterobacter cloacae; identical to SEQ ID NO: 15550
  source 1..40: mol_type = genomic DNA

SEQ ID NO: 47531 - protein, 494 aa, Ruminococcus lactaris
METKYGYGYVRVSTDKQEELSPDSQAKLLKDFAHKNGIIISKIFYELGVSGRKAEKRPEFQKMIAMAKSSDHPVDAILVWKFSRFARNQEESIVYKSLLKKKHNVDVISVSEPLVDGPFGSLIERIIEWMDEYYSVRLSGEVTRGMTEKAKRGGYQARPPLGYRIAERGKPPVIVEEEAEIIRIIFQKYALEGMGMFDIARYLNLCGFKTSHGKEFERRSVEYILENPTYCGMIRWNRTVNETNEIRPKDEWIIADGQQPAIISKELFDRAAARRNMEYKPRGSRPSSTYRHWLSGLVKCPVCGRTMIAKKIVNGKRTYCYFVCYGYSKGKCLAKNSISSLKLAPAILQSLKDVLNNQQLSFRYIQPEPETAPDLSDILLDQLKRIDEKLDRIKEAYRNGVDTLEEYKENKALVQNEKQLLEKQLAELPAQDSESDQAESALLDRVKNVYEIVNSESVDDVTKNEILKSIIEKIVYNKEKDTLEVYYYYKPQTQ

SEQ ID NO: 47532 - DNA, 50 bp, Ruminococcus lactaris
  source 1..50: mol_type = genomic DNA
gtttgtaggttcttgcaaaaaggtcaacctttccgcaagaacctacaacg

SEQ ID NO: 47533 - DNA, 40 bp, Ruminococcus lactaris
  source 1..40: mol_type = genomic DNA
cttttgacccccactgggtcaaccagttcgggcagctcac

SEQ ID NO: 47534 - DNA, 50 bp, Ruminococcus lactaris
  source 1..50: mol_type = genomic DNA
gtttgtaggttcttgcaaaaaggttcacctttccgcaagaacctacaacg

SEQ ID NO: 47535 - DNA, 40 bp, Ruminococcus lactaris
  source 1..40: mol_type = genomic DNA
cttttgaccctcagtgtcctcaccagtgggagcaggtcat

SEQ ID NO: 47536 - protein, 528 aa, Citrobacter freundii
MKVPVWSYARVSTLNQVDGFGIQRQVNTINQFIQYLVLDHRLPYVLDTENITQMVAEGKSAFKGKNWNPKTKLGQYRKMVMDGVVPDSVLIVENIDRLTRLDPFQAVEIISGLINRGTTILEIETGMTYSRYIPESITVLTMQINRANGESKRKSVMMKKSHQNRYGNVSKVRPRWFDVVEVDGIKQYRTNNTAKAIQRMYNDYVNGIGAAQIVRTYGDTDNGKPWTLVTVLRALSDKRVADDARYPSIIDKALYERVQAMKLSPSKGNTHQKYMLNLFAGMSRCPLCRQAIITKRNSHGGLFTVCLGKRTDKTCTARSIAYNALERPLLNAIVGLDFSEVYGQEESNVLTLRDQWIQNERDIAAFRERLTKASRHEKFAILDELEVMNREQDELTIRLKSVDAPKDITLTYDDDKLDMNVEYRIELNNRMKKLIQRIDIVREDVSKTNYKIFCSIKYWTELLTHLVIIDVDVQRIGRGGTNQLTTTLRSVSSLDLEGNIKGNPDMEALEYWQSVVSKATQKAIESLT

SEQ ID NO: 47537 - DNA, 50 bp, Citrobacter freundii
  source 1..50: mol_type = genomic DNA
gggcgtacttactataccaattgggaacagttgatgtataatgtacgcca

SEQ ID NO: 47538 - DNA, 40 bp, Citrobacter freundii
  source 1..40: mol_type = genomic DNA
cggccccatcagcagcagtgaacagtcggtcgtaccccca

SEQ ID NO: 47539 - DNA, 50 bp, Citrobacter freundii
  source 1..50: mol_type = genomic DNA
gggcgtacttactataccaattggggacagttgatgtataatgtacgcca

SEQ ID NO: 47540 - DNA, 40 bp, Citrobacter freundii
  source 1..40: mol_type = genomic DNA
gggcccagtcagcaggaggggacagcaggtggtccccaca

SEQ ID NO: 47541 - protein, 528 aa, Citrobacter freundii; identical to SEQ ID NO: 47536

SEQ ID NO: 47542 - DNA, 50 bp, Citrobacter freundii; identical to SEQ ID NO: 47537
  source 1..50: mol_type = genomic DNA

SEQ ID NO: 47543 - DNA, 40 bp, Citrobacter freundii
  source 1..40: mol_type = genomic DNA
cggccccatcagcagcagtgaacagtcggtcgtccccccg

SEQ ID NO: 47544 - DNA, 50 bp, Citrobacter freundii; identical to SEQ ID NO: 47539
  source 1..50: mol_type = genomic DNA

SEQ ID NO: 47545 - DNA, 40 bp, Citrobacter freundii; identical to SEQ ID NO: 47540
  source 1..40: mol_type = genomic DNA

SEQ ID NO: 47546 - protein, 534 aa, Vibrio owensii
MSNFNMTPNQPPAKCYSYVRFSTVSQGKEGKDSYIRQTLAAKEYAERMGLEYQDKSFSDLGISGFRSSKKRDGLSSMLEAIQSGAIEPTSTICIDGFDRLSRASFEHTYDTVRLIVGTGVKLHVVQDDMTLDKSSLNDLISIVRLALQSDLAHQESAKKSYLIKQSRLRAREAHRVTGKLPAWIKRDDSTPTGFAFNEMVDCIKELVRLRVEGKSLQSIAKNLNAMGYRTTTGAPWSSAGCRSIIESRALHGSKSYHETDPETGRMLLEPVDIVAGIFPALIDFDVWKSIQQKSKSAPTKVTKVSKKGAYSGLLRCGCCSAGMVMRTTTYTPKESGVPEVRMYRKCIRATEGSCTQTEQVREPETYIDLALSNLKYVTSEKRHVSRVPEIREQIATLEKTEDILLQRGMAEKLADLYMKIDDLKTKLVEAQEEDSKHKVPTETSFAKVIEIKDLEHRNMVLRGLLRGVYFTLLWKYKTQSKWKVTIEQINGLKTTFILSQKHGFGNSHIELLADPLRWTNLVQSDLEPWEVNQD

SEQ ID NO: 47547 - DNA, 50 bp, Vibrio owensii
  source 1..50: mol_type = genomic DNA
acgtatgagactacgtgtagaataaaggttctatacagactctgatacgt

SEQ ID NO: 47548 - DNA, 40 bp, Vibrio owensii
  source 1..40: mol_type = genomic DNA
attcggttggcacgttgtgaaggtgttataccgtacttaa

SEQ ID NO: 47549 - DNA, 50 bp, Vibrio owensii
  source 1..50: mol_type = genomic DNA
acgtatgagactacgtgtagaataatggttctatacagactctgatacgt

SEQ ID NO: 47550 - DNA, 40 bp, Vibrio owensii
  source 1..40: mol_type = genomic DNA
attgtggtgggaccttgtgattgtgtaagtcagtacttaa

SEQ ID NO: 47551 - protein, 584 aa, Pseudomonas fluorescens
MPTAYAYIRYSSKAQGEAGRDSVDRQMASIQAITNQQGIELPPENIYSDTGISAHDGSNKRKGKLKELIDMISDMHIKEGDYIFVESIDRLSRQRLLQAKELVNGILEKGVILITTIDGQRYEKPNETNRIDDLQQDILLSVIAKRAYEESKTKSVRRKSAWNRAKKLAEEEKVIFNAHNPPYGIRYNAELNCFEIEEEEAQEIRDFFESLKYVGVSLSIKKLNTYSKRKWSSRNIKHLIDTKYVLGAYMAQRRDENKKKVFERYIENYYPQIVSYELFNEAIAAMKNRAQRKNYGNQSVGSLNVFRHSIKCDCCEASMLFEKQTNPKGIVYPYFQCYTRKELKNGCDQPRFRFDLAFGLFLELIYQSTTGEDFVVHPWQNEDPNPERQHEWITRESGMKYSLPTQEGADEEERTENFKELLIKLLSNRETRTKDNKKIVELNNLLLEQKSYRDNLMKSFAGFTSGVIPKEFLEVVSKTEANINDIEQNLAELQTQINIKKTTINIYSENDIIDLYKTEDGRLKINQFFVANDITFKFNFDKTTRTLFAKIFQNGFEIDRIAKQFSLHNPLKEFGINNLNEYFN

SEQ ID NO: 47552 - DNA, 50 bp, Pseudomonas fluorescens
  source 1..50: mol_type = genomic DNA
gtgtggaataaccccctaccattcgagaccggtgggtggtattctcacat

SEQ ID NO: 47553 - DNA, 40 bp, Pseudomonas fluorescens
  source 1..40: mol_type = genomic DNA
ggtgttgagagagccactggaatccggccacatcgtgatc

SEQ ID NO: 47554 - DNA, 50 bp, Pseudomonas fluorescens
  source 1..50: mol_type = genomic DNA
gtgtggaataaccccctaccattcccgaccggtgggtggtattctcacat

SEQ ID NO: 47555 - DNA, 40 bp, Pseudomonas fluorescens
  source 1..40: mol_type = genomic DNA
gggcgtgagtgagccactgccaccagcccggatcgtgctc

SEQ ID NO: 47556 - protein, 518 aa, Bifidobacterium dentium
MAKSKRPEINDNNLAIAYYRYSSHSQNEMSIDQQRQQAHAYADAHGLTIVKEYEDAAKTGTNANRPGYQQMLAEVGKLRPNALILWKTDRLGRDRFELVDAKRRIREAGCKLELIAEMSPTDDPESVLFEGIAESFAEYYSRTLSVNIKRGMDYNAEHGLYNGHAVFGYVGRPHEPYSVDEKAAGAVRKMFADYAAGSSMQEVCDELNAAGFRTCRGGKFGVKTMNRMLKNRRYVGEYSEGGVVIPDGMPRLIDDETFQAVQTRLLENRRKGKSKEQAARYWLSGKLYCGRCGAPVTGVSGTSKTGKVYGYYYCANARKHACGLRKMRRESIESLVGELLRFLLTDSELVASLAVDAAAYYAEHYGDGAYLDGLRGQLADVDKQLANVVKAVMAGASGETITTALAELEARKEGLRGAIDVEEAKQALADDAHSIQTYFSRYWRASVGDGEIRQHALDYLVERLVVNDDGLDVVGWLSERRDKPSSFDWEMLSGIAEHDPFAAREAALGFDRFPSGST

SEQ ID NO: 47557 - DNA, 50 bp, Bifidobacterium dentium
  source 1..50: mol_type = genomic DNA
ggttcgaccgcttcccttctggctccaccaaaagcggaacggtcgaactc

SEQ ID NO: 47558 - DNA, 40 bp, Bifidobacterium dentium
  source 1..40: mol_type = genomic DNA
ggttcgattccccgcagctccaccattcgaaagccgccgg

SEQ ID NO: 47559 - DNA, 50 bp, Bifidobacterium dentium; identical to SEQ ID NO: 47557
  source 1..50: mol_type = genomic DNA

SEQ ID NO: 47560 - DNA, 40 bp, Bifidobacterium dentium
  source 1..40: mol_type = genomic DNA
ggtccgagtcccggcggctccaccgttcgcagcccggcga

SEQ ID NO: 47561 - protein, 644 aa, Gordonia terrae
MSTDNGSIDFSAFSTSLEKHRRKQNDARTQAARNEVAALLRKGSAPTELVTAQAASHPDTVARTRGRAGIYLRVSTAEQAHVGGEVEGYSIPYQREVTRARARDLGLLIHDEYVDAGFSGRDTKRPDFLRLLEDIMAGNVTHVIVHKLDRLGRSKRVDFMIDDALERMNGQLVSIAENIDGTPAGKMQLQTLRGIAHYYSDNLGSEVLKGLTTKHARGGTPGRAPLGYLNKRTIDDLADIRWVDPDPERAPLIQWAFETYASGDWSIANLRDALEDKGLRTRRTPRVPSRPVSIGSLHKILSNPYYAGVVTYRGAYREGKHEPLVPLETWIRVQDILHAHNTAGEKDNKHNHHLRGTIWCSHCGQRMVYSKNKGRGGTYEYYFCMGRKDADNPCPRGFVRLSRIEEGIEDLYRAMSLTTEDATAISETVHGELSAHGKQAELDTSAAKKRLTRAQTEQEKLLAAHYDGAIPLELLKKEMKRLSDVIEAATNQLAISGQGLDELRHRADSAIELAHHCHRLYERARPSERRMLNQGFFTRIYINSDGTVSDAELQQPFVHLLAVDKRTTIQHRQKRLRHAMPEQNESDSGDTSTAHVVSLIPRGQRYHQMQQEHSQTAVLLSFTPRPRQTPVLTFAQGLNDEHLA

SEQ ID NO: 47562 - DNA, 50 bp, Gordonia terrae
  source 1..50: mol_type = genomic DNA
gggtttgaacgacgaacatttggcggaaggaacgtcatggctttcaaacc

SEQ ID NO: 47563 - DNA, 40 bp, Gordonia terrae
  source 1..40: mol_type = genomic DNA
gaacgggcttcattcaggtggagccaaggggattcgaacc

SEQ ID NO: 47564 - DNA, 50 bp, Gordonia terrae
  source 1..50: mol_type = genomic DNA
gggtttgaacgacgaacatttggctcaaggaacgtcatggctttcaaacc

SEQ ID NO: 47565 - DNA, 40 bp, Gordonia terrae
  source 1..40: mol_type = genomic DNA
gaaaggggatcctgcaggttcatcctggtggattcaaacc

SEQ ID NO: 47566 - protein, 471 aa, Nocardia abscessus
MQVAVKAVIYVRISKDREGAGLGVERQRDECTELAERLGWTVAGVYEDNDISAYAGKKRPGYDAMCKALEEGEANAVIAWHVDRLHRRPIELEAFIDLCDRHQLEVRTVKAGAFDLSTASGKMIARMLGAASRHEVEHGIERQKAAKLQAARDGKYRGGRRSFGWEPDGMHLRPSEAKAISKGARDALSGVSLNQIAREWNESGLRTSLGGKLFVGREVKKILLRPRNAGISLHEGKDIANGQWEPIFDRDTLTALQVLLKDPTRTRKDAFERKWMGSNVYFCGKCASERVIIWASARRGSNTAPTYRCNAHAHLGRIAEPLDEYVTDLVVERLSRNDARIRLGSDQKIDIDALKASETAIEARLNELVTMFNNDEITGSQLKTGTAQKKAELEAVRQQIATARKKSILANLVLADEGIREAFEACSADVKGKIVDTLMTVTILPAPKGRRPGGKYFDPDYVQIEWKSPQS

SEQ ID NO: 47567 - DNA, 50 bp, Nocardia abscessus
  source 1..50: mol_type = genomic DNA
agcgtgttattcgaatatatgccaggtcgtaagtccgtcagctacgctca

SEQ ID NO: 47568 - DNA, 40 bp, Nocardia abscessus
  source 1..40: mol_type = genomic DNA
accgcgacggccagcgccaggtcgtagacgctgcccagct

SEQ ID NO: 47569 - DNA, 50 bp, Nocardia abscessus
  source 1..50: mol_type = genomic DNA
agcgtgttattcgaatatatgccacctcgtaagtccgtcagctacgctca

SEQ ID NO: 47570 - DNA, 40 bp, Nocardia abscessus
  source 1..40: mol_type = genomic DNA
gccgggccagccaccacctcctcgttgtcgctgcccaggt

SEQ ID NO: 47571 - protein, 547 aa, Nocardia nova
MTAPPLRALLVARLSVMTDESTSPARQLEHSRNAVQARGWTEAGVATDLDVSATKYSPFDRPELGDWLKNRHHEFDAIVVWRLDRLVRSSKDLADLISWCEANGKTLVSATEGFDLSTPFGKAMVAIIAALAELEAGTLSTRVKDSHNALRKMDRWPGGQPPYGYRIVEHPRAGKTLEIDPVSSQAVRIMGEMTLAGKSQWEIAARLTADGFPTPARYYHKEGVSRKTEVSDVWNQSSVGKILKSPATQGYKLIGRSVKERRLARGADGMPIRYTPKGIFTDEEWAQIQEVLKARSRTRERSHGAAPLLGIVYCAGCGDRLYRVVNSHSNGKTYSYYRCVPKSGKPKCEGSTFLESEIQETVDSRVYDNLKALPVTERKFIPGEDHTDELQAVSRAMTTIRDEYDLGLYDYDGGQDEYRERLAALVEKRKLLESLPQREPQYIDEPTGETYAEAYERMNPEERRALLMKAGIRLYVRKLGENGRYAHLIVPDEFPDTFNVPREEYYKRYREWVERPLTPEEEELARNPYPEWDKLAWELRHEYRGKK

SEQ ID NO: 47572 - DNA, 50 bp, Nocardia nova
  source 1..50: mol_type = genomic DNA
gttgtgtaaaccgcgtcgatgcgccaccggatcgactcggttctacaaac

SEQ ID NO: 47573 - DNA, 40 bp, Nocardia nova
  source 1..40: mol_type = genomic DNA
gaggtggtagtcgatgcgccagccggcgtcgttgtcgtag

SEQ ID NO: 47574 - DNA, 50 bp, Nocardia nova
  source 1..50: mol_type = genomic DNA
gttgtgtaaaccgcgtcgatgcgcagccggatcgactcggttctacaaac

SEQ ID NO: 47575 - DNA, 40 bp, Nocardia nova
  source 1..40: mol_type = genomic DNA
gaagagctcctcgatgcgcaggctggcgtagatgcggtag

SEQ ID NO: 47576 - protein, 547 aa, Nocardia nova
MTAPPLRALLVARLSVMTDESTSPARQLEHSRNAVQARGWTEAGVATDLDVSATKYSPFDRPELGDWLKNRHHEFDAIVVWRLDRLVRSSKDLADLIAWCEDNGKTLVSATEGFDLSQPFGKAMVAIIAALAELEAGTLSTRVKDSHNALRKMDRWPGGQPPYGYRIVDHPRAGKTLEIDPVSSQAVRIMGEMTLAGKSQWEIAARLTADGFPTPARYYHKEGVSRKTKVSDVWNQSSVGKILKSPATQGYKLIGRSVKERRLARGVDGMPIRYTPKGIFTDEEWTQIQEVLKARSRTRERSHGAAPLLGIVYCAGCGERLYRVVNTHSNGKKYSYYRCVPKSGKPKCEGSTFLESEIQETVDSRVYDNLKALPVTERKFIPGEDHTDELQAVSRAMTTIRDEYDLGLYDYDGGQDEYRERLAALVEKRKLLESLPQREPQYIDEPTGETYAEAYERMNPEERRALLMKAGIRLYVRKLGENGRYAHLIVPDEFPDTFNVPREEYYKRYREWVERPLTPEEEEEIRNPHPEWDKLAWELRHEYRGKK

SEQ ID NO: 47577 - DNA, 50 bp, Nocardia nova; identical to SEQ ID NO: 47572
  source 1..50: mol_type = genomic DNA

SEQ ID NO: 47578 - DNA, 40 bp, Nocardia nova; identical to SEQ ID NO: 47573
  source 1..40: mol_type = genomic DNA

SEQ ID NO: 47579 - DNA, 50 bp, Nocardia nova; identical to SEQ ID NO: 47574
  source 1..50: mol_type = genomic DNA

SEQ ID NO: 47580 - DNA, 40 bp, Nocardia nova; identical to SEQ ID NO: 47575
  source 1..40: mol_type = genomic DNA

SEQ ID NO: 47581 - protein, 559 aa, Serratia marcescens
MKSYLYSRISTLQQSEGFGIQRQINTVTDFLSFAEIDSRLGFSLDPSNYEILESDLGKSAFTGRNWKPSSSLGRFYESVMRREIIEGILIVENIDRLTRQSNYEAARKLINLITNGITIIEVESGMCFSTKIPESLSILNMSISRAHGESLRKSRMIKKSWDNKKAKLLEQGIAPSKKVPRWLKVIDGAYVVDEVLATLFREAFVLYDKGHGNAAIVARFNSEGRLNNGKQWTTITMHRVLRDKRLNGIMTFGKNTDRDNEELHVFPVVVENELFNRVQEKINGKTKYDRTTKSQKNLFKGMLKCSLCKQAILTTTDGSRNTHARCIGRRDHKNCTARGFIYIPFERGLLQYIRGINWSSIYNSGVDNSQAIENCNVKIATIDFEINELSEELKIADDDVVLALVRTINNKKKTRKSLSDELELLTRELPKVDFDNIKDNLHDPSNVKERQHVNIELQKVVKEIRVLRMSDYIFANISYYTCTVIHMIALDMKGNLITTSSIDENLRFHSDFIEWDLLNNKMEVINTSWTDVHQILWDLWSDIFDEAFEQAKGMFDGKH

SEQ ID NO: 47582 - DNA, 50 bp, Serratia marcescens
  source 1..50: mol_type = genomic DNA
tactgtcttttattgactaacatcttgctattgagatatgatatacacta

SEQ ID NO: 47583 - DNA, 40 bp, Serratia marcescens
  source 1..40: mol_type = genomic DNA
tggcgccatgaccaacgtcttcctgctgatgatgaccgtg

SEQ ID NO: 47584 - DNA, 50 bp, Serratia marcescens
  source 1..50: mol_type = genomic DNA
tactgtcttttattgactaacatcccgctattgagatatgatatacacta

SEQ ID NO: 47585 - DNA, 40 bp, Serratia marcescens
  source 1..40: mol_type = genomic DNA
tggcaccttgaccagcgtccccaagccgtagttgacagtg

SEQ ID NO: 47586 - protein, 485 aa, Nocardioides houyundeii
MRVYGYARLSRASEDSTSIEKQRDIITRTAEARGWDLIGIAADESVSATKARLNRPGLTEAREAVLSSRADAILCWRLDRIARNVVDMSLLLDEGVGIVSATEPYDTTSPMGLAIVQITQVFAGLEAATTGERAKATKAYLRGLRRWGGGPRPYGYRPGPAPDGVGKVLRVDEAEADVIRRIFADLLDGVPVNRLARNLTTEGIPTATGRDWKPASVLNIARALHVSGYLTESVRDQKGHPTRQRRPVHDEGGAPVRAWEPLVDDETAEAVRALVTPQALDEARSSATREGLTAPRPLLHGLAFCPCGEALIRRSRRGRAFYGCRGISEGSHVLVDAAEVDAEAERLFLTAFSGVEIVERVVEVSVSEALAEVETALAVATAEIAHTATGDLPALFERISELTAERERLGASEDRVTTRRTRTPYGAAWDGWAVGERRKHMAALGVRVSVLPARRRGAWDPSRVRLSSEVDYLVGQTEDLSDLLE

SEQ ID NO: 47587 - DNA, 50 bp, Nocardioides houyundeii
  source 1..50: mol_type = genomic DNA
gcgatgtgcttcgttacccactacccttcatggttagcggggtacatgac

SEQ ID NO: 47588 - DNA, 40 bp, Nocardioides houyundeii
  source 1..40: mol_type = genomic DNA
catcacctcgtcccactccccctcgatgttggtgaacatg

SEQ ID NO: 47589 - DNA, 50 bp, Nocardioides houyundeii
  source 1..50: mol_type = genomic DNA
gcgatgtgcttcgttacccactactcttcatggttagcggggtacatgac

SEQ ID NO: 47590 - DNA, 40 bp, Nocardioides houyundeii; identical to SEQ ID NO: 15600
  source 1..40: mol_type = genomic DNA

SEQ ID NO: 47591 - protein, 618 aa, Enterococcus cecorum; identical to SEQ ID NO: 11111

SEQ ID NO: 47592 - DNA, 50 bp, Enterococcus cecorum; identical to SEQ ID NO: 19274
  source 1..50: mol_type = genomic DNA

SEQ ID NO: 47593 - DNA, 40 bp, Enterococcus cecorum
  source 1..40: mol_type = genomic DNA
tcttgactttatgactactaacgttggaccagcagctaaa

SEQ ID NO: 47594 - DNA, 50 bp, Enterococcus cecorum; identical to SEQ ID NO: 39649
  source 1..50: mol_type = genomic DNA

SEQ ID NO: 47595 - DNA, 40 bp, Enterococcus cecorum
  source 1..40: mol_type = genomic DNA
ttttgatttaatggctacttatgctgtacaaacagcttaa

SEQ ID NO: 47596 - protein, 514 aa, Streptomyces sp 32146
MTAAREYLRVSKGKGRTARSIDDQHRDNLAAEQDHGPWTWGEAYRDTGSASKFATKSRDDFDRLTADLADGAFGDPGDVLVLWEISRLARETGKGVKLIDLCETAGYKIHVTSLDRTFDPSNYGDRHSLISGINDAEKEARLLSKRTKRGTDSALAEGRPHGKRPFGYARRYEVVDGRSRVVEQYPDPVEGPLVVELFERVAGWNGRERESIRGIALDWEKRGIVSREKGVPISAQNMRPMLLRKAYIGVRTHKGTESEGNWPAIVGRDLFDAVQEVLADPSRKSTVTSAVRHVLTGTLRCDVCGNAMTITAGDRPKRSGTGHHGQAAYVCRKYGCLRIRQADVDRVIIGDLEAVDPETGESAPELGAILAYLSVPHRHAALSRRPEAGTEESSARAELSRLRVELKELEAAPSPKTARARIARTADMEEIEMDIAALDVKLSKLTAPNPLAGLLPDDPGADLILWWKAAPVTAQRTVAALLLTPELLGQVRIKRVADSTSDAVTDRLRWVRAA

SEQ ID NO: 47597 - DNA, 50 bp, Streptomyces sp 32146
  source 1..50: mol_type = genomic DNA
aaggcccttagttagtacttgtcgacggataaatactcacctacggttga

SEQ ID NO: 47598 - DNA, 40 bp, Streptomyces sp 32146
  source 1..40: mol_type = genomic DNA
accgtccgcctcgacgtcgacggagacatagaggctgggt

SEQ ID NO: 47599 - DNA, 50 bp, Streptomyces sp 32146
  source 1..50: mol_type = genomic DNA
aaggcccttagttagtacttgtcgatggataaatactcacctacggttga

SEQ ID NO: 47600 - DNA, 40 bp, Streptomyces sp 32146
  source 1..40: mol_type = genomic DNA
gccatctgcctccaggtagatggagtcacaggggctaggt

SEQ ID NO: 47601 - protein, 512 aa, Neisseria dumasiana
MKTAIIYARVSTARQADEGISIDSQIERSMKKAADLGANVLNVFRDEGKSGKSDRRPAFQSAVQYCTFEKVDYFIVWSTSRFARNKIDAASYKRLLEGVGTRVVYVSMDIDNRTDEGWFSESLLEIMDEHYSRQISRDTKRSMMKNAEEGYWNGGFVPLGFQTQAVGKRKKLIINEQEAPIVREIFRRYLAGEGTKAIAMELNRRGLSLRNRPFSKDNIRLILGNYVYIGVSVFNRTTNRKPNPESEWVMHETHDGIIDKEAFKAARAKLAEGRETTGKGSPLSQHAFTGLLKCGKCGLAMRIETATGRSRTYSYYNCSGNQKGHGCSSRRIDADKFDRYLLEVVMDKVLHADVVADFITEAQQMFLSKRSERQPRIDLIQSELRDIRGRRKSLYDILEKMGTSAPNMDEMLARAKSYTDRENLLLEELESINNEPEYEPINDIDLKNAVNVLKGVIMKSKSPEKVRAMLQHFIERIDVNDDEIMIHYRPELIIKEKCPEPNVVQSIDSWLP

SEQ ID NO: 47602 - DNA, 50 bp, Neisseria dumasiana
  source 1..50: mol_type = genomic DNA
aaatgtggttcagagcattgatagttggctccccgttctcgcccagctgc

SEQ ID NO: 47603 - DNA, 40 bp, Neisseria dumasiana
  source 1..40: mol_type = genomic DNA
gcctatcttgttgatttatttggctccccgacctgggctc

SEQ ID NO: 47604 - DNA, 50 bp, Neisseria dumasiana
  source 1..50: mol_type = genomic DNA
aaatgtggttcagagcattgataggtggctccccgttctcgcccagctgc

SEQ ID NO: 47605 - DNA, 40 bp, Neisseria dumasiana
  source 1..40: mol_type = genomic DNA
tcctttcttcttcatctctgtggcttccctacctggggac

SEQ ID NO: 47606 - protein, 493 aa, Paenibacillus antibioticophila
MRVAIYIRVSTDMQAEEGFSIEGQRSRLISFAESQDWVIHDFYVDDGYSAKDLKRPDMQRMLEDMEKKLFDVVLVYKLDRLTRSVGDLHSLLKTFDLYGVKFKSATEIFETTTAMGRFFITLVGAMAEWERGTISERVRFGVEQMVAEGRRPGGVVPYGYTQDEQLIPEEAALIREVRDLYMSGKGYKSVAMIMNRSGKLRRGREWTDATVAYTLENPYYAGIIRIGSKTPAGTYVNSKRDERVKCVYGKGSHEPIFTQEEYEELKKYMKRKSQGGFSKVGEYWFSGVLRCGRCGAAMFGRLTTKRTTTKGIVRTQYYICSNRHHSKTCDLPIFRQTHIEHLVFQYINQIQEDMEKLNEEAMKIFADEGKKKSAIDSAKRELSKVAERREKWQYMFVEGLIGKQEIRKRMAEEDKREKEIRQRIAQEQKAFSGIPRIEELVGLAEGWAYFDDQEKKEIIHTVFDKIVVNTDLRKIKGVKNKFFDAYIQEISFN

SEQ ID NO: 47607 - DNA, 50 bp, Paenibacillus antibioticophila
  source 1..50: mol_type = genomic DNA
cactaccacaatacccacgatggactcctatcattgatattgtgtatatc

SEQ ID NO: 47608 - DNA, 40 bp, Paenibacillus antibioticophila
  source 1..40: mol_type = genomic DNA
cgcatgcccagtggataagctgccgtcatggccagtgttc

SEQ ID NO: 47609 - DNA, 50 bp, Paenibacillus antibioticophila
  source 1..50: mol_type = genomic DNA
cactaccacaatacccacgatggaaacctatcattgatattgtgtatatc

SEQ ID NO: 47610 - DNA, 40 bp, Paenibacillus antibioticophila
  source 1..40: mol_type = genomic DNA
cggacttccagtggggaagaagccgtcttggcgagtgtct

SEQ ID NO: 47611 - protein, 557 aa, Pseudomonas fragi
MPKAYAYVRWSTASQGEEGRDSHDRQTTPLQAFTEVTGVPVVETVIDKGISAFRGANARIGQLKGLLDRIESGEIEHGDYIIVESIDRLTRQKLTDSVDLIQSILKKGVRLHTVFDNKTYSYDDPSRDLETLILVGVIAKRAHEESDTKSKRLKSVWVKKRDTAETNVIGKRCPYGFRFDEQSQSFIIVEDEAQEIRQIFDLLKHVGVLESVKQVNKHSKRRWTRTAVLQLINSKSPIGVLRLQRRNENGTKAFDRYVPNYFPKIIDEIEFSAAVAAMKTRLNGRNYGRRTPHHYNIFRHCIQCEEHKCGMIFNLQILGTEKKRYAYLVCSNRAERVCECSNRIRFELVFGTFLAFVRQLSENRYIDERTDKKRKDFTWFSQDQYKQMDTVNDAFSRFFSVRDTSAPKEEIRAKKAKLTTEKSTLEMLEASLAQFDGIIPNTFIRRVADSEARITVLESEIQKLEGTLAIEAETLEITTYEDIIALYETEEGRLKLNTFFITRGITFDVKIDKETNLVGMDIRIKGEKDFNLYTHQFFKQKAPLTPFGIPDLSHIIK

SEQ ID NO: 47612 - DNA, 50 bp, Pseudomonas fragi
  source 1..50: mol_type = genomic DNA
ttattagaaacagctagaccctgtgaccacggtaagctattttctaataa

SEQ ID NO: 47613 - DNA, 40 bp, Pseudomonas fragi
  source 1..40: mol_type = genomic DNA
gctgtccaggttgcccgatgaaatcggtgccatcgacaat

SEQ ID NO: 47614 - DNA, 50 bp, Pseudomonas fragi
  source 1..50: mol_type = genomic DNA
ttattagaaacagctagaccctgtccccacggtaagctattttctaataa

SEQ ID NO: 47615 - DNA, 40 bp, Pseudomonas fragi
  source 1..40: mol_type = genomic DNA
tctctgcagggtgccgtatcccatgggtgccttcgccaat

SEQ ID NO: 47616 - protein, 563 aa, Streptomyces coelicoflavus
MHRDDYPALRSLGFEDDELKELGLWEPAVGSPADLAEMYVRRSKKKDSLSALREQIRRMCAHAVRESKRIRHVWFEQKSASKSYVRREEFEKATAAVTEVGLSKALYVYKTSRLSRRGMGQVGLLLDTFEEQGAYIFVVSEGLDSRTSRTVLAFLSEQARDQVKDLGDFVKLGMDSHKADGKWTGGVTPYGLRAVKGEGRLEHDPKEYPTARRIAEYLLDRKTPAWIADTLNEEGLKTRHGRNWQATGIIALAHAVTWAGLVAQRERMLDKNGQWTGKYHRGGTPMFDKKGKPVSFGEGVITFAEHVKIKSILASRAQKNGPVGNRARGKREVSNLLSGIMHCGRCAVQEVSSGPAYRCYARTNEGAHVCEGVSIGRERADDAVTQAWFGHILSLSPESATLHEIAREWLAYKDPEKEARKAQVTAALESAVSREMKLNKEFFVLGRMTEDMFDSMRVQVGEQITALKAELAELTREADLSPLMDPEALAALWNGAGIAGQRALLRAALTSKGIILKPSQGRGHRVPAIDRLDFHWREASSPEWEAAFEAGVRLVERTRTQNG

SEQ ID NO: 47617 - DNA, 50 bp, Streptomyces coelicoflavus
  source 1..50: mol_type = genomic DNA
cctatggttctgttggtccaagggcaggcttggaccaacgaagccataac

SEQ ID NO: 47618 - DNA, 40 bp, Streptomyces coelicoflavus
  source 1..40: mol_type = genomic DNA
gcccacgtagcaccaggggcaggcgatgtcgctccagatc

SEQ ID NO: 47619 - DNA, 50 bp, Streptomyces coelicoflavus
  source 1..50: mol_type = genomic DNA
cctatggttctgttggtccaagggccggcttggaccaacgaagccataac

SEQ ID NO: 47620 - DNA, 40 bp, Streptomyces coelicoflavus
  source 1..40: mol_type = genomic DNA
gcccatggagcgctagggcccggcactgtgcctgcagatc

SEQ ID NO: 47621 - protein, 461 aa, Streptomyces hygroscopicus
MREVLSWLPRADYVLAAKLDRYARSVLEFQRLLDAAKSTSTTVVTADGVVSPENASIIINVLAAFAEYERDMIKARITDSKKHFRARGNHLGGLAPYGYAVSGPVNNKRWVIDESAASILRECADKLINHGASLTGLTRELNERGVLPPAEHARQRAGRKLRGGKWHSTSLRDVLYSSAVRGWLVQSVPGTKRGALTNQPVLDAEGNPVSAGPEILSAETWSAVRAVLDGKAKGRGSERTGKALLLHVALCSECNGPMYRQRRAVNGKDYSTYVCRAGVGKRGIHRPNVIIARNVEELVTADYLKRFGSFELMRWAEPDGSAVLQLSEITQQIERLAGNLAQLDPNGTAARVVIGQLTALEKRQAELQAEAEHAEGRWVSTGGTIADEWKRRDDEGRRNLLADLGARVVIRPATPGAPKRFDPQRVKPTYQGPTWWQELNPAEAALVDIAREEELSEQFAV

SEQ ID NO: 47622 - DNA, 50 bp, Streptomyces hygroscopicus
  source 1..50: mol_type = genomic DNA
atgtacgcttagaccaggcacccgcccgggtgtctcgcctagcactgcat

SEQ ID NO: 47623 - DNA, 40 bp, Streptomyces hygroscopicus
  source 1..40: mol_type = genomic DNA
gtgaacggtgccgcagccgccctcatggccggtgttcaag

SEQ ID NO: 47624 - DNA, 50 bp, Streptomyces hygroscopicus
  source 1..50: mol_type = genomic DNA
atgtacgcttagaccaggcacccgttcgggtgtctcgcctagcactgcat

SEQ ID NO: 47625 - DNA, 40 bp, Streptomyces hygroscopicus
  source 1..40: mol_type = genomic DNA
gtgacagctgcagcagctgttctgctggccaggggtcaag

SEQ ID NO: 47626 - protein, 541 aa, Faecalibacterium prausnitzii
MEKDKKVTALYCRLSKDDGSNSESLSIRTQKSMLMEYATRNGFGNCQYYVDDGYSGTNSDRPAFQELLDDIREGKVATVITKDQSRLGRNHIETGTYMEIFFPEHGVRYIAINDGYDSNEQSQVDIAPFRNIINEMYAKDTSRKIKSALRTRKKSGKYISSGAPFGYQKDPADHNHLVIDPNTAPVVEYIYSMAEEGLGLHRIAKRLHDEKVLKPCYYKKEMFGRFIDDEKMYDWDSAYISQVLHSPVYAGHIIYEAKPTVSMKSKKRRYIPFEERAIVPNTHEAIIPQDRWENVQRILYSRSSSFMCDKTDYDNIFKGIVRCADCGRTMLVKVEHRRKRNSVLDQTFYCCSTYRKYGAKACDSHNLEARVLHEAVFADIQAHAKAAVSNREALVKKIANQMHLRVSSDRAQHKRDLKQCKARIAEIEDLYAELYEDVSKGLLPEKRFQMLADRYDKEQAELTEKIEQYEREGRAEHDQLDKIQDFIDEVSKYAGITELNYKILHQLIDKILVSRAEKVDGEYVQKIQIFYRFIGPLDAIE

SEQ ID NO: 47627 - DNA, 50 bp, Faecalibacterium prausnitzii
  source 1..50: mol_type = genomic DNA
ccgagaactatcctacagatgcagggtagtgcggttaggtgacttaagag

SEQ ID NO: 47628 - DNA, 40 bp, Faecalibacterium prausnitzii
  source 1..40: mol_type = genomic DNA
atctgtgctacggatgcaggacgcgagggagaactgatct

SEQ ID NO: 47629 - DNA, 50 bp, Faecalibacterium prausnitzii
  source 1..50: mol_type = genomic DNA
ccgagaactatcctacagatgcagcctagtgcggttaggtgacttaagag

SEQ ID NO: 47630 - DNA, 40 bp, Faecalibacterium prausnitzii
  source 1..40: mol_type = genomic DNA
atctgagccaccttttcagcccgggagggaacaatgatct

SEQ ID NO: 47631 - protein, 505 aa, Nocardioides lijunqiniae
MQQVLLELMPTRRCAIYVRISVAQEASVSMDRQVEAAEQYAAARGWTVVEVFRDEGVSATHNKPENRAGWRALLESNEKFDAVLVWKIDRLARRVLDFLHADESLQARGAGIVAVEDPVDMTTAQGRAFAQILAVFGEMEAESIRARVKAARTHLLRSGRVVGGTVPYGWKSTPNPDGGGYVLAQDPDRIDHVRGMVDRVLGGASVYSTVQWLDEVGAPTPTGKGDWIYSTVERILRHPVLAGMVPFNPGNTTKARGTDVLRDADGLPVVDESIAIMPVGEWRAMVNSLDERATAQSLPRALRAKTSGLLSGLVYCADCETRMHRGTTQGRPGYSCPSCHQSITNFEHVVVDEFLRQKGERVRWSVIEEVHEGGAALLPEIEHRLDELDDLIRLAPDRQARQTLQAEQGNLLDLRDDKRAETPNVRYVPTRGTQAFGDDWTEAETVERKRAILDDAMERVWVRRGRPGRRTDAQVLARLTFDWKMPDDLGPIEPPSDKDLADWAK

SEQ ID NO: 47632 - DNA, 50 bp, Nocardioides lijunqiniae
  source 1..50: mol_type = genomic DNA
cgtggctgtttcatacccgcctgcgtacagcccggtatgcaacaggtact

SEQ ID NO: 47633 - DNA, 40 bp, Nocardioides lijunqiniae
  source 1..40: mol_type = genomic DNA
cgtggtcttgccggcctgcgtgccaccggcgaccaggacg

SEQ ID NO: 47634 - DNA, 50 bp, Nocardioides lijunqiniae
  source 1..50: mol_type = genomic DNA
cgtggctgtttcatacccgcctgcctacagcccggtatgcaacaggtact

SEQ ID NO: 47635 - DNA, 40 bp, Nocardioides lijunqiniae
  source 1..40: mol_type = genomic DNA
ccgggcccggccggcctgcctgcccccggggacgacgccg

SEQ ID NO: 47636 - protein, 597 aa, Enterobacter hormaechei
MKQKLYSYQRWSSAVQQDGTTKARQTFAAEEYAKRNDLEVVEIVDAGISGFKSVNSKSGALAKFLAAVDEGIIPNNAYLFVESLDRITRDEIDVALELFMGILRRGITIVTGMDNKVYTHAGIKGNPIDLLTSILLFTRAHEESKTKQNRTNGNALAMIRRFQSGEPTTIKAVGSHPWWIDCTTDKFEAVRRHPTLWQPAQDAINMFMEGVSVFKVVEYLDKTYPHMYKGKAWKTANIRKLRFNKAVYGLREITVDGKEYALPNYFPALITEGQFLRLEKIRETTKYIGKVGEGKTVTDEEGNSKVIGERNNINLLAGMKLFRCGHCNGTMMAMRHGDTIRYLCEKGRGHQNDCKTWSLPGLLVEHTLMLVTTIAYINIQRKGGVEKEDYTAQIASTEQLIEDISKKISNSTRLVLAGLDDVDEVIEQIQELKDSRSNLVLELEVLQRKQLLAQDNTFEGLMMDFFNYAQYGVLQDPVHEYRSKLRDIVYTSIGEVKAWKVDRRLMISFQIKGDDEYYTFSAGDEPYNYIFYYGSPVTLGEDLSPQGNYELPEEVKRRIREHSDVYDASMKLLGTANALLSVVNYPDLDGRMFWPRK

SEQ ID NO: 47637 - DNA, 50 bp, Enterobacter hormaechei
  source 1..50: mol_type = genomic DNA
agatgtgtagaaaaatcttttggcaatcctaaacgaatttctacacatta

SEQ ID NO: 47638 - DNA, 40 bp, Enterobacter hormaechei
  source 1..40: mol_type = genomic DNA
cattattagccacccgggaaatccgaaatacccgattgat

SEQ ID NO: 47639 - DNA, 50 bp, Enterobacter hormaechei
  source 1..50: mol_type = genomic DNA
agatgtgtagaaaaatcttttggccatcctaaacgaatttctacacatta

SEQ ID NO: 47640 - DNA, 40 bp, Enterobacter hormaechei
  source 1..40: mol_type = genomic DNA
cattcttagccacccaggacatcttgtcttccagaatgat

SEQ ID NO: 47641 - protein, 507 aa, Escherichia coli
MKRVISYIRFSSERQAKGDSLRRQSKMVNDWLKAHPEYYLDQDLSFRDLGVSGFTGKHLKGGLGDFLTAIEKGLVKAGDTLLIESLDRLSRQAVDRASELLRNILRSGVDIVTLSDGEHYTSESLKDPLALIKSILIMQRAHEESLRKSERIQAAWDAKKEAAKAGIKVSKRCPAWLRLNDDRKSFSVIPEKVETVKRCFQLRLEGKSIWEIVRTLNAEGHRSMNQYKPGKFGQTSVQDLLKNRSVIGYFTPKGCEEISGYYPAIIDETTFYKVQQLSHSRYGKRSVSDKPLSVNLFKGVIRCSECGHALIITGFSDTRNGIYRCPLRNENRCNAKGLSRKQTDGTLLALLSRLDRFDSDMTNVIDALKLHREHISNNIEKLVQLSLEIEDLSAITIKLKQLKGELSQVDADIEKETQRLKSIDVGCLSDCDLTTKAGRIEAQLIIKSAVKEVVLNAAKRRCKVTFHNSKSITLPITENPSEDVTEAIQSLSEVTERGLIDVDEVII

SEQ ID NO: 47642 - DNA, 50 bp, Escherichia coli
  source 1..50: mol_type = genomic DNA
tagtgtatttagaccttgatgatttttattagacacgtttaaatacacca

SEQ ID NO: 47643 - DNA, 40 bp, Escherichia coli; identical to SEQ ID NO: 5198
  source 1..40: mol_type = genomic DNA

SEQ ID NO: 47644 - DNA, 50 bp, Escherichia coli
  source 1..50: mol_type = genomic DNA
tagtgtatttagaccttgatgattcatattagacacgtttaaatacacca

SEQ ID NO: 47645 - DNA, 40 bp, Escherichia coli
  source 1..40: mol_type = genomic DNA
ttgtgttaatcaggtgattcaaggaagacccttggtacat

SEQ ID NO: 47646 - protein, 507 aa, Escherichia coli
MKRAISYIRFSSEKQSRGDSLRRQAKMVTDWLKAHPEYYLDESLTFRDLGVSGFTGKHLKGGLGDFLTAIEKGLVKAGDTLLIESLDRLSRQDVDQASELLRNILRSGVDVVTLSDGEHYTRESLKDPLALIKSILIMQRAHEESLRKAERIQAAWDAKKEAAKAGIKISRRCPAWLKLNDDRKSFSVIPEKVETVKRCFQLRLEGKSIWEIVRTLNAEGHQTLNQYKAGKFGQTSVQDLLKNRSVIGYFTPKGCEEISGYYPAIIDETTFYKVQQLSYARYGRKPASDKPMAVNLFKGVIRCSECGHALIITGFSDTRNGIYRCPLRNENRCSAKGLSRKQTDGTLLALLSRLDRFDSDMTNTIDTLKLHREHISSNIEKLVQLSLEIEDLSAITSKLRQLKNELSQVDADIEKETQRLKSIDVGCLSDCDLTTKAGRIEAQLIIKSAVKEVVLNTAKRRCKVTFHNGKTITLPITENPSDNVTEAIQSLSEVTERGLIDVDEVII

SEQ ID NO: 47647 - DNA, 50 bp, Escherichia coli; identical to SEQ ID NO: 44957
  source 1..50: mol_type = genomic DNA

SEQ ID NO: 47648 - DNA, 40 bp, Escherichia coli; identical to SEQ ID NO: 5198
  source 1..40: mol_type = genomic DNA

SEQ ID NO: 47649 - DNA, 50 bp, Escherichia coli
  source 1..50: mol_type = genomic DNA
tagtgcatttagaccttgatgattcatattagacacgtttaaatacacca

SEQ ID NO: 47650 - DNA, 40 bp, Escherichia coli; identical to SEQ ID NO: 47645
  source 1..40: mol_type = genomic DNA

SEQ ID NO: 47651 - protein, 507 aa, Escherichia coli
MKRAISYIRFSSEKQSRGDSLRRQSKMVTDWLKAHPEYYLDQDLSFRDLGVSGFTGKHLKGGLGDFLTAIEKGLVKAGDTLLIESLDRLSRQNVDRASELLRNILRSGVDVVTLSDGEHYTRESLKDPLALIKSILIMQRSHEESLRKSERIQAAWNRKKELISEGIKISKRCPAWLKLNDDRKSFSVIPDKVETVKRCFQLRLEGKSIWEIVRTLNAEGHRSMNQYKPGKFGQTSVQDLLKNRSVIGYFTPKGREEISGYYPSIIPESDFYKVQQLSHSRHGRKPVSAKPLSVNLFKGVIRCSECGHALIITGFSDTRSGIYRCPLRNENRCSAKGLSRKQTDGTLLTLLSRLDRFDSDTTNTVDTLKLHREHISSNIEKLVQLSLEIEDLSAITIKLKQLKGELSQVDADIEKETQRLKSIDVGCLSDCDLTTKAGRIEAQLIIKSAVKEVVLNTAKRRCKVTFHNSKSITLPITENPSEDVTEAIQSLSEVTERGLIDVDEVII

SEQ ID NO: 47652 - DNA, 50 bp, Escherichia coli; identical to SEQ ID NO: 47642
  source 1..50: mol_type = genomic DNA

SEQ ID NO: 47653 - DNA, 40 bp, Escherichia coli; identical to SEQ ID NO: 22763
  source 1..40: mol_type = genomic DNA

SEQ ID NO: 47654 - DNA, 50 bp, Escherichia coli; identical to SEQ ID NO: 47644
  source 1..50: mol_type = genomic DNA

SEQ ID NO: 47655 - DNA, 40 bp, Escherichia coli; identical to SEQ ID NO: 47645
  source 1..40: mol_type = genomic DNA

SEQ ID NO: 47656 - protein, 507 aa, Escherichia coli
MKRVISYIRFSSERQAKGDSLRRQSKMVNDWLKAHPEYYLDQDLSFRDLGVSGFTGKHLKGGLGDFLTAIEKGLVKAGDTLLIESLDRLSRQDIDIASELLRRILRAGVDIVTLSDGEHYTRESLKDPLALIKSILIMQRAHEESLRKAERIQAAWDAKKEAAKAGIKISKRCPAWLKLNDDRKTFSVIPEKVETVRRCFQLRLEGKSIWEIVRTLNDEGHQTLNQYKAGKFGQTSVQDLLKNRSVIGYFTPKGCEEIAGYFPPIIPETDFYKVQQLSYSRYGRKPASDKPLSVNLFKGAIRCSECGHALIITGFSDTRSGIYRCPSRNENRCSAKGLSRKQTDGTLLALLSRLDRFDSDTTNTIDTLKLHREHISSNIEKLVQLSLEIEDLSAITSKLKQLKGELSQVNADIEKETQRLKSIDVGCLSDCDLTTKAGRIEAQLIIKSAVKEVILNTAKRRCKVTFHNGKVIDLPITEDPSENVTEAIQSLSEVTERGLIDVDEVII

SEQ ID NO: 47657 - DNA, 50 bp, Escherichia coli
  source 1..50: mol_type = genomic DNA
aggtgtatttagaccttgctaattttcatcagacacgtttaaatacacca

SEQ ID NO: 47658 - DNA, 40 bp, Escherichia coli; identical to SEQ ID NO: 22763
  source 1..40: mol_type = genomic DNA

SEQ ID NO: 47659 - DNA, 50 bp, Escherichia coli
  source 1..50: mol_type = genomic DNA
aggtgtatttagaccttgctaattcacatcagacacgtttaaatacacca

SEQ ID NO: 47660 - DNA, 40 bp, Escherichia coli; identical to SEQ ID NO: 47645
  source 1..40: mol_type = genomic DNA

SEQ ID NO: 47661 - protein, 507 aa, Escherichia coli
MKRAISYIRFSSEKQSRGDSLRRQSKMVNDWLKAHPEYYLDQDLSFRDLGVSGFTGKHLKGGLGDFLTAIEKGLVKAGDTLLIESLDRLSRQAVDRASELLRNILRSGVDVVTLSDGEHYTKESLRDPLSLIKSILIMQRAHEESLRKSERIQAAWNRKKELISEGIKVSRRCPAWLRLNDDRKTFSVIPEKVETVKRCFQLRLEGKSIWEIVRTLNDEGHQSMSQYKPGKFGQTSVQDLLKNRSVIGYFTPKGCEEIAGYYPAIIDETTFYKVQQLSHSRYGRKPVSAKPLSVNLFKGVIRCSECGHALIITGFSDTRNGIYRCPLRNENRCSAKGLSRKQTDGTLLALLSRLDRFDSDMTNTIDMLRLHREHISSNIEKLVQLSLEIEDLSAITIKLKQLKGELSQVDADIEKETQRLKSIDVGCLSDCDLTTKAGRIEAQLIIKSAVKEVVLNTAKRRCKVTFHNGKSITLPITENPSEDVTEAIQSLSEVTERGLIDVDVVEI

SEQ ID NO: 47662 - DNA, 50 bp, Escherichia coli; identical to SEQ ID NO: 47642
  source 1..50: mol_type = genomic DNA

SEQ ID NO: 47663 - DNA, 40 bp, Escherichia coli; identical to SEQ ID NO: 5198
  source 1..40: mol_type = genomic DNA

SEQ ID NO: 47664 - DNA, 50 bp, Escherichia coli; identical to SEQ ID NO: 47644
  source 1..50: mol_type = genomic DNA

SEQ ID NO: 47665 - DNA, 40 bp, Escherichia coli; identical to SEQ ID NO: 47645
  source 1..40: mol_type = genomic DNA

SEQ ID NO: 47666 - protein, 507 aa, Escherichia coli
MKRVISYIRFSSERQAKGDSLRRQSKMVNDWLKAHPEYYLDQDLSFRDLGVSGFTGKHLKGGLGDFLTAIEKGLVKAGDTLLIESLDRLSRQAVDRASELLRNILRSGVDVVTLSDGEHYTKESLKDPLSLIKSILIMQRAHEESLRKAERIQAAWDAKKEAAKAGIKVSRRCPAWLRLNDDRKSFSVIPEKVETVKRCFQLRLEGKSIWEIVRTLNAEGHQTLNQYKAGKFGQTSVQDLLKNRSVIGYFTPKGCEEISGYYPAIIDETTFYKAQQLSYARYGRKPASDKPMAVNLFKGVIRCSECGHALIITGFSDTRSGIYRCPLRNENRCSAKGLSRKQTDGTLLTLLSRLDRFDSDMTNVIDTLKLHREHISSNIEKLVQLSLEIEDLNAITNKLKQLKNELSQVDADIEKETQRLKSIDTGSLSDCDLSTKAGRIEAQLIIRSAVKEVVLNTAKRRCKVTFHNGKVIDLSITETSSEDVTEAIQSLSEVTERGLIDVDEVII

SEQ ID NO: 47667 - DNA, 50 bp, Escherichia coli; identical to SEQ ID NO: 44957
  source 1..50: mol_type = genomic DNA

SEQ ID NO: 47668 - DNA, 40 bp, Escherichia coli; identical to SEQ ID NO: 5198
  source 1..40: mol_type = genomic DNA

SEQ ID NO: 47669 - DNA, 50 bp, Escherichia coli; identical to SEQ ID NO: 47649
  source 1..50: mol_type = genomic DNA

SEQ ID NO: 47670 - DNA, 40 bp, Escherichia coli; identical to SEQ ID NO: 47645
  source 1..40: mol_type = genomic DNA

SEQ ID NO: 47671 - protein, 507 aa, Escherichia coli
MKRVISYIRFSSERQAKGDSLRRQSKMVNDWLKAHPEYYLDQDLSFRDLGVSGFTGKHLKGGLGDFLTAIEKGLVKAGDTLLIESLDRLSRQDIDIASELLRNILRSGVDVVTLSDGEHYTRESLRDPLALIKSILIMQRAHEESLRKSERIQAAWDAKKEAAKAGIKVSKRCPAWLRLNDDRKSFSVIPEKVETVKRCFQLRLEGKSIWEIVRTLNAEGHRSMNQYKPGKFGQTSVQDLLKNRSVIGYFTPKGCEEISGYYPAIIDETTFYKVQQLSHSRYGKRSVSDKPLSVNLFKGVIRCSECGHALIITGFSDTRNGIYRCPLRNENRCNAKGLSRKQTDGTLLALLSRLDRFDSDMTNVIDALKLHREHISNNIEKLVQLSLEIEDLSAITIKLKQLKGELSQVDADIEKETQRLKSIDVGCLSDCDLSTKAGRIEAQLIIKSAVKEVVLNTAKRRCKVTFHNGRAITLPITENPSEDVTEAIQSLSEVTERGLIDVDVVEI

SEQ ID NO: 47672 - DNA, 50 bp, Escherichia coli; identical to SEQ ID NO: 44957
  source 1..50: mol_type = genomic DNA

SEQ ID NO: 47673 - DNA, 40 bp, Escherichia coli; identical to SEQ ID NO: 22763
  source 1..40: mol_type = genomic DNA

SEQ ID NO: 47674 - DNA, 50 bp, Escherichia coli; identical to SEQ ID NO: 47649
  source 1..50: mol_type = genomic DNA

SEQ ID NO: 47675 - DNA, 40 bp, Escherichia coli; identical to SEQ ID NO: 47645
  source 1..40: mol_type = genomic DNA

SEQ ID NO: 47676 - protein, 507 aa, Escherichia coli
MKRAISYIRFSSEKQSRGDSLRRQAKMVTDWLKAHPEYYLDESLTFRDLGVSGFTGKHLKGGLGDFLTAIEKGLVKAGDTLLIESLDRLSRQDVDQASELLRNILRSGVDVVTLSDGEHYTRESLKDPLALIKSILIMQRAHEESLRKAERIQAAWDAKKEAAKAGIKISRRCPAWLKLNDDRKSFSVIPEKVETVKRCFQLRLEGKSIWEIVRTLNAEGHQTLNQYKAGKFGQTSVQDLLKNRSVIGYFTPKGCEEISGYYPAIIDETTFYKVQQLSYARYGRKPASDKPMAVNLFKGVIRCSECGHALIITGFSDTRNGIYRCPLRNENRCSAKGLSRKQTDGTLPALLSRLDRFDSDMTNTIDTLKLHREHISSNIEKLVQLSLEIEDLSAITSKLRQLKNELSQVDADIEKETQRLKSIDVGCLSDCDLTTKAGRIEAQLIIKSAVKEVVLNTAKRRCKVTFHNGKTITLPITENPSDNVTEAIQSLSEVTERGLIDVDEVII

SEQ ID NO: 47677 - DNA, 50 bp, Escherichia coli; identical to SEQ ID NO: 44957
  source 1..50: mol_type = genomic DNA

SEQ ID NO: 47678 - DNA, 40 bp, Escherichia coli; identical to SEQ ID NO: 5198
  source 1..40: mol_type = genomic DNA

SEQ ID NO: 47679 - DNA, 50 bp, Escherichia coli; identical to SEQ ID NO: 47649
  source 1..50: mol_type = genomic DNA

SEQ ID NO: 47680 - DNA, 40 bp, Escherichia coli; identical to SEQ ID NO: 47645
  source 1..40: mol_type = genomic DNA

SEQ ID NO: 47681 - protein, 507 aa, Escherichia coli
MKRAISYIRFSSEKQSRGDSLRRQSKMVTDWLKAHPEYHLDQDLSFRDLGVSGFTGKHLQGGLGDFLTAIEKGLVKAGDTLLIESLDRLSRQDVDQASELLRNILRSGVDVVTLSDGEHYTKESLKDPLALIKSILIMQRSHEESLRKSERIQAAWNRKKELISEGIKISKRCPAWLKLNDDRKSFSVIPEKVETVKRCFQLRLEGKSIWEIVRTLNDEGHQTLNQYKAGSFGQTSVQDLLKNRSVIGYFTPKGCEEIAGYYPAIIDETTFYKVQQLSYSRYGRKPASDKPMAVNLFKGVIRCSECGHALIITGFSDTRSGIYRCPLRNENRCSAKGLSRKQTDGTLLTLLSRLDRFDSDMTNTIDTLKLHREHISSNIEKLVQLSLEIEDLSAITIKLKQLKGELSQVDADIEKETQRLKSIDVGCLSDCDLTTKAGRIEAQLIIKSAVKEVVLNTAKRRCKVTFHNGKVIDLPITENPSEDVTEAIQSLSEVTERGLIDVDEVII

SEQ ID NO: 47682 - DNA, 50 bp, Escherichia coli
  source 1..50: mol_type = genomic DNA
aggtgtatttagaccttgatgatttttattagacacgtttaaatacacca

SEQ ID NO: 47683 - DNA, 40 bp, Escherichia coli; identical to SEQ ID NO: 5198
  source 1..40: mol_type = genomic DNA

SEQ ID NO: 47684 - DNA, 50 bp, Escherichia coli
  source 1..50: mol_type = genomic DNA
aggtgtatttagaccttgatgattcatattagacacgtttaaatacacca

SEQ ID NO: 47685 - DNA, 40 bp, Escherichia coli; identical to SEQ ID NO: 47645
  source 1..40: mol_type = genomic DNA

SEQ ID NO: 47686 - protein, 507 aa, Escherichia coli
MKRAISYIRFSSEKQSRGDSLRRQSKMVTDWLKAHPEYHLDQDLSFRDLGVSGFTGKHLQGGLGDFLTAIEKGLVKAGDTLLIESLDRLSRQDVDQASELLRNILRSGVDVVTLSDGEHYTKESLKDPLALIKSILIMQRSHEESLRKSERIQAAWNRKKELISEGIKISKRCPAWLKLNDDRKSFSVIPEKVETVKRCFQLRLEGKSIWEIVRTLNDEGHQTLNQYKAGKFGQTSVQDLLKNRSVIGYFTPKGCEEIAGYFPSIIPETDFYKVQQLSYSRYGRKPASDKPLSVNLFKGVIRCSECGHALIITGFSDTRSGIYRCPSRNENRCNAKGLSRKQTDGTLLALLSRLDRFDSDMTNTLDTLKLHREHISNNIEKLVQLSLEIEDLSAITSKLKQLKGELSQVDADIEKETQRLKSIDVGCLSDCDLTTKAGRIEAQLIIKSAVKEVVLNTAKRRCKVTFHNGKVIDLPITENPSEDVTEAIQSLSEVTERGLIDVDEVIV

SEQ ID NO: 47687 - DNA, 50 bp, Escherichia coli; identical to SEQ ID NO: 47682
  source 1..50: mol_type = genomic DNA

SEQ ID NO: 47688 - DNA, 40 bp, Escherichia coli
  source 1..40: mol_type = genomic DNA
cggtgttaatcgggtgattttagacagccgcccggttcat

SEQ ID NO: 47689 - DNA, 50 bp, Escherichia coli; identical to SEQ ID NO: 47684
  source 1..50: mol_type = genomic DNA

SEQ ID NO: 47690 - DNA, 40 bp, Escherichia coli; identical to SEQ ID NO: 47645
  source 1..40: mol_type = genomic DNA

SEQ ID NO: 47691 - protein, 507 aa, Escherichia coli
MKRAISYIRFSSEKQSRGDSLRRQSKMVTDWLKAHPEYYLDQDLSFRDLGVSGFTGKHLKGGLGDFLTAIEKGLVKAGDTLLIESLDRLSRQNVDRASELLRNILRSGVDVVTLSDGEHYTRESLKDPLALIKSILIMQRAHEESLRKAERIQAAWDAKKEAAKAGIKISRRCPAWLKLNDDRKSFSVIPEKVETVKRCFQLRLEGKSIWEIVRTLNDEGHQTLNQYKAGKFGQTSVQDLLKNRSVIGYFTPKGCEEIAGYFPPIIPETDFYKVQQLSYSRYGRKPASDKPLSVNLFKGVIRCSECGHALIITGFSDTRSGIYRCPSRNENRCNAKGLSRKQTDGTLLALLSRIDRFDSDMTNTIDTLKLHREHISSNIEKLVQLSLEIEDLSAITSKLKQLKGELSQVDADIEKETQRLKSIDVGCLSDCDLTTKAGRIEAQLIIKSAVKEVVLNTAKRRCKVTFHNGKVIDLPITEDPSEDVTEAIQSLSEVTERGLIDVDEVII

SEQ ID NO: 47692 - DNA, 50 bp, Escherichia coli; identical to SEQ ID NO: 47642
  source 1..50: mol_type = genomic DNA

SEQ ID NO: 47693 - DNA, 40 bp, Escherichia coli; identical to SEQ ID NO: 5198
  source 1..40: mol_type = genomic DNA

SEQ ID NO: 47694 - DNA, 50 bp, Escherichia coli; identical to SEQ ID NO: 47644
  source 1..50: mol_type = genomic DNA

SEQ ID NO: 47695 - DNA, 40 bp, Escherichia coli; identical to SEQ ID NO: 47645
  source 1..40: mol_type = genomic DNA

SEQ ID NO: 47696 - protein, 507 aa, Escherichia coli
MKRVISYIRFSSERQAKGDSLRRQSKMVTDWLKAHPEYYLDQDLSFRDLGVSGFTGKHLKGGLGDFLTAIEKGLVKAGDTLLIESLDRLSRQNVDRASELLRNILRSGVDVVTLSDGEHYTRESLKDPLALIKSILIMQRSHEESLRKSERIQAAWNRKKELISEGIKISKRCPAWLKLNDDRKSFSVIPDKVETVKRCFQLRLEGKSIWEIVRTMNAEGRQTLNQYEAGSFGQSSVQDLLKNRSVIGYFTPKGCEEIAGYYPAIIDETTFYKVQQLSYARYGRKPASDKPLSVNLFKGVIRCSECGHALIITGFSDTRSGIYRCPLRNENRCSAKGLSRKQTDGTLLTLLSRLDRFDSDTTNIIDMLRLHREHISSNIEKLVQLSLEIEDLSAITSKLKQLKNELSQVDADIEKETQRLKSIDVGCLSDCDLTTKAGRIEAQLIIKSAVKEVVLNTAKRRCKVTFHNGRAITLPITENPSEDVTEAIQSLSEVTERGLIDVDEVII

SEQ ID NO: 47697 - DNA, 50 bp, Escherichia coli; identical to SEQ ID NO: 47642
  source 1..50: mol_type = genomic DNA

SEQ ID NO: 47698 - DNA, 40 bp, Escherichia coli; identical to SEQ ID NO: 22763
  source 1..40: mol_type = genomic DNA

SEQ ID NO: 47699 - DNA, 50 bp, Escherichia coli; identical to SEQ ID NO: 47644
  source 1..50: mol_type = genomic DNA

SEQ ID NO: 47700 - DNA, 40 bp, Escherichia coli; identical to SEQ ID NO: 47645
  source 1..40: mol_type = genomic DNA

SEQ ID NO: 47701 - protein, 497 aa, Escherichia coli
MKRAISYIRFSSEKQSRGDSLRRQAKMVTDWLKAHPEYYLDESLTFRDLGVSGFTGKHLKGGLGDFLTAIEKGLVKAGDTLLIESLDRLSRQDVDQASELLRNILRSGVDVVTLSDGEHYTRESLKDPLALIKSILIMQRAHEESLRKAERIQAAWDAKKEAAKAGIKISRRCPAWLKLNDDRKSFSVIPEKVETVKRCFQLRLEGKSIWEIVRTLNAEGHQTLNQYKAGKFGQTSVQDLLKNRSVIGYFTPKGCEEISGYYPAIIDETTFYKVQQLSYARYGRKPASDKPMAVNLFKGVIRCSECGHALIITGFSDTRNGIYRCPLRNENRCSAKGLSRKQTDGTLLALLSRLDRFDSDMTNTIDTLKLHREHISSNIEKLVQLSLEIEDLSAITSKLRQLKNELSQVDADIEKETQRLKSIDVGCLSDCDLTTKAGRIEAQLIIKSAVKEVVLNTAKRRCKVTFHNGKTITLPITENPSDNVTEAILNRPGNPGD

SEQ ID NO: 47702 - DNA, 50 bp, Escherichia coli; identical to SEQ ID NO: 44957
  source 1..50: mol_type = genomic DNA

SEQ ID NO: 47703 - DNA, 40 bp, Escherichia coli; identical to SEQ ID NO: 5198
  source 1..40: mol_type = genomic DNA

SEQ ID NO: 47704 - DNA, 50 bp, Escherichia coli; identical to SEQ ID NO: 47649
  source 1..50: mol_type = genomic DNA

SEQ ID NO: 47705 - DNA, 40 bp, Escherichia coli; identical to SEQ ID NO: 47645
  source 1..40: mol_type = genomic DNA

SEQ ID NO: 47706 - protein, 561 aa, Rhodococcus ruber
MPTATEAPVTTPITGDGLNDAQRAVAYIRVSTKEQAERGGFEEGFSIPAQRDAISRAAAEAGAVIVEEFIDAGETATNARRPDLQRMLAFIKSNRVDLCIVHKLDRLARNRADDVAIHLALRQAGVTLVSVTENIDETPTGMLLHGIMSTIAEFYSRNLAGEVTKGLQQKAAAGGTVSKAPLGYLNVRERDPQGREVRTVTVDPERAPLVAWAFEAYAAGNRSLSDLADELAARGLTSLPTPKRPAKPIGASTLQRMLRNPYYKGDIIYKGARHLGTHDRLVHPTVWTKVQNVLDAHNVAGDRTQTHEHYLKGSLYCGCGARMTINKARNRHGETYPYFICLGRHANTTACERQAVLVSTVEHLVAEHYRTVQLSPEAADALTGMIEDIFDRIDAESEAQRRDLTRQKERLEDEQLRLLQAHYADAISLPVLKKEQHRIEGMLADIDQRLNTYRAGREDAKLRLRAYLHLATNAHAFYLACDEGRRRLCNQAFFTKITLTENLDVTSEFTGVYETILDPTNRLHAEFWQRTGQLHPDIDLNNETTLPTDHGGRVGTSTKWW

SEQ ID NO: 47707 - DNA, 50 bp, Rhodococcus ruber
  source 1..50: mol_type = genomic DNA
gggttggaacttcgaccaaatggtggaagtttcgagagtacgttccaacc

SEQ ID NO: 47708 - DNA, 40 bp, Rhodococcus ruber
  source 1..40: mol_type = genomic DNA
cgcctcgtgtcgcgatggtggagctaaggggactcgaacc

SEQ ID NO: 47709 - DNA, 50 bp, Rhodococcus ruber
  source 1..50: mol_type = genomic DNA
gggttggaacttcgaccaaatggtgaaagtttcgagagtacgttccaacc

SEQ ID NO: 47710 - DNA, 40 bp, Rhodococcus ruber
  source 1..40: mol_type = genomic DNA
cgcccgttgtctccctggtgaagaaaatgggactctaacc

SEQ ID NO: 47711 - protein, 490 aa, Bacillus thuringiensis; identical to SEQ ID NO: 35531

SEQ ID NO: 47712 - DNA, 50 bp, Bacillus thuringiensis
  source 1..50: mol_type = genomic DNA
ttttatccttattgacatatgaggaatgccatgtataattagggggtaaa

SEQ ID NO: 47713 - DNA, 40 bp, Bacillus thuringiensis; identical to SEQ ID NO: 34213
  source 1..40: mol_type = genomic DNA

SEQ ID NO: 47714 - DNA, 50 bp, Bacillus thuringiensis
  source 1..50: mol_type = genomic DNA
ttttatccttattgacatatgaggtatgccatgtataattagggggtaaa

SEQ ID NO: 47715 - DNA, 40 bp, Bacillus thuringiensis
  source 1..40: mol_type = genomic DNA
atgcattctttacaatgcctagagggtatggtggatagga

SEQ ID NO: 47716 - protein, 490 aa, Bacillus cereus; identical to SEQ ID NO: 35531

SEQ ID NO: 47717 - DNA, 50 bp, Bacillus cereus; identical to SEQ ID NO: 35532
  source 1..50: mol_type = genomic DNA

SEQ ID NO: 47718 - DNA, 40 bp, Bacillus cereus; identical to SEQ ID NO: 34213
  source 1..40: mol_type = genomic DNA

SEQ ID NO: 47719 - DNA, 50 bp, Bacillus cereus
  source 1..50: mol_type = genomic DNA
ttttatccttattgacatatgaggtatgccatgtataattaggggataaa

SEQ ID NO: 47720 - DNA, 40 bp, Bacillus cereus; identical to SEQ ID NO: 47715
  source 1..40: mol_type = genomic DNA

SEQ ID NO: 47721 - protein, 515 aa, Faecalibacterium sp
MAKKKKPAGGIAVIYARYSSHNQRDVSIEQQIEACRKHAAELGLTIIATYEDRAISGRTDNRPAFQRLMHDAEKGKFSYVLAWKSNRMGRNMMQAMVNESRLMDCGIKVYYAEEDFDDSAAGRFALRSMMNVNQFYSDNLAEDVRRGLMDNANKCMVNGRQPLGYKRGKDGKVVVDEPAAAIVREVYTRVASGELFTDIARDLNRRGIKTADKGEWNKNSFHRLCSNEKYRGIYIYGDVRIEGGIPTIIDDTLWYKVQEALRVKKLKRNGRHRPGDEDYLLTGKLRCGKCGGYMIGMSGRSKTGDIHYYYACQNRRVGRTCDKKNIRRDIIEPAVAQAIKEYCLTDDAIEWIADKTVEYWEKADRNLQLDSIEGDLAAVQSSISNVMKAIEMGVVTETTRDRLIELEKQRTDLKSKLALAKEEVVHVDRKKLISSLLLFRNGDIHDRQYQEDLFKTFLISVYVYDDDDNGHLKIVFNAFGDNDTVDLPIDFGETDNQSAFSDGAEKFDYSLHRST

SEQ ID NO: 47722 - DNA, 50 bp, Faecalibacterium sp
  source 1..50: mol_type = genomic DNA
agttcgattattctctccatcggtcaaccaaaagagaactaggcgaacac

SEQ ID NO: 47723 - DNA, 40 bp, Faecalibacterium sp
  source 1..40: mol_type = genomic DNA
agttcgattctctcatccccaaccagaaagccatctgatt

SEQ ID NO: 47724 - DNA, 50 bp, Faecalibacterium sp
  source 1..50: mol_type = genomic DNA
agttcgattattctctccatcggtataccaaaagagaactaggcgaacac

SEQ ID NO: 47725 - DNA, 40 bp, Faecalibacterium sp
  source 1..40: mol_type = genomic DNA
ggttttattttatcatatcatagcagataaccatctgatt

SEQ ID NO: 47726 - protein, 485 aa, Mycobacteroides saopaulense
MVGGTQQLVRAGCYLRISSDPRDRREGVDRQREDTSALCEVKGWEAARYYIDNDRSASNGKDRPEWDRLLADIESGDIDAIAAWDQDRGWRMMSELEELRRFFKSLGRRVQFATTGQGDIDLYSPTGVLAVQIKTAVSEHEIAMMKVRMLRAARHKAEQGKPKWRKAFGYLPETRPKHEDDGRRELDPVTAPLVQQAYAAVLAGGSLMDITRDWNTREVYGLNGQPWTAATLSLFLRAPRNAGLRAHNGEIVGPGTWEPLVDEATWRAAQTVMNAPGRAPGRKSVRKHLLTGVMLCGKCIRELNSRLSGRWAMQSGGAGSRAHSIVYACKTCRGCSIRAEHVEPLLYQLISARLARPDAVDLLKAEQHDAAEAEALRLERMTLLARLDEVADERADGLIDGRGYRRATERIQAKLDDIERRQQDGERLRVFDGIPLGKPEVADAVERLSADRFRAVLDVLCVITVLPVGKGGKAFKPERVQIVWR

SEQ ID NO: 47727 - DNA, 50 bp, Mycobacteroides saopaulense
  source 1..50: mol_type = genomic DNA
aagagtagttttcgcagtcgatagtgttattgactgcgcgaagtacacta

SEQ ID NO: 47728 - DNA, 40 bp, Mycobacteroides saopaulense
  source 1..40: mol_type = genomic DNA
aaacgtcttcagtagatgatgcttgcggcacaatgctttg

SEQ ID NO: 47729 - DNA, 50 bp, Mycobacteroides saopaulense
  source 1..50: mol_type = genomic DNA
aagagtagttttcgcagtcgataggtttattgactgcgcgaagtacacta

SEQ ID NO: 47730 - DNA, 40 bp, Mycobacteroides saopaulense
  source 1..40: mol_type = genomic DNA
aagggccttcagtagatgagtcagggggcagaatgggttc

SEQ ID NO: 47731 - protein, 628 aa, Vibrio natriegens
MDEKPRIAHIYSRVSKGTQVKGDGLRRQIEIASKFIEDVNISNSRDGLPVYTLADSPIYDRGLSAYFGLNTDENAGLGAFLKAAENGQVEKGTLLIVEAIDRISRLPVDDARALFARFKKYGIDVAICRFNLIIYHDKSSDLGQDLLITTAIHLAHLESEQKSKRIRARFTHKRLLEKEGGERRTSMSPSWIELSKDKTHFVLIPERARIVRKMVDLKLQGWGAHRITVYLNEQGYPCWNRSNTWYTKIVEKYLKMIQLVGDFQPVEHVHGEKGVRKEPVGDVIKGYYPALITEEEWIRLKASFKRSGGRQTGAFSNLFSCMLYCPTCGSCMSYFKPNRGRIKVRCRKQIDKQGCDQRALNYEEIEPRLIKALAGLDYAKINNNSFASLQKELNTLEAQVAELEASADDIKTQMLEESDPRIISVYVNKLKAIYTEQDKAKARFEKLSTQTSDYDVNTLEQLQLERNEDRERYNGFVRSFVKYVIASDSKLGKPLRIVFKSEAVGEVPVFFNDDKNNKAISDIFTAQKDVNEAAPIRLINMSRVHGNLGKLAAIDTVPVPDDLGDALERIKYLFAVRQAVLQNPEKWQAIADDAGYLSNFHQQSTAKRCFCFVWKKREKTNYIPEIIE

SEQ ID NO: 47732 - DNA, 50 bp, Vibrio natriegens; identical to SEQ ID NO: 9667
  source 1..50: mol_type = genomic DNA

SEQ ID NO: 47733 - DNA, 40 bp, Vibrio natriegens
  source 1..40: mol_type = genomic DNA
agtattggttattccaaccaacgaagagtgggttatcgct

SEQ ID NO: 47734 - DNA, 50 bp, Vibrio natriegens
  source 1..50: mol_type = genomic DNA
tgcgatactaatagaaacccaaccagtgaagagtgggtgatagcatcgca

SEQ ID NO: 47735 - DNA, 40 bp, Vibrio natriegens
  source 1..40: mol_type = genomic DNA
ggtattggttatcccacccagccaagcttggggtataatt

SEQ ID NO: 47736 - protein, 505 aa, Streptomyces niveus
MPIAPEHLALAYTGPFNAYLYGRASVDPNKKGRSVASQLGAGRTLCHDNGWPIVAEFKDVDRSASRYAKRGRERFEEMIEGIEAGRCRILVAWEASRYYRDLEVYLRLRNACMAAGVLLCYNGAVYDLSKRGDRKLTAQDALQAEDEADGIRDRNLRTMRTNAAEGRPHGRLLYGYARRYDPDTGDLIEQYPHPKQSPIVAEIFERVAAGETEYSIIQDLQTRGDRVPGVKWQQYHLSNMLRNPSYMGHRVFQGKDIGPGNWKGIVEEDLFERVQRIVKNPARLTTKDWSVKHLLSGIGRCGECPTWPPLRMLNNRGIISYQCDENYDTVISEAKLDAYVEEAVIEYLGSKAAIAAFRSTDDEKRAEQARALHGRLTTQLKEARKAATTVREDGSLALSVDSLGAMESSLTPQIEKAKEQMEAFTAPPVLRGLIGRENVDELWDDMTIDQRRSVLRAVVNVRLFKARARGVTRIEPGRVQLTFLGEPGFIREWRRGREKSPVPAE

SEQ ID NO: 47737 - DNA, 50 bp, Streptomyces niveus
  source 1..50: mol_type = genomic DNA
tcacctgtccatcacatattttcacccgacttagtgtgttggacagagta

SEQ ID NO: 47738 - DNA, 40 bp, Streptomyces niveus
  source 1..40: mol_type = genomic DNA
gacgatggtcaggttgctgccggaaacggcgaggagatgg

SEQ ID NO: 47739 - DNA, 50 bp, Streptomyces niveus
  source 1..50: mol_type = genomic DNA
tcacctgtccatcacatattttcagtcgacttagtgtgttggacagagta

SEQ ID NO: 47740 - DNA, 40 bp, Streptomyces niveus
  source 1..40: mol_type = genomic DNA
ggagatggacagggtgctggtgaaaagagcagagagatgg

SEQ ID NO: 47741 - protein, 469 aa, Gordonia paraffinivorans
MEHLAAIYARISSDREGEALGVQRQEEDCRDLADRLGVEIVRVYCDNDRSASTRTKTARPDYTAMLQAARDGEFGVILAYSNSRLTRRPRELEDLIELHERHGVQIHTVVSGSDDLATADGRMVARIKANVDAAEAERTAERVARAARQAAEAGKWHGGRRPYGFEPDGVTVRETEAEAIRDAYRLILAGGSLRSVAEDFNSRGLVTSTGHRWTAKGVREMVVNPRYAGRRVYRGEVIGDAVWEAIVDPITFDAVHALIRDPGRRRPHKWAPRRLLSGLALCGVCGATMHCSGANGDQHRYRCSVSLGHVSRSGPRADGYVQSLVIARLSQPDAVDLICQPNDAAQDLDDARQQLEAARTRLDQLAVAFADGDLTASQLRAATQRLNERISDLEERVAVRSRDDVLGQLVTAEDVAAVWETLDTDRRRSIIGELMTIRILPTMKGSRTFRPESISIEWNARSPSDGDRS

SEQ ID NO: 47742 - DNA, 50 bp, Gordonia paraffinivorans
  source 1..50: mol_type = genomic DNA
ttgggctagacccgactgtttgtcgagtcgatgcgcctacaatagcctag

SEQ ID NO: 47743 - DNA, 40 bp, Gordonia paraffinivorans
  source 1..40: mol_type = genomic DNA
cttcggagagcccgtcgccgagtcgatcggctggccggag

SEQ ID NO: 47744 - DNA, 50 bp, Gordonia paraffinivorans
  source 1..50: mol_type = genomic DNA
ttgggctagacccgactgtttgtcacgtcgatgcgcctacaatagcctag

SEQ ID NO: 47745 - DNA, 40 bp, Gordonia paraffinivorans
  source 1..40: mol_type = genomic DNA
cgccggcgagcgcgccgcgacgccgaacaggtggccggag

SEQ ID NO: 47746 - protein, 558 aa, Pseudomonas nitroreducens
MPRAYAYVRWSTAEQGEEGRDSHDRQTTPLEAFTKATGIPVVETIIDKGVSAFKGANARIGQLKGLLDRIESGEIERGDYIIVESIDRLTRQKLNDSVDLIQSILKKGVRLHTVIDQKTYSHDDPSRDLETLLMVGVIAKRAHEESDTKSKRLKSSWLKKRNAAETTIIRKQCPYGLRYDEEAQAFAIVEDEAQEIRDIFENLKYMGILESIKRVNQYSKRRWTRKHIDELIKNKSPIGVLSLRRRNDEDGTKIFDRYVPGYYPKIIDETEFDAAVSAVKGRFNERKSGRRSPNNYNIFRHCIQCHEHKAGMLFNLQGLGVEKKRYAYLVCSNRAERVCECDNRIRFDLVFGTFLAFVKQLSENRYIDERTDKKRKDFTWFSQDQYKQMDTVNDSFSRFFSARDTNTPKEEIRAKKGQLTSKKTALEMLDASLAQFDGLIPKTFIKRIADTEARITALEVEIQNLEGSLAIEAETLEVTTYQDILDLYATEQGRLKLNTFFISRGITFEVNSDKESNMVGLQIKIKGDEKFSLYTSQFFTTKDPLTPFGIPDLSHIIK

SEQ ID NO: 47747 - DNA, 50 bp, Pseudomonas nitroreducens
  source 1..50: mol_type = genomic DNA
ttattagaaaatgctagaccattgaacaacggaagggtattttctaataa

SEQ ID NO: 47748 - DNA, 40 bp, Pseudomonas nitroreducens
  source 1..40: mol_type = genomic DNA
gctgtcgatggagccgtggaacagcacttcgaagtccagc

SEQ ID NO: 47749 - DNA, 50 bp, Pseudomonas nitroreducens
  source 1..50: mol_type = genomic DNA
ttattagaaaatgctagaccattgatcaacggaagggtattttctaataa

SEQ ID NO: 47750 - DNA, 40 bp, Pseudomonas nitroreducens
  source 1..40: mol_type = genomic DNA
actgttgatgtagcattggatcaccaattctaaatccaga

SEQ ID NO: 47751 - protein, 589 aa, Klebsiella pneumoniae
MSAYVTIPRNTLLPAKHNVMNRPRLYSYIRYSSERQGKGNSLERQKSYIAKMAKQIAEEYKLEVFEEYQDLGVSAYKGKNLQEGALSDFIAQVKSGVIPKGSFLLIESLDRFSRQNAMQAVNLFTGLLLNGITVITGIDRQVYKHTDANNDTFQQLMFSVMLFSRANEESSTKSQRTIASALSKIERHQQRKPGDPVIAIKELGSDKWWTDSSSGYVNPHPVLFPIAKEIIQLKQDGWSNRMILQHLKNSYDGPIIGNKKSKGIWNMQHCSRILEPAIYGRKVITINNAEYILDDYYPAIISKDEYEALKLQVGNKGFAPNRESNPEIPLLSGIGILYCAHCSCYMVKAKSTLKNHPHAYRYQCASRDLHQDCNKWGFRASTLERTILQLIADRVFLPTKSQPSGLEGKIADIQSQIENYVLAIGSAKSPEIINNITSKIDQLEQEKQRLVVAKRLYDESIVQMNTEGWDKFREFDINDALAPLRAKIRASIKTVVMRVDCFRIDKKHNLFTITYRDQQKQRVVIENNSGWRKGKVYVEVQTINNTQLIESEGFILHDHIDILINRDKFMMEVKKRLENPRTLIDELTE

SEQ ID NO: 47752 - DNA, 50 bp, Klebsiella pneumoniae
  source 1..50: mol_type = genomic DNA
ccagcgtggagaaagccgtcgccggcattcctcggcggcctgccgggagc

SEQ ID NO: 47753 - DNA, 40 bp, Klebsiella pneumoniae
  source 1..40: mol_type = genomic DNA
gtcgcagggtaaaatgccggtaccatcggcaaatccgggt

SEQ ID NO: 47754 - DNA, 50 bp, Klebsiella pneumoniae; identical to SEQ ID NO: 47752
  source 1..50: mol_type = genomic DNA

SEQ ID NO: 47755 - DNA, 40 bp, Klebsiella pneumoniae
  source 1..40: mol_type = genomic DNA
ctcgcagggtaacattctggctccatgggcaaagcccatt

SEQ ID NO: 47756 - protein, 452 aa, Bacteroides uniformis
MLAFIKQSNKKGSSQPVKTVIVFSTSRFSRTGSTTIIEEVEARGAYVVSATSNYDPRTPVGKYMQLMELANARFQNDEKRATTIENSVKALLKGRWIGKAPRGYDQKTTKKEQIITINEEGKLIRKAFLWKANNKLSNEEIRHRLEAEGLHICKQKLSELFKNPFYCGYMAHKFLQGDIVQGNHPPLISKEIFLKVNGELSKNHSGYEQKIDKEYAPLLGSIKCPCCGKNLSASISTKMRKRFGRTDIGYYVCSRKGCKYNSSTKKVHEAFEEEVNRYALSDKVSELLKMQLTITFEYMNQENRERAKSIKANIKAKEKELEQVETNYALCTDAKKQSICEKVMTKLEKEVRDLKTEFSKVNTEILNLDKFIDFAFKMRSNLFELWELQGLEGRRRLQKLVFPDGFIYDKNNEHIEPKKVNQFFLLKYSYPTGNGDKKKETNREKHDSSLRV

SEQ ID NO: 47757 - DNA, 50 bp, Bacteroides uniformis
  source 1..50: mol_type = genomic DNA
aaaacacgattcgtctcttagagtacccttaacagatgaaatattgaacc

SEQ ID NO: 47758 - DNA, 40 bp, Bacteroides uniformis
  source 1..40: mol_type = genomic DNA
ttttttataaaagtacagtactcgcagcgggacttgaacc

SEQ ID NO: 47759 - DNA, 50 bp, Bacteroides uniformis
  source 1..50: mol_type = genomic DNA
aaaacacgattcgtctcttagagtaaccttaacagatgaaatattgaacc

SEQ ID NO: 47760 - DNA, 40 bp, Bacteroides uniformis
  source 1..40: mol_type = genomic DNA
ttgtttttagaagtacagtaattgcagcaggttttaatct

SEQ ID NO: 47761 - protein, 577 aa, Pseudomonas monteilii
MMRLRSRGTPAMQRKTPVYAYIRMSTIEQAKGDSERRQLGQIERFLQENDGELVEPVFLDRLSSFNGKNIKKGAIKDFLERVKNGQIEKGSVLVIESFDRISRQGGYLAHAVILDIIKNGVDIATLSPYKRYSINSENQFIEGIEIQTLLYRAHEESRTKSDRITRQHQARREKAKDKNVVYGSLPFWLIRTADWIEFKEPEATDVKLCLSLLKTYGMYTATAKINEQRKSSKIFSKETVSHLLNRSAVCGDLQTHRIEYDEAGNKIRVPGEVIHDYYPALISRAEFEELRAEIQNRRTTKSTGRVSGFKNIFRNVMTCTYCFSPMRLAHMKWKNGGKKYLVCTKSETNQCIEKGRLWYDYDDVERVFFNEVNLSILKKSLTQKTKIDDAEIEKLRSNLLKAEDQKTNVLKAIEMGTVSKTLINRLEELEKYSDEIQKRIDELKAENALRRSQNEAAIFDYEQLDAALNDEEQRAVINKILRTNQAEISILKGGIGCDFIIEISVGDRLETEISYHKQDDFINRYEHDLPENQTSDLVIHEDQTDPYAEENEGQVFEMFDSASMPIIEINQHNKKPD

SEQ ID NO: 47762 - DNA, 50 bp, Pseudomonas monteilii
  source 1..50: mol_type = genomic DNA
accatacgaattgactacgccagcatgcaggcataacctgttcgtatagc

SEQ ID NO: 47763 - DNA, 40 bp, Pseudomonas monteilii
  source 1..40: mol_type = genomic DNA
gaccatctgctacgccttcatgcaggccaccggcatggtc

SEQ ID NO: 47764 - DNA, 50 bp, Pseudomonas monteilii
  source 1..50: mol_type = genomic DNA
accatacgaattgactacgccagcctgcaggcataacctgttcgtatagc

SEQ ID NO: 47765 - DNA, 40 bp, Pseudomonas monteilii
  source 1..40: mol_type = genomic DNA
gaccagcccctctgacttcctgcagtccaagggcttggtc

SEQ ID NO: 47766 - protein, 655 aa, Vibrio vulnificus
MKPTIITYLRYSSKQQADGLSEFRQSEINRKFVEKFCAEHDVDLNEVISLKDLGVSAYRGLNLTLGSFSQTIKKFKSGEIKKRFNEDGEINTYLIVESLDRITRTGPFKSTQIFTELLEYTNIVVLADGEKKIYSKKSIDSTHGMMDLFMALISLQRSHTESLMKEFRSRKSWEKKREDLLNYFTLPEDEREGLERPKNATAMCPFWLTAKKDGRGYDFIPENKKVMDFLIEKLLDGNGMTRAVRLLNDEIDAGNLKPKLKKANRKTRHFRAAAYSGLFNSEISTVKGDYLLTESYYPTEDDIEQGKYPEKHLGKRVRKEIAVLKNYYPALMTESQAAYIRKMMDERRSAGTKPNKSIKNLAQGILRCPHCNSTYIKAKDRKNVYLRCNLSREGLCNAKVIKHGVFEHNLLQFCKGLNINKIISNQSSDQVIDSSLKELEQKMMPLKVKKSQLEDDIEQIVKNISNIKIPSLLEKVQDDYLKKENELKKVIQEIDLIETSIMKLQQQIAMSDGDNSLQELIDLTLDEQADDEIRQRFNVELKKVVKSMTVLYADTDDNPFGYHMISIQFLDGVHRLIPVHEKMTDKIHNILPYQDAVKVDSVDFSENVILPEDYVEGREKGKYPNLDGMAKYYQENPTKYLRLKHKMDQVHEIHA

SEQ ID NO: 47767 - DNA, 50 bp, Vibrio vulnificus; identical to SEQ ID NO: 46337
  source 1..50: mol_type = genomic DNA

SEQ ID NO: 47768 - DNA, 40 bp, Vibrio vulnificus
  source 1..40: mol_type = genomic DNA
aacggcgccaagccctatggaaatggtgctaatggctgca

SEQ ID NO: 47769 - DNA, 50 bp, Vibrio vulnificus; identical to SEQ ID NO: 46339
  source 1..50: mol_type = genomic DNA

SEQ ID NO: 47770 - DNA, 40 bp, Vibrio vulnificus
  source 1..40: mol_type = genomic DNA
gactgccaggaccactatgtcaatgatgctgatggctgca

SEQ ID NO: 47771 - protein, 540 aa, Klebsiella grimontii
MPKAISYIRFSSRIQASGDSTKRQNKYINEWLKNNPDYHLDESLRFQDLGISGYSGANAKSGAFGEFLAAVESGVIEAGSVLLVESLDRVSRQDIDTARERLRKILLAGVDVVTLADNSWYKKESLNDPLSLIKAVLIMQRANEESATKSKRLRSAWDAKREEAAKGKIMSRRCVAWLRVSDDMSHFELIPDNVKAVQRVFQLRLEGLPFVRIARQMNEEGFYTLNQRNPVKGAWSHTTVKALLDNRSVIGFKVPSNCTVTKGVKEIPNYYPAVISEEHFYAVQQLKQGAGRRPSSEKPLLTNLFKGVMRCAECGFVTIVNCATEKWHGVYRCSMRYEGRCHAKSINRRLADKALVQGLLYNTNRLSLNRDNGSAIGSLQSELEQLQKQRERLIKLAMLADDTESMAKDLKALNSQIKDAEKAISDVHQREQSTQLETISHLDLTVKKDRIEAQIIIKRIVKEIRLNTAGKKCDVFLHNGLKLLNFPLDRVVDGAQWLEVLPLIDGDEFDFEGFTTKPRYIALEEAPNWVKEMEEQSNQP

SEQ ID NO: 47772 - DNA, 50 bp, Klebsiella grimontii
  source 1..50: mol_type = genomic DNA
gttagttattagagagttgtaattaggactacgaatctcttatgataaac

SEQ ID NO: 47773 - DNA, 40 bp, Klebsiella grimontii
  source 1..40: mol_type = genomic DNA
attggtgtgcagcgttgagagcaccaggtgcccggtctgc

SEQ ID NO: 47774 - DNA, 50 bp, Klebsiella grimontii
  source 1..50: mol_type = genomic DNA
gttagttattagagagttgtaattttgactacgaatctcttatgataaac

SEQ ID NO: 47775 - DNA, 40 bp, Klebsiella grimontii
  source 1..40: mol_type = genomic DNA
tttgcttggcagagctgagttcgccagggtccctgtctgc

SEQ ID NO: 47776 - protein, 526 aa, Mycobacterium intracellulare
MDTTTGLRVLGRLRLSKLTDESTSIVRQREMIRQWCELQGHIVVGWAEDTDVSGTVDPFETVELGDWLQERHPEFDAIAVWKLDRLSRSTINLNKLFAWCLEHGKTVVSVTESIDLGTPVGRLIANVIGFLAEGELEAITERIRSSRVKLREEARWGGGLPPYGYVPEPRPGGGKSLKVDESSRRVVRRIVDDVLAGKPVARIADELNAEGYLTPRQYYETGFTTVKLPYDELPQDKYGHRKPGWHPTNLRRLLRSKALLGHVIHQGQTVRGDDGMPLKIAEEIIDPDEYELVQVHLDRVATSRRGLNRADFGPLYQIAVCFDCGELLQHNKTTAGGKTYRYYRCKNKNKAGHIDCGMLNAGEFEELVSEAFLHEVGDVEDVQRIWVRGDSRAEELNRAVMALDELSAAALRMTSATAKQRLQRQLDSLDTLIAELEAAPAREGSWELRSTGITYRDAWGEGDGMTAARRDLVVRSGITVAAIVAAGTKSFRWEIRIPADVKERMRKRSIASTSTSATRGAVLGAE

SEQ ID NO: 47777 - DNA, 50 bp, Mycobacterium intracellulare
  source 1..50: mol_type = genomic DNA
gctttgtctgacatagcaaccgcctaggccagtgctatgttatcccaata

SEQ ID NO: 47778 - DNA, 40 bp, Mycobacterium intracellulare
  source 1..40: mol_type = genomic DNA
gctgggcgccgcgctggcctacgccgtcgacgtcaagaat

SEQ ID NO: 47779 - DNA, 50 bp, Mycobacterium intracellulare
  source 1..50: mol_type = genomic DNA
gctttgtctgacatagcaaccgcccaggccagtgctatgttatcccaata

SEQ ID NO: 47780 - DNA, 40 bp, Mycobacterium intracellulare
  source 1..40: mol_type = genomic DNA
ggtgggcgcgggcctggcccacaggctcagcgtcaagaat

SEQ ID NO: 47781 - protein, 508 aa, Mycobacterium intracellulare
MTSSTGLRVLGRLRLSKLTDESTSIVRQREMIQQWCELQGHTVVGWAEDTDVSGTVDPFDTAGLGDWLQERHPEFDAIAVWKLDRLSRSTINLNKLFAWCLEHGKTVVSVTESIDLGTPVGRLIANVIGFLAEGELEAITERIRSSRVKLREEARWGGGLPPYGYVPEPKPSGGKGLKVDESSRRVVRRIVDDVLAGKPVARIADELNAEGYLTPRQYYETGFATVKLPYGELPQDKYGHRKPGWHSTNLRRLLRSKALLGHVIHQGQTVRGDDGMPLKIAEEIIDSDEYELVQAHLDRVATSRRGLNRADFGPLYQIAVCFDCGELLQHNKTTAGGKTYRYYRCKNKNKAGHIDCGMLNAGEFEELVSEAFLHEVGDVEDVQRIWVRGDSRAEELNRAVTALDELSAAALRMTSATAKQRLQRQLDSLDALIAELEAAPTREGRWELRPTGITYRDAWGEGDGMTAARRDLVVRSGITVAAIVAAGTKSFRWEIRVPADVKERMRKR

SEQ ID NO: 47782 - DNA, 50 bp, Mycobacterium intracellulare
  source 1..50: mol_type = genomic DNA
attttgtctgacatatctatcgcctaggagatagccacgtcatccaaaac

SEQ ID NO: 47783 - DNA, 40 bp, Mycobacterium intracellulare; identical to SEQ ID NO: 47778
  source 1..40: mol_type = genomic DNA

SEQ ID NO: 47784 - DNA, 50 bp, Mycobacterium intracellulare
  source 1..50: mol_type = genomic DNA
attttgtctgacatatctatcgcccaggagatagccacgtcatccaaaac

SEQ ID NO: 47785 - DNA, 40 bp, Mycobacterium intracellulare; identical to SEQ ID NO: 47780
  source 1..40: mol_type = genomic DNA

SEQ ID NO: 47786 - protein, 511 aa, Anaerotruncus rubiinfantis
MNIAAYCRVSTDKADQLNSLEAQKEFFSEYTKRTGDTLVRLYADEGISGTKIKNRKEFLRMMADAEHGLFDMVVVKDISRFARNTVDLLQNVRKLKSLGIETQFLTANMTSMGNSEFVLTIFGALAQEESANTSKRVKFGKKMNAEKGRVPNIVYGYDKTIGDYFNLAINEEEAAVVRQIYEWYIKDGYGAAKISIFLNERGLRTKRNCQWSQNGVCRILTNELYTGKIINGKQEVTDFLTGQRADKDETEWMVVERPDLRIIEPEVFEQAQQIMQSRGKAFKVDKERQSNKYLFSTLIKCKECGWSFRRTVRTYKNTYVRWVCSGHNGRGADNCPNAVTVDEEELIEVLQEYFAELLKAKKNVIRYVVGEFQRVYKAKDENLNYEKELNAQLAKLQKTRQKYMDMYADDLISREELNDKIGGMRKEIERLENELKMVAYHLTKGEQLESVLGRTFKEIEDITDVHQMTNAQLKRIIQKIEVDKDGNVDIYLRLLGDLGLDETVLIHYDET

SEQ ID NO: 47787 - DNA, 50 bp, Anaerotruncus rubiinfantis
  source 1..50: mol_type = genomic DNA
ccgttctaattcattacgacgaaacatacggaagtgataaaacagaacgg

SEQ ID NO: 47788 - DNA, 40 bp, Anaerotruncus rubiinfantis
  source 1..40: mol_type = genomic DNA
tatcagcaaatccacggtacacaaggatgtaaccgaccgg

SEQ ID NO: 47789 - DNA, 50 bp, Anaerotruncus rubiinfantis
  source 1..50: mol_type = genomic DNA
ccgttctaattcattacgacgaaatgtacggaagtgataaaacagaacgg

SEQ ID NO: 47790 - DNA, 40 bp, Anaerotruncus rubiinfantis
  source 1..40: mol_type = genomic DNA
tttcagtaaaaccaaagcatgaaaggctgtaactgactgg

SEQ ID NO: 47791 - protein, 606 aa, Nocardia cyriacigeorgica
MPIVLMAGPRTAPDQVHLQCHGIHPRSGVHGSDQQGPATIEHRAFLNQQEESQQMIRFAFAGRVSTEDQQDPDASRNWQLGRASALVGQHGQIVAEFFDIGQSRSIPWKRRPAAGRLLELLRHPGRGFDAVVIGEPQRAFYGNQFGLTFPVFVHYGVQLWVPEVGGPIDPDSEAHDLIMSVFGGMSKGERNRIKIRVRAAMAAQAQVEGRYLGGRPPYGYRLADAGPHPNPGKAADGKRLHTLELDPVTAPVVQRIFREYLSGIGIFAIAQRLTADDVLCPSAYDRGRNSHRSGAAWSKSAVRAILGNPRYTGYEVWNKQRKQESLIDVDDVALGHQTRLAWNPKTEWVYSDQPAHTALISKDVFEQTQLRLAARGPQSTGRITARRKHPYAFKGLLFHKACGRRMQGNWNHGMPHYRCRYPSEYALANDLDHPTTVYLREDRLSGPIDSWLATIFHPDRIKHSLTMLEGAQIDNMSAIESARRSLAEHDRKLSRYRAALEAGTDPALVATWTQQVQRERQATAAQLTALEAEQAPNHRMDSDEIHQLVTSLGGLVHILKTADPTDKLEIYRELGLKLTYDHEKQVVVAETAPKPPVCVLSVSGGG

SEQ ID NO: 47792 - DNA, 50 bp, Nocardia cyriacigeorgica
  source 1..50: mol_type = genomic DNA
cgtgtgcgtactgtctgtgtccggagggggaattaaccactacgcacacg

SEQ ID NO: 47793 - DNA, 40 bp, Nocardia cyriacigeorgica
  source 1..40: mol_type = genomic DNA
atgcgcattctgtgtccggagggggacttgaacccccacg

SEQ ID NO: 47794 - DNA, 50 bp, Nocardia cyriacigeorgica
  source 1..50: mol_type = genomic DNA
cgtgtgcgtactgtctgtgtccggtgggggaattaaccactacgcacacg

SEQ ID NO: 47795 - DNA, 40 bp, Nocardia cyriacigeorgica
  source 1..40: mol_type = genomic DNA
atgtccattccatggctaatgggggacctgaacccccact

SEQ ID NO: 47796 - protein, 625 aa, Clostridium symbiosum
MISTLTDTPLVIDGYVRLSRDDNKRNYSSIENQKKIIQQYAEENNMIIRHIYEDDGISGYSFNRPDFQKMMASLDTINVIVAKDLSRIGRHNAKVLLFLEEMEEMGKRVILIDDNYDSFYSDDDIIGIKTWDNERHVKNTSRKVKRIKRMEQENGTLITQPPFGYTRHPLNKQMILIDEEAAAILNLEKEIYLDGNGIRRTAEILSDRGVPTPSMIDKERHESLGLVYNKKVAYQWSFGMVKDTLFNDYNNGVLRTHKKERVTINGKDKKVPKEDQYIFPNHHPKIFDDDTMKLLNEVKDSRHHSQYRGQRTHVNLFSGCLYCKDCGMKLTAINRPNRGKYYLCGTYNKKGKQFCQYAHLVTEETLLDALVKYLILCRDSLADIIQNFDLSKLKVETYTPTDSKQRLEAELEKVKEELKVLITQKVREITANPSMNEIITETYASLQNDKMERISAIEKTLQDLTKEPHIPSTTIKPSLQTALDILNEVLDKQELSRKDIEVLVEKIIVDKDGNVDIYLKHGLGNLAAYDFKADKENLKLTMLIESIRLLEKDVTGFTSVKFLADSLKEMGYPMHKKKFVTYMEHLLDLGLVEKTGIYHYPYRIAATRQQLRDVEKMFIMLGQTG

SEQ ID NO: 47797 - DNA, 50 bp, Clostridium symbiosum
  source 1..50: mol_type = genomic DNA
gttcatcatgctagggcagacaggcggccgacccaaccacgatgtaacat

SEQ ID NO: 47798 - DNA, 40 bp, Clostridium symbiosum
  source 1..40: mol_type = genomic DNA
tgttgggcggccgcgcaggcggtatgccggaaatgatctt

SEQ ID NO: 47799 - DNA, 50 bp, Clostridium symbiosum
  source 1..50: mol_type = genomic DNA
gttcatcatgctagggcagacagggagccgacccaaccacgatgtaacat

SEQ ID NO: 47800 - DNA, 40 bp, Clostridium symbiosum
  source 1..40: mol_type = genomic DNA
ggttggggggaagggaagggaggttgccagaaatgatgtt

SEQ ID NO: 47801 - protein, 560 aa, Clostridium fessum
MPRIRKDKTARSYAEPFWKIGLYIRLSKEDDNEDESESVINQEKILRDFVDSYFEPGTFVIVDVFADDGLTGTDTARPNFKRLEGCIVRKEVNCMIIKSLARGFRNLADQQKFLEEFIPINGARFICTGTPFIDTYANPHSASGLEVPIRGMFNEQFAATTSEEIRKTFKMKRERGEFIGAFATYGYKKDPNDKNSLLVDEEAAEVVKSIYHWFVNEGYSKMGIAKRLNQMGEPNPEAYKKKKGLKYNNPNSGKNDGLWSASTIARILQNEIYTGVMVQGRHRVISYKVHKQISVPEDEWFVVPNTHEAIIDRETFEKAQALHKRDTRTAPGKQEVYLMSGFVRCADCQKAMRRKTARNIAYYSCRSYTDKKICSKHSIRQDKLENAVLAALQMQIALVDQLAEEIERINNAPVINRENKRLSYSLKQAEKQLKQHNDASDSLYLDWKSGEITKEEYRRLKGKIAEQIQQLEANISYLKEEMQIMADGIGADDPYLTAFLKYKNIQSLNRGIVVELIKAVWVHENGEITVDFNFADEYQRIIDYIENNHNIITVIESKAI

SEQ ID NO: 47802 - DNA, 50 bp, Clostridium fessum; identical to SEQ ID NO: 13407
  source 1..50: mol_type = genomic DNA

SEQ ID NO: 47803 - DNA, 40 bp, Clostridium fessum
  source 1..40: mol_type = genomic DNA
tgcaggagctgtcggcgctacaggagctaccggcgcaacg

SEQ ID NO: 47804 - DNA, 50 bp, Clostridium fessum
  source 1..50: mol_type = genomic DNA
tgttgtgcataaataaacggctctggtgccccgtcaatatatgcacaaca

SEQ ID NO: 47805 - DNA, 40 bp, Clostridium fessum
  source 1..40: mol_type = genomic DNA
cggaggagctgtcggcgggggaggagcacctggtgaaatg

SEQ ID NO: 47806 - protein, 587 aa, Klebsiella oxytoca; identical to SEQ ID NO: 17391

SEQ ID NO: 47807 - DNA, 50 bp, Klebsiella oxytoca; identical to SEQ ID NO: 45352
  source 1..50: mol_type = genomic DNA

SEQ ID NO: 47808 - DNA, 40 bp, Klebsiella oxytoca; identical to SEQ ID NO: 24218
  source 1..40: mol_type = genomic DNA

SEQ ID NO: 47809 - DNA, 50 bp, Klebsiella oxytoca
  source 1..50: mol_type = genomic DNA
caatctttttcttggtgtttcgggatccctaatgataaaaatccaatctt

SEQ ID NO: 47810 - DNA, 40 bp, Klebsiella oxytoca
  source 1..40: mol_type = genomic DNA
actcacgaagtgttccaggatgcccagagacaaaaagcca

SEQ ID NO: 47811 - protein, 587 aa, Klebsiella michiganensis; identical to SEQ ID NO: 17381

SEQ ID NO: 47812 - DNA, 50 bp, Klebsiella michiganensis; identical to SEQ ID NO: 46792
  source 1..50: mol_type = genomic DNA

SEQ ID NO: 47813 - DNA, 40 bp, Klebsiella michiganensis; identical to SEQ ID NO: 24218
  source 1..40: mol_type = genomic DNA

SEQ ID NO: 47814 - DNA, 50 bp, Klebsiella michiganensis
  source 1..50: mol_type = genomic DNA
caatctttttcttgatgtttcgggatccctaatgataaaaatccaatctt

SEQ ID NO: 47815 - DNA, 40 bp, Klebsiella michiganensis; identical to SEQ ID NO: 47810
  source 1..40: mol_type = genomic DNA

SEQ ID NO: 47816 - protein, 538 aa, Pseudomonas kuykendallii
MSTSEQLKGFSLERQRNLIADFARKNGLSLEDSHILEDIGRSSFSDDTEQKELTKFFEDLGNDKFQKGDVFALENIDRLTRRGPIDALMKVNQIISKGLKLAIISDKEQRILEEIDVFSIITLSIDASRANKESQVKSDKGLQNWAFKRELAATHKIAMTAQAPAWIDTETYYIMDETKNKQVKRRRYVLNEDRAKTVKLIFELFQNGNGSLKIKNILNEQNIPTFKGIEYWEPSTISKIIRNPATYGMYQPKKQNTGKRDLVAIGEPIENYFPAVISKEIFDQCQQITATNTTRKGRRGKLFTNLFTGLLKCADCDGPIHLLNPGIDKRAKNPKPVNYLICKKGKFTKECITKRLRYEDFENVMLKAIQEINLADVLHENNPLENLIKQQRNLQADIEKKKKLLENFERNFVENDGDLPSFMIAQAKQAEIDIKSLDSEIKSIRLEISQLNVYNSNIDNAIDELKVNGTYEARSKINLILHEIIKHIVIDFELDDYGVMFKNGAKRFINNGIIQNVFRTENTKQRDDEINEILNHKN

SEQ ID NO: 47817 - DNA, 50 bp, Pseudomonas kuykendallii; identical to SEQ ID NO: 18907
  source 1..50: mol_type = genomic DNA

SEQ ID NO: 47818 - DNA, 40 bp, Pseudomonas kuykendallii
  source 1..40: mol_type = genomic DNA
cgccggcaacgcggtcctgatcaagtccgcgcatccctgg

SEQ ID NO: 47819 - DNA, 50 bp, Pseudomonas kuykendallii; identical to SEQ ID NO: 18907
  source 1..50: mol_type = genomic DNA

SEQ ID NO: 47820 - DNA, 40 bp, Pseudomonas kuykendallii
  source 1..40: mol_type = genomic DNA
ccccggccccgctgccccgatcgcggccgcgcacccctgg

SEQ ID NO: 47821 - protein, 529 aa, Micrococcus luteus; identical to SEQ ID NO: 41181

SEQ ID NO: 47822 - DNA, 50 bp, Micrococcus luteus; identical to SEQ ID NO: 41182
  source 1..50: mol_type = genomic DNA

SEQ ID NO: 47823 - DNA, 40 bp, Micrococcus luteus
  source 1..40: mol_type = genomic DNA
gaaccgggccttctgactggtggaggtaaggggattcgaa

SEQ ID NO: 47824 - DNA, 50 bp, Micrococcus luteus
  source 1..50: mol_type = genomic DNA
aggtgttctagtacgtctgaaattaaggacgcgggtggactcaaaccgaa

SEQ ID NO: 47825 - DNA, 40 bp, Micrococcus luteus
  source 1..40: mol_type = genomic DNA
gaaccaggcctggtgactgaaggggaaaatggaatatgaa

SEQ ID NO: 47826 - protein, 513 aa, Rhizobium leguminosarum
MKNKSIELTRTPKAIVYCRVSSTRQKTEGSGLESQEHRCRQYADQKGYEVEAVFPDDASGGGDFMKRPGMVALLSYLAAQPKKSYVVIFDDLKRFARDVEFHMKLRREFEKLGAQIECLNLMLEDTPEGKFLETIVAATGELERSANRRQVIQKMIARLEMGFAVFAPPLGYKYAAERGRGKILVRVEPVASIVCEALEGFASKRFLSHGEVKRFLEAQPSFPKNARGEVYFSRVERMLSHLVYTGYVEFPEWGVSRRKGHHEPIISLETFERIQMRLHEGTTAAVRKDLNEDFPLRGFVLCDDCGQPMTAGWSKGRSKHYPYYLCDTRGCECCRKSVRRDEIEDGFAELLRTLQPTQELYGLAKAMFTDAWKMRASEAIRDKSELENQVRGVEKQIQTLLERIIETASDTVIKAYEGKIEKLERQKLLLEEKVDRISPPTRKLDDFIEPALALLSSPWNIYENGNLPFKRAVLRLVFADPIRYSLKYGYRTANTTIPFKMLASISSVNGEMV

SEQ ID NO: 47827 - DNA, 50 bp, Rhizobium leguminosarum
  source 1..50: mol_type = genomic DNA
tctcgagtgtgaacggagagatggtacactcgacgggagaaagttcgaac

SEQ ID NO: 47828 - DNA, 40 bp, Rhizobium leguminosarum
  source 1..40: mol_type = genomic DNA
ctttatggagagaaagtggtacgccctaggggagtcgaac

SEQ ID NO: 47829 - DNA, 50 bp, Rhizobium leguminosarum
  source 1..50: mol_type = genomic DNA
tctcgagtgtgaacggagagatggaacactcgacgggagaaagttcgaac

SEQ ID NO: 47830 - DNA, 40 bp, Rhizobium leguminosarum
  source 1..40: mol_type = genomic DNA
ctttatggagaaaaagtttaaaaccctagtggagtgtaca

SEQ ID NO: 47831 - protein, 506 aa, Paenibacillus tyrfis
MKAAIVSRVSTKKEVQENSLQNQKDYFEEYCLEKGWDVVEVYTESESGTKFNRKEMNRLIADAKARKFDIILAKELSRLARNQRLALEIKEVIEKHGIHLVTLDGAIDTTTGNTHMFGLFAWIYEQEAQRTSERIKMALETKARKGLFKGSNPPYGYTVCNGKLFVREDEIPSIVQRIFRRYIEGKGFDAIAHELFEEGVPTPSIVAGKKKQSIYWNGSSVRQILENPHYTGDMVQGRETTISVTNKARREKSEADFIVVEHTHEAIISRDVFDTVQQLIESNRRRSPENPDVSSRPHQNVNLFTGVIFCEDCGRGFHYQRNCKGYICGRSHKHGNKACTKHRVREKVLVGIIQEDMQKLAKLFDDQACYNEVKAKLVKARTRVEKELNAAAAKIENVKKLKSKALSRYLEDAIPKSDYDDYVVNQDAELAKLLQDKGRIEASMSAALDSRKLDEVKAVVTSALAFEEVNREVINRFIEKVVVARDSTVKLYYRFAGTSKILELLA

SEQ ID NO: 47832 - DNA, 50 bp, Paenibacillus tyrfis
  source 1..50: mol_type = genomic DNA
ttgtgcaatgctcggcagtcctcacatgtggaatgctgtgtgtcgcttat

SEQ ID NO: 47833 - DNA, 40 bp, Paenibacillus tyrfis
  source 1..40: mol_type = genomic DNA
tatgtttccgcagacggcgcatgtggagtgcgtggtaagg

SEQ ID NO: 47834 - DNA, 50 bp, Paenibacillus tyrfis
  source 1..50: mol_type = genomic DNA
ttgtgcaatgctcggcagtcctcaaatgtggaatgctgtgtgtcgcttat

SEQ ID NO: 47835 - DNA, 40 bp, Paenibacillus tyrfis
  source 1..40: mol_type = genomic DNA
tatgtttccagtgaactcaaatgtggagttcatgggaagg

SEQ ID NO: 47836 - protein, 599 aa, Eubacterium ventriosum
MNTAVNEYNYRFKLTDYAQFDRNRARNVAIYGRVSTEHEAQLSALENQLQWYDDQVKYHPNWTVCERYIDEGITGTQAKKRPAFLKMIEDAKQGKFDLIVTREVCRFARNVVDTLVVTRELKGIGVEVFFIDDNIWTMDGDGELRLSLMATLAQEESRKTSERVKAGQKISRDNGVLYGNGNILGYDRVGDTYVINEEQAETVRMIYDLYLQGYGSMKIAKILTERKRKTASGLIKWSVSNIMRAIKNATYTGTKCYNKSRSNNFLEQKRINNLDMSTYEYVEGDFPAIISQEIWDKAQAIRESRVKPVCVSAGKNTHSKRDSRDIWVNKLRCSCGSSYRKNKWHTKLDGKTSYGYQCYNQLNNGIKRKRAEIGLDTEGYCDSRMITDWKLDFMAKALLEHLWTERKESVLIALDLIKCYYKEEKSNETQSDTVTIQAKLDKANSRLTNLIAMRADGEISKDEYQAMRSPVDEEIKKLQKALDEIPQEKSNPKGLDIEGIRSTLNSLVDFSGSTISHDVVNRFVYLITPTSDTTFDWYVNLNGTADVKATFTAEGRKKNCIIKLEEIEKISSVHRGENEDNAHFIKNPHIFTYLHRQLS

SEQ ID NO: 47837 - DNA, 50 bp, Eubacterium ventriosum; identical to SEQ ID NO: 37462
  source 1..50: mol_type = genomic DNA

SEQ ID NO: 47838 - DNA, 40 bp, Eubacterium ventriosum
  source 1..40: mol_type = genomic DNA
tgctagattagcagcagctcaggcagctatcgctaacaag

SEQ ID NO: 47839 - DNA, 50 bp, Eubacterium ventriosum
  source 1..50: mol_type = genomic DNA
cccccatatttttacctatctgcatgggctgctatcgcaaataggtagga

SEQ ID NO: 47840 - DNA, 40 bp, Eubacterium ventriosum
  source 1..40: mol_type = genomic DNA
tgctggagtggcagcagcctgggcagctttggatgacctg

SEQ ID NO: 47841 - protein, 580 aa, Paenibacillus odorifer; identical to SEQ ID NO: 22526

SEQ ID NO: 47842 - DNA, 50 bp, Paenibacillus odorifer
  source 1..50: mol_type = genomic DNA
gaatgggttatgtaatcgcagacgaatatcattggatacataatccattt

SEQ ID NO: 47843 - DNA, 40 bp, Paenibacillus odorifer
  source 1..40: mol_type = genomic DNA
aaatggactgccgcagacgaatatcattggcttaccagat

SEQ ID NO: 47844 - DNA, 50 bp, Paenibacillus odorifer
  source 1..50: mol_type = genomic DNA
gaatgggttatgtaatcgcagacgtgtatcattggatacataatccattt

SEQ ID NO: 47845 - DNA, 40 bp, Paenibacillus odorifer
  source 1..40: mol_type = genomic DNA
aaaagaacttcagcagatgtgtttcatttgcttggcaaat

SEQ ID NO: 47846 - protein, 567 aa, Malikia spinosa
MEVKKDTKRRVIAYSRFSTKRQEHGDSLERQHAAALRWCTQKGLELDTELTFSDHGRSGFKGHNSKKGALRVLVDMCKEGQIQTGSYILFEAFDRMTRMPIIEAQNLFTELLSTGVVVVTLNNGKEWRHKNLRNISDFLFSVLDLFRGNQESERKSAMLRSAFRAARESGDKWKFASLPGWIGKEGGKKDGAFVVKEELAESVVKVFDLAALGFTSKDIAIRANAENWPIPARLQQTEAWTANMPRRLLLNRAVLGEHEHKQYYNEIEDDEGDVEVEYLSRGKSTGIVVKDYYPRIISDELWAASRVGIKVRGAAPKRDYNKLNFWSGMIFCGTCGAAMHRRQDIKKSGDSIKGTMYCSAKKDGRSNCKPMAMRKFDTTVLSAITTFAASELGNHVGQSSLNEEAEALATLLADAVLRRANVMQAIEKMGFSDAFHERYEALEKEVKELEAKLTATREEAAFAASGSMLDTSFLESVLPHIYSLDSESADIRAALFLKLNRLVDSIIVFPYDLAVVYFRGESHRLTVPLPHKSHVPKPQHKQAELFSTGSVEHAAIKRPVYQSSRFR

SEQ ID NO: 47847 - DNA, 50 bp, Malikia spinosa
  source 1..50: mol_type = genomic DNA
acgtgcttcccccggcgcatgtcctgggctatagttccgggatggcacgt

SEQ ID NO: 47848 - DNA, 40 bp, Malikia spinosa
  source 1..40: mol_type = genomic DNA
gaaaccgtcgaccagttcctgcgccagcagcagcacgttc

SEQ ID NO: 47849 - DNA, 50 bp, Malikia spinosa
  source 1..50: mol_type = genomic DNA
acgtgcttcccccggcgcatgtcccaggctatagttccgggatggcacgt

SEQ ID NO: 47850 - DNA, 40 bp, Malikia spinosa
  source 1..40: mol_type = genomic DNA
gaaacagtaggctggttcccaggctaccagcagaatgttc

SEQ ID NO: 47851 - protein, 582 aa, Brucella anthropi
MDRENTKPLAYSYVRMSTDMQLKGNSLERQKEKSKEYAIRHDLHLVENFEDIGVSAFKGKNIKEGMLGDFISLIENKTVPAGSYLLIESLDRLSRENIFESIPLFIKILKSGIKIVTLIDEQVYGAENADFKDLLYPMVVLSRAHEESVAKSFRVGKAWANKRKNIHHRKLTKVCPAWLKLNTDANSFEVIPGRDDIVKRIFDLADSGYGSYSIGRILNNEAVPPFSEESKGWHASYISRILNNRSVLGEFQPHKLVNGTAEPDGNIVPDYFPQLIAEEQFLRIKHARRKRQVEGAGRKGPVYRNLFSRIAKCAYCASPMRFVDKGPPPKGGQFLRCTNADRHFGCSASHWRYDHFENVFLYFVHELDLIETLKRADEQSERYTLEQKLVSINENIRGKRELLNTTFDMLQTSNASKDFIQSKIEEISSEILELENQKGAVEAKLEKDAALAPVDDQQIKSLIKELQDADDGDLERKRRVVANRLQMMIKSLTLAPDGLRKDAEKLVLSQFGSSEALFDFFETGAQSGEVSTGMSFSVVLLDGIMRRVTVSRREPLKVIQLIAVDKHGLIIETEQTHESLKI

SEQ ID NO: 47852 - DNA, 50 bp, Brucella anthropi
  source 1..50: mol_type = genomic DNA
tgacgattaattagctcatatattgagatgttgtggctaattaatttatc

SEQ ID NO: 47853 - DNA, 40 bp, Brucella anthropi; identical to SEQ ID NO: 29293
  source 1..40: mol_type = genomic DNA

SEQ ID NO: 47854 - DNA, 50 bp, Brucella anthropi
  source 1..50: mol_type = genomic DNA
tgacgattaattagctcatatattacgatgttgtggctaattaatttatc

SEQ ID NO: 47855 - DNA, 40 bp, Brucella anthropi
  source 1..40: mol_type = genomic DNA
gtccaggaagcccaccatgacctggcctaccatgccaggc

SEQ ID NO: 47856 - protein, 497 aa, Streptococcus anginosus
MSKIALYIRLSVEDQMKKDESESIINQRQYLNDYLNRNEEFKSFQREEYIDDGYTGTNEKRPSFQRMLEEVKSGKINAIIVKDLSRFMRDYIALGDYLENIFPFLGIRFIAINDGYDSAKEKGNGTDLDIQFKGLLYDFYTKDISQKIKSVSTELKKQGKFLAWSPPLGYMKDPVDKYNIIIDEKTSWIVRKVFDLALSGMATRKIAAVMNAENIPTPNERKKELTNMDYEYNIVSSENRKNPTWTNGTVTDMLSNENYTGTYVFNMQEKSVLTPRSFKFHPKEEWGRVHNHHEAIISQEEFDKVQAIKESRRFIKGKNTDYPWRQHSPLQGFAKCPTCNHILGFVQSKRPRLDGSVRVHKYFHCRICKCNNVEHKNSRAEKLEEQVLALIKEKYGEVKAEQKDKISVKDLEKQVERLEAKKTSDFEKYKLGKMTKLKFIESKKSIDKALESLSERIAELSKQDEVVKDNELTRELMEKYIDSVLCEGSIVQKIIWK

SEQ ID NO: 47857 - DNA, 50 bp, Streptococcus anginosus; identical to SEQ ID NO: 47017
  source 1..50: mol_type = genomic DNA

SEQ ID NO: 47858 - DNA, 40 bp, Streptococcus anginosus
  source 1..40: mol_type = genomic DNA
aattctagacccttccatgggaacagggaatttctttgcg

SEQ ID NO: 47859 - DNA, 50 bp, Streptococcus anginosus; identical to SEQ ID NO: 47017
  source 1..50: mol_type = genomic DNA

SEQ ID NO: 47860 - DNA, 40 bp, Streptococcus anginosus
  source 1..40: mol_type = genomic DNA
gattctggaccctgcccagggaacatggcacttccttgct

SEQ ID NO: 47861 - protein, 473 aa, Microbacterium maritypicum
MSRTALYLRISRDSDKLGRGVARQRAECEALASRIGLNITQVFEDNDISASGYSKRVRPAFEEMLKRTEGGEFDTLLAWDLDRLIRKPEDGERLIDLNAKSGANIRTVSESVDLTTANGKLFLRIKVDVAAHESEHKADRIKAAHRQRLQEGKPISGRTPFGWKKGGLELEPAEADAIRDGVAHVLAGGSTTSLMRQWNAAGLLGPSGKLWSTASVKNVLRRWRNAGVVEHKGQPLDVESQITAIVSREDLDAIRLKLALQPSPNGRPVAKSWLSGVMTCGVCGLKMYPRKDYYQCQTQTERKREAGDTRKHCSIAKHVAEDRIMHALYFEANHRARWGTVEAADVAKVRKIEDDLLEAQKDRQETTQLLFIKGVDRKGVEARLSELADEIERLERERLENRTATSEAARIADLMGGVQGTGVEFTVAWIEYFKTLTVEEKRDLAKTLTIEVAKGGKGAKRILIKGEVEHFTL

SEQ ID NO: 47862 - DNA, 50 bp, Microbacterium maritypicum
  source 1..50: mol_type = genomic DNA
catacccttaacttgactttcgctaatagcacgatagatttaggggcatg

SEQ ID NO: 47863 - DNA, 40 bp, Microbacterium maritypicum
  source 1..40: mol_type = genomic DNA
cagccctggatacacggcgaagagcaccgagagcggaagg

SEQ ID NO: 47864 - DNA, 50 bp, Microbacterium maritypicum; identical to SEQ ID NO: 47862
  source 1..50: mol_type = genomic DNA

SEQ ID NO: 47865 - DNA, 40 bp, Microbacterium maritypicum
  source 1..40: mol_type = genomic DNA
cagccctggggacatggggaacagcactctgatgggaagg

SEQ ID NO: 47866 - protein, 607 aa, Streptococcus agalactiae
MFCKCGIIRLHRKIQKGGSAVKKDVKVIKGDTTLKRTASGCVQRSIKRVAAYCRVSTDTEDQINSYNSQVEHYTEFIQKNKEWTLAGIYADEAITGTQVDRRIDFQRLINDCMNGDIDMIITKSISRFARNTLDTLKYVRKLKEFNVAVFFEEENINTLTMDGELLLTILSSVAQQEVENISANVKKGLRMKMERGEMVGFQGCLGYDYDPETKSISINEKEAEIVRYIFRRYIEGVGGMVISRELEEQGYLSPRGNKRWTETTVLGIIKNEKYKGDLMMGKTYTVDPISKRRLDNFGEQDKFYIENHHEPIISEEDFEKAQGIRLRRSKNRNTVANNGGKREKYSRKYAFSSMLECGFCGYNLSRRNWHSSSEYTKVIWQCVNATKNGKKYCPHSKGIEEEAIEKAFMESYRQVCHNNVEITNEFLKTVEEELKDNSLAKDLKKITNQLDKILKKEKDLVELRLNESISMDIYQDKYNEIAISKEKLLAEKRTLEVTLTDEKALKKRLEGFKKLLESNKYLEEFDRAVFESIVDKIIIGGTNDEGEIDPAMITIIYKTGKKDSQDGRLFKSRRKNAKEVDEGTDNKLYPQSSDEVNNLCSYPMDNI

SEQ ID NO: 47867 - DNA, 50 bp, Streptococcus agalactiae
  source 1..50: mol_type = genomic DNA
gtgttcctatcctatggacaacatatgtagagtgcatagcgttgatacaa

SEQ ID NO: 47868 - DNA, 40 bp, Streptococcus agalactiae
  source 1..40: mol_type = genomic DNA
acatctactgtctcaaggtatatatcccaaaatggttacg

SEQ ID NO: 47869 - DNA, 50 bp, Streptococcus agalactiae
  source 1..50: mol_type = genomic DNA
gtgttcctatcctatggacaacatttgtagagtgcatagcgttgatacaa

SEQ ID NO: 47870 - DNA, 40 bp, Streptococcus agalactiae
  source 1..40: mol_type = genomic DNA
atttgtatagtctcaaagtttctatcccaagatgtttact

SEQ ID NO: 47871 - protein, 430 aa, Faecalibaculum rodentium
MSLKFTAIYLRVSSRERALEGYGLEAQREKCDKWIDLYNIDSKNVRYYVDDGYSAKNLKRPKMQELLKDIRSGKVGKIITYKLDRLTRNVVDTYNLIKELDLHQCELAAIIDNLDITSANGRLFVGILSIIAQWEREVISERTIDGMVAMAQLGKYPFGSTPFGWCKDEFGRLHIDPTDSKIVLYAAERILEGHSLTYISSLIKREFGIYKSALTIKKELSNERLIGKFRYRENDYIGLIPAIMEEDKFMDLQKVLAFRQIHAPRHRKYIFHSKVYCKNCGCRMEQSCTTKGTTIYYYYCCPHCKARINQDKLLKSVLDPICDNMQSLREERLYREYEKKMIDLNTSIENVMMQYQNRELSQQAFALAMESLSDQMANLKKGWSIASLSKDTFHKSDPLLKFQFVQSTVAKIVFDPFTKKHHQVEFKRVL

SEQ ID NO: 47872 - DNA, 50 bp, Faecalibaculum rodentium
  source 1..50: mol_type = genomic DNA
tatgcggccctgtgcagtgtctaaatggcgccacaggatacagataactc

SEQ ID NO: 47873 - DNA, 40 bp, Faecalibaculum rodentium
  source 1..40: mol_type = genomic DNA
tctccgctgcagtatctgaatggcgcctgaaacaagactc

SEQ ID NO: 47874 - DNA, 50 bp, Faecalibaculum rodentium
  source 1..50: mol_type = genomic DNA
tatgcggccctgtgcagtgtctaatgggcgccacaggatacagataactc

SEQ ID NO: 47875 - DNA, 40 bp, Faecalibaculum rodentium
  source 1..40: mol_type = genomic DNA
tctccactgaaatatctcatgggtgcctgaaacttaaata

SEQ ID NO: 47876 - protein, 450 aa, Enterococcus faecium; identical to SEQ ID NO: 21711

SEQ ID NO: 47877 - DNA, 50 bp, Enterococcus faecium
  source 1..50: mol_type = genomic DNA
atgtgtactaacttatatattccagaaggataatataagttagtacacgt

SEQ ID NO: 47878 - DNA, 40 bp, Enterococcus faecium; identical to SEQ ID NO: 21713
  source 1..40: mol_type = genomic DNA

SEQ ID NO: 47879 - DNA, 50 bp, Enterococcus faecium
  source 1..50: mol_type = genomic DNA
atgtgtactaacttatatattccataaggataatataagttagtacacgt

SEQ ID NO: 47880 - DNA, 40 bp, Enterococcus faecium
  source 1..40: mol_type = genomic DNA
caatggaataaaattataatatggatgaataagcctcaaa

SEQ ID NO: 47881 - protein, 450 aa, Enterococcus faecium
MKRVALYMRVSTEQQAKHGDSLREQKETLYEYIEQHKDLKVVNEYVDGGISGQKINRDEFQKLLQDVKENKIDLILFTKLDRWFRNLRHYLNTQEILEKHNVSWNAVSQQYYDTTTAYGRTFIAQVMSFAELEAQIDSERIKAVMANKIAQGEVVSGKTPLGYSIENKKLVINDDAPIVIDIFNYFLSSGSLRKTVYYLGSQYGIVRDYQSVKNMLTNKKYIGELRNNKNYCPPIIDKKLFYAVQKALPKNLKTNAKRDYIFKGLLKCSDCQGSVAGQTIKARYKKKDGTESIYERTCYRCVKRRNNKLRCTNKRAFYEKNLERYIFEATKQKFEQIQINYSKKQPKIIKKKNSKKNIENKLDRLKKAYLNEVIDLEEYKKDREALMKELNEIEVEPAKIDIKNVEFILSKEFDEIYKESSEEEKNALWRSIIDNIIVFPDGNITVNFLI

SEQ ID NO: 47882 - DNA, 50 bp, Enterococcus faecium
  source 1..50: mol_type = genomic DNA
atgtgtactaacttatatattccggaaggataatataggttagtacacgt

SEQ ID NO: 47883 - DNA, 40 bp, Enterococcus faecium; identical to SEQ ID NO: 21713
  source 1..40: mol_type = genomic DNA

SEQ ID NO: 47884 - DNA, 50 bp, Enterococcus faecium
  source 1..50: mol_type = genomic DNA
atgtgtactaacttatatattccgtaaggataatataggttagtacacgt

SEQ ID NO: 47885 - DNA, 40 bp, Enterococcus faecium; identical to SEQ ID NO: 47880
  source 1..40: mol_type = genomic DNA

SEQ ID NO: 47886 - protein, 450 aa, Enterococcus faecium; identical to SEQ ID NO: 47881

SEQ ID NO: 47887 - DNA, 50 bp, Enterococcus faecium
  source 1..50: mol_type = genomic DNA
ccggaaggatacttatatattccggaaggataatataaggttagtacacg

SEQ ID NO: 47888 - DNA, 40 bp, Enterococcus faecium; identical to SEQ ID NO: 21713
  source 1..40: mol_type = genomic DNA

SEQ ID NO: 47889 - DNA, 50 bp, Enterococcus faecium
  source 1..50: mol_type = genomic DNA
ccggaaggatacttatatattccgtaaggataatataaggttagtacacg

SEQ ID NO: 47890 - DNA, 40 bp, Enterococcus faecium; identical to SEQ ID NO: 47880
  source 1..40: mol_type = genomic DNA

SEQ ID NO: 47891 - protein, 450 aa, Enterococcus faecium
MKRVALYMRVSTEQQAKHGDSLREQKETLYEYIEQHKDLKVVNEYVDGGISGQKINRDEFQKLLQDVKENKIDLILFTKLDRWFRNLRHYLNTQEILEKHNVSWNAVSQQYYDTTTAYGRTFIAQVMSFAELEAQIDSERIKAVMANKIAQGEVVSGKTPLGYSIENKKLVINDDAPIVIDIFNYFLSSGSLRKTVYYLGSQYGIVRDYQSVKNMLTNKKYIGELRNNKNYCPPIIDKKLFYAVQKALPKNLKTNAKRDYIFKGLLKCSDCQGSVAGQTIKARYKKKDGTESIYERTCYRCVKRRNNKLRCTNKRAFYEKNLERYIFEATKQKFEQIQINYSKKQPKIIKKKNSKKNIENKLDRLKKAYLNEVIDLAEYKKDREALMKELNEIEVEPAKIDIKNVEFILSKEFDEIYKESSEEEKNALWRSIIDNIIVFPDGNITVNFLI

SEQ ID NO: 47892 - DNA, 50 bp, Enterococcus faecium; identical to SEQ ID NO: 47882
  source 1..50: mol_type = genomic DNA

SEQ ID NO: 47893 - DNA, 40 bp, Enterococcus faecium; identical to SEQ ID NO: 21713
  source 1..40: mol_type = genomic DNA

SEQ ID NO: 47894 - DNA, 50 bp, Enterococcus faecium; identical to SEQ ID NO: 47884
  source 1..50: mol_type = genomic DNA

SEQ ID NO: 47895 - DNA, 40 bp, Enterococcus faecium; identical to SEQ ID NO: 47880
  source 1..40: mol_type = genomic DNA

SEQ ID NO: 47896 - protein, 450 aa, Enterococcus faecium
MKRVALYMRVSTEQQAKHGDSLREQKETLYEYIEQHKDLKVVNEYVDGGISGQKINRDEFQKLLQDVKENKIDLILFTKLDRWFRNLRHYLNTQEILEKHNVSWNAVSQQYYDTTTAYGRTFIAQVMSFAELEAQIDSERIKAVMANKIAQGEVVSGKTPLGYSIENKKLVINDDAPIVIDIFNYFLSSGSLRKTVYYLGSQYGIVRDYQSVKNMLTNKKYIGELRNNKNYCPPIIDKKLFYAVQKALPKNLKTNAKRDYIFKGLLKCSDCQGSVAGQTIKARYKKKEGTESIYERTCYRCVKRRNNKLRCTNKRAFYEKNLERYIFEATKQKFEQIQINYSKKQPKIIKKKNSKKNIENKLDRLKKAYLNEVIDLEEYKKDREALMKELNEIEVEPAKIDIKNVEFILSKEFDEIYKESSEEEKNALWRSIIDNIIVFPDGNITVNFLI

SEQ ID NO: 47897 - DNA, 50 bp, Enterococcus faecium; identical to SEQ ID NO: 47882
  source 1..50: mol_type = genomic DNA

SEQ ID NO: 47898 - DNA, 40 bp, Enterococcus faecium; identical to SEQ ID NO: 21713
  source 1..40: mol_type = genomic DNA

SEQ ID NO: 47899 - DNA, 50 bp, Enterococcus faecium; identical to SEQ ID NO: 47884
  source 1..50: mol_type = genomic DNA

SEQ ID NO: 47900 - DNA, 40 bp, Enterococcus faecium; identical to SEQ ID NO: 47880
  source 1..40: mol_type = genomic DNA

SEQ ID NO: 47901 - protein, 450 aa, Enterococcus faecium
MKRVALYMRVSTEQQAKHGDSLREQKETLYEYIEQHKDLKVVNEYVDGGISGQKINRDEFQKLLQDVKENKIDIILFTKLDRWFRNLRHYLNTQEILEKHNVSWNAVSQQYYDTTTAYGRTFIAQVMSFAELEAQIDSERIKAVMANKIAQGEVVSGKTPLGYSIENKKLVINDDAPIVIDIFNYFLSSGSLRKTVYYLGSQYGIVRDYQSVKNMLTNKKYIGELRNNKNYCPPIIDKKLFYAVQKALPKNLKTNAKRDYIFKGLLKCSDCQGSVAGQTIKARYKKKDGTESIYERTCYRCVKRRNNKLRCTNKRAFYEKNLERYIFEATKQKFEQIQINYSKKQPKIIKKKNSKKNIENKLDRLKKAYLNEVIDLEEYKKDREALMKELNEIEVEPAKIDIKNVEFILSKEFDEIYKESSEEEKNALWRSIIDNIIVFPDGNITVNFLI

SEQ ID NO: 47902 - DNA, 50 bp, Enterococcus faecium
  source 1..50: mol_type = genomic DNA
atgtgtactaacttatatattccggaaggataatatagattagtacacgt

SEQ ID NO: 47903 - DNA, 40 bp, Enterococcus faecium; identical to SEQ ID NO: 21713
  source 1..40: mol_type = genomic DNA

SEQ ID NO: 47904 - DNA, 50 bp, Enterococcus faecium
  source 1..50: mol_type = genomic DNA
atgtgtactaacttatatattccgtaaggataatatagattagtacacgt

SEQ ID NO: 47905 - DNA, 40 bp, Enterococcus faecium; identical to SEQ ID NO: 47880
  source 1..40: mol_type = genomic DNA

SEQ ID NO: 47906 - protein, 450 aa, Enterococcus faecium
MKRVALYMRVSTEQQAKHGDSLREQKETLYEYIEQHKDLKVVNEYVDGGISGQKINRDEFQKLLQDVKENKIDLILFTKLDRWFRNLRHYLNTQEILEKHNVSWNAVSQQYYDTTTAYGRTFIAQVMSFAELEAQIDSERIKAVMANKIAQGEVVSGKTPLGYSIENKKLVINDDAPIVIDIFNYFLSSGSLRKTVYYLGSQYGIVRDYQSVKNMLTNKKYIGELRNNKNYCPPIIDKKLFYAVQKALPKNLKTNAKRDYIFKGLLKCSDCQGSVAGQTIKARYKKKDGTESIYERTCYRCVKRRNNKLRCTNKRAFYEKNLERYIFEATKQKFEQIQINYSKKQPKIIKKKNSKKNIENKLDRLKKAYLNEVIDLEEYKKDREALMKELNEIEVEPAKIDIKNVEFILSKEFDEIYKESSEEEKNALWRSIIDNIIVFPDGNITINFLI

SEQ ID NO: 47907 - DNA, 50 bp, Enterococcus faecium; identical to SEQ ID NO: 47882
  source 1..50: mol_type = genomic DNA

SEQ ID NO: 47908 - DNA, 40 bp, Enterococcus faecium; identical to SEQ ID NO: 21713
  source 1..40: mol_type = genomic DNA

SEQ ID NO: 47909 - DNA, 50 bp, Enterococcus faecium; identical to SEQ ID NO: 47884
  source 1..50: mol_type = genomic DNA

SEQ ID NO: 47910 - DNA, 40 bp, Enterococcus faecium; identical to SEQ ID NO: 47880
  source 1..40: mol_type = genomic DNA

SEQ ID NO: 47911 - protein, 579 aa, Flavonifractor plautii
MNSDTSLDINNYSNPVQTVAQPKEDNEMLRATDKITALYCRLSVEDTKDEKKNGKEDLSNSIQNQKAMLLQYARDHRFPHPTFFIDDGYSGVTYDRPGFQKMLDEIEAGHVGVVITKDLSRLGRNSALTGLYINYTFPQNDVRYIAINDHFDSINPNSTDSDIAGIKNWFNEFFAKDTSRKIRAVQKAKGERGERLTVHVPYGYMKNPENPKEWIIDEEAAQVVKKIFTLCMNGRGPSQIADQLEKDKILTPTAYKNKQGVKTPHTEPENPYRWHESTIVNILERKEYIGATVNFKTYTNSIWDKKQRENPEENRVIFYNTHPAIIEQEVFDKVQEIRQQRHRRTATGKSSPFSGLVFCADCKQKLYYSTTKYFEKRQDFFICSTHRANKDKCSGHYIRAVVLEDLVWNHMKEVISYVTRYEAHFRVEMEQKLRLQSEETIRIYKKRLAQAEKRIGELDRLFIKIYEDNAKGKLNDDRFAMMSKTYEDEQAQLKVEIVNLQKEIEVQERQIEDLEQFIQRARRYTDLTELTPYALRELVKAVYVEAPDKSSGKRKQRVHIEYDLVGYIPVDELIKAEQA

SEQ ID NO: 47912 - DNA, 50 bp, Flavonifractor plautii; identical to SEQ ID NO: 38582
  source 1..50: mol_type = genomic DNA

SEQ ID NO: 47913 - DNA, 40 bp, Flavonifractor plautii
  source 1..40: mol_type = genomic DNA
acacaaaactcccccggcattgccgggggagttttacttc

SEQ ID NO: 47914 - DNA, 50 bp, Flavonifractor plautii
  source 1..50: mol_type = genomic DNA
ttactgttttacgaccaccgagcaggagatgggtgctcgtaagacagtaa

SEQ ID NO: 47915 - DNA, 40 bp, Flavonifractor plautii
  source 1..40: mol_type = genomic DNA
acacataacacccccagcagggatgggggtttattacata

SEQ ID NO: 47916 - protein, 467 aa, Mycolicibacterium rutilum
MSTSSTAVYLRQSLDRDGNQLAVARQRKECLALCERRGWTEVVEYVDNDRSATNGKPRPEYRRMLSDIGDGRIGAVVVWDLDRLHRQPRELEDFIDLADEHRLKLATVTGEVDLSTDNGRLFARIKGAVGKSETERKAARQRAAARQKAEHGRPAWKRAFGYLDGANGPEPDPATAPLVKQMYAAVLAGSSLKDIARTLNTAGAYGLKGTPWSQASVSLFLRKARNAGLREYTDSTTKQTAIVGKGTWTALVDESTWRAAQSVLNAPGRAPGRKTVRKHLLTGALHCGRPGCNGYLAAQWSNEQARRVRYGCRVCQGVVIRADDVEPLLYRVVGGRLAQPDAVDLLRAEIHDEAEAEALRIEANTLLARLDEIADERADGLLTGAQARRATERVQEKLAKIEARQQDSERLRVFDGLPLGRPEVVAAVKELSADRFRAVLSVLCTVTILPVGRGRTTDPDRVRIDWR

SEQ ID NO: 47917 - DNA, 50 bp, Mycolicibacterium rutilum
  source 1..50: mol_type = genomic DNA
aagtgcactttgcgcagtcgtcaccatcagcgactacgcgaagtacactc

SEQ ID NO: 47918 - DNA, 40 bp, Mycolicibacterium rutilum
  source 1..40: mol_type = genomic DNA
ggagttgttctaccgacaccaccgccagctgtaccggatc

SEQ ID NO: 47919 - DNA, 50 bp, Mycolicibacterium rutilum
  source 1..50: mol_type = genomic DNA
aagtgcactttgcgcagtcgtcactctcagcgactacgcgaagtacactc

SEQ ID NO: 47920 - DNA, 40 bp, Mycolicibacterium rutilum
  source 1..40: mol_type = genomic DNA
ggagttgaccttctggcactccacccagcagtccaggatc

SEQ ID NO: 47921 - protein, 533 aa, Nitrospira sp; identical to SEQ ID NO: 37341

SEQ ID NO: 47922 - DNA, 50 bp, Nitrospira sp
  source 1..50: mol_type = genomic DNA
agttttggtctagattggctccccgcttctagtgaaactgggcaatggat

SEQ ID NO: 47923 - DNA, 40 bp, Nitrospira sp
  source 1..40: mol_type = genomic DNA
gcgtaaaggttggctccccgggcaggactcgaacctgcga

SEQ ID NO: 47924 - DNA, 50 bp, Nitrospira sp
  source 1..50: mol_type = genomic DNA
agttttggtctagattggctccccgtttctagtgaaactgggcaatggat

SEQ ID NO: 47925 - DNA, 40 bp, Nitrospira sp
  source 1..40: mol_type = genomic DNA
gcgtaaatgtgggctctgtgtgcaggtctttatcctgcca

SEQ ID NO: 47926 - protein, 643 aa, Vibrio alginolyticus
MLYAYCRVSSGKQLEGLSMSLQGDEALLSRIAKEYHTTVSDRIYIDEGVSSYKGKNLESGQLGEIVRDIEKGRIKKGDIIVMRALDRLSRQEMTDSENLYNRIVGAGVNIYTTIDNHLYKPNCVHSAILKTLALNTAHEESAKKAYLTNRYALHRIEEFQRGEKPENGTAWDIGVGKHPFWIQLDNKVVQPHRLYFQAAKDIVKLIIDGKGNREIMRYLEENHPRYDKDGERIEWSYSLVASFHRKEALTGLRSVKLEDIEYKLEDYYPRVCTDLEFHQMSLRKEEKYVSNGNRARPTLLGGIRRLYCSCGRAMGGITPKDSPAFYRCLHILNPCISYISLRVVDRIVLDAIQTHVFESEKFDDTLLNELLSKADLMRIKYSKQESMLMSDPDLFTPEFKQQLRKSKLEIEQVEQEIMAERKKHAVIEDVDLKSYAEWQAAISEFQEQRDDEEIIKLRDKVQKLVRRIDIDGQLITITMVDGKKIYRHIVKDNTHDTVYCKVHVVDSETLEMVTLTNPALADVYCLESELERFKSACNINQTFITRIAIREKTDHLGIVQQAVSDYLDEHDVLRWRRSDVMKLGVTTTQWQMFKEPEHMSGTGVVIEELKYKDKKYAKKSAVVAYKRYNEQAILNLLNARSLI

SEQ ID NO: 47927 - DNA, 50 bp, Vibrio alginolyticus
  source 1..50: mol_type = genomic DNA
atctcactagttttgacttttgcgtcacttaaagtaaaatagtgtgatac

SEQ ID NO: 47928 - DNA, 40 bp, Vibrio alginolyticus
  source 1..40: mol_type = genomic DNA
ctcaacactttccttcgcatcaccaaatagcattgatgta

SEQ ID NO: 47929 - DNA, 50 bp, Vibrio alginolyticus
  source 1..50: mol_type = genomic DNA
atctcactagttttgacttttgcgatacttaaagtaaaatagtgtgatac

SEQ ID NO: 47930 - DNA, 40 bp, Vibrio alginolyticus
  source 1..40: mol_type = genomic DNA
ctctagagagtcctcggcaataccaaatagcgtggacgta

SEQ ID NO: 47931 - protein, 524 aa, Chryseobacterium bernardetii
MLMKKNFSSKIADLYIRVSTDEQADKGYSQRDQAERLQAYCAKYDIAVDNVFFEDHSAKNFDRPEWSKYLKNLKKRNKRDREPRLVLFTKWDRFSRNVGEAYHMISVLEGLEVETQAIEQPLDLKIPENKIVLAIYLSTPEVENDRRALNVFYGMRRARKEGRIMGIPPYGYINRCTEDGAKYIGVRHPEADNIVWAFEEIAKGELPSEHIRLLMNKREGKDLTRNAFMVAVRNPVYTGKVFIPEFENEEAHFVKGKHLPLITEELFEKVQIVLDGKGRKSKSEHGENRVLQNENFPLRGVLICPRCGKTLTASTSQGNTKRYNYYHCNSKCGFRHNSDIVNNKFVETLREFEILPEYRDTLKIVVLKNYKKHCGNVDDERKAVVEEMENVNQKLSKARNLFLSDRLDEDDYNEVKVECKKRSDELDESLKSLTKASKDQDVPGKLSLAIESIANIAQRYNDSCVEDKRKIASSLYYHKLEFDGKNFRTPKSNAFLNLIRLSKRGLGDKKNRHQSCKNSDDDEV

SEQ ID NO: 47932 - DNA, 50 bp, Chryseobacterium bernardetii
  source 1..50: mol_type = genomic DNA
tgtaaaaactctgatgacgatgaagtgaacttgcaaggattgtcattgaa

SEQ ID NO: 47933 - DNA, 40 bp, Chryseobacterium bernardetii
  source 1..40: mol_type = genomic DNA
caaatagttgcctctttaagtgagcgcgaaaggattcgaa

SEQ ID NO: 47934 - DNA, 50 bp, Chryseobacterium bernardetii
  source 1..50: mol_type = genomic DNA
tgtaaaaactctgatgacgatgaaaagaacttgcaaggattgtcattgaa

SEQ ID NO: 47935 - DNA, 40 bp, Chryseobacterium bernardetii
  source 1..40: mol_type = genomic DNA
caaatagtggcctctttataacagcaagaaaggcaccaag

SEQ ID NO: 47936 - protein, 558 aa, Clostridioides difficile; identical to SEQ ID NO: 3086

SEQ ID NO: 47937 - DNA, 50 bp, Clostridioides difficile; identical to SEQ ID NO: 3087
  source 1..50: mol_type = genomic DNA

SEQ ID NO: 47938 - DNA, 40 bp, Clostridioides difficile
  source 1..40: mol_type = genomic DNA
ctgaaaatccgggcgttcaaagttcgtccccgaccagcca

SEQ ID NO: 47939 - DNA, 50 bp, Clostridioides difficile; identical to SEQ ID NO: 38214
  source 1..50: mol_type = genomic DNA

SEQ ID NO: 47940 - DNA, 40 bp, Clostridioides difficile
  source 1..40: mol_type = genomic DNA
ctgaaattcactgtgatcaccttgagtccccgaccagccc

SEQ ID NO: 47941 - protein, 558 aa, Clostridioides difficile; identical to SEQ ID NO: 3086

SEQ ID NO: 47942 - DNA, 50 bp, Clostridioides difficile; identical to SEQ ID NO: 3087
  source 1..50: mol_type = genomic DNA

SEQ ID NO: 47943 - DNA, 40 bp, Clostridioides difficile
  source 1..40: mol_type = genomic DNA
ctgaaaatccgggcgttcaaagtttgtccccgaccagcca

SEQ ID NO: 47944 - DNA, 50 bp, Clostridioides difficile; identical to SEQ ID NO: 38214
  source 1..50: mol_type = genomic DNA

SEQ ID NO: 47945 - DNA, 40 bp, Clostridioides difficile; identical to SEQ ID NO: 47940
  source 1..40: mol_type = genomic DNA

SEQ ID NO: 47946 - protein, 557 aa, Blautia wexlerae
MLQSNKITALYCRLSQEDMQAGESGSIQHQKMILQRYADEHHFLNTKFFVDDGFSGVSFEREGLQAMLQEVEAGRVATVITKDLSRLGRTYLKTGELIEIVFPENGVRYIAINDGVDTAREDNEFTPLRNWFNEFYARDTSKKIRAVKQAQAQKGERVNGEYPYGYIPDPNNRHHLIPDPETAPIVKQVFAMFVSGVRMCEIQKWLAENKVLTIGALRYQRTGQARYQRAMIAPYTWPDKTLYDILARQEYLGHTITAKTHKVSYKSKKTRKNEEEQRYFFPNTHEPLVDEETFELAQKRIATRHRPTKAAEIDIFSGLLFCAGCRHKMYYQQGVNIEPRKFSYSCGAWRNRARTGSECTSHYIRKNVLLDLVLEDMRRVLRYVKEHEQDFICKATEYGDMEARKALAQQQKELFKAQARMTELDTLFRKLYEDNALGRLTDERFVFLTSGYEDEKKSLAARIDELQQQIATVTERKRDISRFIQIVGKYSDIQELTYENVHEFIDRILIHELDRETNTRKIEIHYSFVGQVDTEQEPTQVVNHDRRNMVDVKSIAI

SEQ ID NO: 47947 - DNA, 50 bp, Blautia wexlerae; identical to SEQ ID NO: 11442
  source 1..50: mol_type = genomic DNA

SEQ ID NO: 47948 - DNA, 40 bp, Blautia wexlerae; identical to SEQ ID NO: 47938
  source 1..40: mol_type = genomic DNA

SEQ ID NO: 47949 - DNA, 50 bp, Blautia wexlerae
  source 1..50: mol_type = genomic DNA
aagtatcgctatctaaccccagcacctaatgaggtgtgatagcgatagcg

SEQ ID NO: 47950 - DNA, 40 bp, Blautia wexlerae; identical to SEQ ID NO: 47940
  source 1..40: mol_type = genomic DNA

SEQ ID NO: 47951 - protein, 498 aa, Aeromonas hydrophila
MTPIKMTTASKPKAILYSRFSSSQQADGDSIRRQEEAAYKFCEREGLELIESQFKDLGFSGWKRHVKREGLESLLMAVENGTIPSGTWLLVEATDRLSRQGWDHVVSLVKSLVSTGCTFVTLDNNQIYNSSNIQDLMSALPLMISADLAFKESQKKSERLRAVKTNKRSNRVIQGNQPFWIDVVDGKPVLNDKAPLARRIVDMALEGIRPLAIVRQFNTEGIKSPKGKDWEVAVIRRILKNTILYGAKTYFEARDGEYKDVETVAGLYPKICTLAEFEQITIKKKKDDTSYNTAGPFSNLLKCQCGKPLVAKQKRGDDYYKVCSGMQNKTCNYKGYYKNIDFYLTKWLGTLSMEEIAHNSNVIDNSPRITELEQLLIDLEAMRVENKGKTRILQRIYEDIEEAESELEQLQAQKSLSEGDTKTTLRDALSFSDNPTKQNMIFRRYISSIVCRKETKDIIVGEVHFKSGASYEVWVHHDSKLKNTSESISYKYNLKTNR

SEQ ID NO: 47952 - DNA, 50 bp, Aeromonas hydrophila
  source 1..50: mol_type = genomic DNA
ttgtcatcaaaaagaactagcatcacgatgttagttattttaggatacag

SEQ ID NO: 47953 - DNA, 40 bp, Aeromonas hydrophila
  source 1..40: mol_type = genomic DNA
gagcggcgcgatcagcatcaccttgttgatcatccagacg

SEQ ID NO: 47954 - DNA, 50 bp, Aeromonas hydrophila
  source 1..50: mol_type = genomic DNA
ttgtcatcaaaaagaactagcatcccgatgttagttattttaggatacag

SEQ ID NO: 47955 - DNA, 40 bp, Aeromonas hydrophila
  source 1..40: mol_type = genomic DNA
caccttggcgatcagcttccccttcttgttcatgcagatg

SEQ ID NO: 47956 - protein, 471 aa, Aeromonas hydrophila
MERQLKAAISYCERNALELSSIRFSDLGVSGWSGVERDGLAALLRCVREGYVPNNSYILVEDADRLSRQGFMHVLQLVTELVETGCTFVTLSNGQQYTKHNVKNLSTALPLIIAADLAQIESQKKSERLRAVKTQKRMDRVIQGNQPFWITIVDGIPKLNDKAELARRIVDLTLKGYRPLHIARLFNSEGIPSPRGKNWAVAVIRRILSNTILYGAKSYHESRDGNYDAVETVKGLYPAICTHAEFQQIRVEKSTKKGTAETGPFSKLLRCPCGSALVIKQRRGEDTYRVCSAFIQNACTHNGYHKNIDSALMKVYQMVPITNKVTPSNSPDAERLAELHESLAVFEEMRLEFSGKPKMLARVYADIEKTENDIEEIENKLRTEFQDTQETIDIQDLPSIEQNAILRRYIKSITCEKLNATDTECTVETKSGKFSSIYISYTRGYKEPLVVSTFLNNNPHDNGGDKFGLYE

SEQ ID NO: 47957 - DNA, 50 bp, Aeromonas hydrophila
  source 1..50: mol_type = genomic DNA
tgtctgcataatggaacttgcatcaccttatttgttcttttatgatgaca

SEQ ID NO: 47958 - DNA, 40 bp, Aeromonas hydrophila; identical to SEQ ID NO: 47953
  source 1..40: mol_type = genomic DNA

SEQ ID NO: 47959 - DNA, 50 bp, Aeromonas hydrophila
  source 1..50: mol_type = genomic DNA
tgtctgcataatggaacttgcatccccttatttgttcttttatgatgaca

SEQ ID NO: 47960 - DNA, 40 bp, Aeromonas hydrophila; identical to SEQ ID NO: 47955
  source 1..40: mol_type = genomic DNA

SEQ ID NO: 47961 - protein, 497 aa, Aeromonas hydrophila
MTQAILYSRFSSTQQADGDSLRRQTELAERFCMTHGLELSSMTFEDLGVSGWKEVQRDGLKSLLRAVERGVVPNDSFILVEAADRLSRKGWEDVTKIVSELVSRGCSLVTIENGQIYNSTNFKTLAGVLPLMISADLAKQESDRKSQRIRSVKTSKRTNRVIQGNQPFWIDIIDGVPVLNNKASLARRIVDLSLSGKRPLAIVREFNTERLESPNGGIWQVAVIRSILKNTILYGAKTYFESRDGEYKAVETVAGLYPKICTKQEFDIIKTGSGVKGRKAKGPFSTLLRCSCGRPLVIKGRRKRNKDTSEVDTYRVCSGSIDGVCTLKGYYKNIDEILLGLVSYIEVPTDKPAPINNDDRISELEQRLIDLDIMRKENKGKTRILQMVFEEIEEVENELEELNKEEVIDQTEVDLKTILDIEDSDNQNALLKRIIKKIECKKEGYLTHVHIVFKTRFQRKFIIDQSRKLKGGYEIKKVGVGDERLKQELAQFGQEEE

SEQ ID NO: 47962 - DNA, 50 bp, Aeromonas hydrophila
  source 1..50: mol_type = genomic DNA
tcagataaaagaaatagcatcaccttgtttgttctgtttctactacgtag

SEQ ID NO: 47963 - DNA, 40 bp, Aeromonas hydrophila
  source 1..40: mol_type = genomic DNA
cggcgcgatcagcatcaccttgttgatcatccagacgaag

SEQ ID NO: 47964 - DNA, 50 bp, Aeromonas hydrophila; identical to SEQ ID NO: 47962
  source 1..50: mol_type = genomic DNA

SEQ ID NO: 47965 - DNA, 40 bp, Aeromonas hydrophila
  source 1..40: mol_type = genomic DNA
cttggcgatcagcttccccttcttgttcatgcagatgtag

SEQ ID NO: 47966 - protein, 535 aa, Brevundimonas naejangsanensis
MTASTVPLRAALYLRVSTARQAEHDVSIPDQKRQGEAYCESRGLQLVETFIEPGASATNDRRPEFQRMIEAGTSKPAPFDVVVVHSFSRFFRDHFELEFYVRKLAKNGVKLVSITQEMGDDPMHVMMRQIMALFDEYQSKENAKHVMRALKENARQGFWNGSLPPIGYRTVAAEQRGAKTKKKLEIDPLHADTVRLIYRLALEGDGTTGQMGVKNIVSYLNSRRIFTRDGGRWGIGQVHRILTRRTYMGEHEFNKRSKTKELKPVSEIVTVPVPPIIDKETFEAVQKLLKARNPKVMPARVISGPTMLTGLIHCAKCGGAMTIRTGKGGRYRYYACSMKARQGPTACEGMAVPMEKLDDMVVNHLEKQLLQPERLETVLAAALDRREEHAERRREHIAELNKRSAESELRLKRLYDAIEAGVADLDDPALKDRIDGLKAIRDQAKADADRAQAMLQSTGQKAVTPQMLRKFAATARERIRLESGGYRRDHLRALAQRVEVADGEVRIMGSKSRLLQTLVAGSGVNSVPTQGLKWR

SEQ ID NO: 47967 - DNA, 50 bp, Brevundimonas naejangsanensis
  source 1..50: mol_type = genomic DNA
tgcccactcagggactgaagtggcgggccgcgaccgatagtgatgatcac

SEQ ID NO: 47968 - DNA, 40 bp, Brevundimonas naejangsanensis
  source 1..40: mol_type = genomic DNA
gctagctggggtcggtggcggacagggtgggattcgaacc

SEQ ID NO: 47969 - DNA, 50 bp, Brevundimonas naejangsanensis
  source 1..50: mol_type = genomic DNA
tgcccactcagggactgaagtggcatgccgcgaccgatagtgatgatcac

SEQ ID NO: 47970 - DNA, 40 bp, Brevundimonas naejangsanensis
  source 1..40: mol_type = genomic DNA
gcttcctggggtgggtggcattcaggcccggattctgccc

SEQ ID NO: 47971 - protein, 533 aa, Paenibacillus xylanexedens
MKIAIYARVSSDRQAEKELSIPAQVKAIQQYCQERGYIIVNEFIEIGKSAKTDDRPEFQKMIALAKRSNRPFDAVVVHKFDRFSRKRDDHVIYKALLNQSGVKVISVTEQTEAETPQDMLLEGMLEVISEFFNANLATEVRKGMTQNAKQGYNNGGTPPYGYRTEHIALGNNKTKAVWIHGPREEIDIVKWIFNQYAHEGMGYTKIASELNRRQIPSQKGGTWASSTIRAIIFNEAYVGRRCWNKQDYQTKGKKWRDRSEWIITENAHPSIISEDIFIKCQENAKKRNTGGGETHKPFDNKLASPFWLRGVMVCEKCGSRMVGNSTSSKMKGGKKQYYVCGGYLRKGKDFCPYAGWNKERIEEIVSNRLRIHIMSLLMGNNLVEEMRRFYTESNQQHTTQKTIMENELEFLKKRIELIEDDISTGKAKPYHQEMLAEIQNELREKSESYLRLTANWSEFHVSEEYIAGIRYDIQSFISLLDQEVPNPQLLHALASKYISKLYINRDTKKIYLSLQLTMNDKVMYQKTMVSEWK

SEQ ID NO: 47972 - DNA, 50 bp, Paenibacillus xylanexedens
  source 1..50: mol_type = genomic DNA
gggtgcttcttctgatactactaatgaagatgacactcgaagataaatag

SEQ ID NO: 47973 - DNA, 40 bp, Paenibacillus xylanexedens
  source 1..40: mol_type = genomic DNA
tggtggtttttgactctaatggaggcgaggggagtcgaac

SEQ ID NO: 47974 - DNA, 50 bp, Paenibacillus xylanexedens
  source 1..50: mol_type = genomic DNA
gggtgcttcttctgatactactaactaagatgacactcgaagataaatag

SEQ ID NO: 47975 - DNA, 40 bp, Paenibacillus xylanexedens
  source 1..40: mol_type = genomic DNA
aggtggtttttgacactctctgagaggaccggagtggaag

SEQ ID NO: 47976 - protein, 687 aa, Amycolatopsis sp AA4
MGHGHEVSAGWGGRQPILDSYARLSRNQKGKLEKCEVQHADNREVIERLGAVLGEEISDPKLSAWNPKVRRPGWERVMKRVAARACDGVVVWNTDRGWRQSPDLEALFKLVEEFDSFTVASSHGRYDLSDYNDRYQLRQEVAHNQRNSDEASQRITRRFDTLRRKGIPHLQGRSFGFPGLDRTVPKEEALDEDGNDTREQVPAELVERERAALRSGTEAILAKVTQETVAEEWNAGGLRTVTGGLFSPAQVRDVLLRPRNAGLIEHDGEIVGRMRGEPIVDPDDFTRLRTLFAGRTRGRQPGNTYVGSGIATCPKCGKKLSARPHVGEYPDGTRRRQYNCTKARGGCGKVAADMRAVDREIRALVIARLSDKNHAAAIKAARALVSDRLAAVESEIRECEERQEAIAAKWGAKKMTEKAYDKANEPLLKDLARLYAEREELTGGNPEGPTEAMSPEEVAAKWDAADVGERRAMLGDALGRDTLCVYPSACKGFRTFDPKRVRIKPYNPKRDRAGIASVPAADRATGDGRDNVSTSDEKGPSMVIFSPGSGPLPTADEDTAAANLDAFVADVCARWDYTLVASRRRPEDDRDDGRYVWDLEFRRPNGKHHMCQAAMFGVPRDYAEGGDSLMFPEPRLYVDGESWVWDFAVGIAAAYFDRNPDDLNHPEHPDHDEWLRERSRGGSAPDA

SEQ ID NO: 47977 - DNA, 50 bp, Amycolatopsis sp AA4
  source 1..50: mol_type = genomic DNA
taggtaaccaattgagtatcggctctagcggaccctgacttggcgaccta

SEQ ID NO: 47978 - DNA, 40 bp, Amycolatopsis sp AA4
  source 1..40: mol_type = genomic DNA
gtgagtgttcctgccggttctaaccggcaggaacactcac

SEQ ID NO: 47979 - DNA, 50 bp, Amycolatopsis sp AA4
  source 1..50: mol_type = genomic DNA
taggtaaccaattgagtatcggctacagcggaccctgacttggcgaccta

SEQ ID NO: 47980 - DNA, 40 bp, Amycolatopsis sp AA4
  source 1..40: mol_type = genomic DNA
gtgtgtgaccctgacacagacagccggcaggaacacacac

SEQ ID NO: 47981 - protein, 505 aa, Nocardia farcinica
MSNPSLRAICGARVSVLTGPQKVSHLAQHETAAAWVAREGHTVVGTFTDLDVSASIPPEKRPDLGPWLTPEKSWEWDVLVFSKIDRAFRSTRHMVKLAEWCEQNRKMLVFAEDGLVLNYRNPQAGLEHMMAELFVYIGSFFAQLELGRFKSRAEDSHRILRFTERWPGGVPPFGYTTVPAEDGKGRVLAVDPEAKAVLEEMANHLVEDDWSLLQIARWLNDQGIKSNMGKVKTNGSGWRPTSVRQVLSNLSTQGVKISAPGKTEGCKACEPTKGGCKAHRERVPVLDKEGRMIRMAEPIFSEERWGEIQDALSRRKINRTVKTRSDNPMRDGVGICGKCGLGLTIHRSPRPGGGYYLYTRCGSGCRGVSMKMDEAVDLLGQTFLENYGHKEAVEKVFVPGSDNSAELERVSKSIERLRAESDAGLITDDSEYLSRLTGLTARKRELEANPITPPHTVDLPTGETYAQTWERSDPEERRQLLVKWKIQFVLYGKNNFELRVPSETH

SEQ ID NO: 47982 - DNA, 50 bp, Nocardia farcinica
  source 1..50: mol_type = genomic DNA
attttaaggactggcgcaacccgcgggtcgtttgctacacttcttaaaat

SEQ ID NO: 47983 - DNA, 40 bp, Nocardia farcinica
  source 1..40: mol_type = genomic DNA
ctcaccgagcgcaacccgcgggtcgtttcggctgtcaagc

SEQ ID NO: 47984 - DNA, 50 bp, Nocardia farcinica
  source 1..50: mol_type = genomic DNA
attttaaggactggcgcaacccgcaagtcgtttgctacacttcttaaaat

SEQ ID NO: 47985 - DNA, 40 bp, Nocardia farcinica
  source 1..40: mol_type = genomic DNA
agcgccgagcccagccctgaagtcgtttcggctgtgcaga

SEQ ID NO: 47986 - protein, 505 aa, Nocardia farcinica
MSNPSLRAICGARVSVLTGPQKVSHLAQHETAAAWVAREGHTVVGTFTDLDVSASIPPEKRPDLGPWLTPEKSWEWDVLVFSKIDRAFRSTRHMVKLAEWCEQNRKMLVFAEDGLVLNYRNPQAGLEHMMAELFVYIGSFFAQLELGRFKSRAEDSHRILRFTERWPGGVPPFGYTTVPAEDGKGRVLAVDPEAKAVLEEMANHLVEDGWSLLQIAKWLNDQGIKSNMGKVKTNGSGWTPTSVRQVLSNLSTQGVKISAPGKTEGCKACEPTKGGCKAHRERVPVLDKEGRMIRMAEPIFSEERWGEIQDALSRRKINRTVKTRSDNPMRDGVGICGKCGLGLTIHRSPRPGGGYYLYTRCGSGCRGVSMKMDEAVDLLGQTFLENYGHKEAVEKVFVPGSDNSAELERVSKSIERLRAESDAGLITDDSEYLSRLTGLTARKRELEANPITPPHTVDLPTGETYAQTWERSDPEGRRQLLVKWKIQFILYGKNNFELRVPSETH

SEQ ID NO: 47987 - DNA, 50 bp, Nocardia farcinica; identical to SEQ ID NO: 47982
  source 1..50: mol_type = genomic DNA

SEQ ID NO: 47988 - DNA, 40 bp, Nocardia farcinica
  source 1..40: mol_type = genomic DNA
ctctccgagcgcaacccgcgggtcgtttcggctgtcaagc

SEQ ID NO: 47989 - DNA, 50 bp, Nocardia farcinica; identical to SEQ ID NO: 47984
  source 1..50: mol_type = genomic DNA

SEQ ID NO: 47990 - DNA, 40 bp, Nocardia farcinica; identical to SEQ ID NO: 47985
  source 1..40: mol_type = genomic DNA

SEQ ID NO: 47991 - protein, 640 aa, Vibrio parahaemolyticus
MIYAYCRVSSGKQLEGLSMSLQGDEALLSKLAKDYNTTVSDRVYRDEGKSAYKGEHLRGELGKLLADIDSGVVKDGDIIVMRHLDRLSRLDFSKSMNLFNGILGAGIGIYTTMDNRLYSNKLGNSEQAIYNALAGFAFSTANEESVRKSYYVNKNALAQIERFQRGERTACGHAYDIGVGHHPFWVTTRTDDGVGIKNPPVRVHAENYSIAKELVQYALQGNGITRCQQLLEKRGLSYTKQGIRNIFESAALYGCLKISIDDKQGARTEFELDGYYSAVCSKEEFYKLRAERKKRTVSNGNRKEYSLLSGARMLHCGCKQSLNVHHSKSGAKYYICASQNHNMINCYTLDNLVLNALKSKVFNTEIDDTRLKALEAELDVISTAYRKKQKFVFDNIELFGDAIKSELSAMKAGVAKLESKVEAERQAVMSAKPAEVLELSTYDKWVHQISEIVDADSETKRVYNQKIKQLVNDIVLHDDGLVEIEYVDRSKDYYYFPENKRKKQGEYWAVKLLVIDDYATRDMILSEEEMAVFIFSTADIKAKKYVNDISKFKAGLTLFSRKRTTDTAQKRFANQIKEYLGNHGELEYKRSEVVKLGISESRWQKLKDTDLTKYGIGFKNKESEMVNGKSSVSKLAFLME

SEQ ID NO: 47992 - DNA, 50 bp, Vibrio parahaemolyticus
  source 1..50: mol_type = genomic DNA
ggttgttactaagcaaatttagcgccgctaaacttgctctagttgcaatc

SEQ ID NO: 47993 - DNA, 40 bp, Vibrio parahaemolyticus; identical to SEQ ID NO: 27708
  source 1..40: mol_type = genomic DNA

SEQ ID NO: 47994 - DNA, 50 bp, Vibrio parahaemolyticus
  source 1..50: mol_type = genomic DNA
ggttgttactaagcaaatttagcgatgctaaacttgctctagttgcaatc

SEQ ID NO: 47995 - DNA, 40 bp, Vibrio parahaemolyticus
  source 1..40: mol_type = genomic DNA
cgtttctgtcactttggtcatggggaatttacctataaag

SEQ ID NO: 47996 - protein, 568 aa, Bradyrhizobium stylosanthis
MRISTDLQLKGHGRKRQLEASRAYAEANGLEFAEGGELEDIGISAFKGANVREGALGGFLEAVQSGRVQSGSYLIVESLDRLSREQVLSAQSLFLRIIQNGINLVTLADNRVYRAGKTDLGDLIMSLVIMSRAHEESQTKSLRLSAAWKNKRAAAATLKPMTKWCPAWLKLANDRSGYECIPDRVQIVRQIFNDSADGIGVYKIAHRLNQSSTPTFNDSDGWHQSYVAKILANRAVIGEFQPAVRRDGKRTIEGEPIEDYFPAIIDKGLFYRAHQAKAQRQRNGAGRKGKGFSNLFSGLATCAYCGASMTYDNKGSGPKGNQYLVCTNSKRRLGCQGKRWKYTDFETSFLAFVTEIDFASIVDTDERSTAQVQLSQKLASLEGELASVTALMDKTFALLETGAPPEFVSSKLQEMQLRKESLVESIAASRGILEEMRSSQQRAAESRDEIQSLVNRLRDANDPDLFDLRAKIASHLKAMIETLTVAPQGSRPRLTRIAAETLSNFGEDGADVAHFIARRGDQPEQAHRYFAVGLRDSRIRIVFPDDEEPLRYRQQIIATDDGIVQMTS

SEQ ID NO: 47997 - DNA, 50 bp, Bradyrhizobium stylosanthis
  source 1..50: mol_type = genomic DNA
taagggttaatagtcattactattgcaaaggcgttgactattaacccgga

SEQ ID NO: 47998 - DNA, 40 bp, Bradyrhizobium stylosanthis
  source 1..40: mol_type = genomic DNA
gccaggcctgccggccttcgccatcgtcgggctgcccgac

SEQ ID NO: 47999 - DNA, 50 bp, Bradyrhizobium stylosanthis
  source 1..50: mol_type = genomic DNA
taagggttaatagtcattactatttaaaaggcgttgactattaacccgga

SEQ ID NO: 48000 - DNA, 40 bp, Bradyrhizobium stylosanthis
  source 1..40: mol_type = genomic DNA
gcgctgcctgccgcacttctacatcatagggcagcccaag

SEQ ID NO: 48001 - protein, 541 aa, Lichenihabitans psoromatis
MNKEAPLVATRAALYLRVSTTRQAEHDVSIPDQKRQGEAYCVTRGYQLIDTFVEPGASATNDRRPEFQRMIEAGTSKPAPFDIVVVHSFSRFFRDHFELEFYVRKLAKNGVKLVSITQEMGDDPMHVMMRQIMALFDEYQSKENGKHVIRALKENARQGFWNGALPPIGYRIVAAEQRGSKTKKKLEIDPLHADTVRLIYRLALEGNGTSGPMGVKAIVSHLNARRIFTRDGGRWGIGQLHRILTRRTYIGEHEFNKRGKSKELKPVSEIVMVSVPPLIDTDTFDAVQAHLRARNPKVTPPRVVSGPTLLTGICFCKKCGGAMTIRTGKGGRYRYYTCSIKARQGETGCSGRSIPMEKLDTIVASHIEDRLLHPDRLEEVLSSVLDRRHERAERRQEHIAELNRRAAETDLRLKRLYDAIESGVADLSDPALKDRITGLKALRDQAQVDAERAQAMLENSGNQAVTPAAVRRFANVARQRIRLDGGGYRRDHLRAFAQRVEVGETEVRIMGSKGELLRTLTAVSGGKSAAIGVPSLGLKWR

SEQ ID NO: 48002 - DNA, 50 bp, Lichenihabitans psoromatis
  source 1..50: mol_type = genomic DNA
tgcccagtttgggactgaagtggcgggccacgcccgacgaagatgagcac

SEQ ID NO: 48003 - DNA, 40 bp, Lichenihabitans psoromatis
  source 1..40: mol_type = genomic DNA
ttgcgcatagagaggtggcggagagggagggattcgaacc

SEQ ID NO: 48004 - DNA, 50 bp, Lichenihabitans psoromatis
  source 1..50: mol_type = genomic DNA
tgcccagtttgggactgaagtggccagccacgcccgacgaagatgagcac

SEQ ID NO: 48005 - DNA, 40 bp, Lichenihabitans psoromatis
  source 1..40: mol_type = genomic DNA
ttgctcatagagatggggccacacgggaaggattctggcc

SEQ ID NO: 48006 - protein, 571 aa, Pseudomonas syringae
MTTPRTKAYSYIRFSTPEQANGDSYRRQRAAAETYCTQNGLELVRSEDYFFFDSGRSAYKGKHLDDTGQLARFLSYVKDGTIDPGSLLIVESLDRLSREHVREALPRFLDILNNDIQIYTAADNKLYTKDYNDVDLIVSIVQMSRAHSESSLKGERVSKAWQQKQKDARESKKPLGRACPYWLKLEGGEYIEVPERVQIVRQIFRLAISGHGHRAIAKLLNLDNVPIFGSPKRNTSGLWGSSSTGKILSNRAVLGEYQPTGLVDGKRAKLGEPVLDFFPAVIDEDLFFQAQSARSTRNVSKATKAAVNFNVWQGLAKCSMCGEPMHLVNKGQPPKGGKYLRCYGSAKGRCTNKLVEISRSERAFMEILTKVDSLSLVQDSQAKIRKEIAKIDLQLDLVKKRQAEIESQILDVSGDLPSFIVQAAFRFEQELKELKRQKDDLKRDSQREKIINKADFFAKLDLLSFEGRARANYLLKALKVQVRIERQEKTVCYAIEVEGVLMFVMKEAGDQVDYYPYTGELTELLRIQGDDGAFATMHSDMVARAFELLELVREQSRIDSMLANKTVPKKI

SEQ ID NO: 48007 - DNA, 50 bp, Pseudomonas syringae
  source 1..50: mol_type = genomic DNA
tagggtgtattggattacaacataagcaggttgtgatacattacacccat

SEQ ID NO: 48008 - DNA, 40 bp, Pseudomonas syringae
  source 1..40: mol_type = genomic DNA
gccgggcgggccgctgaacaacaggttgtggccaccggcc

SEQ ID NO: 48009 - DNA, 50 bp, Pseudomonas syringae
  source 1..50: mol_type = genomic DNA
tagggtgtattggattacaacatattcaggttgtgatacattacacccat

SEQ ID NO: 48010 - DNA, 40 bp, Pseudomonas syringae
  source 1..40: mol_type = genomic DNA
gcctggaggtctcatgaacttcaggatgctgccactggcc

SEQ ID NO: 48011 - protein, 508 aa, Mycolicibacter terrae
MRVLGRLRLSRSTEESTSIERQREIIEQWSSAQGHTVVGWAEDIDVSGAVDPFDTPQLGEWLSDRAPEWDILCAWKLDRLGRNAIQLNKLFAWCGEHDKTVVSCSESIDLGSWAGRMLASVIAGLAEGELEAIRERQTGSRRKLRESARWPGGKPPYGYVGIPPGTVDPRCSQGHVASCLCHDGPGWTLKIDPEASKVVRRIVDELIDGKPLTRIGRELTSEGYRSPAAYYTTVKAGQPSLRWADGETPTGKWGSTPLRNMLRSKALRGYVHHGGETIRDDDGMPIQLAEPLVTLDEWELIQAALDRVQQSRRGILKGEPSPLAGLVVCYECGQTLHHDRTTVHRSENRYVYRYYRCPNKDSAMIPADDVAQLAEDAFLERLGDQEVRERVWVPGDSREAEMREALTALDELTQAAGRAKSATMKQRLQRQLDALDTKIVELESAPKREARWEYRPTGGTYGSVWEASDTDQRRELLRRSGITLAISRIPKTNAYKFEIRIPPELRMH

SEQ ID NO: 48012 - DNA, 50 bp, Mycolicibacter terrae
  source 1..50: mol_type = genomic DNA
gacatgggcatagtgatatccggtgaatagaacaacactttgaacacaac

SEQ ID NO: 48013 - DNA, 40 bp, Mycolicibacter terrae
  source 1..40: mol_type = genomic DNA
gttgggcgggatgcgcggcgaatagaacagcaccctgaac

SEQ ID NO: 48014 - DNA, 50 bp, Mycolicibacter terrae
  source 1..50: mol_type = genomic DNA
gacatgggcatagtgatatccggtacatagaacaacactttgaacacaac

SEQ ID NO: 48015 - DNA, 40 bp, Mycolicibacter terrae
  source 1..40: mol_type = genomic DNA
ctggggagggatgtactccacatagatcagcccccagaac

SEQ ID NO: 48016 - protein, 585 aa, Mycobacteroides abscessus
MESDNSTLIDLLVANRQLNTQAAAKIAVSYPRVSSKKQAEKDGDPDGYSLPAQREANRRKAATLGAVVVEEFVERAESAKSADRPKLQEMLNYIREHKVDYVIVHKVDRLARNRADDVEISLAIKQAGAELVSATENIDETPNGMLLHGIMSAIAEYYSRNLAVEVTKGMTQKAKIGGTPGKAPLGYLNVRKINAHGADVRTVEVDPMRAPLITWAFHAYASGDWTLKALAAELEHRGLTTRPTPKTPARAIKYNSLHKILTTPYYKGVVVFSKAAYSGKHKPLVDEVTWAKVQEVLSSHATGEKQREHPHYLKSSVFCGNCDSRLVITNAKNPSGTIYPYFICLGRHQKITDCEVKAVLIAEVEQKVADYYRTVQLDPDLRNQIETMLQDEMAAYRASAETQHKQLSLQKDRLERERSSLLQAHYAQAVPLDLLKTEQDRIARSLAEITERLAATTMEFQQFELAVVSALDYAMNCHRAYIGAVHVTGGKQIRRLLNQAIFTRIYIDDEGIHGDLAEPFRTLLSDELANAAEQHAANEERGMAGDGKHCATSDNDPRTPLTEVLEKTNKKPDDSVASLKLTTLV

SEQ ID NO: 48017 - DNA, 50 bp, Mycobacteroides abscessus
  source 1..50: mol_type = genomic DNA
gagtttgaaactgactactttggtgcgcctgcgtgaatcgctttcaagta

SEQ ID NO: 48018 - DNA, 40 bp, Mycobacteroides abscessus
  source 1..40: mol_type = genomic DNA
gagcgcgctgcgtaaaagtgccctcggcaggattcgaacc

SEQ ID NO: 48019 - DNA, 50 bp, Mycobacteroides abscessus
  source 1..50: mol_type = genomic DNA
gagtttgaaactgactactttggtcagcctgcgtgaatcgctttcaagta

SEQ ID NO: 48020 - DNA, 40 bp, Mycobacteroides abscessus
  source 1..40: mol_type = genomic DNA
cagggcgcttcccaaaagtcagagagccaggattcgaacc

SEQ ID NO: 48021 - protein, 451 aa, Turicibacter bilis
MKVALYARVSTEKQIDNYSIPLQLERMQAFCKSKGWNEMSEYIDGGYSGSNLNRPAIEQLQKDICHKKINAVIVYRLDRLSRSQHDTLYLIEKIFLPNNVQFISLSETIDTSTPSGRAMIGVMSVFAQLEREVIIERLRDGQHKMIQEKGLWVGGGLDNPYGYIQVTPGHLKVVEEERQHILRLYEEFIKLKSPTAARKKLEEEGFKKLNHNRIIRILQNRLYLGEVSFKKEWFKGSHEPIISTELFNQAQQIFDENRVASFGKPKKKLFTGKIICSCCGENYVIQYASKTTSSGRIVNYQNYVCRRRKLPARYESKCFNRRIKCSDFQHEIFNRIMNLEMSGEIKIPKPLNFTKQLNQIDRKINKLLDLYMEERLSKDLLNTKLNDLNKQKKEVLMKQQEITEVSEVQKAIKNGIPNLFECDTETQTEIINLFIKKIIVTNESLKIIWNN

SEQ ID NO: 48022 - DNA, 50 bp, Turicibacter bilis
  source 1..50: mol_type = genomic DNA
tttcggttttcaaatggagcgtgtactgttgcactattctgaaaaccgaa

SEQ ID NO: 48023 - DNA, 40 bp, Turicibacter bilis
  source 1..40: mol_type = genomic DNA
tatcctaattagcggaccaacgggaagcgggaaaacaaca

SEQ ID NO: 48024 - DNA, 50 bp, Turicibacter bilis
  source 1..50: mol_type = genomic DNA
tttcggttttcaaatggagcgtgtaatgttgcactattctgaaaaccgaa

SEQ ID NO: 48025 - DNA, 40 bp, Turicibacter bilis
  source 1..40: mol_type = genomic DNA
tatactcatgagagaatgaaagggaagaaggcaaacaaca

SEQ ID NO: 48026 - protein, 501 aa, Frankia casuarinae
MEFPSLLPLPEWPDAEPALWYGRMSDVDNDARIPDQFARGQRYARLTGEYWIARAWADDGISAWREDVVRPEFEGFLTTLRTGKHRVVVAWEESRITRDPVVGAEFGKIMQRVSGRLIVTDGEKATTYDFRRQRDRDAWHGAVGKSVSDSGLKSELVKRKLDAKREAREFLGGPVGFGWSQTISRKGKKIVTEWSVNEEQARWLREASQRIREGEAVLKVADDFYDRGLRIPHRRTRPDDTMKTGTLTRASLTAMLRNPRIAGLFATGNVHRGWTVVGPMANFPAILTEEEWRETCAALEAVKTRKGTGTAVKHVFAGYYVCHKCKRSLIRNSPRAYALWRHRLGKSREHVECDQSFHINAADADDLMTRLVDAYLVRRDWEKAGEVADAEELKAERTEKEQELADLPRAITAKEISLRLGGQVEAQIEARLREIDAELARRARLVTVLDGQEALRLWRNGTLTEKRRVLSTIIERIIAIPGKDLPLRDRLDPQWRNPSPA

SEQ ID NO: 48027 - DNA, 50 bp, Frankia casuarinae
  source 1..50: mol_type = genomic DNA
cgttgctacgacgtactacttgcgtacgtgtgtagtacgtcgtagcatca

SEQ ID NO: 48028 - DNA, 40 bp, Frankia casuarinae
  source 1..40: mol_type = genomic DNA
ctccggggtgacgaacacgtacgcgtcgaacgccgccact

SEQ ID NO: 48029 - DNA, 50 bp, Frankia casuarinae
  source 1..50: mol_type = genomic DNA
cgttgctacgacgtactacttgcgttcgtgtgtagtacgtcgtagcatca

SEQ ID NO: 48030 - DNA, 40 bp, Frankia casuarinae
  source 1..40: mol_type = genomic DNA
ccccggggtgacaaacatcttcccgtcctccagcgccact

SEQ ID NO: 48031 - protein, 597 aa, Coprococcus eutactus
MNTAVNEYNYRFKLTDYSLFDRNRARKVAIYGRVSTEHEAQLSALENQLQWYDDQVKYHPNWTVCERYIDEGITGTQAKKRPAFLKMIEDAKQGKFDLIVTREVCRFARNVVDTLVVTRELKGIGVEVFFIDDNIWTMDGDGELRLSLMATLAQEESRKTSERVKAGQKISRDNGVLYGNGNILGYDRVGDTYVINEEQAETVRMIYDLYLQGYGSMKIAKILTERKRKTASGLIKWSVSNIMRAIKNATYTGTKCYNKSRSNNFLEQKRINNLDMSTYEYVEGDFPSIISQEIWNKAQAIRESRVKPVCVSAGKNTHSKRDSRDIWVNKLRCSCGSSYRKNKWHTKLDGKTSYGYQCYNQLNNGIKRKRAEIGLDTEGYCDSRMITDWKLDFMAKALLEHLWTERKESVLIALDLIKYYYKEEKSNETQSDTVTIQAKLDKANSRLTNLIAMRADGEISKDEYQAMRSPVDEEIKKLQKALDEIPQEKSNPKGLDIEGIRSTLNSFIDFSGSTISHDVVNQFVYLITPTSDTTFDWYVNLNGTADVKATFTAEGRKKNCIIKLEEIEKISSVHREKNEDNAHFIKNPHIFTYLHRL

SEQ ID NO: 48032 - DNA, 50 bp, Coprococcus eutactus; identical to SEQ ID NO: 36102
  source 1..50: mol_type = genomic DNA

SEQ ID NO: 48033 - DNA, 40 bp, Coprococcus eutactus
  source 1..40: mol_type = genomic DNA
cgctagacttgctgctgctcaggctgcaatcgctaacaag

SEQ ID NO: 48034 - DNA, 50 bp, Coprococcus eutactus; identical to SEQ ID NO: 38774
  source 1..50: mol_type = genomic DNA

SEQ ID NO: 48035 - DNA, 40 bp, Coprococcus eutactus
  source 1..40: mol_type = genomic DNA
tggtagactttctgccgctgtggctgcagtctctaaagtc

SEQ ID NO: 48036 - protein, 444 aa, Enterococcus gallinarum
MRVSTDQQAKHGDSLREQQETLDEYIKRNKNLKVVDKYIDGGISGQKLNRDEFQRLLDDVKNDQIDLILFTKLDRWFRNLRHYLNTQEILEKHNVSWNAVSQQYYDTTTAYGRTFIAQVMSFAELEAQMTSERIKSVFSNKIQQGEVVSGKVPLGYKIENKRLVPTSDKDIVIDLFDYYVRVGSLRKTTTYLEEKHGIVRDYQSVRKLLTNEKYIGKLRNNTNYCEPIIDKDIFETVQLRLSQNVKTSGSHDYIFRGLVRCADCDGSMSCSTLKSKYIKKTDGEVSYYIRSCYRCTRRRNNPTRCKNKKTYYERALERYLLDNIQTNIAMHVRTLKKEVTKKDSVKRKKDALFVKIERLKKAYLNEIIELDEYKRDRELLENEIASLKEPKINKNIAPLKKVLSDDFFEKYEKASINQKNELWRSIIESIEVSVDGNITINFLP

SEQ ID NO: 48037 - DNA, 50 bp, Enterococcus gallinarum
  source 1..50: mol_type = genomic DNA
tatgtgcctaactgatactttccgctgggatgatattggttagtacgtct

SEQ ID NO: 48038 - DNA, 40 bp, Enterococcus gallinarum
  source 1..40: mol_type = genomic DNA
cgaaggttggggactgccgctgggatgattgtgcacgcag

SEQ ID NO: 48039 - DNA, 50 bp, Enterococcus gallinarum
  source 1..50: mol_type = genomic DNA
tatgtgcctaactgatactttccggcgggatgatattggttagtacgtct

SEQ ID NO: 48040 - DNA, 40 bp, Enterococcus gallinarum
  source 1..40: mol_type = genomic DNA
ggagggatggggacagcaggcaggaagaatgggcacacag

SEQ ID NO: 48041 - protein, 451 aa, Enterococcus gallinarum
MQRVAIYMRVSTDQQAKHGDSLREQQETLDEYIKRNKNLKVVDKYIDGGISGQKLNRDEFQRLLDDVKNDQIDLILFTKLDRWFRNLRHYLNTQEILEKHNVSWNAVSQQYYDTTTAYGRTFIAQVMSFAELEAQMTSERIKSVFSNKIQQGEVVSGKVPLGYKIENKRLVPTSDKDIVIDLFDYYVRVGSLRKTTTYLEEKHGIVRDYQSVRKLLTNEKYIGKLRNNTNYCEPIIDKDIFETVQLRLSQNVKTSGSHDYIFRGLVRCADCDGSMSCSTLKSKYIKKTDGEVSYYIRSCYRCTRRRNNPTRCKNKKTYYERALERYLLDNIQTNIAMHVRTLKKEVTKKDSVKRKKDALFVKIERLKKAYLNEIIELDEYKRDRELLENEIASLKEPKINKNIAPLKKVLSDDFFEKYEKASINQKNELWRSIIESIEVSVDGNITINFLP

SEQ ID NO: 48042 - DNA, 50 bp, Enterococcus gallinarum; identical to SEQ ID NO: 48037
  source 1..50: mol_type = genomic DNA

SEQ ID NO: 48043 - DNA, 40 bp, Enterococcus gallinarum; identical to SEQ ID NO: 48038
  source 1..40: mol_type = genomic DNA

SEQ ID NO: 48044 - DNA, 50 bp, Enterococcus gallinarum; identical to SEQ ID NO: 48039
  source 1..50: mol_type = genomic DNA

SEQ ID NO: 48045 - DNA, 40 bp, Enterococcus gallinarum; identical to SEQ ID NO: 48040
  source 1..40: mol_type = genomic DNA

SEQ ID NO: 48046 - protein, 548 aa, Mycobacterium senegalense; identical to SEQ ID NO: 9226

SEQ ID NO: 48047 - DNA, 50 bp, Mycobacterium senegalense; identical to SEQ ID NO: 9227
  source 1..50: mol_type = genomic DNA

SEQ ID NO: 48048 - DNA, 40 bp, Mycobacterium senegalense
  source 1..40: mol_type = genomic DNA
tcagtcgggtgtccgaggggggacttgaacccccacgccc

SEQ ID NO: 48049 - DNA, 50 bp, Mycobacterium senegalense; identical to SEQ ID NO: 9227
  source 1..50: mol_type = genomic DNA

SEQ ID NO: 48050 - DNA, 40 bp, Mycobacterium senegalense
  source 1..40: mol_type = genomic DNA
ccaggcgggagtcagaggaggggctttcaccctgacgccc

SEQ ID NO: 48051 - protein, 460 aa, Aquamicrobium defluvii
MLGEFLELVRSGDIAIGSYLLVENLDRVSRENALDALDALKDIAKEGITVVTLNDGRAYTHESLRQNPVDLMVAVMVFMRANEESATKAKRLREAWGAKRAKAEKQPLTKLSPGWVRLRDDRSGFDLIPERAAIVRRIFEMAIAGKGQQSIAETLNREGVPVFGRGKHWHRSYVKKMLGNPAVIGQFTPHRMEIINGKRVRVPAEPVEDYFPQAVSREVFEQVAALASGRSAPSKTEGAMANILAGLAKCPRCGSTMTRVNKGGKKGGHPYLICTRAKAGAGCTYRKVRLDHVTRAIIDNAGYLIGELPSPEADLQAQWDQLSLAHDVMGDEIERVVQAIAEAGHSPALLNRLRATEAERDRIANELSSVATRMADTITNRIANTGTALLDAVGEQPHDIPKVNAVLRQLFGKVVVDYRSGSLVFHWNHVPDAATSIVYGWPTETDDDDGIIPATSLPPS

SEQ ID NO: 48052 - DNA, 50 bp, Aquamicrobium defluvii
  source 1..50: mol_type = genomic DNA
ggggggtcttttgttttcaatatgagcatgatatggacaaaagaccccta

SEQ ID NO: 48053 - DNA, 40 bp, Aquamicrobium defluvii
  source 1..40: mol_type = genomic DNA
gccgggcggacccaccatgaggagattgtggccgcccgcc

SEQ ID NO: 48054 - DNA, 50 bp, Aquamicrobium defluvii
  source 1..50: mol_type = genomic DNA
ggggggtcttttgttttcaatatgtgcatgatatggacaaaagaccccta

SEQ ID NO: 48055 - DNA, 40 bp, Aquamicrobium defluvii
  source 1..40: mol_type = genomic DNA
gcctgtgggccccgccctgtggagactgtggcctcctccc

SEQ ID NO: 48056 - protein, 587 aa, Streptococcus pneumoniae; identical to SEQ ID NO: 10016

SEQ ID NO: 48057 - DNA, 50 bp, Streptococcus pneumoniae; identical to SEQ ID NO: 9807
  source 1..50: mol_type = genomic DNA

SEQ ID NO: 48058 - DNA, 40 bp, Streptococcus pneumoniae
  source 1..40: mol_type = genomic DNA
tctatttcctcaaacgcatcacgtcgagccggtagcactt

SEQ ID NO: 48059 - DNA, 50 bp, Streptococcus pneumoniae
  source 1..50: mol_type = genomic DNA
tgtgttcctatcctatggacaacaggtgtggagtgcatagcgttgataca

SEQ ID NO: 48060 - DNA, 40 bp, Streptococcus pneumoniae
  source 1..40: mol_type = genomic DNA
actccgcccccaaacgcatggcgtccagcggggagcactc

SEQ ID NO: 48061 - protein, 407 aa, Variovorax paradoxus
MDLVYSLLVMIRAHEESDTKSKRVTASIERLCKGWLAGTYRGVIRNGKDPLWVRRNDDRWELVPERVEAARTALDLYRRGYSATRILEALAEKQLSLTGNGPQSLQIYRLIRQRALLGEKELEIGGETYRLPDYYPALLTPAEWADLQAIADGRGRRVGKGAVPGILTGMKLTVCGYCGRALVGQNIGTRNRRPDGGIMDGHRRLHCISYSYGGCPVPGSCSVAPIERALMTYCSDMLNLQALYGGDRAAGPRARIATLRGQLEELASKLERLTDAMLEATADGGTPAAFTKRARALEAEQAQAQEELAEAELELASAARTELTGADERWKALAAGVESQDYDTRIQARQLVADTFERIVIYRAGVIPDQTPAGLIDVMLLAKGGTARMVRINKKGEVLTAEELEAE

SEQ ID NO: 48062 - DNA, 50 bp, Variovorax paradoxus
  source 1..50: mol_type = genomic DNA
ggtatattctgggtatcactcgctcacccgagcgataccattcctatact

SEQ ID NO: 48063 - DNA, 40 bp, Variovorax paradoxus
  source 1..40: mol_type = genomic DNA
atctgtcagggccttgggacagcccaggctcacgaagccg

SEQ ID NO: 48064 - DNA, 50 bp, Variovorax paradoxus
  source 1..50: mol_type = genomic DNA
ggtatattctgggtatcactcgcttccccgagcgataccattcctatact

SEQ ID NO: 48065 - DNA, 40 bp, Variovorax paradoxus
  source 1..40: mol_type = genomic DNA
gtgaggcgggggctggggatcgcccaggctcagggagcag

SEQ ID NO: 48066 - protein, 475 aa, Mycobacteroides abscessus
MGVRAAIYVRISQDRDGTRLGVERQEQDCRKLANTLGLEVRNVFVDNDISAYNGKRRPQYEALLADVEAGALDVVIAWHPDRLHRSPLELETYIDLSERFGIQTHTVQAGAWDLSTPSGRAVARTLGAWARYESEHKGERIRRARQQQAKAGGWHGGIRPYGFEKDGVTIRPSEAAEIAKATEAIVSGVSLRSLVRDLNERSIPTATGRGPWTSVALKDTIMRPRTAGLSSYHGEIVGPAVWPPIVPEDTWRAACSILSDPARRTNAGRGGTVRWLGSGLYVCGVCGAAQLRVGTGGSVKRNTYRCGNRNIRDGGGHVTREAGSLDAYVEEVIVRRLSEPGLLDRFLGADPDQDTTTTRVELLAVRQRQDDLAGLFAAGEITARQLAIGTEQLATKEDQLAKALASAGRRNPIQMLAGAKDVRSLWFGTDEARSDGLTLGQRRAILDVLMTVTVLPAPRTRGGFDPEYVRIEWKA

SEQ ID NO: 48067 - DNA, 50 bp, Mycobacteroides abscessus
  source 1..50: mol_type = genomic DNA
cggtgtcacaggtggactgtcggttttccgactctcgatctgtggcacac

SEQ ID NO: 48068 - DNA, 40 bp, Mycobacteroides abscessus
  source 1..40: mol_type = genomic DNA
cgcggacaacaacgtagtcttgcccgcgcccgtgccgccc

SEQ ID NO: 48069 - DNA, 50 bp, Mycobacteroides abscessus
  source 1..50: mol_type = genomic DNA
cggtgtcacaggtggactgtcggttgtccgactctcgatctgtggcacac

SEQ ID NO: 48070 - DNA, 40 bp, Mycobacteroides abscessus; identical to SEQ ID NO: 17195
  source 1..40: mol_type = genomic DNA

SEQ ID NO: 48071 - protein, 590 aa, Collinsella aerofaciens
MSTNKELREGVADKAKTCFLYVRVSTKMQVENGESIEAQLYDLRDYAKRNNLRILHEYIDDGYSGKNITGRPHFQEMMEEIKSGVRADYVLVFKLSRFGRNAADALSSLQLMQDYGTNLVCIKDGINSEAQMGKMMIAFMSAFAEMERENILVQTMAGREQKAREGKWNGGQAPYGYKLVKDEKGKGHLEIDEDEAEIVRIIFREYTKNGKGVMALASWLNAQGYRKNVRGNGKYEHFVPTFLKNVLCNPVYIGKIAYGRRRTTPVKGKRNEYRMIKQSDYDVYDGEHEAIIDEATWNAAQERMAEESHPFPEAKTGEHVHLLTGMLICPVCGRKMIANVSHGKRKKDGTVGKSTYAYACKYSKKQFGPSCTFTRQFKQEYIDREVIEVIAHAAYSDVFEERVRDELDAAVDIEKLEADVERIGKALDNNKAARRMLSRKLDSLDVSDRSYERKYEDMQARLDKLYDEYADIETAFDDANSKLESAKEKQVTTARIYEMLDEFREHFDEYDPVRKKEILRQVVDSVEINPDANPKKGDTIVTRVRFKCPVSFYPTLPEEAYDALGVKEFNRLETTEYVSEKKSRVDEDTV

SEQ ID NO: 48072 - DNA, 50 bp, Collinsella aerofaciens
  source 1..50: mol_type = genomic DNA
tctcgggttgacgaagataccgttgagacggtagcagtcttaacccgaga

SEQ ID NO: 48073 - DNA, 40 bp, Collinsella aerofaciens
  source 1..40: mol_type = genomic DNA
ccctcacaccgaccacaccgaaaccgtagcggtcctcgaa

SEQ ID NO: 48074 - DNA, 50 bp, Collinsella aerofaciens
  source 1..50: mol_type = genomic DNA
tctcgggttgacgaagataccgtttggacggtagcagtcttaacccgaga

SEQ ID NO: 48075 - DNA, 40 bp, Collinsella aerofaciens
  source 1..40: mol_type = genomic DNA
ccctcacaccagcctcccctgacccgctgcggtcctcagc

SEQ ID NO: 48076 - protein, 467 aa, Staphylococcus sciuri
MKVAIYCRVSTLEQSREGHSIDEQRKRLKAFCEVQDWKIYDEYIDPGFSGGNTTRPGLDKLMNDLDKIDLILVYKLDRLTRSVKDLMNLLEIFEKNDVSFRSATEVFDTTNAFGKLFITLVGAMAEWERSTIAERTKMGRQAATQKGIYTTGPPFYYDKVDGKLVPNEKREVADYIVKRALDGISIRGITEELTLSKYSPPKGKIWDRTTVSYVLTSPVSRGHTKIGDVLVKNTHEPIMDEETYKLIMEKTKSRTRTKKRSHTTIFRNKLVCHQCGKKLTLNTWRRKKKDGSYRYNASYICEKCQKNKEVSSFSLQKELVEKAFISYLSKADFKEDELDINRKTEHIDMIDGDKILKQREKYQQAFSLDLITLEEFTKRMNETQKAYKLYEEQLEELNKRKSKDIKIEEVIELRDSIISGWQLLSETDKESLVRSSIKNIYYTFIEGSGYGKNRIPNDLIVNHIDFY

SEQ ID NO: 48077 - DNA, 50 bp, Staphylococcus sciuri
  source 1..50: mol_type = genomic DNA
agtgtgggtaacggtgtttacttcgggaaagtaccacctttattcccact

SEQ ID NO: 48078 - DNA, 40 bp, Staphylococcus sciuri
  source 1..40: mol_type = genomic DNA
tatgggtggtggaacgtttggaaattggacccctactgct

SEQ ID NO: 48079 - DNA, 50 bp, Staphylococcus sciuri
  source 1..50: mol_type = genomic DNA
agtgtgggtaacggtgtttacttctggaaagtaccacctttattcccact

SEQ ID NO: 48080 - DNA, 40 bp, Staphylococcus sciuri
  source 1..40: mol_type = genomic DNA
tgtgggttgtggaaggctttgaaatttggcgcctgcacct

SEQ ID NO: 48081 - protein, 495 aa, Bacillus pumilus
MNIDKNSKVAVYSRKSREDPDTEDTLLKHREQLKALLTRYSFTDVEWFEEVVSSDSIDNRPIFSRLLPRIRSGEFDVVCVIANDRLSRGSQIDSGRIMEAFKESNTLLITPQKIYNMSNESDEMLSEFELVIARNEYRAIKRRLLNGRKGAVKEGRPHSGSVPFGFKWDKNDKTAKVNEEKIKIYRMMIDWFLKEEMSSAAIADRLNQLEIPPPSSRGKMWYGEVVTYLLLNDFHRGYVWYGNDEKNKGVHQPTKTEEEHTQIVERITKLRTYPDVGRRLNMNSHKLSGIVRCPYCLKVQNVHQPKGRQKHVRKCLRKSSAREPMCETTKGINEDILYSAILQEMKQYSSEIFKRNENRESAETTTISVHLIELKEKAIKKLRGRIERLKELYLDGDLDKNEYKEKLEKAQGNLMKSEKELGELYSSIEYQKAKALEKRTSLWQEEDVQALLESDEGMSDTEINIVLKKLISHISYKVKDEDGKQPELSVKVYYN

SEQ ID NO: 48082 - DNA, 50 bp, Bacillus pumilus
  source 1..50: mol_type = genomic DNA
tgttgtacccaaactatatctgtcgtaagcggtattgattgggtacaaca

SEQ ID NO: 48083 - DNA, 40 bp, Bacillus pumilus
  source 1..40: mol_type = genomic DNA
tgtcgtgacagggtctgtcgtcaccattattggcataacc

SEQ ID NO: 48084 - DNA, 50 bp, Bacillus pumilus
  source 1..50: mol_type = genomic DNA
tgttgtacccaaactatatctgtcataagcggtattgattgggtacaaca

SEQ ID NO: 48085 - DNA, 40 bp, Bacillus pumilus
  source 1..40: mol_type = genomic DNA
ggtcctgactgggtccctcatcaccaagattggcatggct

SEQ ID NO: 48086 - protein, 518 aa, Clostridium cocleatum
MKESKKNQKNNTKVGIYIRVSTQEQVIHGYSIGAQTDRLKKYCEVMGWDIYKLYIDEGISGKNMKDRPEMQNLLHDIENEKVNNVLVLKVDRLTRSVRDLVDFVDLINEKDCQFTSIMEMIDTSTATGRMFLKIIGIFAEFERENTIERVEIANSRKVSEGYCLYSCTTAWGYDRKKGKKEIYVNHKEAKILKEMEHMFLVDDYSCHKIAFKLNVRGIKTKQGEGNYWTSKAVKYVLTNPVYHGMTRHHTDDLTRYTEHKGKHKPLRTKETYDKIIEKFEQVKHYTKTKHGNENNYFLGALYCSICGSRLNSHIKIKTLANGERKKYTSYRCPNKGMGIGLCNAKSIAHSKMEEAFVNYIKEYEIKINEKIIDQVEIKQQEETNLLNTIKEDLEKQLKKLDRKEEEVMRLYIKNDVDFVTFHQIKKELGIQRDQIITEMESICEETEEEMIQISKKDIITNLRENWELFSDNEKNNFLKKFIHKIHVINKPQENTFYGKAVIEEIIFNEEVTNNKKDE

SEQ ID NO: 48087 - DNA, 50 bp, Clostridium cocleatum
  source 1..50: mol_type = genomic DNA
gggatgttattttttaccctttcttcgcaaggggataaaaaaaacacctc

SEQ ID NO: 48088 - DNA, 40 bp, Clostridium cocleatum
  source 1..40: mol_type = genomic DNA
gaccaccaggtccatggtttccgccgagaccaccaagacc

SEQ ID NO: 48089 - DNA, 50 bp, Clostridium cocleatum
  source 1..50: mol_type = genomic DNA
gggatgttattttttaccctttctgcgcaaggggataaaaaaaacacctc

SEQ ID NO: 48090 - DNA, 40 bp, Clostridium cocleatum
  source 1..40: mol_type = genomic DNA
atccaccagcaccatggttgccaccaaagccaccacaacc

SEQ ID NO: 48091 - protein, 542 aa, Lachnospiraceae bacterium MD335
MREQQNYTAGIYCRLSSEDSAEHESMSIGNQKAMLSDYVKRQGWEVGDIYIDDGYSGTNFERPDFKRMIGDIENGKINMVVVKDLSRLGRNYIMCGQYTEIYFPEKGVRFIAVNDNVDTINNTGSMDITPFKHILNDMYAKDISTKIKSSLHMKAMRGEYLGALDPYGYVRDPKDKHKLLVNEETAPIVKRIFEMCAGGMGSRSIATTLNNEGVLSPAEYNRFKNHDPEKDGAFVRKRYWCQTYIRTMLQNEMFIGSMVQGRHYTPSYRTKKRVKNDREDWIVVKGMHEPIISEELFEQAQKALHSRKIQPRKDSPHHVDPDVFSGLFRCEACGTAMRKHRTHNGKYIYYVCGRHHQQGKFACSSHYINCDVITRLVREDIKRNAVLFAEDTERAVKELTEKKCSDDQKKLSQMKSELTASRNQLAGLDAKLRRAYEDNLSGKLPDHIFTMLIGNYDEEKETLQRTIRELEKRIDASNAARSDVERFSKLIQKYTSFEELDSFMLHELIEKITIYETPNMGRYRKGKEKIVTIYYKFVGALQ

SEQ ID NO: 48092 - DNA, 50 bp, Lachnospiraceae bacterium MD335
  source 1..50: mol_type = genomic DNA
ttataccaaaatgaacactcgtcatctttggagttgtcattttggtggag

SEQ ID NO: 48093 - DNA, 40 bp, Lachnospiraceae bacterium MD335
  source 1..40: mol_type = genomic DNA
ttccccgtcaagattatcgtcctttgagagcctgcaatat

SEQ ID NO: 48094 - DNA, 50 bp, Lachnospiraceae bacterium MD335
  source 1..50: mol_type = genomic DNA
ttataccaaaatgaacactcgtcatgtttggagttgtcattttggtggag

SEQ ID NO: 48095 - DNA, 40 bp, Lachnospiraceae bacterium MD335
  source 1..40: mol_type = genomic DNA
atccccagcaatattatcttgctgtaagaacctgaaattt

SEQ ID NO: 48096 - protein, 557 aa, Pseudomonas weihenstephanensis
MRKSNCCYWFLFSLLVKVLKVGIGKVFSYLRFSDPRQAAGSSADRQLAYAATWAAKQGMELDATLTLKDEGLSAYHQRHVTQGALGVFLRAIEDGRIASGSVLVVEGLDRLSRAEPIQAQAQLAQIINAGITVVTASDGREYNRASLKAQPMDLVYSLLVMIRAHEESDTKSKRVKAAIRRQCEGWVAGSFRGLIRNGKDPQWLHWGEQGWELVPERVSAVRRALELYQQGLGAGRAAKLMHDEGFELSSWGISGQQVYRLIKLPALRGAKRLAVDGEAYMLEEYYPRILSDTEWAELQHLASQRHRRRGAGEIPGIITGVGLAYCGYCGTALVAQNIMQRRRADGSLADGHRRLQCTSYSKNGGCSASGSCSVVPIERALLNFCSDQLNLQRLLQVGDDGQGIRQQLVVARAAVEKNTRQLGKITEALLDDESGSAPIAFVRKARELEAQQVVAEQKVLQLEYALATVYGPSQPAQAERWEELAELVGAGDYGAREKVRQLVMDTFERIVIYMRGLEPDGRKGQLIDVQLLSRTGQHRLIQIDRRSGEWVSSEDWD

SEQ ID NO: 48097 - DNA, 50 bp, Pseudomonas weihenstephanensis
  source 1..50: mol_type = genomic DNA
tgtatattttgagaatcgttagggcaccccagtgatataaaccctacacg

SEQ ID NO: 48098 - DNA, 40 bp, Pseudomonas weihenstephanensis
  source 1..40: mol_type = genomic DNA
gtcgaccaacgcttttgggcaacccagggagacaaaacca

SEQ ID NO: 48099 - DNA, 50 bp, Pseudomonas weihenstephanensis
  source 1..50: mol_type = genomic DNA
tgtatattttgagaatcgttagggggccccagtgatataaaccctacacg

SEQ ID NO: 48100 - DNA, 40 bp, Pseudomonas weihenstephanensis; identical to SEQ ID NO: 17210
  source 1..40: mol_type = genomic DNA

SEQ ID NO: 48101 - protein, 539 aa, Pseudomonas carnis
MVKNGARVYSYLRFSDPRQSTGSSADRQLQYAQKWAAEKGLILDESLSMRDEGLSAYHQRHITQGALGVFLVAIEEGRIASGSVLVVEGLDRLSRAEPIQAQAQLAQIINAGITVVTASDGREYNRAGLKAQPMDLVYSLLVMIRAHEESDTKSKRVKASIRRLCEAWQAGTYRGQIRNGKDPQWLKWTGTEWEFIPERVAAVRRALQLYLQGMGAARAVRILHDEGLSYSDLGVTTLQIYRLIKLKALRGAKSLTVEGEEFVLDDYYPRLLSETEWAELQHMGGQRLRRRMKGEIPGIITGIGLTYCGYCGTAVVGQNYMSRARADGTLADGHRRLHCVSYSRNDGCGSGGSCSVVPIEKALLNFCSDRLNLQRLMQVGDDGQGLRHQLVVARAAVQKIAEQLERVTAALLADDDGPAPISFVRKARELEAQQIDAEKNVANIEYELAAASGSGKPAQQDQWVELAALVNAGDYGAREKVRQLVMDTFQRIVVYMRGMGDEDRKSKFIDVQLISRTGQHRLLQINRRSGEWVASEDWD

SEQ ID NO: 48102 - DNA, 50 bp, Pseudomonas carnis
  source 1..50: mol_type = genomic DNA
agtatattgatgcaatcgctggggcaccctaacgatatcattcctacacg

SEQ ID NO: 48103 - DNA, 40 bp, Pseudomonas carnis
  source 1..40: mol_type = genomic DNA
gtcgacaagcgccttcgggcaacccagggaaacaaagcca

SEQ ID NO: 48104 - DNA, 50 bp, Pseudomonas carnis
  source 1..50: mol_type = genomic DNA
agtatattgatgcaatcgctggggggccctaacgatatcattcctacacg

SEQ ID NO: 48105 - DNA, 40 bp, Pseudomonas carnis; identical to SEQ ID NO: 17210
  source 1..40: mol_type = genomic DNA

SEQ ID NO: 48106 - protein, 507 aa, Vibrio coralliirubri
MGKVYSYIRFSKKEQGAGSSTARQLKYAEEYAKKHGLVLDSTLVDDGLSAYHAKHLSKGALGLFLAAVESGDVEPDSTLIIERLDRLSRQKPRQAQALLSQIIDYGITVVTASDGAVYNEKTIDDDPMKLVYSLLIAIRANEESETKAQRSKAAIQHNINQFQKHKIRSLGGAVPAWFDRFNSAQGWEYKLNPKTDTVRRIVELSLNGTGAKTIARMINSEGHKPFGKSENWGMTSVVSVLKNPALFGRRVVNSNGSVMLDDYYPAVVSRKDFDAVQYRLNKRKNTKGSEKFVNLITGLGKGFCTCGYCGSAIATQNQIFKTKSGERIVRRMHCTATKESGQCHSSKRIEKTEEAVLMFMMERNLDTLKAGDTQSYEIEIDTIDKKIRKMVSLQLALETSELPDDFLDSLTQLRARKVELSDKAAKGGIDIELNEQFKALGEKAIKLENSEARTTVRQIIRDSVASIRIWTCGVELVNEPDIAIEFKNGTRGLISIRGQEIIAQQLS

SEQ ID NO: 48107 - DNA, 50 bp, Vibrio coralliirubri
  source 1..50: mol_type = genomic DNA
cagtttaattggttacactggacagacgctcaacgtaaccaatcacacaa

SEQ ID NO: 48108 - DNA, 40 bp, Vibrio coralliirubri
  source 1..40: mol_type = genomic DNA
gcaagatatccactggacagacggcgcattcggttacttc

SEQ ID NO: 48109 - DNA, 50 bp, Vibrio coralliirubri
  source 1..50: mol_type = genomic DNA
cagtttaattggttacactggacaaacgctcaacgtaaccaatcacacaa

SEQ ID NO: 48110 - DNA, 40 bp, Vibrio coralliirubri
  source 1..40: mol_type = genomic DNA
ggacgacttgcactggacaaatgccgccttcctttacttc

SEQ ID NO: 48111 - protein, 444 aa, Mycobacterium intracellulare
MHELYKLKAVIYVRKSTVSDGKSTRDQESECRNWCATNKIPVEKVFKDEGKGASRHSKKERDSWAELKAYLRSGHILVAWEASRATRDTAEGAALLNLCEERGIPLAYNGRILDPSTGDDRFLGGLDFLLAARESDIIRERVNRGLRGAAADGTPHGKVPWGYRAKPRKVGERPEWEFDPIEAPRVREAVERIMAGESYKSVYRWLRSTGHAPPNPSCLSRLLCSPTMTGKRIFQGKVVGKGTWPALITEEQHQFMVSRRENGYHPPGPESRHLCSGITFCARCNSPMRYRTREGRKPTYVCRTGCVSRPADVLDKYVEDAVLRRLANINPDDYDSSNPEIAEAERRIEELEANLAEWEEKAINEQVSPAVFAKIEKDRRQKIAALRPHTVPQEQIEFLRPENWDAAPMKVKRDHVRVLLKVTIPMTDKRRRLSEDEIADITPI

SEQ ID NO: 48112 - DNA, 50 bp, Mycobacterium intracellulare
  source 1..50: mol_type = genomic DNA
tgtacccctattcataatttctcttgagataagttcgcgttaggggtaca

SEQ ID NO: 48113 - DNA, 40 bp, Mycobacterium intracellulare
  source 1..40: mol_type = genomic DNA
cgcgccggtcccgctggcgtggctcaaggacatcggcgcc

SEQ ID NO: 48114 - DNA, 50 bp, Mycobacterium intracellulare
  source 1..50: mol_type = genomic DNA
tgtacccctattcataatttctctcgagataagttcgcgttaggggtaca

SEQ ID NO: 48115 - DNA, 40 bp, Mycobacterium intracellulare
  source 1..40: mol_type = genomic DNA
cgccccggcccggcagccgcggctcccggccacccgcgcc

SEQ ID NO: 48116 - protein, 468 aa, Collinsella aerofaciens
MPKRAVIYARFSCNRQREASIEDQLRVCREWCAREGYEVAAEYCDRAVSGRTDDRPEFQRMIANAGESEIVLVYMMDRFSRGEYDAPIYKRELATHGVKLVSALEQIPDSPEGIIYEKLLEGLAACESRKTAIRTKRGMEGNALKCKTNGVRIFGYRRNGDDEYEVDQAQAAWVREAFALRLERMSMNAIAREFARRGLRTRKGNPCGQAMVQQMLRDRRYTGRYEWGAIVREGGMPQIVDEVTFMEVQGIKCRKQRSSENWGDFALAGAALCAECGRNLQGVSGRGRNNVKYEYYSCPGSCVRNIRREELEGSIASPLRELLGDRGEALQIADMVAERADTAEVRARRRQAEDSLRAAERGLRNILNAIEQGVIAPGVNERIAELEEQQARARYDLEAITDERIDPERFADFLQCGTALDDATLLKAFVWQAVVSEDEILVTLNYDKKGEPARLDIQRVRAKLEWCP

SEQ ID NO: 48117 - DNA, 50 bp, Collinsella aerofaciens
  source 1..50: mol_type = genomic DNA
agcgggttcgagcaaaattggaatggtgccccgtctgcctagattctaga

SEQ ID NO: 48118 - DNA, 40 bp, Collinsella aerofaciens
  source 1..40: mol_type = genomic DNA
ggacggtcttacgttcgatggtgccccatgttggattcga

SEQ ID NO: 48119 - DNA, 50 bp, Collinsella aerofaciens; identical to SEQ ID NO: 48117
  source 1..50: mol_type = genomic DNA

SEQ ID NO: 48120 - DNA, 40 bp, Collinsella aerofaciens
  source 1..40: mol_type = genomic DNA
ggactgtcttacctttgagggttccccattttgttatcaa

SEQ ID NO: 48121 - protein, 504 aa, Mesorhizobium ciceri
MQKESIIALGYRRVSGAKQVKEGDGLGSQEARIREFAERRGYPPLSAMFTDDESGGSENRPGFREMLAFLKKNRAHTCVVIIDDITRLARGVTVHHKLRAAIAATGARLECPSFEFGESSDEQLVENLLASVSQHHRQKNGEQVYNRMRGRLLNGYWCFHAPPGYTHARVSGQTILVKKEPVASIVEEALEGYANGRLQSQAEVQRFLEACPDFPRYSGRVKFDRVTTMLKCVLYSGYLEYPKWDVSLRKAHHEPLISFETYQRIQSRLNGAAKTPARADISEHFPLRGFIRCAKCGKSISGSFSRGRPKEYPYYFCIGKGCQIYRKSLSKQAVETRFDDLLRSLEPTSDLIELAETTFRDIWQQRAASSKERKAALQRVLGNIERSINQIIDRIAATSDQGLIAVYEKRLSELQRDKVAQAEKAETAANSLPDFDDTLRTALQFLSSPWKLWDTGRLEDRRAVLKLVFSKHLHYDEDEGFRTAETTLPFKVLATLRDEVGNLV

SEQ ID NO: 48122 - DNA, 50 bp, Mesorhizobium ciceri
  source 1..50: mol_type = genomic DNA
acacttcgcgatgaagttggcaatttggtgcagcaaacgggagaaagttc

SEQ ID NO: 48123 - DNA, 40 bp, Mesorhizobium ciceri
  source 1..40: mol_type = genomic DNA
ttgatgtcaaagagaccaattggtgcccctagccgggatc

SEQ ID NO: 48124 - DNA, 50 bp, Mesorhizobium ciceri
  source 1..50: mol_type = genomic DNA
acacttcgcgatgaagttggcaatcaggtgcagcaaacgggagaaagttc

SEQ ID NO: 48125 - DNA, 40 bp, Mesorhizobium ciceri
  source 1..40: mol_type = genomic DNA
tggatgtctcaaagaccaacaagtgacccaagccttcatc

SEQ ID NO: 48126 - protein, 548 aa, Mycobacterium chimaera; identical to SEQ ID NO: 9226

SEQ ID NO: 48127 - DNA, 50 bp, Mycobacterium chimaera; identical to SEQ ID NO: 17512
  source 1..50: mol_type = genomic DNA

SEQ ID NO: 48128 - DNA, 40 bp, Mycobacterium chimaera
  source 1..40: mol_type = genomic DNA
ggctcagtcgtgtgtccgaggggggacttgaacccccacg

SEQ ID NO: 48129 - DNA, 50 bp, Mycobacterium chimaera
  source 1..50: mol_type = genomic DNA
agtcgtgtcgccggacgtgtccgaagggggacttggccacttacgacacg

SEQ ID NO: 48130 - DNA, 40 bp, Mycobacterium chimaera
  source 1..40: mol_type = genomic DNA
gggtcagagacgtatcccaagggggactggaacccgcatg

SEQ ID NO: 48131 - protein, 548 aa, Mycobacterium intracellulare; identical to SEQ ID NO: 441

SEQ ID NO: 48132 - DNA, 50 bp, Mycobacterium intracellulare; identical to SEQ ID NO: 442
  source 1..50: mol_type = genomic DNA

SEQ ID NO: 48133 - DNA, 40 bp, Mycobacterium intracellulare; identical to SEQ ID NO: 48128
  source 1..40: mol_type = genomic DNA

SEQ ID NO: 48134 - DNA, 50 bp, Mycobacterium intracellulare
  source 1..50: mol_type = genomic DNA
agtcgtgtcgccggatgtgtccgaagggggacttgtccgtctacgacacg

SEQ ID NO: 48135 - DNA, 40 bp, Mycobacterium intracellulare; identical to SEQ ID NO: 48130
  source 1..40: mol_type = genomic DNA

SEQ ID NO: 48136 - protein, 548 aa, Mycobacterium intracellulare; identical to SEQ ID NO: 13166

SEQ ID NO: 48137 - DNA, 50 bp, Mycobacterium intracellulare; identical to SEQ ID NO: 442
  source 1..50: mol_type = genomic DNA

SEQ ID NO: 48138 - DNA, 40 bp, Mycobacterium intracellulare; identical to SEQ ID NO: 48128
  source 1..40: mol_type = genomic DNA

SEQ ID NO: 48139 - DNA, 50 bp, Mycobacterium intracellulare; identical to SEQ ID NO: 48134
  source 1..50: mol_type = genomic DNA

SEQ ID NO: 48140 - DNA, 40 bp, Mycobacterium intracellulare; identical to SEQ ID NO: 48130
  source 1..40: mol_type = genomic DNA

SEQ ID NO: 48141 - protein, 548 aa, Mycobacteroides franklinii; identical to SEQ ID NO: 441

SEQ ID NO: 48142 - DNA, 50 bp, Mycobacteroides franklinii; identical to SEQ ID NO: 442
  source 1..50: mol_type = genomic DNA

SEQ ID NO: 48143 - DNA, 40 bp, Mycobacteroides franklinii
  source 1..40: mol_type = genomic DNA
gcctcagtgttgtgtccgaggggggacttgaacccccacg

SEQ ID NO: 48144 - DNA, 50 bp, Mycobacteroides franklinii; identical to SEQ ID NO: 48134
  source 1..50: mol_type = genomic DNA

SEQ ID NO: 48145 - DNA, 40 bp, Mycobacteroides franklinii; identical to SEQ ID NO: 48130
  source 1..40: mol_type = genomic DNA

SEQ ID NO: 48146 - protein, 548 aa, Mycolicibacterium monacense; identical to SEQ ID NO: 13166

SEQ ID NO: 48147 - DNA, 50 bp, Mycolicibacterium monacense; identical to SEQ ID NO: 442
  source 1..50: mol_type = genomic DNA

SEQ ID NO: 48148 - DNA, 40 bp, Mycolicibacterium monacense
  source 1..40: mol_type = genomic DNA
ggttcacaccggtgtccgaggggggacttgaacccccacg

SEQ ID NO: 48149 - DNA, 50 bp, Mycolicibacterium monacense; identical to SEQ ID NO: 48134
  source 1..50: mol_type = genomic DNA

SEQ ID NO: 48150 - DNA, 40 bp, Mycolicibacterium monacense; identical to SEQ ID NO: 48130
  source 1..40: mol_type = genomic DNA

SEQ ID NO: 48151 - protein, 611 aa, Jeotgalicoccus aerolatus
MSKRASDKKETYDSLYLDNQTQPKDAALSFQKINTSKSLGDDVFHAVQKNVMEFQVKHTSKNTDKEGITALYVRLSQEDTLNGESNSISNQKKILDHYCREQNYTLTYHYVDDGYSGTTFDRPAFQEMLAHIKAGKINRVIVKDMSRFGRDYLQVGMFTDILFPNFDVHFIAINDGVDSTKGDNEFTAIRNIFNEMHARDTSKKIRATWQSKGRSGEKLSTNAPYGYLKDPTNKKNWIVDEDAAAVVQKMFSLCMDGLGPTQIARWLRERNILCPSAYFRSKGIKYPATPPANPYQWSTETVSTMLERVEYLGHTVNFKTRKTSYKTKRFIYTDPSEWKIFENTHPAIIEESVFLIVQNIRRSRRRPNRYGDMGLFSGLLFCADCGGKMYLCRASGFKKEQEYSICSTYRKDRSLCGKTHSIRTVVLEELVLNNLREALHYVSAYENDFIQEVSDIRMSEKEKELSKMEDTLLQMEKRIVELDVIFKRLYEDHISGKLSDQRFIHLSGEYEKEQETLKASCHTLQKELKEHEKKKTNVRKFVKIARKYTKLEKLDTAILREFIDKILVSSKDHQTKTQEITIVYNFIGAFDFNRAIHQTKGKDKHTKVDVI

SEQ ID NO: 48152 - DNA, 50 bp, Jeotgalicoccus aerolatus
  source 1..50: mol_type = genomic DNA
atgctttcttaattcagcgcacctttcaacatgttgacataagaaaacat

SEQ ID NO: 48153 - DNA, 40 bp, Jeotgalicoccus aerolatus
  source 1..40: mol_type = genomic DNA
ctgataaaactcgttctctttgagcgcctggtttttttcg

SEQ ID NO: 48154 - DNA, 50 bp, Jeotgalicoccus aerolatus
  source 1..50: mol_type = genomic DNA
atgctttcttaattcagcgcacctaacaacatgttgacataagaaaacat

SEQ ID NO: 48155 - DNA, 40 bp, Jeotgalicoccus aerolatus
  source 1..40: mol_type = genomic DNA
gttataatcctccttctcaaagagttcctggtttgtttgg

SEQ ID NO: 48156 - protein, 560 aa, Streptomyces alboflavus
MNLESLKGLRGGLYARKSAYRGKTKSQGRSVREQLDAGQADADRFGVPIVKEFVDDDRSASIYRAREREEFESMIEWINKKRLDIVFAWASTRLQRDLAVYARLRDACAANGVLWCYGGKVYDLTNKDDRLQTGLHALLGENEVEEMRNNVLRTLRANAANGRPHGQEGYGYRRVYDPRTRALLKIEVEPAEAKIIGELCKRVAAGDAYSVIARDFNLRGVAPPARQWRKEHIGRLAVWRDDLPENVLIHPEWVQRIKDHAHLQAEVQQRLKEGEEELSVSQDFNERQEPLLLARWHAATIVDYASHPRYIGVRTHHGKATAEGVWPKIVKKSTHARCLAIIKERKRKPHNSRPGRAVNWLSGSMVCDVCSVAVGSGRNASGPYYRCMQPKVEGKYGGKGYHVSATTGPIDEFVEEKLFEWLSSPQFVEAYTKGDDELMKQAAEADAEVTLLRGRLQEFRESAIDGKTSAETLAVVEAGLLPKIEEAEKVAKSLKAPSLVRDLVAATPEEVATAWAEVPMAQRRLVAETLLDIRLRKAPRGGHMPVEDHVVVTPRLPAAA

SEQ ID NO: 48157 - DNA, 50 bp, Streptomyces alboflavus
  source 1..50: mol_type = genomic DNA
aatcatcacgaacgcggagctaccttggttctcccgagttagggacataa

SEQ ID NO: 48158 - DNA, 40 bp, Streptomyces alboflavus
  source 1..40: mol_type = genomic DNA
tcaggccttgggtgccaccttgctgaggccgttgatgatg

SEQ ID NO: 48159 - DNA, 50 bp, Streptomyces alboflavus
  source 1..50: mol_type = genomic DNA
aatcatcacgaacgcggagctaccacggttctcccgagttagggacataa

SEQ ID NO: 48160 - DNA, 40 bp, Streptomyces alboflavus
  source 1..40: mol_type = genomic DNA
tcaggccttgtgtgttcccaccttgagggctttgctcatg

SEQ ID NO: 48161 - protein, 525 aa, Blautia wexlerae
MYLEISNPMDYHVALYIRLSKEDETEGPSQSVTNQKSLLNEFVQQHRLSVYDTYVDDGWSGISFDRPDFQRMIEDIEAKKVNMVITKDLSRLGRDYIMTGHYMERYFPEKRVRYISLLDGIDTGVESTANDITPFRAIMNDMYAKDISKKIKSVKRDKQRKGQFIGGKPMYGYKMHPTEKNKIVIDEKVAPVVRRIFAMALDGMSCRKIATTLNEEGVPTPATYCGWNMGRKGPYAGLWSSERISEMLQNETYLGNMVQGRTVKISYKSKKCLKQDRENWVVVENTHEPLIDKETFQKVRMLVNSRKHTRSRTYDFLLKGLIFCHECDYPMAVLNRPPVSGEDRLFFVCRTYQRFTKAGVCSCHSIKEQVVTEAVLAKVREVCEAYLDPNKLQPIAADAVEKARKAENHEAEIQSIQNKIDSLTANLDKMYMDWLTGLLAEADFERIYQRVKMDRTSLEEKLKELESQKESPVSTEDRARELVQQFLDSAYTSRELLVSLIERVELTEDKQIIIKFRFRELEAIS

SEQ ID NO: 48162 - DNA, 50 bp, Blautia wexlerae
  source 1..50: mol_type = genomic DNA
cgtttacaataggcgcggcggaatgtatagcgccgccactaatgtaaacg

SEQ ID NO: 48163 - DNA, 40 bp, Blautia wexlerae
  source 1..40: mol_type = genomic DNA
gtgtatcagccgctcttatgtctccagaatcgaaaaaact

SEQ ID NO: 48164 - DNA, 50 bp, Blautia wexlerae
  source 1..50: mol_type = genomic DNA
cgtttacaataggcgcggcggaatgcatagcgccgccactaatgtaaacg

SEQ ID NO: 48165 - DNA, 40 bp, Blautia wexlerae
  source 1..40: mol_type = genomic DNA
ctattatagccatttttatgcctccagaattgaaaatact

SEQ ID NO: 48166 - protein, 470 aa, Collinsella intestinalis
MADVKRAVIYARFSCSKQREASIDDQLRVCREWCDREGYEVVREYSDYAMSGRSDDRPQFQEMIANAGESDIVLVYMMDRFSRSEYDAPIYKKELAKHGVEVVSAMEALPDGPEKILIEKIYEGLAAVESAKTSIRVKRGMGGNALKCLTNGVRIYGYRTAEDGRFEIDPDAAENVKWAYKMRLRGIAVNQIGTMLAERGVKNSTGGACNYNLARKILSDERYTGVYIWDDVRIEGGMPQIIDRGTFMEAQEVRSRKCRADESWGDYALKGKALCGECGRSLQGISGYGNKGVRYEYYSCPGKCQKNIRRDLLEGEIVHALRSMLSDRSTAMMIARALCGLQSHKALNIEKERAQKSLSDAEKSLKNLLSAVEQGIIVPGTKERIQELEAQKMRALRDLESAQSEEVDPEGFADFLMYGEELDDRNLLKAFVYQVMLMPESVVVTLNYDEENGEPARINFKRVRGKLEWC

SEQ ID NO: 48167 - DNA, 50 bp, Collinsella intestinalis
  source 1..50: mol_type = genomic DNA
gggttcgaggaaaattagaatggtgccctatagcaatgctctcgcgaact

SEQ ID NO: 48168 - DNA, 40 bp, Collinsella intestinalis
  source 1..40: mol_type = genomic DNA
cccgaggatgtttgttggtgcgccatatagggttcgaacc

SEQ ID NO: 48169 - DNA, 50 bp, Collinsella intestinalis
  source 1..50: mol_type = genomic DNA
gggttcgaggaaaattagaatggttccctatagcaatgctctcgcgaact

SEQ ID NO: 48170 - DNA, 40 bp, Collinsella intestinalis
  source 1..40: mol_type = genomic DNA
ccaaaagttgttttttggctccccatttggggttcgtacc

SEQ ID NO: 48171 - protein, 470 aa, Collinsella intestinalis
MADVKRAVIYARFSCSKQREASIDDQLRVCREWCDREGYEVVREYSDYAMSGRSDDRPQFQEMIANAGESDIVLVYMMDRFSRSEYDAPIYKKELAKHGVEVVSAMEALPDGPEKILIEKIYEGLAAVESAKTSIRVKRGMGGNALKCLTNGVRIYGYRTAEDGRFEIDPDAAENVKWAYKMRLRGIAVNQIGAMLAERGVKNSTGGACNYNLARKILSDERYTGVYIWDDVRIEGGMPQIIDRGTFMEAQEVRSRKCRADESWGDYALKGKALCGECGRSLQGISGYGNKGVRYEYYSCPGKCQKNIRRDLLEGEIVHALRSMLSDRGTAMMIARALCGLQSHKALNIEKERAQKSLSDAEKSLKNLLSAVEQGIIVPGTKERIQELEAQKMRALRDLESAQSEEVDPEGFADFLMYGEELDDRNLLRAFVYQVMLMPESVVVTLNYDEENGEPARINFKRVRGKLEWC

SEQ ID NO: 48172 - DNA, 50 bp, Collinsella intestinalis; identical to SEQ ID NO: 48167
  source 1..50: mol_type = genomic DNA

SEQ ID NO: 48173 - DNA, 40 bp, Collinsella intestinalis; identical to SEQ ID NO: 48168
  source 1..40: mol_type = genomic DNA

SEQ ID NO: 48174 - DNA, 50 bp, Collinsella intestinalis; identical to SEQ ID NO: 48169
  source 1..50: mol_type = genomic DNA

SEQ ID NO: 48175 - DNA, 40 bp, Collinsella intestinalis; identical to SEQ ID NO: 48170
  source 1..40: mol_type = genomic DNA

SEQ ID NO: 48176 - protein, 505 aa, Rhizobium leguminosarum
MSEKGILTIGYARVSTKKQTKEGDGLGSQEARIREYARNRGYPAPTVVFTDDRTGATAVRPGFAAMVKFLVKNRSSACVVIIDDINRLARDVHVHHKVRAAIAATGARLECPSFEFGDSSDDILVENLLASVSQHQRQKNGEQVYNRMRGRLLNGYWCFASPPAFQYERVAGQKILVPREPIASIVTEALEGFANGRFETQAEVQRFLQDSPGFPKMRNGTVKIDRVTEMLTSVLHAGMVEYLPWKVGILKGHHVGLITYETYLRIQRRLNENPKAPARADLNENFPLRQAVQCDYCGRLIGGAYSRGRNAEYPYYFCLNRECSRYRKSFSCDETHGRFYALLKTMSPAEEVVDIASDIFREKWEKQSVGSRERIALLQQEMSSTGKSIELLIDRIANSPNRELIEAYEARLVDLQRKKAELSEKILNTGQKLPDFDSTLRTALDFLASPWKLWETGNLEDRRILRKLVFTEHLRYAPESGFRTAETTLPFKVLADIAARNVEMV

SEQ ID NO: 48177 - DNA, 50 bp, Rhizobium leguminosarum
  source 1..50: mol_type = genomic DNA
atcgcagctaggaatgtcgaaatggtggagccaacgggagaaagttcgaa

SEQ ID NO: 48178 - DNA, 40 bp, Rhizobium leguminosarum
  source 1..40: mol_type = genomic DNA
caaaaccctggaaaaagtggtgggcccggagggactcgaa

SEQ ID NO: 48179 - DNA, 50 bp, Rhizobium leguminosarum
  source 1..50: mol_type = genomic DNA
atcgcagctaggaatgtcgaaatggaggagccaacgggagaaagttcgaa

SEQ ID NO: 48180 - DNA, 40 bp, Rhizobium leguminosarum
  source 1..40: mol_type = genomic DNA
caaaacatttgaataaatggagagcccggagggaatgcca

SEQ ID NO: 48181 - protein, 546 aa, Geobacillus kaustophilus
MVMDGVKKRVATLYRVSTKGQLDGDDIPMQRNACRSFIEKQGNWELVKEYIEKGVSGFKVSASKRDAIQRAKEDAEKGLFDVLLVFMFDRLGRRDDETPFIVEWFINNGIEVWSVKEGQQKLEDHADRLINYIRFWQSSGESRKTSIRVNEKHSQMVEDGIYRGGLVPYGYKTVNSGVFNKKGKELLKVVIDEEEAEIVKKMYDLVLEEGYGQSRIAQYLNEKGIPSKTGKKWTSGAVNNVLRNPMYKGYMVYARGTEKEVVSKEKLEELVIIDEEKWNKVQSIREKRNPENVKNRGEESIITTTKSSLLLVGLVRCGHCGSPLCTTYNKKKYVRKDGTEYVKREAKYRCSGKAQKKVDCDGQTLYSPKKIEGVVLDELYDYLDQLETIDLTSKIQEFKQHNTDKEVKTLKKLQSEFDKVNSALVKLRDEALKIIMGESLFDAKVVNDLINQKENELRELEESINKAKLDLESKKVELSEMEELQRYIPVWREVFEKASVEKKKMMLSTVIDKIVVFRDRVEITFKISLNRFLVNEGSHSNNDALP

SEQ ID NO: 48182 - DNA, 50 bp, Geobacillus kaustophilus; identical to SEQ ID NO: 13542
  source 1..50: mol_type = genomic DNA

SEQ ID NO: 48183 - DNA, 40 bp, Geobacillus kaustophilus
  source 1..40: mol_type = genomic DNA
ctcctgccagcacgacgctctcccaactgagctaatgccc

SEQ ID NO: 48184 - DNA, 50 bp, Geobacillus kaustophilus
  source 1..50: mol_type = genomic DNA
ggcagtcattctaacaatgacgcctgcccacgcttgtcagttacactgcc

SEQ ID NO: 48185 - DNA, 40 bp, Geobacillus kaustophilus
  source 1..40: mol_type = genomic DNA
ctcctgccagctgcatgcttgcctggctgtgccaaggccc

SEQ ID NO: 48186 - protein, 458 aa, Staphylococcus aureus; identical to SEQ ID NO: 41121

SEQ ID NO: 48187 - DNA, 50 bp, Staphylococcus aureus
  source 1..50: mol_type = genomic DNA
ttgtgcggaactacgaacagtttataaacacgaagtgtacaaactcccat

SEQ ID NO: 48188 - DNA, 40 bp, Staphylococcus aureus
  source 1..40: mol_type = genomic DNA
atgtatggaggcacttgtatcaatataggatgtatacctt

SEQ ID NO: 48189 - DNA, 50 bp, Staphylococcus aureus
  source 1..50: mol_type = genomic DNA
ttgtgcggaactacgaacagtttacaaacacgaagtgtacaaactcccat

SEQ ID NO: 48190 - DNA, 40 bp, Staphylococcus aureus
  source 1..40: mol_type = genomic DNA
atgaaagcagggacttggacaaatatatgatatatacacc

SEQ ID NO: 48191 - protein, 540 aa, Blautia massiliensis; identical to SEQ ID NO: 12686

SEQ ID NO: 48192 - DNA, 50 bp, Blautia massiliensis; identical to SEQ ID NO: 3657
  source 1..50: mol_type = genomic DNA

SEQ ID NO: 48193 - DNA, 40 bp, Blautia massiliensis; identical to SEQ ID NO: 20033
  source 1..40: mol_type = genomic DNA

SEQ ID NO: 48194 - DNA, 50 bp, Blautia massiliensis; identical to SEQ ID NO: 18389
  source 1..50: mol_type = genomic DNA

SEQ ID NO: 48195 - DNA, 40 bp, Blautia massiliensis
  source 1..40: mol_type = genomic DNA
cctatacagatgtgaaaccctaaaagcaatgtagtatatc

SEQ ID NO: 48196 - protein, 548 aa, Mycobacterium dioxanotrophicus; identical to SEQ ID NO: 13166

SEQ ID NO: 48197 - DNA, 50 bp, Mycobacterium dioxanotrophicus; identical to SEQ ID NO: 442
  source 1..50: mol_type = genomic DNA

SEQ ID NO: 48198 - DNA, 40 bp, Mycobacterium dioxanotrophicus
  source 1..40: mol_type = genomic DNA
ctcatcacagtgtgtccgaggggggacttgaacccccacg

SEQ ID NO: 48199 - DNA, 50 bp, Mycobacterium dioxanotrophicus; identical to SEQ ID NO: 11354
  source 1..50: mol_type = genomic DNA

SEQ ID NO: 48200 - DNA, 40 bp, Mycobacterium dioxanotrophicus
  source 1..40: mol_type = genomic DNA
ctcaccacagcctctcagagaggggacgggaatcccctct

SEQ ID NO: 48201 - protein, 559 aa, Bradyrhizobium japonicum
MARKHLQVSEAPDNAARPRPRNVLIYIRVSTEKQSNNQLSLDSQEENLIARCKRDGDHIAGIFREEGETATNMKRPAFEQMIARATDGTRSVDAIMVYSFSRAFRNQVEQELTVQTLRKHKVELISHAEPLANDDTGDMFRKFIGIVNEYQSKETARSTMRTMKANAQLGYSNGGIIPFGYKSVDAEIIGNKQKKKLATEPVEAEVVIRAFDLAKNGDGNSGPLGTKKIAEWLNAHGYRSRNGSLFGTGTVHEMLTRRAYTGVRNFNEFDRKGDGERKAQSEIVEYEIPVIIDQATFEAVQALLVSRRPRSRGPRLASAPSLLGGLVRCDCAKSCALTTATGTSRTGVIYSYYKCIQSIKKGQHKHDDGASCGNRKIARPVIEKLVVEALLDQLLQPERVTAILTALKARRDDRQASADRRLVDLARQVTDAEERLSRLYASIEAGTIDGTDPTLKERVAALKTTRDRALEALDYAKKSSALPIEIDPVAVDRFTRLMREQLVSGDVAARKAYLSAIVDAIVVSDTTIRIIGSNDNIRATLGPNGQPTPTVRKSVQEWC

SEQ ID NO: 48202 - DNA, 50 bp, Bradyrhizobium japonicum
  source 1..50: mol_type = genomic DNA
ttcgtaaatctgttcaggaatggtgcgccattcagaacaaagatgcgaac

SEQ ID NO: 48203 - DNA, 40 bp, Bradyrhizobium japonicum; identical to SEQ ID NO: 29843
  source 1..40: mol_type = genomic DNA

SEQ ID NO: 48204 - DNA, 50 bp, Bradyrhizobium japonicum
  source 1..50: mol_type = genomic DNA
ttcgtaaatctgttcaggaatggtatgccattcagaacaaagatgcgaac

SEQ ID NO: 48205 - DNA, 40 bp, Bradyrhizobium japonicum
  source 1..40: mol_type = genomic DNA
tgagggagagaatggtgggatctctggcctgaatcaaacc

SEQ ID NO: 48206 - protein, 499 aa, Actinomyces oris; identical to SEQ ID NO: 45866

SEQ ID NO: 48207 - DNA, 50 bp, Actinomyces oris
  source 1..50: mol_type = genomic DNA
atacgtccttggtctcgcatagcggccactatgtacgaacgaagacatac

SEQ ID NO: 48208 - DNA, 40 bp, Actinomyces oris
  source 1..40: mol_type = genomic DNA
gccggcgaaggccgcggccgccaaggtgccgatggcgtac

SEQ ID NO: 48209 - DNA, 50 bp, Actinomyces oris
  source 1..50: mol_type = genomic DNA
atacgtccttggtctcgcatagcgggcactatgtacgaacgaagacatac

SEQ ID NO: 48210 - DNA, 40 bp, Actinomyces oris
  source 1..40: mol_type = genomic DNA
gacagcgctggccggggagggcaagcggccgctggcgtac

SEQ ID NO: 48211 - protein, 479 aa, Mycobacteroides saopaulense; identical to SEQ ID NO: 3691

SEQ ID NO: 48212 - DNA, 50 bp, Mycobacteroides saopaulense; identical to SEQ ID NO: 3692
  source 1..50: mol_type = genomic DNA

SEQ ID NO: 48213 - DNA, 40 bp, Mycobacteroides saopaulense
  source 1..40: mol_type = genomic DNA
tgaggccagactctttaccaaggcgatcaaggtgatgccc

SEQ ID NO: 48214 - DNA, 50 bp, Mycobacteroides saopaulense; identical to SEQ ID NO: 3692
  source 1..50: mol_type = genomic DNA

SEQ ID NO: 48215 - DNA, 40 bp, Mycobacteroides saopaulense
  source 1..40: mol_type = genomic DNA
cgaagccacactctttaccaaggctttcggggtggtggac

SEQ ID NO: 48216 - protein, 581 aa, Blautia pseudococcoides
MQEVEVIKARNVLSKQARGKAIERLRVAAYCRVSTDSEDQLNSYKSQVQYYTDMIKKNKEWVLVDIYADEAITGTQVTKREDFQRMINDCMNGDIDMVITKSISRFARNTLDTLKYVRMLKERNIAVYFEDEKINTLTMDGELLLVVLSSVAQQEVENISANVKKGLKMKMKRGELVGFQGCLGYDYHPEDKTITVNQEEAEIVRYIFNRYVEGAGGSVIGQELENLGYKTKYGSSTWAPSTVIGIIKNEKYKGDILLGKTFTVDPISKRRLENMGEEDKFYMKDHHEPIISEEVFEKAQEILNRRNKNRTTVGNGKREKYSRKYAFSSMLECGFCGSTLSRRNWHSSSEYSKVIWQCVTATKKGKKFCPDSKGIPETAIEEAFIESYRLLCDNNKDVLDEFLQRLDDTLSNSTVNKQLSKIEKEISAVEGKKNKLVDMRLEDSIDKDTYETKYAALMEKAEQLVADRQKLQQTAANEKDIKRRLKEFKSTLEQNEVLDLFDRHVFESIVEKVIVGGYDEDGNKDPAQLTFVYKTGVKNSVDGSRFKPQRKNARGRHRTDELCSHESNEVDKMCSDRSTVH

SEQ ID NO: 48217 - DNA, 50 bp, Blautia pseudococcoides
  source 1..50: mol_type = genomic DNA
tgtgttccgataggagtacggtgcatgttgagtgtgtcgtgttgatgtca

SEQ ID NO: 48218 - DNA, 40 bp, Blautia pseudococcoides
  source 1..40: mol_type = genomic DNA
cagttttgtcagacggtgcatgttgagaccgtcacgcttc

SEQ ID NO: 48219 - DNA, 50 bp, Blautia pseudococcoides
  source 1..50: mol_type = genomic DNA
tgtgttccgataggagtacggtgctcgttgagtgtgtcgtgttgatgtca

SEQ ID NO: 48220 - DNA, 40 bp, Blautia pseudococcoides
  source 1..40: mol_type = genomic DNA
cagttgtgtcagactgggctccctgagacattaaagctgc

SEQ ID NO: 48221 - protein, 533 aa, Pseudomonas furukawaii
MTKKCFPYVRFSSTRQEDGSTRTRQNELIEAFVAKHGLEVDRHLEDAGTSAFHGKHAGSDGVLGQFLKEVRKGEIEKGSYLLIENFDRLSRDKIVRSNKIFTDLLFSGIKIVILDKNKIYDADNLDFGDWITALVEFERANAESQRKSDFSSKAWKLNRNKMHNGEIVTKKVPTWLKVENNTFIIDEVKIDRIRTLFRLSLSKGLQEATKEYNTLYGEKLAIHQAQYLLSNRKLIGEHQPQKIHYNENGRLIRKDEGNPIPNYYPQVIDEDLFLKVQSVITSRKPFSGRYSAQRYNVFRDLIFCRFCGGTIRYMNKGERDYFICTNSMTGKCGLKGQQSIRGKKVFGRFFKFTNGINIGTLLEENTNADEIKNELMKLQNQKTKISNRLDDFKSQIKKMIMEGETIPETYNEIIVDLENSIIKLDDEIEIKNKELNKIISSFKSFYDLKEIDIEKIIYDKSQEAIEKRVQYNNELKNIIKKIQIDYLNDILHVEFSNGVNRHILNDEFANEYNKEEIENSWASVVKSIAQKTN

SEQ ID NO: 48222 - DNA, 50 bp, Pseudomonas furukawaii; identical to SEQ ID NO: 36312
  source 1..50: mol_type = genomic DNA

SEQ ID NO: 48223 - DNA, 40 bp, Pseudomonas furukawaii
  source 1..40: mol_type = genomic DNA
ccgcgcatagcagtagatgcagccgtgttcacagccgcga

SEQ ID NO: 48224 - DNA, 50 bp, Pseudomonas furukawaii
  source 1..50: mol_type = genomic DNA
atggaaccttttgcagagcatatcaagacatgctatgttattggttccac

SEQ ID NO: 48225 - DNA, 40 bp, Pseudomonas furukawaii; identical to SEQ ID NO: 3390
  source 1..40: mol_type = genomic DNA

SEQ ID NO: 48226 - protein, 533 aa, Pseudomonas furukawaii
MTKKCFPYVRFSSTRQEDGSTRTRQNELIEAFVAKHGLEVDRHLEDAGTSAFHGKHAGSDGVLGQFLKEVRKGEIEKGSYLLIENFDRLSRDKIVRSNKIFTDLLFSGIKIVILDKNKIYDADNLDFGDWITALVEFERANAESQRKSDFSSKAWKLNRDKMHNGEIVTKKVPTWLKVENNTFIIDEVKIDRIRTLFRLSLSKGLQEATKEYNTLYGEKLAIHQAQYLLGNRKLIGEHQPQKIHYNENGRLIRKDEGNPIPDYYPQVIDEDVFLKVQSVITSRKPFSGRYSAQRYNVFRDLIFCRFCGGTIRYMNKGERDYFICTNSMTGKCGLKGQQSIRGKKVFSRFFKFTIGINIGTLLEENTNADEIKNELMKLENQKTKISNRLDGFKSQIKKMILEGETIPETYNEIIVDLENSIIKLDDEIEIKNKELNKIISSFKSFYDLKEIDIEKIIYDKSQEAIEKRVQYNNELKNIIKKIQVDYLNDILHVEFSNGVNRHILNDELANEYNKDEIENAWASVVKSMAQKTN

SEQ ID NO: 48227 - DNA, 50 bp, Pseudomonas furukawaii
  source 1..50: mol_type = genomic DNA
atggaaccttttacagagcatatccagacatgctatgttattggttccac

SEQ ID NO: 48228 - DNA, 40 bp, Pseudomonas furukawaii; identical to SEQ ID NO: 48223
  source 1..40: mol_type = genomic DNA

SEQ ID NO: 48229 - DNA, 50 bp, Pseudomonas furukawaii
  source 1..50: mol_type = genomic DNA
atggaaccttttacagagcatatcaagacatgctatgttattggttccac

SEQ ID NO: 48230 - DNA, 40 bp, Pseudomonas furukawaii; identical to SEQ ID NO: 3390
  source 1..40: mol_type = genomic DNA

SEQ ID NO: 48231 - protein, 542 aa, Pseudomonas citronellolis
MTKKCFPYVRFSSTRQEDGSTRARQNELIDAFVTKHGLDVDRHLEDAGTSAHRGKNAGAEGVLGQFLRQVRMGEIDKGSYLLIENFDRLSRDKIVRSNKIFTDLLYAGIKIVILDKNKIYDAENLDFGDWISALVEFERANAESERKSDFSSKAWRFNREKMRAGEIVTKKVPTWLKVENNAFVIDHAKVERINTLFKLSLSKGLQEATREYNELYSEKLAIHQTQYLLSNRKLIGEHSPQKIHYDESGQLKRKDEGEAIPNYYPAVVDEKLFYQVQEVIKSRRPFAGRYSNQRYNVFRDLIYCKWCGGTIRYMNKGERDYFICTNSMTGKCDLNSHFGQLSIRGKKLFSMFFAFTDGLNVSALLEENTQAEELKTKIMKMKANRDQITSRLDDFKIDVKNMIMSGKTIPSTYNELIAELESNRTHIDQEIESESKKLDQIYMSEKSFSGLKSNDISEIIYDRSDESIEKRVRYNSELKKIIKHIRIDYLETGLEIEFFNGVQRFIDQDGNTGDQIIGFEPPEFEPEDEERFDLKAGYQSQE

SEQ ID NO: 48232 - DNA, 50 bp, Pseudomonas citronellolis
  source 1..50: mol_type = genomic DNA
ttggcacctatcgctgaacatatccagacatgttaggctatacgttccat

SEQ ID NO: 48233 - DNA, 40 bp, Pseudomonas citronellolis
  source 1..40: mol_type = genomic DNA
ccgcgcgaagcagtagatgcagccatgctcgcagccgcgg

SEQ ID NO: 48234 - DNA, 50 bp, Pseudomonas citronellolis
  source 1..50: mol_type = genomic DNA
ttggcacctatcgctgaacatatcaagacatgttaggctatacgttccat

SEQ ID NO: 48235 - DNA, 40 bp, Pseudomonas citronellolis; identical to SEQ ID NO: 3390
  source 1..40: mol_type = genomic DNA

SEQ ID NO: 48236 - protein, 539 aa, Pseudomonas reactans
MTKKCFPYVRFSSTRQEDGSTRTRQNELIDAFVTKHGLEVDRHLEDAGTSAYHGKNAGSEGVLGKFLKEVRMGEIEKGSYLLIENFDRLSRDKIVRTNKIFTDLIFSGIKIVILDKNKIYEEDNLDFADWVNALLEFERANVESKRKSDFSSKAWKFNREKMRNGEIVTKKVPTWLKVENNAFVIDHAKVERINTLFKLSLSKGLQEATREYNDLYSEKLAIHQTQYLLSNRKLIGEHSPQTIHYDESGQLKRKDEGDSIPNYYPAVVDEKLFYQVQEVIKSRRPFAGRYSNQRYNVFRDLIYCKWCGGTIRYMNKGERDYFICTNSMTGKCDLNSHFGQQSIRGKKLFGMFFAFTDGLNVSALLEENTNAKEIKTEVLKLEAKRKQIANRLQDFKVEVKTMILDGKTIPSTYNEVIAELESNRNHIDNEIDTRTKELDQIYISEKSFMGLKDIDVSGIIYDRTNEAIEKRVQYNNELKKIIKHIRIDFLNTSIEIEFANKLCRLVNSDGDVIDYVIDHVPEEFTTIYNYDKDYINPDA

SEQ ID NO: 48237 - DNA, 50 bp, Pseudomonas reactans
  source 1..50: mol_type = genomic DNA
gtggaacctatcattgaacatagccagacatgctaggctatacgttccat

SEQ ID NO: 48238 - DNA, 40 bp, Pseudomonas reactans
  source 1..40: mol_type = genomic DNA
ccgcgcgtagcagtagatgcagccatgctcgcagccacga

SEQ ID NO: 48239 - DNA, 50 bp, Pseudomonas reactans
  source 1..50: mol_type = genomic DNA
gtggaacctatcattgaacatagcaagacatgctaggctatacgttccat

SEQ ID NO: 48240 - DNA, 40 bp, Pseudomonas reactans; identical to SEQ ID NO: 3390
  source 1..40: mol_type = genomic DNA

SEQ ID NO: 48241 - protein, 539 aa, Pseudomonas salomonii; identical to SEQ ID NO: 42066

SEQ ID NO: 48242 - DNA, 50 bp, Pseudomonas salomonii; identical to SEQ ID NO: 42067
  source 1..50: mol_type = genomic DNA

SEQ ID NO: 48243 - DNA, 40 bp, Pseudomonas salomonii
  source 1..40: mol_type = genomic DNA
ccgcgcatagcagtagatgcagccatgctcgcagccgcga

SEQ ID NO: 48244 - DNA, 50 bp, Pseudomonas salomonii
  source 1..50: mol_type = genomic DNA
gtggaacctattactgaacacgtcaagacatgctacgctatacgttccat

SEQ ID NO: 48245 - DNA, 40 bp, Pseudomonas salomonii; identical to SEQ ID NO: 3390
  source 1..40: mol_type = genomic DNA

SEQ ID NO: 48246 - protein, 536 aa, Pseudomonas alcaligenes
MTKKCFPYVRFSSTRQEDGSTRTRQNGLIEAFVAKHGLEVDRHLEDAGTSAFHSKHAGSEGVLGQFLKEVRKGEIEKGSYLLIENFDRLSRDKIVRSNKIFTDLLFSGIKIVILDKNKVYDADNLDFGDWITALVEFERANAESQRKSDFSSKAWKLNRDKMHNGEIVTKKVPTWLKVENNTFIIDEVKIDRIRTLFRLSLSKGLQEATKEYNTLYGEKLAIHQAQYLLSNRKLIGEHQPQKIHYNENGRLIRKDEGNPIPDYYPQVIDEDLFLKVQSVITSRKPFSGRYSAQRYNVFRDLIFCRFCGGTIRYMNKGERDYFICTNSMTGKCGLKGQQSIRGKKVFSRFFKFTNGINIGTLLEENTNADEIKNELMKLENQKTKISNRLDDFKSQIKKMIMEGETIPETYNEIIVDLENSIIKYDDEIEIKNKELDKIISSFRSFYDLKGIDIEKIIYDKSQEAVEKRVQYNNELKNIIKKIQIDYLNDILHVEFSNCVIRHILNDELANEYNKDEIENSWASVVKSIANKTNPQP

SEQ ID NO: 48247 - DNA, 50 bp, Pseudomonas alcaligenes
  source 1..50: mol_type = genomic DNA
gcggaaccttttacagagcatatccagacgtgctatgttattggttccac

SEQ ID NO: 48248 - DNA, 40 bp, Pseudomonas alcaligenes; identical to SEQ ID NO: 48223
  source 1..40: mol_type = genomic DNA

SEQ ID NO: 48249 - DNA, 50 bp, Pseudomonas alcaligenes
  source 1..50: mol_type = genomic DNA
gcggaaccttttacagagcatatcaagacgtgctatgttattggttccac

SEQ ID NO: 48250 - DNA, 40 bp, Pseudomonas alcaligenes; identical to SEQ ID NO: 3390
  source 1..40: mol_type = genomic DNA

SEQ ID NO: 48251 - protein, 583 aa, Intestinimonas butyriciproducens
MTQTQIHATISPCTPILSADPTVKEDVMLDQQKITILYCRLSNEDALDGESNSIQNQKEFLTRYAAEHGYTNLKILVDDGYTGTNFDRPGVQEGFALVKQGLVGCWLVKDLSRFGRDYLTVGQYTDIIFPSYDVRFIAVNDGVDSERGDSDGFAAIRNLFNEWYPRDTSKKVRVVFRQKGTSGKHLGKPPYGYRTDPADKDHWIIDEDAAPVVKRIFDLAIDGKGPEQIARILEQDQVLTTKALYAKQSENHPDPKKRKKMPERPYHWIGQSVAGILERMEYTGCTCNFKTYSKSYKLKKRIPNAIEDMCIFPDTQEAIVSQAQWDRVQELRKNKRRPTKAQRQGLFSGLLFCPDCGNKLHFATCKSFDGKQDHYVCSSYKSGRGTCSAHYIREDVLRELVLERIQAVNAYIRQDVESFQEEWLQCRRSDQERNIREDRKRVEQAKKRLADLDVLLSRLYEDFVLGDLSKERYKKMTADYEAEQERLKLEIEVTEEWLETQETMSADVDAFVALTQKYVDVPELTPTIANEYIKKIEVFAPDKSSGKRVQKVKIYFNFVDDVEIPVISEPVVAKSTLGRRKTA

SEQ ID NO: 48252 - DNA, 50 bp, Intestinimonas butyriciproducens; identical to SEQ ID NO: 10157
  source 1..50: mol_type = genomic DNA

SEQ ID NO: 48253 - DNA, 40 bp, Intestinimonas butyriciproducens
  source 1..40: mol_type = genomic DNA
acgaaaaatccccaaagccttgcggctccagggatttttc

SEQ ID NO: 48254 - DNA, 50 bp, Intestinimonas butyriciproducens
  source 1..50: mol_type = genomic DNA
atagtaccttatcactattaagccctggcttaacagtgataaggaactaa

SEQ ID NO: 48255 - DNA, 40 bp, Intestinimonas butyriciproducens
  source 1..40: mol_type = genomic DNA
acgaaaaatccccctttccctgcacctccaaggagtttaa

SEQ ID NO: 48256 - protein, 583 aa, Intestinimonas butyriciproducens
MTQTQIHATISPCTPILSADPTVKEDVMLDQQKITILYCRLSNEDALDGESNSIQNQKEFLTRYAAEHGYTNLKILVDDGYTGTNFDRPGVQEGFALVKQGLVGCWLVKDLSRFGRDYLTVGQYTDIIFPSYDVRFIAVNDGVDSERGDSDGFAAIRNLFNEWYPRDTSKKVRVVFRQKGTSGKHLGKPPYGYRTDPADKDHWIIDEDAAPVVKRIFDLAIDGKGPEQIARILEQDKVLTTKALYAKQSENHPDPKKRKKMPERPYHWIAQSVAGILERMEYTGCTCNFKTYSKSYKLKKRIPNAIEDMCIFPDTQEAIVSQAQWDRVQELRKNKRRPTKAQRQGLFSGLLFCPDCGNKLHFATCKSFDGKQDHYVCSSYKSGRGTCSAHYIREDVLRELVLERIQAVNAYIRQDVESFQEEWLQCRRSDQERNIREDRKRVEQAKKRLADLDVLLSRLYEDFVLGDLSKERYKKMTADYEAEQERLKLEIEVTEEWLETQETMSADVDAFVALTQKYVDVPELTPTIANEYIKKIEVFAPDKSSGKRVQKVKIYFNFVDDVEIPVISEPVVAKSTLGRRKTA

SEQ ID NO: 48257 - DNA, 50 bp, Intestinimonas butyriciproducens; identical to SEQ ID NO: 10157
  source 1..50: mol_type = genomic DNA

SEQ ID NO: 48258 - DNA, 40 bp, Intestinimonas butyriciproducens; identical to SEQ ID NO: 48253
  source 1..40: mol_type = genomic DNA

SEQ ID NO: 48259 - DNA, 50 bp, Intestinimonas butyriciproducens; identical to SEQ ID NO: 48254
  source 1..50: mol_type = genomic DNA

SEQ ID NO: 48260 - DNA, 40 bp, Intestinimonas butyriciproducens; identical to SEQ ID NO: 48255
  source 1..40: mol_type = genomic DNA

SEQ ID NO: 48261 - protein, 549 aa, Pseudoalteromonas marina
MSEKPLLFSYVRFSTQEQAKGHSLKRQLDYANKVAKERGLLLDESLTMRDLGLSAYHGNNIKKGAFGVFLKAIEDGNIPSGSVLLIESLDRMSRRKVSECASIVTQIINAGITVITAIDNKEYNSQLIDENPFELLAMLMIFMRANEESETKSQRVRDVLKQQCDDWSAGKRGFRVNCGKPPSWTVWNDDKKIFEFEPHHKKIMLRKIELFKKGYGGIKIAMLINSEFGAGTIHHTGANVYKEVKRRSLIGELNVKVGNAEYGLKGYYPPLMSESEFNFLVADSSKRGATKQSQKFVGILSGVGVFKCGNCGKSVGSHVVYRNKCLNEVKSSHKRYGCVEARRKNNCEMNSTVQIDVIEKAVVTFCQDKVNLQRILLKGGDREAINSQEANLRARLVKINGDIDLFTEALLTLNGTPPQAIANKISKLESEARDVESQISISKNKLARIDNSFRDEVTDRWLSITKNLIKLSNDERLAIRQLVKDTFKSISLQLNTFSGDKGGLNNVFERLLGTSNADYFELLLEFHNDKRRLLRLHKHTGELVSGYDF

SEQ ID NO: 48262 - DNA, 50 bp, Pseudoalteromonas marina
  source 1..50: mol_type = genomic DNA
tatctaccttcattatcttttagccagacaatgtataattaaactagatt

SEQ ID NO: 48263 - DNA, 40 bp, Pseudoalteromonas marina
  source 1..40: mol_type = genomic DNA
gtcgacagcaattgtcggccagccgaaggcggtgttgagt

SEQ ID NO: 48264 - DNA, 50 bp, Pseudoalteromonas marina
  source 1..50: mol_type = genomic DNA
tatctaccttcattatcttttagcacgacaatgtataattaaactagatt

SEQ ID NO: 48265 - DNA, 40 bp, Pseudoalteromonas marina
  source 1..40: mol_type = genomic DNA
ggccacagcaagggtgtggacgccgtaggaggtggtgagt

SEQ ID NO: 48266 - protein, 464 aa, Mycobacteroides abscessus
  SITE 146: note = misc_feature - Xaa can be any naturally occurring amino acid
MRVLGRVRLSRLTDESTSTARQREIIEQWSQMNGHTIVGWAEDMDVSRSVDPFDTPDLGKWLTKPEKIEQWDIVATWKLDRLATGSIYLNKLMHWCFENDKVMVSVTENFDLSTWVGRMIANVIAGVAEGELEAIKERTRGSRRRXLQTGRWPGGTVPYGFRTQELPGGGWRLTTDPEKAAVVVRIAQDIINGLPIEAVSKALNEKGVPGPAGGKWIPESVWKIIESKVLIGHATYKGDTVRDSEGRPVLYADPILDQETWDRMQSAIQLRKHPEAQRYNQTSPLLGVIFCYDCEQKLYYKIYKRPNKDYRYYYCRDHKQLLNADEIEDLLEERFLELVGDELADDRIFVPAESHQIELDEATRAVDELTALLGTVTSATMRSSVMGQLQALDSRIAELERLPSKEAHWEYRKLDHTYAEEWQSSDTDGRRRLLLRCEITAKASKGHFHFNTPEDLLERLRSSV

SEQ ID NO: 48267 - DNA, 50 bp, Mycobacteroides abscessus
  source 1..50: mol_type = genomic DNA
tatctacaattagttgcatgcgacaagtcggatgatatgctttgtagatg

SEQ ID NO: 48268 - DNA, 40 bp, Mycobacteroides abscessus
  source 1..40: mol_type = genomic DNA
ggtggagatctgctcggacaagtcggcagccgggtagatc

SEQ ID NO: 48269 - DNA, 50 bp, Mycobacteroides abscessus
  source 1..50: mol_type = genomic DNA
tatctacaattagttgcatgcgacaggtcggatgatatgctttgtagatg

SEQ ID NO: 48270 - DNA, 40 bp, Mycobacteroides abscessus
  source 1..40: mol_type = genomic DNA
agtggagatctgctcagagaggtctgcagctgggatcact

SEQ ID NO: 48271 - protein, 569 aa, Clostridium jeddahense
MKRSNRRKNREDTAFLYERLSRDDNLEGESYSISNQKKLLIKVAKEKGYTNLVHFSDDGISGVTMERPGFVAMIQELEEGHAAAVFVKDMSRLGRNYIEVGKLTEEFLPDHDIRLVAVSDNVDTAEGENELTPIRNLFNEWYARDISKKRRISNKIKGNAGEPMGQPPYGYIKDPDNSKRWIVDEEAAIVVRRIYQMTLDGSGPEQIAAALEKDSILTPISYWQTRGVNRPGKHKDAPPTKWNSSTITKILSLQEYCGDVLNFKTYSKSYKNKKRIENDRDNWVIFKDVHDPVIDRASWEKVQQKRGKIRKRKTNEGETNMFSGLLVCADCGHNLHYHFNQGNPDIKYFNCSNYKGNRGTCTSTHYIRVDFLEQVVLGEIHRLTKFASKYEDEFVKAVMGHSQQTVELERQKKQKGYNALLARDKEIDRLFDRMYEDNVAGKISDERFSKMTKQYEDEQSGLAGRIKTLRTELDKESRQSVGTDMFIATVRKYTRARKLTPRMLNELIDHIEVHQAEKVNGVYVQKLTIHYNCIGSIEIPDVSSLQEPDVLIQTRKGVAVSYSQAQMAG

SEQ ID NO: 48272 - DNA, 50 bp, Clostridium jeddahense
  source 1..50: mol_type = genomic DNA
atactataagaacactcggcatggtcgaaagaaagacggttctacggtct

SEQ ID NO: 48273 - DNA, 40 bp, Clostridium jeddahense
  source 1..40: mol_type = genomic DNA
tacataaaacccggactggtcaggcataataatgcaaata

SEQ ID NO: 48274 - DNA, 50 bp, Clostridium jeddahense
  source 1..50: mol_type = genomic DNA
atactataagaacactcggcatgggcgaaagaaagacggttctacggtct

SEQ ID NO: 48275 - DNA, 40 bp, Clostridium jeddahense
  source 1..40: mol_type = genomic DNA
aaaagaaaaaccgggcggggcaggcattaaaaagaaaata

SEQ ID NO: 48276 - protein, 495 aa, Rhodococcus ruber
MPDRKPLSPNASQLPRAVIYCRISADKTGAGLGVERQEKDCRELAHRLGMQVVDVLVENDTSAYSGAPRPKYQRLLELMRSGDVDAVLALHTDRLHRSLVELEEYVNVSEAGGVTTQTVMAGPIDLSTPSGRLVARQLGAVARYEVEHSIERVKSAKLQMAQSGKFLGGQRPYGFEPRRAAIREDEAAVIREIVQRVIDGDSFRAIALDLNRRGITTNHGREWNALKVRNVAIRPINTGIVRHHGIDYEANTPAIIPRDQWEDFMIAVQLNRTRSTHPGTFRVHILNGFVYCGKCGTRMVHKPKMNRDGTTRTMVSCESVHKDTGGNGGCGGVARSVDPIIELVRQSILYRLNSPELVSALHAQKTSADALRELHAKQRAAEAKAVEISDDYYVHELLTREQFERAKAQADAALKAINDQIASEYSRAITSTIDLNGDLEAAWENGSLDWKRDLIALLIEKIVVYPMPRDTGYKRPMFAGRWRFDPDLVKIEWRE

SEQ ID NO: 48277 - DNA, 50 bp, Rhodococcus ruber
  source 1..50: mol_type = genomic DNA
tgtggtggttagctattgacagactcgtcgaaagattgcctagcaccaca

SEQ ID NO: 48278 - DNA, 40 bp, Rhodococcus ruber
  source 1..40: mol_type = genomic DNA
ggtgcccatctcggcgacctcgtccaggaagaggacgccc

SEQ ID NO: 48279 - DNA, 50 bp, Rhodococcus ruber
  source 1..50: mol_type = genomic DNA
tgtggtggttagctattgacagacgtgtcgaaagattgcctagcaccaca

SEQ ID NO: 48280 - DNA, 40 bp, Rhodococcus ruber
  source 1..40: mol_type = genomic DNA
ggtggcattcttggcgctcgtctccaagaaggggatgccc

SEQ ID NO: 48281 - protein, 461 aa, Staphylococcus borealis
MKVAVYCRVSTLEQKEHGYSIEEQERKLKSFCDINDWTVYDTYVDAGYSGAKRDRPELQRLMKDINKFDLVLVYKLDRLTRNVRDLLDLLEIFEQNNVSFRSATEVYDTTTAMGRLFVTLVGAMAEWERETIRERTQMGKLAALRKGIMLTTPPFYYDRVDNKFVPNKYKDVILWAYDEAMKGQSSNAIARKLNNSDIPPPNNTQWQGRTITHALKNPFTRGHFDWGGVHIENNHEAIITEEMYDKVKDRLNERVNTKKVKHTSIFRGKLVCPNCSARLTLNSHKKKSNSGYIFVKQYYCNNCKVTPNLKPVYIKESEVLRVFYEYLKRFDLEKYEVTQKQNEPEITIDINKVMEQRKRYHKLYANGLMQEDELFDLIKETDQTIVEYEKQNENREVKQYDIEDIKQYKDLLLEMWDISSDEDKEDFIKMAIKNIYFEYIIGTGNTRRKRNSLKITSIEFY

SEQ ID NO: 48282 - DNA, 50 bp, Staphylococcus borealis
  source 1..50: mol_type = genomic DNA
ctatggaagtatgtacagtctagcaatgttgagtgtacatacttccataa

SEQ ID NO: 48283 - DNA, 40 bp, Staphylococcus borealis
  source 1..40: mol_type = genomic DNA
ttttggcggcacatgcatcaatcacggctgtattccctct

SEQ ID NO: 48284 - DNA, 50 bp, Staphylococcus borealis
  source 1..50: mol_type = genomic DNA
ctatggaagtatgtacagtctagctatgttgagtgtacatacttccataa

SEQ ID NO: 48285 - DNA, 40 bp, Staphylococcus borealis
  source 1..40: mol_type = genomic DNA
tattggcgtcagatgcatctaccacacatgtcctccttct

SEQ ID NO: 48286 - protein, 508 aa, Clostridium beijerinckii
MKRIAIYSRKSKETDKGESIKNQIQMCKDYFSRYDEECTYEVFQDEGFSGKNIDRPSFQRMMMLAKRNEFDIVACYRVDRISRNIVDFMNTFDILEKHNVSLVSISEGFDPSTPGGKMMLIMLGGFAEMERMNIAQRVKDNMQSLAQLGRWSGGTPPTGYRSVQLEDGNKLEVYLELIPEWKEKIQLAFESLSQGYSIRQSALLLNMPVKTVANIINNPTYCQSDELSAAYLKSLGYEVYGELNGNGYIPYNRRPRTKSGKKLYNADGMFVSVSKHEAIVPSNLWISANEEIKKRGSEARPRISQNSFLAHLVKCSCGSGMYLEPGRTRRDGTRTYYFRCSRQKYDKSSCDSGWINAAYLEEDVLEKLKELSTDKASLENYLNKKPNNNVSKKIKDLKKLISKNNSILSKLTEKLILLEGDAVKIVTEKMNEISRENKKINETLLSFEQENFSNSIGKITVEQLQAKLIKILSSWDSLSIGEKQLKIRMLVKNILWNGAEDFDMKLNI

SEQ ID NO: 48287 - DNA, 50 bp, Clostridium beijerinckii
  source 1..50: mol_type = genomic DNA
tactagtatttgaagtgggttgcacatccagaccagtataaataccagta

SEQ ID NO: 48288 - DNA, 40 bp, Clostridium beijerinckii
  source 1..40: mol_type = genomic DNA
actcgaaattgctgccgcgcatccagaccaacctccgcca

SEQ ID NO: 48289 - DNA, 50 bp, Clostridium beijerinckii
  source 1..50: mol_type = genomic DNA
tactagtatttgaagtgggttgcatatccagaccagtataaataccagta

SEQ ID NO: 48290 - DNA, 40 bp, Clostridium beijerinckii
  source 1..40: mol_type = genomic DNA
attagcatgtgtttcagcgtatccagaccagcttccgcca

SEQ ID NO: 48291 - protein, 600 aa, Enterococcus sp CR-Ec1
MKRIQKEVILEMKDVEIIKANRTMTDRNKTHSLQLLRVGAYCRVSTDSEDQLNSYKSQVTYYTNLIKKNKEWVFADIYADEAITGTQVNKRTDFQRLINDCMNGELDMVITKSISRFARNTLDTLKYVRMLKEKNVAVYFEDEKINTLTMDGELLLVVLSSVAQQEVENISANVKKGLKMKMSRGELVGFQGCLGYDYHPEDKSITINEEEAEIVKYIFNRYVEGAGGSIIGRELENLGYKTKRGSSRWAESTVLGIVKNEKYKGDILLGKTFTIDPISKRRLANYGEEDQFYLRNHHEPIISEEVFEKAQEIRMKRSIPRGLHASKEGVVKRQKYSRKYAFSCLLECGFCGGTLTRRKWHSSSEYKKNIWQCVVATKKGKKHCPHSKGIPEKAVEDAFVESYRQLSNDNKDIMENFLKKLQETLSESSVEKEFAKIQISLATLDKKRNNLVDMRLDEKIDEDTYELKYSELSLQIDELLKERTSLENSLDNEHSMKRRLADFKKTLQNNQVLDEFDRYVFESIVEKGIVGGVEEDGTIDPHKLVFVYKTGLTDKQDGSKFKPKRKNAKQSKGAKTKSPDLCSQASDEGKDVCSLVSDHT

SEQ ID NO: 48292 - DNA, 50 bp, Enterococcus sp CR-Ec1
  source 1..50: mol_type = genomic DNA
tgtgttcacttgttagtgaccacacacatcgagacaatagtgttgctacg

SEQ ID NO: 48293 - DNA, 40 bp, Enterococcus sp CR-Ec1
  source 1..40: mol_type = genomic DNA
tttgttcccacaaacgacccatgtggagtgtgtcgtgttg

SEQ ID NO: 48294 - DNA, 50 bp, Enterococcus sp CR-Ec1
  source 1..50: mol_type = genomic DNA
tgtgttcacttgttagtgaccacattcatcgagacaatagtgttgctacg

SEQ ID NO: 48295 - DNA, 40 bp, Enterococcus sp CR-Ec1
  source 1..40: mol_type = genomic DNA
tctgctcacttaaagggcctttctggagtgtgtcgtggtc

SEQ ID NO: 48296 - protein, 561 aa, Streptomyces hygroscopicus
MAKLRVLGGVRQSVTQDNSVSVESQKREVIHWTAAPSLNAEVVGWAIDTDVSGSIDPFKRPELSPWLTERVGEWDVLCAPRIDRLSRKLTHFSQLLDWAEDNGKYVATADGMLNTRAPGGATIAKVMAVFAEEELRKIRGNIQNGMLTLRELARWMGGPHPFGYISYDTGDDHKRLKPEETYAPILREICKRVTDGESTYALADDFNARGLLVWSDHLRVLKGKEPTGVRWKPAVIARTIQKPICAGYLTFNGEVWENEEGEPTVIADPPILTLAEWEGAVSAISGRTRQKNIRRRDTTCQLTGIALCGCCGTRMVCHHVTKTLKSGAEKQYRDYTCTAKNRAVECADVARIPEKTLEGLFEGFLMHHLGDLPEVQKRVDPGESHAAELLRLKDRRAMLDSEDEEGMYDDDRESYHRKRKNLNRKIAELEAKPVRPARTWYEKTGRTWRDMWAVMATKDQREYLAERNVKVFVFKNAKGPHSGPGVVIRFGELKEFATAAGLDASEVAALDEVHWNTPDHWANPGEWSQEIASGELPPIPAVLTDAAFDQWEQRNSEKVSV

SEQ ID NO: 48297 - DNA, 50 bp, Streptomyces hygroscopicus
  source 1..50: mol_type = genomic DNA
gttctctactaggcgcacaatcggtctccgtctgaacgcaagtctggaac

SEQ ID NO: 48298 - DNA, 40 bp, Streptomyces hygroscopicus
  source 1..40: mol_type = genomic DNA
cagccacaccccgaactcatcgccgtcggtgtccgagaac

SEQ ID NO: 48299 - DNA, 50 bp, Streptomyces hygroscopicus
  source 1..50: mol_type = genomic DNA
gttctctactaggcgcacaatcgggttccgtctgaacgcaagtctggaac

SEQ ID NO: 48300 - DNA, 40 bp, Streptomyces hygroscopicus
  source 1..40: mol_type = genomic DNA
caggcaaacccggaagccagtgccgggagtctccgaggac

SEQ ID NO: 48301 - protein, 497 aa, Flavonifractor sp An10
MDAIYARQSVDRADSISIESQIEFCKYETRGEAYKTYIDRGYSGKNTERPGFQEMMSDMAAGLIQKVIVYKLDRISRSILDFSTMMETFGKYQVEFVSTTEKFDTSSPMGRAMLNICIVFAQLERETIQKRVADAYFSRSQKSFYMGGRVPYGYCLVPAVIGGVKTSMYEIVPEEAEVVRLMYELYSKPECSYGDLIRTFQEHGITQNGKPWVRTRMADILRSPIYVRADLSVYQFYQNQGAIIANDPSDFIGTNGCYYYKGKEGSGRKQMNLEGNHLVLAPHEGIVPADTWLKCRLKCLNAKQVRPYQKAKNTWLAGKVKCGICGYALVEKHYANSKARYLLCSHRMDTKACPGPGTIYTDDFENLIYDEMKKKMAMFQRLRRRNGPAADSELTARKLELARLEQEIDALLERLARADDVMYRYISERVGELDGRKRELAKEISERSLRKEVDCQEITGHLTRWEELSFEDKRQTVDQLIKVIYATSDKVQIEWRI

SEQ ID NO: 48302 - DNA, 50 bp, Flavonifractor sp An10
  source 1..50: mol_type = genomic DNA
tgacccctccccttcctcttgtacgatttggcgagacaaagcgtacaaga

SEQ ID NO: 48303 - DNA, 40 bp, Flavonifractor sp An10
  source 1..40: mol_type = genomic DNA
gagatcgtccacttccagcgcttcggcgaagcggtgcgcc

SEQ ID NO: 48304 - DNA, 50 bp, Flavonifractor sp An10
  source 1..50: mol_type = genomic DNA
tgacccctccccttcctcttgtaccctttggcgagacaaagcgtacaaga

SEQ ID NO: 48305 - DNA, 40 bp, Flavonifractor sp An10
  source 1..40: mol_type = genomic DNA
gagatcgtctacttcctccccttctgccactcggagctca

SEQ ID NO: 48306 - protein, 507 aa, Escherichia albertii
MKRAISYIRFSSEKQSRGDSLRRQSKLVTDWLKARPEYHLDESLTFRDLGVSGFTGKHLKGGLGDFLTAIEKGLVKAGDTLLIESLDRLSRQDVDRASELLRNILRSGVDVVTLSDNEHYTKESLKDPLSLIKSILIMQRAHEESLRKSERIQAAWDAKKEAAKAGIKISKRCPAWLKLNNDRKSFSVIPEKVATVKRCFQLRLEGKSILEIVRTLNSEGHQTLNQYKAGKFSQTSVQDLLKNRSVIGYFTPKGCEEISNYYPSIIPETDFYKVQQLSYPRYGRKPASDKPLSVNLFKGVIRCSECGHALIITGFSDTRNGIYRCPLRNENRCSAKGLSRKQTDGTLLALLSRLDRFENGTTNAIDTLKLHREHISNNIEKLVQLSLEVEDLTAITSKLKQLKGELSQVDADIEKEAQRLKSIDTGSLSDCDLSTKAGRIEAQLIIRSAVKEVVLNTAKRRCRVTFHNGKVIDLSITENPAQDITEAEKSLTEIAEKGLLDVDAFQL

SEQ ID NO: 48307 - DNA, 50 bp, Escherichia albertii
  source 1..50: mol_type = genomic DNA
tagtgcatatagaccttgataatactaatcagacacgtttaaatacacca

SEQ ID NO: 48308 - DNA, 40 bp, Escherichia albertii
  source 1..40: mol_type = genomic DNA
tggcgttaatagggtaatactggatagccgcccggttcat

SEQ ID NO: 48309 - DNA, 50 bp, Escherichia albertii
  source 1..50: mol_type = genomic DNA
tagtgcatatagaccttgataataccaatcagacacgtttaaatacacca

SEQ ID NO: 48310 - DNA, 40 bp, Escherichia albertii
  source 1..40: mol_type = genomic DNA
tggcggtgatgaggtcatgccggataccggccaggctcat

SEQ ID NO: 48311 - protein, 513 aa, Vibrio owensii
MQDFSSYQHIYAYIRHSKESQSEGDSVSRQKKLIKAWGDTFKRDVTLLDVDAGKSAFSAAHVETGYLGTFLKDLESGVIPSDSLLLVESLDRLSRQALLTALSQLESIITAGADVLTLTDNKLHTSATINDFGSLVGSLAVMQRAHEESETKSKRIKESFSRRDDLMKQGIPVNYRHLPHWLEYQKDAPDYLVNEHADTIRSLFSLYLDGNGVTAVANKLNALGTLRKGSTEWTASNVSTQLSDRLVLGEWKGYKDVYPTIISVSDFNAAQALKRKGTGRRANRLESVNLFIASTSRCDCGKTMNLVRPRGTRRLICSGTRKGKTGCPYGCKLYNVDNLEQALGLWLSLNIGTDTEDYSTKLRTLEVQLSSIEEEQTSHRTALDNLASAIADLGYTQALKDRHSAIERQLSASIKQAESVTLEMQQLQQPKTDIASLMRHWNSKQQDTDYRRQILRLLETQQVQFVMSDGSVSLIYQGRTWTLKRDFFKPVISVSPKLLKQAKELFKHVKRPS

SEQ ID NO: 48312 - DNA, 50 bp, Vibrio owensii
  source 1..50: mol_type = genomic DNA
ggatatgcagttgtattttctacattagctgatagcataagtgcatacct

SEQ ID NO: 48313 - DNA, 40 bp, Vibrio owensii
  source 1..40: mol_type = genomic DNA
tgggtcttcgtcgccaccatttgcaggccaaaagtaacgc

SEQ ID NO: 48314 - DNA, 50 bp, Vibrio owensii
  source 1..50: mol_type = genomic DNA
ggatatgcagttgtattttctacatcagctgatagcataagtgcatacct

SEQ ID NO: 48315 - DNA, 40 bp, Vibrio owensii
  source 1..40: mol_type = genomic DNA
tggcccttcctccccgccctctgcaggcccacactaaccc

SEQ ID NO: 48316 - protein, 515 aa, Bacillus thuringiensis
MKTAIYLRKSRADLEAEARGEGETLAKHRSTLLKIAKEMNLNVLAVREEIVSGESLVKRPEMLALLEEIEDNKYDVVLCMDMDRLGRGGMKEQGIILETFKRSNTKIMTPRKTYDLNDEWDEEYSEFEAFMARKELKIITRRMQRGRIASVEAGNYLGTHAPFGYDIHRLNKRERTLTINSEEASVVRMIFDWYANEDMGASAIRSKLNDLGYKSKLGNEWNPYSILDILKNNVYIGKVTWQKRKEVKHPDAVKRSCARQDKSDWIIADGKHEPIISESLFEQVQDKLNSRYHVPYNTNGIKNPLAGIIKCSKCGYSMVQRYPKNRKETMDCKHRGCENKSSYTELIEKRLLEALKEWYINYKADFEKHKQGDKLKETQVIQMNEAALRKLEKELMDVQKQKNNLHDLLERGVYTVDMFLERSKVISDRINEITSTMENLKKEIKTEIKKEKVKKDTIPQVEHVLDLYFKTDDPKKKNSLLKSVLEKAVYKKEKWQRLDDFELVLYPKLPQDGDI

SEQ ID NO: 48317 - DNA, 50 bp, Bacillus thuringiensis; identical to SEQ ID NO: 40972
  source 1..50: mol_type = genomic DNA

SEQ ID NO: 48318 - DNA, 40 bp, Bacillus thuringiensis
  source 1..40: mol_type = genomic DNA
tgtagccattaggcgcatgagatttaccccatttaaccct

SEQ ID NO: 48319 - DNA, 50 bp, Bacillus thuringiensis
  source 1..50: mol_type = genomic DNA
tgtcgtcaccttgttggtgtaattaagttgacgccaacatggtagcaaca

SEQ ID NO: 48320 - DNA, 40 bp, Bacillus thuringiensis; identical to SEQ ID NO: 17340
  source 1..40: mol_type = genomic DNA

SEQ ID NO: 48321 - protein, 515 aa, Bacillus cereus
MKTAIYLRKSRADLEAEARGEGETLAKHRTTLLKIAKEMNLNILAVREEIVSGESLVKRPEMLALLEEIEDNKYDAVLCMDMDRLGRGGMKEQGIILETFKRSNTKIMTPRKTYDLNDEWDEEYSEFEAFMARKELKIITRRMQRGRIASVEAGNYLGTHAPFGYDIHRLNKRERTLTINSEEASVVRMIFDWYANKDMGASAIRSKLNDLGYKSKLGNEWNPYSILDILKNNVYIGKVTWQKRKEVKRPDAVKRSCARQDKSDWIIADGKHEPIIPESLFEQVQEKLNSRYHVPYNTNGIKNPLAGIIKCSKCGYSMVQRYPKNRKETMDCKHRGCENKSSYTELIEKRLLEALKEWYINYKADFEKHKQDDKLKETQVIQMNEAALRKLEKELVDVQKQKNNLHDLLERGVYTVDIFLERSKAVSDRINEITSTMENLKKEIKTEITKEKVKKDTIPQVEHVLDLYFKTDDPKKKNSLLKSVLEKAVYKKEKWQRLDDFELVLYPKLPQDGDI

SEQ ID NO: 48322 - DNA, 50 bp, Bacillus cereus
  source 1..50: mol_type = genomic DNA
tgtcgtcaccttgttggtgtaattaggttgacgccaacaaggtgacgaca

SEQ ID NO: 48323 - DNA, 40 bp, Bacillus cereus; identical to SEQ ID NO: 48318
  source 1..40: mol_type = genomic DNA

SEQ ID NO: 48324 - DNA, 50 bp, Bacillus cereus
  source 1..50: mol_type = genomic DNA
tgtcgtcaccttgttggtgtaattaagttgacgccaacaaggtgacgaca

SEQ ID NO: 48325 - DNA, 40 bp, Bacillus cereus; identical to SEQ ID NO: 17340
  source 1..40: mol_type = genomic DNA

SEQ ID NO: 48326 - protein, 515 aa, Bacillus cereus
MKTAIYLRKSRADLEAEARGEGETLAKHRATLLKIAKEMNLNVLAVREEIVSGESLVKRPEMLVLLEEIEDNKYDVVLCMDMDRLGRGGMKEQGIILETFKRSNTKIMTPRKTYDLNDEWDEEYSEFEAFMARKELKIITRRMQRGRIASVEAGNYLGTHAPFGYDIHRLNKRERTLTINSEEASVVRMIFDWYANEDMGASAIRSKLNDLGYKSKLGNEWNPYSILDILKNNVYIGKVTWQKRKEVKRPDAVKRSCARQDKSDWIIADGKHEPIIPESLFEQVQEKLNSRYHVPYNTNGIRNPLAGIIKCSKCGYSMVQRYPKNRKETMDCKHRGCGNKSSYTELIEKRLLEALKEWYINYKADFEAHKQGDKLKETQVIQMNEAALRKLEKELVDVQKQKNNLHDLLERGVYTVDIFLERSKAVSDRINEITSTMENLKKEIKAEIKKEKVKKDTIPQVEHVLDLYFKTDDPKKKNSLLKSVLEKAVYKKEKWQRLDDFELVLYPKLPQDGDI

SEQ ID NO: 48327 - DNA, 50 bp, Bacillus cereus
  source 1..50: mol_type = genomic DNA
tgtcgtcatcttgttggtgtaattaggttgacgccaacatggtagcaaca

SEQ ID NO: 48328 - DNA, 40 bp, Bacillus cereus; identical to SEQ ID NO: 48318
  source 1..40: mol_type = genomic DNA

SEQ ID NO: 48329 - DNA, 50 bp, Bacillus cereus
  source 1..50: mol_type = genomic DNA
tgtcgtcatcttgttggtgtaattaagttgacgccaacatggtagcaaca

SEQ ID NO: 48330 - DNA, 40 bp, Bacillus cereus; identical to SEQ ID NO: 17340
  source 1..40: mol_type = genomic DNA

SEQ ID NO: 48331 - protein, 515 aa, Bacillus cereus
MKTAIYLRKSRADLEAEARGEGETLAKHRSTLLKIAKEMSLNVLSVREEIVSGESLVKRPEMLALLEEIEDNKYDVVLCMDMDRLGRGGMKEQGIILETFKRSNTKIMTPRKTYDLNDEWDEEYSEFEAFMARKELKIITRRMQRGRIASVEAGNYLGTHAPFGYDIHRLNKRERTLTINSEEASVVRMIFDWYANEDMGASAIRSKLNDLGYKSKLGNEWNPYSILDILKNNVYIGKVTWQKRKEVKQPDAVKRSCARQDKSDWIIADGKHEPIIPESLFEQVQEKLNSRYHVPYNTNGIKNPLAGIIKCSKCGYSMVQRYPKNRKETMDCKHRGCENKSSYTELIEKRLLEALKEWYINYKADFEVHKQGDKLKETQVIQMNEAALRKLEKELVDVQKQKNNLHDLLERGVYTVDIFLERSKAVSDRINEITSTMENLKKEIKTEIKKEKVKKDTIPQVEHVLDLYFKTDDPKKKNSLLKSVLEKAVYRKEKWQRLDDFELVLYPKLPQDGDI

SEQ ID NO: 48332 - DNA, 50 bp, Bacillus cereus; identical to SEQ ID NO: 36457
  source 1..50: mol_type = genomic DNA

SEQ ID NO: 48333 - DNA, 40 bp, Bacillus cereus; identical to SEQ ID NO: 48318
  source 1..40: mol_type = genomic DNA

SEQ ID NO: 48334 - DNA, 50 bp, Bacillus cereus
  source 1..50: mol_type = genomic DNA
tgtcgtcaccttgttggtgtaattaagttgacgccaacagggtgatgaca

SEQ ID NO: 48335 - DNA, 40 bp, Bacillus cereus; identical to SEQ ID NO: 17340
  source 1..40: mol_type = genomic DNA

SEQ ID NO: 48336 - protein, 466 aa, Enterococcus casseliflavus
MKKAGLYIRVSTPQQEKEGYSIEAQTKKLNAYALAKDYKVFKTYTDAAFSGAKLERPALNEMIEDIESNKIDVVIVYKLDRLSRSQKNTMYLIEDVFLKNNVDFISMQESFDTTTSFGRAMIGILSVFAQLERDNITERMSMGKLERVKRGYYMGGGNVPFGYEYNQITGELEIQETQALAVKRMFELFLSGQAINKIVSILKKEFPVFEDSFMDSTVRRRLQSHYYCGKQKYQNKIYDAKHEPIVSTKDFNKAQRLISNRPHGNAFNHSYLFSGLIICHKCGKPYNGYESVRTANEKKYKHKYYRCSCRTYKHKQKYGWTCSGKSYRCDFLDAAIMSEIKKRAENSKFALKEDNNEVDNKPIIREIARLNAQQTKLLDLYLSDKISTKILDDKTDDLKDKIEKLELQLNQTVSKKDKEEFEKSLEELVDKFEELDFSTRRSLIENIIEKIEVVENEITIYFYVTI

SEQ ID NO: 48337 - DNA, 50 bp, Enterococcus casseliflavus
  source 1..50: mol_type = genomic DNA
tatgtgactatttaagcaatcacttgcatgttcgcttatttagacacaca

SEQ ID NO: 48338 - DNA, 40 bp, Enterococcus casseliflavus
  source 1..40: mol_type = genomic DNA
catcgttccagcaatcacttgcatgtttgcagggtggcgt

SEQ ID NO: 48339 - DNA, 50 bp, Enterococcus casseliflavus
  source 1..50: mol_type = genomic DNA
tatgtgactatttaagcaatcactcccatgttcgcttatttagacacaca

SEQ ID NO: 48340 - DNA, 40 bp, Enterococcus casseliflavus
  source 1..40: mol_type = genomic DNA
tatctttccagcaatcactcccctgcttaacggctggtga

SEQ ID NO: 48341 - protein, 499 aa, Rhizorhabdus histidinilytica
MQARIRAAQYVRMSTDRQAYSIANQQAAIASYAQRHGFEIVRTYADEGRSGLHLKGRSALQQLLADVLVDEPEFSAILVYDVSRWGRFQDIDQGAHYEFLCRSAGVRIHYCAEPFSNDDSLPAAIMKSLKRIMAGEFSRELSTKVFEAQARLARQGFKMGGGRRYGFHRMLVDEFGQPKGILQPGQYKHLRSDKVIIVPGPADEIATVQKIFRMCAWRGMSPRQIALRLNNAGNVTMTGRPWSGILVAHVIRSDMYRGVLTYNRHSRKLGGRDVLNDKSEWIRCEGAIEPLIDERTFRTANRRLSERRWSKSDHQLIKLLATLQARTGRLSVRDTLDQPGFPVPTTFARRFGSFREACALAGYIRPQILYASVHPTLLFRACDLLEDAATAIRSSGGRVEVSEVDRTLMIDGKYRLGATMVRTMSTAPHTTWRARLREGFDIDWLLVGLLNRTDNLVGYAVLPESRFGKTRDVYISASRIRAANNRIESLSELYSILRQ

SEQ ID NO: 48342 - DNA, 50 bp, Rhizorhabdus histidinilytica
  source 1..50: mol_type = genomic DNA
tagtgaaaagtggcgctggtgggcccggcacctaccgaatcgtagcaata

SEQ ID NO: 48343 - DNA, 40 bp, Rhizorhabdus histidinilytica
  source 1..40: mol_type = genomic DNA
agcatggacgctggtgggcccggcaggactcgaacccgca

SEQ ID NO: 48344 - DNA, 50 bp, Rhizorhabdus histidinilytica
  source 1..50: mol_type = genomic DNA
tagtgaaaagtggcgctggtgggcggggcacctaccgaatcgtagcaata

SEQ ID NO: 48345 - DNA, 40 bp, Rhizorhabdus histidinilytica
  source 1..40: mol_type = genomic DNA
ggcttaggcggggcggggcggggcagggcgcgaacccgca

SEQ ID NO: 48346 - protein, 533 aa, Anaerobutyricum hallii
MQVDGYSLDAQRDKLRKYAAYEDMVVAGEYSDEGFSGKNIQGRQEFQRMLNDIQDCKDGVSYVLVFKLSRFGRNAADVLNSLQLMQDFGVNLICVEDGIDSSKDAGKLMISVLSAVAEIERENIRTQTMAGREQKAREGKWNGGFAPYGYKLESGNLVIAEDEVEVIRVIYDRYIHTNEGVAGIAKYLNRNGFVKKLRQNNTIPGFSRNFVQDVLDNPVYMGKIAYGRRRTEKRQGTRNEMHVVEQSEFPVYDGQHEAIISEEDWYLAQEKRKINSFKREKVNNPDHAHILSGILKCPCCGKSMYGNIAKAHSKDKKTRYYYYCKNTVTPTGHECSFRLNIEQTEINKFVAKVISAMVSNPQFIEAIQAKIGTAVDTEDMEKQIAVLQGQLKQAFGTKSRLERQMDTLDINDAHYDRKILDLQRRYDEQYDTIEEIEVQIGELQSQIRSIQQEKISGDNIYRLLLAFDEVYHSATEAEQKEFMKAFIERIEMFPEKRKDGSWIKKIVFNFPVPVDGEEVKELPLETETTVETV

SEQ ID NO: 48347 - DNA, 50 bp, Anaerobutyricum hallii
  source 1..50: mol_type = genomic DNA
cccttggaaactgaaacaacagtcgagacggttgtactgctttcccacaa

SEQ ID NO: 48348 - DNA, 40 bp, Anaerobutyricum hallii
  source 1..40: mol_type = genomic DNA
ttgtcagactgttcacgtggagacggttgttcttttgtcc

SEQ ID NO: 48349 - DNA, 50 bp, Anaerobutyricum hallii
  source 1..50: mol_type = genomic DNA
cccttggaaactgaaacaacagtcatgacggttgtactgctttcccacaa

SEQ ID NO: 48350 - DNA, 40 bp, Anaerobutyricum hallii; identical to SEQ ID NO: 3410
  source 1..40: mol_type = genomic DNA

SEQ ID NO: 48351 - protein, 450 aa, Corynebacterium coyleae
MQRQRELIEQWAETNGHTITAWAEDVDVSGSISPFDSPELGPFLTDEHKDEWDILVAWKLDRLARSSITLHELFGWIQLNDKQLVCISDNIDLSTWVGRMVAGVIAGVAEGELEAITERVTAGQKALREAGRFRGGTPPFGYRQERKGAETVLVKDDKTQPTLLRMLDRAVEGASFLEIANELNDDGIKTRWGKRWTATAVNNVVTNQANLGWTTHSGRVVLDKQGQPVMRCEPSISLEDYNRILEHKKSRSFTRTSPEHNSPLLGIIECWECGSNMHFRRGNNGPGGDAYRCPECKPSRFVNAGVVEPLVEELFHEELADIPVMEKAVGTISDTELEEAQRSYQDIASFLSTAPDEQTRNTLFEQLRLVGERISRLEVQKKTPEAERWVNTGQTYGGLWETLDQEGRRRMMLGAGVRLRVRIIERGTRWSKPVLETEFVVPSDLRSRIL

SEQ ID NO: 48352 - DNA, 50 bp, Corynebacterium coyleae
  source 1..50: mol_type = genomic DNA
tgggtactacaacacaacctcgcctgcgccaacttctgctaaggtactcg

SEQ ID NO: 48353 - DNA, 40 bp, Corynebacterium coyleae
  source 1..40: mol_type = genomic DNA
gaggtactgcaaattagcttgcgccaagtagtagttaccg

SEQ ID NO: 48354 - DNA, 50 bp, Corynebacterium coyleae
  source 1..50: mol_type = genomic DNA
tgggtactacaacacaacctcgccgtcgccaacttctgctaaggtactcg

SEQ ID NO: 48355 - DNA, 40 bp, Corynebacterium coyleae
  source 1..40: mol_type = genomic DNA
gatgtactgcaatttatctgtttacaattagttgtttctg

SEQ ID NO: 48356 - protein, 523 aa, Mediterraneibacter faecis
MTDLRKTAVYIRLSAEDDNVDGRAKKESDSVTSQRILLKSFVIDELGVVESDILEYVDDGVSGTHFKRQGFQQLQDDMKSGEIGCVVVKDFSRFGRDYLEVGFYIEYIFPLLQIRFISINDSYDSAASSGMTGGMNVALQNLVYNMYSLDLSKKISSALQTRTRNGTRLPVNARYGYKKGKDGRLEVDPEAAKVVKMIFRMAAEGTSFADITRELNGQAIATCDEQKLSRGDQVQFQRFDTIKKKHWSPTTVAAIVRDEIYIGTRIWGKTRCSMHTGHKAVLNDETEWVRLENHHTAIIDRALFEKANEMHPKKKRSVAESRTNFTLERRKKQPALLLCANCGHSLLKETEHLLKCSDARTNGDPVCRSLVIRREPLEENILGLVHQYAASILEKEKKVSSNRQCDDKEINTAELQKQSRQLTSEKMKLYDDYKDGRIDRDSYKQRAGKISVQLEEIKRKIEDAENSKKLFEQNELSDKIKLKDFLGIQKFDTEKLREIIKVIRVHSQDEIEIEWNFDDIFSE

SEQ ID NO: 48357 - DNA, 50 bp, Mediterraneibacter faecis; identical to SEQ ID NO: 47427
  source 1..50: mol_type = genomic DNA

SEQ ID NO: 48358 - DNA, 40 bp, Mediterraneibacter faecis
  source 1..40: mol_type = genomic DNA
gttgccggatttttcagcgcacagcttgagacacacattt

SEQ ID NO: 48359 - DNA, 50 bp, Mediterraneibacter faecis
  source 1..50: mol_type = genomic DNA
tttgtcctatacttgacacatccacttggtcgagttataataaggacaag

SEQ ID NO: 48360 - DNA, 40 bp, Mediterraneibacter faecis
  source 1..40: mol_type = genomic DNA
attgctggagttaccatccctcatcttgagaaaaacattt

SEQ ID NO: 48361 - protein, 624 aa, Lachnospiraceae bacterium
MKTKQTGSGKITALYERLSRDDELTGDSNSIINQKKLLEDYAKSHGFTNCVHFTDDGWSGANFDRPNWKRMIESIESGEVSHVLVKDLSRVGRDYLQVGFYTEVMFRENGVRFIAIANGVDSDKRESSEFAPFLNIMNEWYVRDSSRKITTVLRAKGMSGAHLTNHCIYGYKKDPNDKNHWIIDEEAAEVVRRIYRMAIEGKGPYETARILALEKIERPSYYLAQRGMGNHKSNYNSTEPYAWRGNTISDILSKPEYMGHTVNFRTYKESYKDKRSKATPKEDLVIFEDTQEAIIDKETWERVQSLRKTIRRTDTIGEANPLTGLMFCADCGAKMYNHRGKAGKARDWAGRPNGKRRPDRDEYNCSRYDLGNQRYDTYCTTHLIRTVVVNELLLEAIKEVCNYAQNNEAAFIEQVCSASGERQKKTIKTIRQRKQRSEKRADELSRLIRKLYEDNVNGKLSDKLFEQMLHDFELELDGLNTSITQDQQELDRISSESVNAEKFIALVKRYTDFSELTPAMINEFIEKILVHQAEGKGASRTQEIEIFFNFVGKVEIPHEEVELTEEEIAAIAEQERRRAKKAEYNRRYMQKKRKQWKEQQEQAQEPQEPIELPLVQDEKGALSA

SEQ ID NO: 48362 - DNA, 50 bp, Lachnospiraceae bacterium
  source 1..50: mol_type = genomic DNA
aaacacccttgacaaagcgtatcagatgttatatgctgtgaaagggggac

SEQ ID NO: 48363 - DNA, 40 bp, Lachnospiraceae bacterium; identical to SEQ ID NO: 24043
  source 1..40: mol_type = genomic DNA

SEQ ID NO: 48364 - DNA, 50 bp, Lachnospiraceae bacterium; identical to SEQ ID NO: 48362
  source 1..50: mol_type = genomic DNA

SEQ ID NO: 48365 - DNA, 40 bp, Lachnospiraceae bacterium
  source 1..40: mol_type = genomic DNA
gccatctacaaagtacacagaggatacccacctgtcaccg

SEQ ID NO: 48366 - protein, 614 aa, Lachnospiraceae bacterium
MKIKDKRFKITALYERLSKDDEVQGESNSIVNQKRMLTQYAEQHGYENIEHYTDDGWTGTNFDRPDWKRMLADIEAGKVGTVIVKDMSRIGRDYLQVGFYTEVMFREKGVHFIAISNGVDSERRESAEFAPFLNIMNEWYVRDTSRKITAVLKTRGMSGKAHTNNRCCYGYKKSADNPDKWEIDEEAAEVVRRIFNMCLNGKGPYQIARELAEDKVERPEYYLGMRGRGANVKSFDMEHPYAWRGGTVKTILTRMEYIGCTVNFRTKKESYKDKRPTKVDSSEWVIFENTQEPIIDKHTWETVQKLLDTPRRIGVFEESNPLTGKVFCADCGAKMYNHRHSKGVWKKNYFKAGEMVYHAPEDRYSCSNNALGKQMYEKVCSSHSISTKALKTLVLETIKRTCDYAVENEAEFREKVCSISEEQQGELSVRLEKRLAKKQKRVSEINRLIRKLYEDNISGKLNDKRFNAMLSDYELELEALEADIDRDNAELEGMSAKKTDVDVFMELVKKHTTFEELTPAILNEFVDKIMVYKAVGSGANRTQDVDIYLNYIGRFVVPEVVVELTEEEKLAEAKRQEKLEKKRASNRKYMARKREEARKAWAEIEAEKAKAVGQ

SEQ ID NO: 48367 - DNA, 50 bp, Lachnospiraceae bacterium
  source 1..50: mol_type = genomic DNA
atcctaccttgacaaatcctcacagatgtaatacactttgagagtaggca

SEQ ID NO: 48368 - DNA, 40 bp, Lachnospiraceae bacterium; identical to SEQ ID NO: 24043
  source 1..40: mol_type = genomic DNA

SEQ ID NO: 48369 - DNA, 50 bp, Lachnospiraceae bacterium; identical to SEQ ID NO: 48367
  source 1..50: mol_type = genomic DNA

SEQ ID NO: 48370 - DNA, 40 bp, Lachnospiraceae bacterium; identical to SEQ ID NO: 48365
  source 1..40: mol_type = genomic DNA

SEQ ID NO: 48371 - protein, 523 aa, Eubacterium ramulus
MRFFSYGRKSVFSDKSDSIDNQFRMNREYCESKFSGQVDSWQQFSDEDFTGANTSRPDLQRMLSFIKGGFCDVLVVYQLDRLSRDVRDFANIYALLEEHGVMFISIKENIDTTTPIGRAMMYVTVVFAQMERETIAARVTDNMLGLAKKGYWTGGNPPVGYVRKHIIVNGKKHCSIEVDPDGARYVTQIFDTFLAYNCSLQGMETRFKNQGIRTQSGKFFSTTQLHKMLTMPYCVEATPEVYDFYAAKGCIMDPGSPREMWDGSVGVIIYGRSTEKNKKHQAQPPEKWTVCLGKHKPFMPAEKWLAVQSRFTQNKCIKDAKWPVPLLKGVLRCKCGNLMQVSRKKKVDGTCSSWYYCRKRMRQGVDACDMGQIKCDLLDEEVLELFRGITADPALIQKFVKAEAPADVPDLKAAQARVSACERKIGRLAASLALAEDSAASKYIIAEMERLDVELGALKREASLAEMESHRAAASAKDAKATAAEIAKLIHGLDGFDDKEKNAIARAVIQECTWDGERLFITL

SEQ ID NO: 48372 - DNA, 50 bp, Eubacterium ramulus
  source 1..50: mol_type = genomic DNA
tcactatttcataatggtggggttctgcccgcaatataaaaaagtgaaag

SEQ ID NO: 48373 - DNA, 40 bp, Eubacterium ramulus
  source 1..40: mol_type = genomic DNA
tctcccacaataatgcggtccggccgcatacgcagagccg

SEQ ID NO: 48374 - DNA, 50 bp, Eubacterium ramulus
  source 1..50: mol_type = genomic DNA
tcactatttcataatggtggggtttagcccgcaatataaaaaagtgaaag

SEQ ID NO: 48375 - DNA, 40 bp, Eubacterium ramulus
  source 1..40: mol_type = genomic DNA
gctgccacagtaatgcgactaagaagcttacgcagagcct

SEQ ID NO: 48376 - protein, 590 aa, Ruthenibacterium lactatiformans
MRASEGKIAIYSRKSKFTGKGESIGNQIELCREYIRANHGQADADAAAVYEDEGFSGGNLERPAFKRMLRAARERKFKAVVVYRLDRISRNISDFSGLIEELSRLDIAFVSIKEQFDTGTPMGRAMMYIASVFSQLERETIAERIRDNMHELAKTGRWLGGTTPTGYCSKSVRTVTVDGKAKKACMLELIPEEGETVKLVYALFAETHSLTATETELLRRGVTTKNGKTFTRFSIKGILQNPVYLVADQAAYRYFIQRQADVFSNEREFDGVHGVLAYNRTDQSKGKNTVYLPVSEWIVSVGKHRGLISSEVWLEAQAALEHNRSKAYRRPRSNEALLTGLLFCRCGGRMYPKLSKRSLADGTRSYTYVCREKERSRRSLCDGKNADGNMLDSAVLQAIGALAEDKAGFAGRLAQSKGGSMGGPGLAGEKLSALRKELGGNAKKIDALVDSLAQAGAGAAREHILKRIGTLHELDRELRKRIGELERLAAQNMLGARELEAQRRRLAAFPESMETMRLAQKRAAVQALVQRVVWDGESAHVVLAGTAEVPADFLCAEEGRTEREERSEAHGDGNTQFVNTPAPHWREDSK

SEQ ID NO: 48377 - DNA, 50 bp, Ruthenibacterium lactatiformans; identical to SEQ ID NO: 38622
  source 1..50: mol_type = genomic DNA

SEQ ID NO: 48378 - DNA, 40 bp, Ruthenibacterium lactatiformans
  source 1..40: mol_type = genomic DNA
tgcagcgcgctgcattgaaaatgaggtgctcatgcagttc

SEQ ID NO: 48379 - DNA, 50 bp, Ruthenibacterium lactatiformans
  source 1..50: mol_type = genomic DNA
cgccgcattggcgggaggatagcacttgctatcctcccgcaaatgcggcg

SEQ ID NO: 48380 - DNA, 40 bp, Ruthenibacterium lactatiformans
  source 1..40: mol_type = genomic DNA
ggccatgttctgctttgaacttgaggtgctcaggctgttg

SEQ ID NO: 48381 - protein, 478 aa, Micrococcus luteus
MTKRKATAAIYVRISRDADGRAAGVERQEADCRALAERMGLTLHPRVFKDNDIGASSRSRKARPAFRELLEAVEAGEVNVILAYSNSRITRRPLEWESLIRLSETHGLQVHTVVSSSAQFDTADGRMVLRVLAANDAAEADRISERVTRAKQQRLEEGAFRGGPRPFGYEADGMTIRETEAQALREAAGRIVAGESLRSVTADLRDRGFKGTRRADSGLQPVQLRRILLRPRNAGLVEHYGKVTGPAAWPAILSEDEWQAVRSVLTDPARKTNHGSNRVKHLGSSLFRCGVCGDHVRASAASRGYRVYRCKTGAHVSRAQEPIDHFIREVMAARLRADPDVLRREDDVDDAAPNEIRRELSTLRARRAQLADDYADGLLDGAQVKAAGARIDAKIEAAAAELARLTSASVLSGLADAEDAGNAFLAAPIGAQRAIVDALATITIYPAGKKGRPAGWQTGDHYIDLETVQITWKGSDDE

SEQ ID NO: 48382 - DNA, 50 bp, Micrococcus luteus
  source 1..50: mol_type = genomic DNA
gggcgtcttagttgtactaatgccctggcgagaggttagactagacacat

SEQ ID NO: 48383 - DNA, 40 bp, Micrococcus luteus
  source 1..40: mol_type = genomic DNA
gcgaggcgcctgccacgacctggcgatcgtcctggcggcc

SEQ ID NO: 48384 - DNA, 50 bp, Micrococcus luteus
  source 1..50: mol_type = genomic DNA
gggcgtcttagttgtactaatgccacggcgagaggttagactagacacat

SEQ ID NO: 48385 - DNA, 40 bp, Micrococcus luteus
  source 1..40: mol_type = genomic DNA
gggagtcgactgccaggacacggccagggtgctggggggc

SEQ ID NO: 48386 - protein, 521 aa, Escherichia coli
MKVPVWCYARISTLKQIDGFGIQRQINTINQFLQYVVLDHRLPFTLDVDNVTQMVAEGKSAFRGKNWNEKTKLGQYRKMVMDGVINDSVLIVENIDRLTRLDTFQAVEIISGLVNRGTTILEIETGMTYSRYIPESITVLVMQCNRANGESKRKSIMMQKSHANRYGKVSKVRPRWFDVVEIDGIKQYRPNETAKAIQRMYNDYINGIGAAHIVRTYGNTDNGKAWTLVTVLRALSDKRVADDARYPPIIDKELYDSVQALKAATNKKGNTHQKNMLNIFSGMSRCPVCNQSIIVKRNSHGNLFTVCLGKRTNKTCEARSLSYFALERPLLTAIRGLDFSEVYKHEDKNVLTLRDQWIQNERDIAAFRERLNKASRHEKFAILDELEIMNREQEELTIRLKSVDVPKDIQLTFDDDKLDLDTNYRIELNNRIKKLIQYINIVREDVTKSSYTIYCTIKYWTDVISHLVIIDVNIKRTGTGGTNTLTTTLRSVSSLNMDGTVSGNPDSDAWEYWKSFLDNLK

SEQ ID NO: 48387 - DNA, 50 bp, Escherichia coli
  source 1..50: mol_type = genomic DNA
cggtgtatattcttgcatgactacgacagttatgttatgatgtacaccac

SEQ ID NO: 48388 - DNA, 40 bp, Escherichia coli
  source 1..40: mol_type = genomic DNA
tggtcccatcagcagcaatgaacagtcagtcgtaccaccg

SEQ ID NO: 48389 - DNA, 50 bp, Escherichia coli
  source 1..50: mol_type = genomic DNA
cggtgtatattcttgcatgactacgccagttatgttatgatgtacaccac

SEQ ID NO: 48390 - DNA, 40 bp, Escherichia coli
  source 1..40: mol_type = genomic DNA
tggaaccaccagcacaaatgcatactcagccgtaccatcc

SEQ ID NO: 48391 - protein, 659 aa, Paraburkholderia nemoris
MQNNLESQRRQYGLVERARQLGWERVEVIDDDLGRSGSGTLRPGFERLLGLLCDGEVGAVLSIEASRLARNGRDWHTLLEFCSVVGALLIDAEGIYDPVQMNDRLLLGMKGTISEMELASFRQRAHEAMKQKAKRGELYMHVPIGYVRTVDDRLEKDPDERVRAAIDLVFRKFAELGSARRVYFWLGEQGIEMPAVTSAGSAERHEWKAPRYHSVLSLLHNPIYAGAYTHGRSKTSVRIEDGRKRAVRTHQHRPEDWAVLIRDHHEGYIDWDVYCANRELMAHNTNGHGSAVRGSIRSGSALLSGLLRCGHCGAKLSVNYPGPTSIRYQCTTHILSRDHACCVMFGGLGADQLVAEQVLRCLQPLGLQAAVQAIEQLQSVDDERLAQKRLALQRARYEVNRAQRQYDAVDPANRLVAGSLEKRWNDALAVQSRLEEEVSELMRQRPDALSDETRQALMALAEDIPRLWEHPDTTPDVRKRIVRTVIKEIVVTADGDSVRFIVHWQGGDHTELSLEKTPIGAHRYVTSAETIELITSLARMQPDERIAATINRLGHRTAHGQTWTAARVCSIRKGHSIAAYREGERQERGELTVDEAATSLNVTHTTVLRLIHQKELSARQVCRNAPWTIRQADLDEFLAARAEQGPSTHVAGQLGLDIQ

SEQ ID NO: 48392 - DNA, 50 bp, Paraburkholderia nemoris
  source 1..50: mol_type = genomic DNA
ggagtgcattatggaaggccgtcgaacaagtgtaagtcattctgcccgtc

SEQ ID NO: 48393 - DNA, 40 bp, Paraburkholderia nemoris
  source 1..40: mol_type = genomic DNA
ggcgttcttcaggacgttgaagaacatttctatttcccac

SEQ ID NO: 48394 - DNA, 50 bp, Paraburkholderia nemoris
  source 1..50: mol_type = genomic DNA
ggagtgcattatggaaggccgtcgagcaagtgtaagtcattctgcccgtc

SEQ ID NO: 48395 - DNA, 40 bp, Paraburkholderia nemoris
  source 1..40: mol_type = genomic DNA
gggtttctcaatgactttgaggttcgtttctaattcccac

SEQ ID NO: 48396 - protein, 524 aa, Hyphomonas atlantica
MTRAHYHSTKPQKAVIYCRVSSKSQSTEGSGLDSQEHLCREHAASKGYEVVAVFPDDISGYGDFMKRPGMVALLKFLDDNPFDNFVVIFDDLKRYSRDTEFYLKLKREMEMRGAIRECPNFNFEDTPESKFVETVLAAQGELEREQNRRQVLQKMKARVEQGYWVFHAPKGYIYQKAQSGGKVLVPDPVLGPIVKSALDGFASGRLGSQVEVQRFLQSQPEFAAQSPKGRVRPQAIVRLLSNPVYAGMVYAKVWGVSLRPGKHEGLVSPTTHQKILEILERGVYAPSRVDTTEKFILRGAVSCASCGKPMTAGHCKGKTKTYAYFWCAQKGCDQRSKTISRDKMEADFTDLLKELQPTQWLLRLAEAMFRDLWDRENRQAHERVIAYQKEADAAEAEIQALVDRIVESSNARVISALERRIDAEERRKIIALEHARVGVKPLIPMERVFELSLKFLKAPYLLWESGRLDLRRLVLKLTFSEHLRYRKGEGFELSPLSLPFNIFNELGGKMTPMDPAFAGKNAMV

SEQ ID NO: 48397 - DNA, 50 bp, Hyphomonas atlantica
  source 1..50: mol_type = genomic DNA
cttttgcgggaaaaaatgcaatggtgccactgagcggagatctcttaaac

SEQ ID NO: 48398 - DNA, 40 bp, Hyphomonas atlantica
  source 1..40: mol_type = genomic DNA
aaatgaggggaaatcctggtgccgcgagggagaattgaac

SEQ ID NO: 48399 - DNA, 50 bp, Hyphomonas atlantica
  source 1..50: mol_type = genomic DNA
cttttgcgggaaaaaatgcaatggggccactgagcggagatctcttaaac

SEQ ID NO: 48400 - DNA, 40 bp, Hyphomonas atlantica
  source 1..40: mol_type = genomic DNA
aagggatgggaaatcctggggcatggatggagaatagtaa

SEQ ID NO: 48401 - protein, 507 aa, Bacillus subtilis
MFFKETETQEIIKYEDYPYAVYARVSSEKDEQVTSIANQIDICHHWIEKNNYEWKDEAIQLDDGISGTVLLDRKAMQLILDKAQKRKLKMVVFKSISRLARDLKDALEIREVLLAHGVRVVTLEEGYDSLYEGKNSMKFEMFSMFAAQYPQTISVAASGALAAKARRGEHSGRVPFGFKKEGKFLAINEEEAKVVRFIFDLHNNHGYGHKRIVLKLNEELALGNIVKPQKTEFWQLSTVQTILKNPIYCGVFIANRHTQVKIGGRKKFIRNPKEKWTVYKDWCPKIISEEEYEKANNKEHKMRKKRFNPRNELRGMMKCGVCGCNMVVLPSYKYNQKREKKEFNYLKCSAYRRGGTALCVNHAPMQYKDLRAFVIKTLKQKGKKLKLDVKSDFEEQKKNRIKRTKIGIENAENKKKRLIELYLEDQLITKVEFQAKRKELEEQIEKLNDKLFMLEREEEETIDISNIKNAFAQLERTDQDLFEAFSALIDKLVIYEDGTVDFHYKFK

SEQ ID NO: 48402 - DNA, 50 bp, Bacillus subtilis
  source 1..50: mol_type = genomic DNA
agtttgcgatagatatgcatatcaaatggtatgcataccggtcgcaaact

SEQ ID NO: 48403 - DNA, 40 bp, Bacillus subtilis
  source 1..40: mol_type = genomic DNA
cgttcgaaaccatatttcaaatgccatgcagaaattgggt

SEQ ID NO: 48404 - DNA, 50 bp, Bacillus subtilis
  source 1..50: mol_type = genomic DNA
agtttgcgatagatatgcatatcacttggtatgcataccggtcgcaaact

SEQ ID NO: 48405 - DNA, 40 bp, Bacillus subtilis
  source 1..40: mol_type = genomic DNA
cgtaaaaaaccaaactttactagccatggagaaatctggt

SEQ ID NO: 48406 - protein, 507 aa, Bacillus subtilis
MFFKETETQEIIKYEDYPYAVYARVSSEKDEQVTSIANQIDICHHWIEKNNYEWKDEAIQLDDGISGTVLLDRKAMQLILDKAQKRKLKMVVFKSISRLARDLKDALEIREVLLAHGVRVVTLEEGYDSLYEGKNSMKFEMFSMFAAQYPQTISVAASGALAAKARRGEHSGRVPFGFKKEGKFLAINEEEAKVVRFIFDLHNNHGYGHKRIVLKLNEELALGNIVKPQKTEFWQLSTVQTILKNPIYCGVFIANRHTQVKIGGRKKFIRNPKEKWTVYKDWCPKIISEEEYEKANNKEHKMRKKRFNPRNELRGMMKCGVCGCNMVVLPSYKYNQKREKKEFNYLKCSAYRRGGTALCVNHAPMQYKDLRAFVIKTLKQKGKKLKLDVKSDFEEQKKNRIKRTKIEIENAENKKKRLIELYLEDQLITKTEFQAKRKELEEQIEKLNDKLFMLEREEEETIDISNIKNAFAQLERTDQDLFEAFSALIDKLVIYEDGTVDFHYKFK

SEQ ID NO: 48407 - DNA, 50 bp, Bacillus subtilis; identical to SEQ ID NO: 48402
  source 1..50: mol_type = genomic DNA

SEQ ID NO: 48408 - DNA, 40 bp, Bacillus subtilis; identical to SEQ ID NO: 48403
  source 1..40: mol_type = genomic DNA

SEQ ID NO: 48409 - DNA, 50 bp, Bacillus subtilis; identical to SEQ ID NO: 48404
  source 1..50: mol_type = genomic DNA

SEQ ID NO: 48410 - DNA, 40 bp, Bacillus subtilis; identical to SEQ ID NO: 48405
  source 1..40: mol_type = genomic DNA

SEQ ID NO: 48411 - protein, 507 aa, Bacillus subtilis
MFFKETETQEIIKYEDYPYAVYARVSSEKDEQVTSIANQIDICHHWIEKNNYEWKDEAIQLDDGISGTVLLDRKAMQLILDKAQKRKLKMVVFKSISRLARDLKDALEIREVLLAHGVRVVTLEEGYDSLYEGKNSMKFEMFSMFAAQYPQTISVAASGALAAKARRGEHSGRVPFGFKKEGKFLAINEEEAKVVRFIFDLHNNHGYGHKRIVLKLNEELALGNIVKPQKTEFWQLSTVQTILKNPIYCGVFIANRHTQVKIGGRKKFIRNPKEKWTVYKDWCPKIISEEEYEKANNKEHKMRKKRFNPRNELRGMMKCGVCGCNMVVLPSYKYNQKREKKEFNYLKCSAYRRGGTALCVNHAPMQYKDLRAFVIKTLKQKGKKLKLDVKSDFEEQKKNRIKRTKIEIENAENKKKRLIELYLEDQLITKAEFQAKRKELEEQIEKLNDKLFMLEREEEETIDISNIKNAFAQLERTDQDLFEAFSALIDKLVIYEDGTVDFHYKFK

SEQ ID NO: 48412 - DNA, 50 bp, Bacillus subtilis; identical to SEQ ID NO: 48402
  source 1..50: mol_type = genomic DNA

SEQ ID NO: 48413 - DNA, 40 bp, Bacillus subtilis; identical to SEQ ID NO: 48403
  source 1..40: mol_type = genomic DNA

SEQ ID NO: 48414 - DNA, 50 bp, Bacillus subtilis; identical to SEQ ID NO: 48404
  source 1..50: mol_type = genomic DNA

SEQ ID NO: 48415 - DNA, 40 bp, Bacillus subtilis; identical to SEQ ID NO: 48405
  source 1..40: mol_type = genomic DNA

SEQ ID NO: 48416 - protein, 507 aa, Bacillus subtilis
MFFKETETQEIIKYEDYPYAVYARVSSEKDEQVTSIANQIDICHHWIEKNNYEWKDEAIQLDDGISGTVLLDRKAMQLILDKAQKRKLKMVVFKSISRLARDLKDALEIREVLLAHGVRVVTLEEGYDSLYEGKNSMKFEMFSMFAAQYPQTISVAASGALAAKARRGEHSGRVPFGFKKEGKFLAINEEEAKVVRFIFDLHNNHGYGHKRIVLKLNEELALGNIVKPQKTEFWQLSTVQTILKNPIYCGVFIANRHTQVKIGGRKKFIRNPKEKWTVYKDWCPKIISEEEYEKANNKEHKMRKKRFNPRNELRGMMKCGVCGCNMVVLPSYKYNQKREKKEFNYLKCSAYRRGGTALCVNHAPMQYKDLRAFVIKTLKQKGKKLKLDVKSDFEEQKKNRIKRTKIEIENAENKKKRLIELYLEDQLITKVEFQAKRKELEEQIEKLNDKLFMLEREEEETIDISNIKNAFAQLERTDQDLFEAFSALIDKLVIYEDGTVDFHYKFK

SEQ ID NO: 48417 - DNA, 50 bp, Bacillus subtilis
  source 1..50: mol_type = genomic DNA
agtttgcgatagatatgcatatcaaatggtatgcatatcgttcgcaaact

SEQ ID NO: 48418 - DNA, 40 bp, Bacillus subtilis; identical to SEQ ID NO: 48403
  source 1..40: mol_type = genomic DNA

SEQ ID NO: 48419 - DNA, 50 bp, Bacillus subtilis
  source 1..50: mol_type = genomic DNA
agtttgcgatagatatgcatatcacttggtatgcatatcgttcgcaaact

SEQ ID NO: 48420 - DNA, 40 bp, Bacillus subtilis; identical to SEQ ID NO: 48405
  source 1..40: mol_type = genomic DNA

SEQ ID NO: 48421 - protein, 507 aa, Bacillus subtilis
MFFKETETQEIIKYEDYPYAVYARVSSEKDEQVTSIANQIDICHHWIEKNNYEWKDEAIQLDDGISGTVLLDRKAMQLILDKAQNRKLKMVVFKSISRLARDLKDALEIREVLLAHGVRVVTLEEGYDSLYEGKNSMKFEMFSMFAAQYPQTISVAASGALAAKARRGEHSGRVPFGFKKEGKFLAINEEEAKVVRFIFDLHNNHGYGHKRIVLKLNEELALGNIVKPQKTEFWQLSTVQTILKNPIYCGVFIANRHTQVKIGGRKKFIRNPKEKWTVYKDWCPKIISEEEYEKANNKEHKMRKKRFNPRNELRGMMKCGVCGCNMVVLPSYKYNQKREKKEFNYLKCSAYRRGGTALCVNHAPMQYKDLRAFVIKTLKQKGKKLKLDVKSDFEEQKKNRIKRTKIEIENAENKKKRLIELYLEDQLITKTEFQAKRKELEEQIEKLNDKLFMLEREEEETIDISNIKNAFAQLERTDQDLFEAFSALIDKLVIYEDGTVDFHYKFK

SEQ ID NO: 48422 - DNA, 50 bp, Bacillus subtilis; identical to SEQ ID NO: 48402
  source 1..50: mol_type = genomic DNA

SEQ ID NO: 48423 - DNA, 40 bp, Bacillus subtilis; identical to SEQ ID NO: 48403
  source 1..40: mol_type = genomic DNA

SEQ ID NO: 48424 - DNA, 50 bp, Bacillus subtilis; identical to SEQ ID NO: 48404
  source 1..50: mol_type = genomic DNA

SEQ ID NO: 48425 - DNA, 40 bp, Bacillus subtilis; identical to SEQ ID NO: 48405
  source 1..40: mol_type = genomic DNA

SEQ ID NO: 48426 - protein, 507 aa, Bacillus subtilis
MFFKETETQEIIKYEDYPYAVYARVSSEKDEQVTSIANQIDICHHWIEKNNYEWKDEAIQLDDGISGTVLLDRKAMQLILDKAQKRKLKMVVFKSISRLARDLKDALEIREVLLAHGVRVVTLEEGYDSLYEGKNSMKFEMFSMFAAQYPQTISVAASGALAAKARRGEHSGRVPFGFKKEGKFLAINEEEAKVVRFIFDLHNNHGYGHKRIVLKLNEELALGNIVKPQKTEFWQLSTVQTILKNPIYCGVFIANRHTQVKIGGRKKFIRNPKEKWTVYKDWCPKIISEEEYEKANNKEHKMRKKRFNPRNELRGMMKCGVCGCNMVVLPSYKYNQKREKKEFNYLKCSAYRRGGTALCVNHAPMQYKDLRAFVIKTLKQKGKKLKLDVKSDFEEQKKNRIKRTKIEIENAENKKKRLIELYLEDQLITKTEFQVKRKELEEQIEKLNDKLFMLEREEEETIDISNIKNAFAQLERTDQDLFEAFSALIDKLVIYEDGTVDFHYKFK

SEQ ID NO: 48427 - DNA, 50 bp, Bacillus subtilis; identical to SEQ ID NO: 48402
  source 1..50: mol_type = genomic DNA

SEQ ID NO: 48428 - DNA, 40 bp, Bacillus subtilis; identical to SEQ ID NO: 48403
  source 1..40: mol_type = genomic DNA

SEQ ID NO: 48429 - DNA, 50 bp, Bacillus subtilis; identical to SEQ ID NO: 48404
  source 1..50: mol_type = genomic DNA

SEQ ID NO: 48430 - DNA, 40 bp, Bacillus subtilis; identical to SEQ ID NO: 48405
  source 1..40: mol_type = genomic DNA

SEQ ID NO: 48431 - protein, 507 aa, Bacillus subtilis; identical to SEQ ID NO: 48406

SEQ ID NO: 48432 - DNA, 50 bp, Bacillus subtilis
  source 1..50: mol_type = genomic DNA
agtttgcgatagatatgcatatcaaatgccatgcatatcgttcgcaaact

SEQ ID NO: 48433 - DNA, 40 bp, Bacillus subtilis; identical to SEQ ID NO: 48403
  source 1..40: mol_type = genomic DNA

SEQ ID NO: 48434 - DNA, 50 bp, Bacillus subtilis
  source 1..50: mol_type = genomic DNA
agtttgcgatagatatgcatatcacttgccatgcatatcgttcgcaaact

SEQ ID NO: 48435 - DNA, 40 bp, Bacillus subtilis; identical to SEQ ID NO: 48405
  source 1..40: mol_type = genomic DNA

SEQ ID NO: 48436 - protein, 507 aa, Bacillus subtilis
MFFQENETQEIISYEEYPYAVYARVSSEKDEQVTSIANQIDICHHWIEKNNYEWKDEAIQLDDGISGTVLLDRKAMQLILDKAQKRKLKMVVFKSISRLARDLKDALEIREVLLAHGVRVVTLEEGYDSLYEGKNSMKFEMFSMFAAQYPQTISVAASGALAAKARRGEHSGRVPFGFKKEGKFLVINEEEAKVIRFIFDLHNNHGYGHKRIVLKLNEELALGNIVKPQKTDFWQLSTVQTILKNPIYCGVFIANRHTQVKIGGRKKFIRNPKEKWTVYKDWCPKIISEEEYEKANNKEHKMRKKRFNPRNELRGMMKCGVCGCNMVVLPSYKYNQKREKKEFNYLKCSAYRRGGTALCVNHAPMQYKDLRAFVIKTLKQKGKKLKLDVKSDFEEQKKNRIKRTKIEIENAENKKKRLIELYLEDQLITKAEFQIKRKELEEQLEKLNDKLFMLEREEEETIDISNIKNAFAQLERTDQDLFEAFSALIDKLVVYEDGTVDFHYKFK

SEQ ID NO: 48437 - DNA, 50 bp, Bacillus subtilis; identical to SEQ ID NO: 41187
  source 1..50: mol_type = genomic DNA

SEQ ID NO: 48438 - DNA, 40 bp, Bacillus subtilis; identical to SEQ ID NO: 48403
  source 1..40: mol_type = genomic DNA

SEQ ID NO: 48439 - DNA, 50 bp, Bacillus subtilis
  source 1..50: mol_type = genomic DNA
agtttgcgatagatatgcatatcacttggtatgcatatcggtcgcaaact

SEQ ID NO: 48440 - DNA, 40 bp, Bacillus subtilis; identical to SEQ ID NO: 48405
  source 1..40: mol_type = genomic DNA

SEQ ID NO: 48441 - protein, 507 aa, Bacillus subtilis
MFFKETETQEIIKYEDYPYAVYARVSSEKDEQVTSIANQIDICHHWIEKNNYEWKDEAIQLDDGISGTVLLDRKAMQLILDKAQKRKLKMVVFKSISRLARDLKDALEIREVLLAHGVRVVTLEEGYDSLYEGKNSMKFEMFSMFAAQYPQTISVAASGALAAKARRGEHSGRVPFGFKKEGKFLAINEEEAKVVRFIFDLHNNHGYGHKRIVLKLNEELALGNIVKPQKTEFWQLSTVQTILKNPIYCGVFIANRHTQVKIGGRKKFIRNPKEKWTVYKDWCPKIISEEEYEKANNKEHKMRKKRFNPRNELRGMMKCGVCGCNMVVLPSYKYNQKREKKEFNYLKCSAYRRGGTALCVNHAPMQYKDLRAFVIKTLKQKGKKLKLDVKSDFEEQKKNRIKRTKTEIENAENKKKRLIELYLEDQLITKVEFQAKRKELEEQIEKLNDKLFMLEREEEETIDISNIKNAFAQLERTDQDLFEAFSALIDKLVIYEDGTVDFHYKFK

SEQ ID NO: 48442 - DNA, 50 bp, Bacillus subtilis; identical to SEQ ID NO: 48402
  source 1..50: mol_type = genomic DNA

SEQ ID NO: 48443 - DNA, 40 bp, Bacillus subtilis; identical to SEQ ID NO: 48403
  source 1..40: mol_type = genomic DNA

SEQ ID NO: 48444 - DNA, 50 bp, Bacillus subtilis; identical to SEQ ID NO: 48404
  source 1..50: mol_type = genomic DNA

SEQ ID NO: 48445 - DNA, 40 bp, Bacillus subtilis; identical to SEQ ID NO: 48405
  source 1..40: mol_type = genomic DNA

SEQ ID NO: 48446 - protein, 507 aa, Bacillus subtilis; identical to SEQ ID NO: 48416

SEQ ID NO: 48447 - DNA, 50 bp, Bacillus subtilis; identical to SEQ ID NO: 48402
  source 1..50: mol_type = genomic DNA

SEQ ID NO: 48448 - DNA, 40 bp, Bacillus subtilis; identical to SEQ ID NO: 48403
  source 1..40: mol_type = genomic DNA

SEQ ID NO: 48449 - DNA, 50 bp, Bacillus subtilis; identical to SEQ ID NO: 48404
  source 1..50: mol_type = genomic DNA

SEQ ID NO: 48450 - DNA, 40 bp, Bacillus subtilis; identical to SEQ ID NO: 48405
  source 1..40: mol_type = genomic DNA

SEQ ID NO: 48451 - protein, 507 aa, Bacillus subtilis
MFFKETETQEIIKYEDYPYAVYARVSSEKDEQVTSIANQIDICHHWIEKNNYEWKDEAIQLDDGISGTVLLDRKAMQLILDKAQKRKLKMVVFKSISRLARDLKDALEIREVLLAHGVRVVTLEEGYDSLYEGKNSMKFEMFSMFAAQYPQTISVAASGALAAKARRGEHSGRVPFGFKKEGKFLAINEEEAKVVRFIFDLHNNHGYGHKRIVLKLNEELALGNIVKPQKTEFWQLSTVQTILKNPIYCGVFIANRHTQVKIGGRKKFIRNPKEKWTVYKDWCPKIISEEEYEKANNKEHKMRKKRFNPRNELRGMMKCGVCGCNMVVLPSYKYNQKREKKEFNYLKCSAYRRGGTALCVNHAPMQYKDLRAFVIKTLKQKGKKLKLDVKSDFEEQKKNRIKRTRIEIENAENKKKRLIELYLEDQLITKAEFQAKRKELEEQIEKLNDKLFMLEREEEETIDISNIKNAFAQLERTDQDLFEAFSALIDKLVIYEDGTVDFHYKFK

SEQ ID NO: 48452 - DNA, 50 bp, Bacillus subtilis; identical to SEQ ID NO: 48402
  source 1..50: mol_type = genomic DNA

SEQ ID NO: 48453 - DNA, 40 bp, Bacillus subtilis; identical to SEQ ID NO: 48403
  source 1..40: mol_type = genomic DNA

SEQ ID NO: 48454 - DNA, 50 bp, Bacillus subtilis; identical to SEQ ID NO: 48404
  source 1..50: mol_type = genomic DNA

SEQ ID NO: 48455 - DNA, 40 bp, Bacillus subtilis; identical to SEQ ID NO: 48405
  source 1..40: mol_type = genomic DNA

SEQ ID NO: 48456 - protein, 507 aa, Bacillus subtilis
MFFKETETQEIIKYEDYPYAVYARVSSEKDEQVTSIANQIDICHHWIEKNNYEWKDEAIQLDDGISGTVLLDRKAMQLILDKAQKRKLKMVVFKSISRLARDLKDALEIREVLLAHGVRVVTLEEGYDSLYEGKNSMKFEMFSMFAAQYPQTISVAASGALAAKARRGEHSGRVPFGFKKEGKFLAINEEEAKVVRFIFDLHNNHGYGHKRIVLKLNEELALGNIVKPQKTEFWQLSTVQTILKNPIYCGVFIANRHTQVKIGGRKKFIRNPKEKWTVYKDWCPKIISEEEYEKANNKEHKMRKKRFNPRNELRGMMKCGVCGCNMVVLPSYKYNQKREKKEFNYLKCSAYRRGGTALCVNHAPMQYKDLRAFVIKTLKQKGKKLKLDVKSDFEEQKKNRIKRTKIEIENAENKKKRLIELYLEDQLITKAEFQAKRKELEEQIEKLNDKLFMLEREEEETIDISNIKNAFAQLERTDQDLFEAFSALIDKIVIYEDGTVDFHYKFK

SEQ ID NO: 48457 - DNA, 50 bp, Bacillus subtilis; identical to SEQ ID NO: 48402
  source 1..50: mol_type = genomic DNA

SEQ ID NO: 48458 - DNA, 40 bp, Bacillus subtilis; identical to SEQ ID NO: 48403
  source 1..40: mol_type = genomic DNA

SEQ ID NO: 48459 - DNA, 50 bp, Bacillus subtilis; identical to SEQ ID NO: 48404
  source 1..50: mol_type = genomic DNA

SEQ ID NO: 48460 - DNA, 40 bp, Bacillus subtilis; identical to SEQ ID NO: 48405
  source 1..40: mol_type = genomic DNA

SEQ ID NO: 48461 - protein, 507 aa, Bacillus subtilis; identical to SEQ ID NO: 48411

SEQ ID NO: 48462 - DNA, 50 bp, Bacillus subtilis
  source 1..50: mol_type = genomic DNA
agtttgcgatagatatgcatatcaaatgagatgcataccggtcgcaaact

SEQ ID NO: 48463 - DNA, 40 bp, Bacillus subtilis; identical to SEQ ID NO: 48403
  source 1..40: mol_type = genomic DNA

SEQ ID NO: 48464 - DNA, 50 bp, Bacillus subtilis
  source 1..50: mol_type = genomic DNA
agtttgcgatagatatgcatatcacttgagatgcataccggtcgcaaact

SEQ ID NO: 48465 - DNA, 40 bp, Bacillus subtilis; identical to SEQ ID NO: 48405
  source 1..40: mol_type = genomic DNA

SEQ ID NO: 48466 - protein, 507 aa, Bacillus vallismortis
MFFKETETQEIIKYEDYPYAVYARVSSEKDEQVTSIANQIDICHHWIEKNNYEWKDEAIQLDDGISGTVLLDRKAMQLILDKAQKRKLKMVVFKSISRLARDLKDALEIREVLLAHGVRVVTLEEGYDSLYEGKNSMKFEMFSMFAAQYPQTISVAASGALAAKARRGEHSGRVPFGFKKEGKFLAINEEEAKVVRFIFDLHNNHGYGHKRIVLKLNEELALGNIVKPQKTDFWQLSTVQTILKNPIYCGVFIANRHTQVKIGGRKKFIRNPKEKWTVYKDWCPKIISEEEYEKANNKERKMHKKRFNPRNELRGMMKCGVCGCNMVVLPSYKYNQKREKKEFNYLKCSAYRRGGTALCVNHAPMQYKDLRAFVIQTLKQKGKKLKLDVKSDFEEQKKNRIKRTKIEIENAENKKKRLIELYLEDQLITKAEFQVKRKELEEQIEKLNDKLFMLEREEEETIDISNIKNAFAQLERTDQDLFEAFSSLIDKLVVYEDGTIDFHYKFK

SEQ ID NO: 48467 - DNA, 50 bp, Bacillus vallismortis
  source 1..50: mol_type = genomic DNA
agtttgcgatagatatgcatatcaaatgccatgcatatcggtcgcaaact

SEQ ID NO: 48468 - DNA, 40 bp, Bacillus vallismortis; identical to SEQ ID NO: 48403
  source 1..40: mol_type = genomic DNA

SEQ ID NO: 48469 - DNA, 50 bp, Bacillus vallismortis
  source 1..50: mol_type = genomic DNA
agtttgcgatagatatgcatatcacttgccatgcatatcggtcgcaaact

SEQ ID NO: 48470 - DNA, 40 bp, Bacillus vallismortis; identical to SEQ ID NO: 48405
  source 1..40: mol_type = genomic DNA

SEQ ID NO: 48471 - protein, 461 aa, Staphylococcus hominis
MNVAIYCRVSTLEQKEHGYSIEEQERKLKSFCEINDWNVADVFVDAGFSGAKRDRPELQRMMNNIKRFDLVLVYKLDRLTRNVRDLLDLLEIFEQNNVAFRSATEVYDTSTAMGRLFVTLVGAMAEWERETIRERTQMGKLAALKKGIMLTTPPFYYDRVDNKFVPNKYKEVVLFAYEEALKGKSAKSIARKLNNSDIPPPNNRKWEDRSITRALRSPFTRGHFEWGGVYLENNHEPIITEEMYEKVKDRLEERTNTKKIKHVSIFRSKLVCPTCHNKLTMNTHKVTLKDRVYYNKHYYCNNCKETPNAKPVYIRAEEVERVFYEYLQHQDLTQYEVVEDTEEKEVAIDINKVMQQRKRYHKLYANGLMNEDELAELIEETDAAIEEYKKQNENKEVKQYSDEDITEYKSLLLEMWEISSDEEKAEFIQMAIKNIFIEYVLGKNDNKKKRRSLKIKDIEFY

SEQ ID NO: 48472 - DNA, 50 bp, Staphylococcus hominis
  source 1..50: mol_type = genomic DNA
ttatggaagtatgcacaattagccaatgtatagtgtgtgtacttccatat

SEQ ID NO: 48473 - DNA, 40 bp, Staphylococcus hominis
  source 1..40: mol_type = genomic DNA
ttatggcggtacatgcataaaccatggctgtattccatct

SEQ ID NO: 48474 - DNA, 50 bp, Staphylococcus hominis
  source 1..50: mol_type = genomic DNA
ttatggaagtatgcacaattagccagtgtatagtgtgtgtacttccatat

SEQ ID NO: 48475 - DNA, 40 bp, Staphylococcus hominis
  source 1..40: mol_type = genomic DNA
ttttggggacacacgctgaagccatggcagtattctaact

SEQ ID NO: 48476 - protein, 548 aa, Mycobacterium intracellulare; identical to SEQ ID NO: 9226

SEQ ID NO: 48477 - DNA, 50 bp, Mycobacterium intracellulare; identical to SEQ ID NO: 17512
  source 1..50: mol_type = genomic DNA

SEQ ID NO: 48478 - DNA, 40 bp, Mycobacterium intracellulare
  source 1..40: mol_type = genomic DNA
gcctcagtcgtgtgtccgaggggggacttgaacccccacg

SEQ ID NO: 48479 - DNA, 50 bp, Mycobacterium intracellulare
  source 1..50: mol_type = genomic DNA
agtcgtgtcgccggacgtgtccgagcggggacttggccacttacgacacg

SEQ ID NO: 48480 - DNA, 40 bp, Mycobacterium intracellulare
  source 1..40: mol_type = genomic DNA
gcctaagtcaagtggccgagctgggatttgaaccctaagc

SEQ ID NO: 48481 - protein, 547 aa, Mycobacterium intracellulare; identical to SEQ ID NO: 18566

SEQ ID NO: 48482 - DNA, 50 bp, Mycobacterium intracellulare
  source 1..50: mol_type = genomic DNA
agtcgtgtcgccggatgtgtccgaggggggagttgtccacctgcgacacg

SEQ ID NO: 48483 - DNA, 40 bp, Mycobacterium intracellulare; identical to SEQ ID NO: 48478
  source 1..40: mol_type = genomic DNA

SEQ ID NO: 48484 - DNA, 50 bp, Mycobacterium intracellulare
  source 1..50: mol_type = genomic DNA
agtcgtgtcgccggatgtgtccgagcggggagttgtccacctgcgacacg

SEQ ID NO: 48485 - DNA, 40 bp, Mycobacterium intracellulare; identical to SEQ ID NO: 48480
  source 1..40: mol_type = genomic DNA

SEQ ID NO: 48486 - protein, 548 aa, Mycobacterium colombiense; identical to SEQ ID NO: 441

SEQ ID NO: 48487 - DNA, 50 bp, Mycobacterium colombiense; identical to SEQ ID NO: 442
  source 1..50: mol_type = genomic DNA

SEQ ID NO: 48488 - DNA, 40 bp, Mycobacterium colombiense; identical to SEQ ID NO: 48478
  source 1..40: mol_type = genomic DNA

SEQ ID NO: 48489 - DNA, 50 bp, Mycobacterium colombiense
  source 1..50: mol_type = genomic DNA
agtcgtgtcgccggatgtgtccgagcggggacttgtccgtctacgacacg

SEQ ID NO: 48490 - DNA, 40 bp, Mycobacterium colombiense; identical to SEQ ID NO: 48480
  source 1..40: mol_type = genomic DNA

SEQ ID NO: 48491 - protein, 536 aa, Clostridium botulinum
MKAAIYSRKSKFTGKGDSIENQVQMCKEYMNRNYLGQNHQFEIFEDEGFGGGDTNRPEFQKLLEEIKSKKFDVLVCYRLDRISRNVSDFSSTLELLQEYNVDFISIKEQFDTSTPMGRAMVYISSVFAQLERETIAERVRDNMLELAKSGRWLGGTPPIGFKSKRITYLDGEYKERSLVQLVPDPKKLEFIKFISDKYEEVGSVHKIRKYYLQNNIKTKNGSDYSLRLLADTLRNPAYVRADKNVSGYLESKGINVVGNTNNKNGILVYNKKDKKNKQKDKSEWIAAVAKHEGIIDATRWLKIQKTLDQNGFNKARGTSKVALLTGIIRCKHCGSPMRITYSNKNKSGEKNHYYACNMKFASGGTRCTNKNLNGARAEQIIIDKIKELTKNKGMLIKELKKTQSELNTSSSKSEIEILNKKITGNESSIKNLVKQLSQNQNSIASKYIISEIENLNNETEQLKSNLEKLKNKNSEVEMTEVDLELIISNLSKFGELIDKADNNQKKYLISSIVDTIYWDADTGELEIDFFGKRKKK

SEQ ID NO: 48492 - DNA, 50 bp, Clostridium botulinum
  source 1..50: mol_type = genomic DNA
tatcgcaattttgttccacgagcagtaggtcgtgggacaaacttgcgaca

SEQ ID NO: 48493 - DNA, 40 bp, Clostridium botulinum
  source 1..40: mol_type = genomic DNA
tgtagatttaccacttcccgtcggaccactaatcaaaatt

SEQ ID NO: 48494 - DNA, 50 bp, Clostridium botulinum
  source 1..50: mol_type = genomic DNA
tatcgcaattttgttccacgagcattaggtcgtgggacaaacttgcgaca

SEQ ID NO: 48495 - DNA, 40 bp, Clostridium botulinum
  source 1..40: mol_type = genomic DNA
taatgatttaccacttcccttcgtataactctttataatt

SEQ ID NO: 48496 - protein, 496 aa, Cytobacillus oceanisediminis
MIAIYARVSTEDQLKGYGINNQIDECLKKIKNQEHMLFKDEGISGEIIDRPGLTLLRENVQAGIIDEVVCYDPDRLSRKLMHQLMIDDEFRKKGVRVVFVNGEYAQSPEGQLFFSMRGAISEFEKEKIKQRTKGGKLRKAREGKVLGNYGLYGYDYDREKKSYKINEEQAKVVKMIFDYFTEPTSPFKGINGIARHLTDMGIPTAKNGKVWHRQVVRQMLMNISYTGKHPHNRYDTEGDYVRKQSGQTTQQKIRPEDEWIYVDIPQIISEDQYNMAQDLLKESRRRYAKDSLHDYLLSGLLRCKDCNNTMTGARASWWGEKVFIYTDVKNYSGAKNKGCGNQIHTSKLDDVVWEHVHHLLNNPDEISTFKQSKKVTAMFENELKQLEKELEKNKKGRQRLISLVAQSDDLDLSDIQEQLEEMKSKEKSLQKKYTQLEKDLKAAKGESNEDMITSAIRYYTENKDSLNFEDKKAIIRQMVKQIYVSKDHEEVDIHLF

SEQ ID NO: 48497 - DNA, 50 bp, Cytobacillus oceanisediminis
  source 1..50: mol_type = genomic DNA
tgcaatactaatgacattaggaatgaaatctctatgtcattagtatagct

SEQ ID NO: 48498 - DNA, 40 bp, Cytobacillus oceanisediminis
  source 1..40: mol_type = genomic DNA
agcccgctgtattgaaaatgagatactgatgcacttgcgg

SEQ ID NO: 48499 - DNA, 50 bp, Cytobacillus oceanisediminis
  source 1..50: mol_type = genomic DNA
tgcaatactaatgacattaggaatataatctctatgtcattagtatagct

SEQ ID NO: 48500 - DNA, 40 bp, Cytobacillus oceanisediminis
  source 1..40: mol_type = genomic DNA
agcacgtgctgttgaaaaaatgatgctgatagacttgctg

SEQ ID NO: 48501 - protein, 525 aa, Longicatena caecimuris
MTDHRKTAVYIRLSAEDDNVDGRAKKESDSVTSQRILLKSFVIDQLGVAESDILEYVDDGVSGTHFKRQGFQQLQDDMKSGEIGCVVVKDFSRFGRDYLEVGFYIEYIFPLLQIRFISINDSYDSAASSGMTGGMNVALQNLVYNMYSLDLSKKISSALQTRTRNGTRLPVNARYGYKKGKDGRLEVDPEAAKVVKMIFRMAAEGTSFADITRELNRQEIVTCDEQKLSRGDQVQFQRFETIKKKHWSPTTVAAIVRDEIYIGTRIWGKTRCSMHTGHKAVLNDETEWVRLENHHTAIIDRQLFEKANEMHPKKKRSVAESRTNFTLERRKKQPALLLCANCGHSLLKETEHLLKCSDARTNGDPVCRSLVIRREPLEENILGLVHQYAASMLEKEKKVSYNRQCDYKEINTAELQKQSRQLTSEKMKLYDDYKDGRMDRDLYKQRAEKISGQLDEIKRKIEDAENSKKFLEQNELSDKIKLKDFLGIQKFDTEKLREIIKVIRVHSQDEIEIEWNFDDIFSEQR

SEQ ID NO: 48502 - DNA, 50 bp, Longicatena caecimuris; identical to SEQ ID NO: 47427
  source 1..50: mol_type = genomic DNA

SEQ ID NO: 48503 - DNA, 40 bp, Longicatena caecimuris
  source 1..40: mol_type = genomic DNA
tttaccaaatgttacaccgcatatcttacgccatacgttc

SEQ ID NO: 48504 - DNA, 50 bp, Longicatena caecimuris
  source 1..50: mol_type = genomic DNA
tttgtcctatacttgacacatccaaatggtcgagttataataaggacaag

SEQ ID NO: 48505 - DNA, 40 bp, Longicatena caecimuris
  source 1..40: mol_type = genomic DNA
tttaccacatggtttactgaatattttaagcccaacgttg

SEQ ID NO: 48506 - protein, 585 aa, Clostridium scindens
MAYAALRKAGLVPAAAPDLRTVALYVRVSTGYQVDKDSLPFQKKELKNYCKHVLHIDESRIEIFEDAGKSGKNTNRPAFERMMKKVRAGQISHVIVYKIDRISRNLVDFSLMYDDFKYNRVTFISLNEQFDTSSAIGEAVLKIILVFAELERKLASERVMDIMIGRALSGQWNGARVPFGWDWDEEAKFPKHSEVEAVFGRLMYDMYEETRSTCKVRDYNNTHDIPTKRGGEWTSKTVADFIRNPINRGDYRYNYRESARGRKKPEEEVIYLEGVFPPLVPPEQWDRCNAIMDENAAKKRSAGFSHKRIHVHAFAGLLVCGDCGAFFQVIKKDKTRENGFSPSLYRCGARYRKRACNSPGCSDVVLGPFVFNYISGMVRVASMRSKISSPEELEQLLLTGPEFEAVAGIASEGLNATFALLSGRPATGGAAYVPDLLAAPSGCINTGEVEELKQKITRIERALERLKKAFLFDDQAMGEKEYLETKLALETERIAAENRMKDLNEATFSTDAGELAFIKSASSFLLAHQIQTGEHIQYSDFAPLVGDETMKEFLNLVIERIVIQNGRPVEITFKNGLTHKFLYRD

SEQ ID NO: 48507 - DNA, 50 bp, Clostridium scindens
  source 1..50: mol_type = genomic DNA
gtcacgggtacgaagttcatttgacagccaaacgtcctcgcacacgcgaa

SEQ ID NO: 48508 - DNA, 40 bp, Clostridium scindens
  source 1..40: mol_type = genomic DNA
atctctggcattcatctggcagccgaaggtggtcacgcag

SEQ ID NO: 48509 - DNA, 50 bp, Clostridium scindens
  source 1..50: mol_type = genomic DNA
gtcacgggtacgaagttcatttgagggccaaacgtcctcgcacacgcgaa

SEQ ID NO: 48510 - DNA, 40 bp, Clostridium scindens
  source 1..40: mol_type = genomic DNA
ctctctggcattaacctgggggccggaggggctccctgaa

SEQ ID NO: 48511 - protein, 595 aa, Cronobacter turicensis; identical to SEQ ID NO: 14036

SEQ ID NO: 48512 - DNA, 50 bp, Cronobacter turicensis
  source 1..50: mol_type = genomic DNA
taaacgttgatcgattgcgaacagttgtgatacaatgtacgccaagaaaa

SEQ ID NO: 48513 - DNA, 40 bp, Cronobacter turicensis
  source 1..40: mol_type = genomic DNA
catcagcagcagcgagcagtcggtggtgccgccgccgata

SEQ ID NO: 48514 - DNA, 50 bp, Cronobacter turicensis
  source 1..50: mol_type = genomic DNA
taaacgttgatcgattgcgaacaggagtgatacaatgtacgccaagaaaa

SEQ ID NO: 48515 - DNA, 40 bp, Cronobacter turicensis
  source 1..40: mol_type = genomic DNA
cagcagcagcagccctggggaggtggagccgcccccgttc

SEQ ID NO: 48516 - protein, 522 aa, Aeromonas hydrophila
MTAFSYIRFSTKDQAQGDSYQRQIASSRDWCKQRGIELSGKGYADLGISAFTEKTRASLADMLEAIQLGTIKAGDWIILENLDRLSRQGIDKTQEIIKSILRHGVKIVSLQDGLELDSGSLNDLVAVIRIALSADLAHKESLKKSERVSAAKASQRELAKQGKAIGKRLPYWLERDGYSYQFNDGVDAVRLMIQLRTDGLGFHKIAMALNASEFKPRWADHWSDTTIRNILSSPALYGRYQFRDGDGVDDYYPALVSYAVFKAFQSTFTASAGGQEHHNHLFGLVRCGACGGAMSKKVSKRKVAGEWKHYKGWICTKTLSGACAQKSPMMDLDTLVIRAVKRLKVSDSKKVSREANQLDQEIDTKKARLDEITQALVSGNGSVSVLSAAASTLERELKDLLVQRKDSVTTSQSEIQTLYDLRDDPKLFNVALRRVVDRITVSHKGSSTWHVAIHQRNGHLISVAAFRKSQRSPWQYLFGNTAEIGSKSGLEEWGTDEVSANPEYWETGITNPEYEHKEVCDD

SEQ ID NO: 48517 - DNA, 50 bp, Aeromonas hydrophila
  source 1..50: mol_type = genomic DNA
ttttcccactaaattaagttgactgtgatatactgtttctagtggagaac

SEQ ID NO: 48518 - DNA, 40 bp, Aeromonas hydrophila
  source 1..40: mol_type = genomic DNA
ggcgggggccagattgaccgtgatgtgtttgctcgggaac

SEQ ID NO: 48519 - DNA, 50 bp, Aeromonas hydrophila
  source 1..50: mol_type = genomic DNA
ttttcccactaaattaagttgactttgatatactgtttctagtggagaac

SEQ ID NO: 48520 - DNA, 40 bp, Aeromonas hydrophila
  source 1..40: mol_type = genomic DNA
ggcggggtccagccttaccttggtggttttcctctggaat

SEQ ID NO: 48521 - protein, 526 aa, Aeromonas hydrophila
MTIAYSYIRFSTAAQREGDSVNRQIAASREWCRQRGIELSDKTYEDLGVSAYRDKKRVDLAAMLEAVEMGTIKENDYIILESLDRLSRQGIDKTQEIIKSILRHGVKIVSLQDGLELDTSSVNDLVSVIRIALSADLAHKESLKKSERVAAAKQAQREQAKRGKAINKRLPYWLEKDGDGYQFNEGVDAVRLMIQLRTDGLGFHKIAMALNASEFKPRWADHWSDTTIRNILSSPALYGRYQFRDGDGVDDYYPALVSYAEFKSFQSTYTASAGGQEHHNHLFGLVRCGACGAAMSKKVSKRKVAGEWKHYKGWICTKTLSGACTQKSPMMDLDTLVIKAVKRLKVSDSKKVSREANQLDREIDTKKARLDEITQALVSGSGSVSVLSAAASTIDKELKELLAQRKDSVRTSKDEIQALYGLRDDPERFNIALRRVVDRIKVFHKGDSTWHVAIHQRNGHLISVAAFRKSQRSPWEYMFGNTSEMELIGAVVELEPWEMVEESMNPEDWETGITNPDYEHKEVCED

SEQ ID NO: 48522 - DNA, 50 bp, Aeromonas hydrophila
  source 1..50: mol_type = genomic DNA
gatctccactaaaataagttaatggtggtatacttcttttcgtggagaac

SEQ ID NO: 48523 - DNA, 40 bp, Aeromonas hydrophila; identical to SEQ ID NO: 48518
  source 1..40: mol_type = genomic DNA

SEQ ID NO: 48524 - DNA, 50 bp, Aeromonas hydrophila
  source 1..50: mol_type = genomic DNA
gatctccactaaaataagttaatgttggtatacttcttttcgtggagaac

SEQ ID NO: 48525 - DNA, 40 bp, Aeromonas hydrophila; identical to SEQ ID NO: 48520
  source 1..40: mol_type = genomic DNA

SEQ ID NO: 48526 - protein, 548 aa, Aeromonas salmonicida
MQKIIYPYVRFSSEKQSAGHSHERQIEKIKEYASVNGYEVNDTLNLRDLGVSAFKGKNAEKGALAAFLKMVEDGTIPTDGTSYLCIEQFDRLSRQTVDEAYSLFRKILISNVNIITLMDEKVYTKKSLNEMVSIISSLLLMEQANVESDKKSKRVSAVFKKKLEKLRNGEKIQFAYMLPGWIDNIGTKQDPNFIINDQVKTVRMIIDMYLGGETMGHIARILNEKQIPQFARKKTKNAISSWNSGKISHLLVNRCLIGDLKISKTGEVIKDYYPSVISKDEWDIIQSTKRTNATIKVAGRKTINIFQGRLFCADCGNKYYFETDDKTGKNGKKYIYHMLKCSGRRFHSCDSKSIKYDDLTSNNLFFFEKVLDQKTEDYYNKIKLEISQFENQIEELKKEQNELDLLLNNKSINFTAHAIANSKILDQIDILEKDIALNKQHIAFTMNTNMIDKFDKNDPVSVAKAKKFIKDNYAGVLISSKYGTIISLMKSGQFIINPIPNRFDDSIPKASLQLFEIKEQIQNQDKKGLLDGKLKELLDAFNFLDRFE

SEQ ID NO: 48527 - DNA, 50 bp, Aeromonas salmonicida
  source 1..50: mol_type = genomic DNA
ttccctttaatactaaagttaatagtgataaacttgagctttaacgggaa

SEQ ID NO: 48528 - DNA, 40 bp, Aeromonas salmonicida
  source 1..40: mol_type = genomic DNA
ggcgggggccaggttgaccgtgatgtgtttgctcgggaac

SEQ ID NO: 48529 - DNA, 50 bp, Aeromonas salmonicida
  source 1..50: mol_type = genomic DNA
ttccctttaatactaaagttaatattgataaacttgagctttaacgggaa

SEQ ID NO: 48530 - DNA, 40 bp, Aeromonas salmonicida; identical to SEQ ID NO: 48520
  source 1..40: mol_type = genomic DNA

SEQ ID NO: 48531 - protein, 548 aa, Mycobacteroides saopaulense; identical to SEQ ID NO: 38736

SEQ ID NO: 48532 - DNA, 50 bp, Mycobacteroides saopaulense; identical to SEQ ID NO: 38737
  source 1..50: mol_type = genomic DNA

SEQ ID NO: 48533 - DNA, 40 bp, Mycobacteroides saopaulense
  source 1..40: mol_type = genomic DNA
ggcggatcgtgtgtgtccgaggggggacttgaacccccac

SEQ ID NO: 48534 - DNA, 50 bp, Mycobacteroides saopaulense
  source 1..50: mol_type = genomic DNA
gagtcgtgtcgccaaatgtgtccgacgggggacttgtccgtctacgacac

SEQ ID NO: 48535 - DNA, 40 bp, Mycobacteroides saopaulense
  source 1..40: mol_type = genomic DNA
tgcagctcttgagtggcacacctgggacttgaacccccac

SEQ ID NO: 48536 - protein, 583 aa, Nocardia cyriacigeorgica
MVSAYVGPGNDADDDLASELPSLPAPLKAGDRAVIYLRVSSPGQFKTDYDPEGISIPAQRVACQNKANQLGLTIVDEYIEPGRSATEMSKRVEFQKLLARIRNHQDVDYVIVYKLSRMARNRFDDAIVMADLRKRNVTLVSATESIDDSPVGQLMHGILATFNEYQSRESGADISYKMGQKARNGGTLGRARLGYLNIFDRFDGREIRTIGVDPERAPLVQLAFQLYATGDYTLDELSEELYDRGLRTRPTHRHPAQRVSKNKLSTMLRDRYYLGYVIYKGEEMQGRHEPLIDENLFDNVQEILESRTNAHERRRVHHHYLKGSLFCGRCQRTGTVGRMIIQRTTNRHGNEYLYFFCRNKQKGTCNAPHINVALVEDAVEAHYATIRFRSDFITSIRNQIAEAINAQETADRLLQKQLTTELQALDAQEENLIDLAADATLPQPKIKAKLRDIAHQRRRLTERLATTTEDLSSSARLIDAALTLLENPQELYRRCNEHQRRLFNQAIFQQLYIDDEQINGHRLHEPFGQLHAAQRAQAGTCGATRHKTSRDAPESGNSRMKGGVGVLLQGVHSAPGSSSDPMV

SEQ ID NO: 48537 - DNA, 50 bp, Nocardia cyriacigeorgica
  source 1..50: mol_type = genomic DNA
gggttctagtagtgaccctatggtggaccttgggggaccttactacaacc

SEQ ID NO: 48538 - DNA, 40 bp, Nocardia cyriacigeorgica
  source 1..40: mol_type = genomic DNA
gccttgtatcgagtggagtggagctaaggggactcgaacc

SEQ ID NO: 48539 - DNA, 50 bp, Nocardia cyriacigeorgica; identical to SEQ ID NO: 48537
  source 1..50: mol_type = genomic DNA

SEQ ID NO: 48540 - DNA, 40 bp, Nocardia cyriacigeorgica
  source 1..40: mol_type = genomic DNA
gccatggatagactgggagggagcaaaggggacttgagcc

SEQ ID NO: 48541 - protein, 573 aa, Gordonia sihwensis
MNDSTTTGPQVAVSYLRVSTTRQMDTGADVDAEGNSIATQREANNAKAARMGAIIEKEFVEPGASAQTIDKRPVFKQLLAYLGEHPDVSLVIIYMRSRAFRNLGDAVITKRRLEAMGVKLVSAKEDFGEGIMADAMEAVTDIINEVQVRMSGEDIKVKMRHKAQMGGTNGRAPIGYRNVRIEHNGRQVNGIAVDEERAPLIKQAFEMYATGDYSIDRLQEAMADLGLRARPQGRGGAKELSRSHLHRMISDPYYIGIVRYKGETFPGRHQPIISADLFERVQKVIEDRSARGQRDRVHYHYLKGLLYCERCRAEGRTSRLVYTEAKGNGGNYAYYLCLARQRGECDLPHLPVADIEWHVLNHYAKLGLPSKFLDYIREAIDRAMADAQAHVRGLHVTYRKKLDKLAQQEERLLDLAADGDLAPDKIRVRLRKIQTERTRAQQGLDDTGEQLELGARKLQQYLDLLDDPQSLYVRAPEDGRRDLNTASFNKLWLDDAGVVTDELTPAISELHEAARAFTHHNSASKVDCATDNQQGSDEGETQKLPGDSREFGLNHRFRLTDMFRVGSSKNVLV

SEQ ID NO: 48542 - DNA, 50 bp, Gordonia sihwensis
  source 1..50: mol_type = genomic DNA
cgtgtcggttcgagtaagaacgttctggtgcacacactgggacggtactc

SEQ ID NO: 48543 - DNA, 40 bp, Gordonia sihwensis
  source 1..40: mol_type = genomic DNA
ccgggtacaggggcgactgctggtgcgcgagaagggactt

SEQ ID NO: 48544 - DNA, 50 bp, Gordonia sihwensis
  source 1..50: mol_type = genomic DNA
cgtgtcggttcgagtaagaacgttagggtgcacacactgggacggtactc

SEQ ID NO: 48545 - DNA, 40 bp, Gordonia sihwensis
  source 1..40: mol_type = genomic DNA
ctggggaaaggggtgaatgaggggaccagagaagggagtt

SEQ ID NO: 48546 - protein, 496 aa, Mycobacteroides abscessus
MGARVSVLSGPQKVSHEAQIDTATKWAKAHDYPVVGAFEDLGVSASVPPDERPDLGPWIRVRSHEWEVIVWSKLDRAFRSMRHCSDFIKWAETNKKIVVFAEDGMTLNYLNPSKGIDSILGELFVQIAAAFAQIELNRFKSRAEDMHRAIRPTTRWAAGLPPLGYQVVDHPSGRGKGLAIDTDAANLVREMADKLVDGWSFVRITEWLNESGKLTSQGRSRKARGLEPKGRWTTTNVVEILTGYRTLGIKTHKGQPVLDDNGEPIRLAPPLFTPERWDEVQRAAQLRKGKPRTPSETANPMLEVGFCAVCGSSLAQQFAKSRPRKSDGHVIQYRYYRCSRTPINCRSVFVVADELDELLSEQFLLECGDRRVTERVFIPGEDNSYELNSINDRIEQLREDRASGLFPSGEDELVFRNQMKRLLARRDELASVPVRHPGYEVIELEKTYREAWPDATPEEKRKMLIDAEISIRLGESPGKSVCADLVVGRPYPKLDA

SEQ ID NO: 48547 - DNA, 50 bp, Mycobacteroides abscessus
  source 1..50: mol_type = genomic DNA
cttctcataggtgtacttctcgatcaacagtaacgtacagtcttgaagta

SEQ ID NO: 48548 - DNA, 40 bp, Mycobacteroides abscessus
  source 1..40: mol_type = genomic DNA
gatagcgatgctcctggatcagcagattccgatggaggtt

SEQ ID NO: 48549 - DNA, 50 bp, Mycobacteroides abscessus
  source 1..50: mol_type = genomic DNA
cttctcataggtgtacttctcgatggacagtaacgtacagtcttgaagta

SEQ ID NO: 48550 - DNA, 40 bp, Mycobacteroides abscessus
  source 1..40: mol_type = genomic DNA
gctatcaaagcccctggatgggctaattccagtgcaggtt

SEQ ID NO: 48551 - protein, 509 aa, Mycobacteroides abscessus
MGARVSVLSGPQKVSHEAQIDTATKWATAHDYPVVGSFEDLGVSASVPPDERPELGPWIRERSHEWQVIIWSKLDRGFRSMRHCSDFIKWAESNRKIVVFAEDGLTLNYLNPASVVESTLSELFVSMAAAFAQIELNRFKSRAEDMHRAIRPTTRWAAGLPPLGYQVVDHPSGRGKGLAIDPDAANLVREMADKLVDGWSFVRITEWLNESGKLTSQGRSRKARGLEPKGRWTTTNVIEILTGYRTLGIKTHKGQPVLDDSGEPIRLAPPLFTPERWDEVQRAAQLRKGKPRTPSDTSNPMLGVGYCGAPCSHKRSGSECPGDCQGICGSSLAQQFSKTRPRKSDGHVTFYRYYRCSRTPINCKAVFVVADDLDELLSEQFLLERGDRRVTERVFIPGEDNSYELDFIKDRIERLREDRVSGLYPSGEDELVFRNQMKQLLARRDELASVPVRQPGYENVELEKTYREVWPGATPEEKRKMLIDAEISIRLGESPGKSLRAELVIGTPY

SEQ ID NO: 48552 - DNA, 50 bp, Mycobacteroides abscessus
  source 1..50: mol_type = genomic DNA
cttctcataggtgtacttctcgatcaacagtagcatacactcttgaaaca

SEQ ID NO: 48553 - DNA, 40 bp, Mycobacteroides abscessus; identical to SEQ ID NO: 48548
  source 1..40: mol_type = genomic DNA

SEQ ID NO: 48554 - DNA, 50 bp, Mycobacteroides abscessus
  source 1..50: mol_type = genomic DNA
cttctcataggtgtacttctcgatggacagtagcatacactcttgaaaca

SEQ ID NO: 48555 - DNA, 40 bp, Mycobacteroides abscessus; identical to SEQ ID NO: 48550
  source 1..40: mol_type = genomic DNA

SEQ ID NO: 48556 - protein, 495 aa, Mycobacteroides abscessus
MGARVSVLSGPQKVSHEAQIDTATKWAKAHDYPVVGAFEDLGVSASVPPDERPDLGPWIRERSHEWEVIIWSKLDRAFRSMRHCSDFIKWAETNRKVVVFAEDSMTLNYLNPSTGIDSILGELFVQIAAAFAQIELNRFKSRAEDMHRAIRPTTRWAAGLPPLGYQVVDHPSGRGKGLAIDSDAANLVREMADKLVDGWSFVRITEWLNESGKLTSQGRSREARGLEPKGRWTTTNVIEILTGYRTLGIKTHKGQPVLDDDGEPVRLAPPLFTPERWDEVQRAAQLRKGKPRTPSETANPMLEVGFCAVCGSSLAQQFAKSRPRKSDGHVIHYRYYRCSRTPINCKAVFVVADDLDELLSEQFLLERGDRRVTERVFIPGEDNSYELDFIKDRIERLREDRVAGLFPSGEDELVFRNQMKQLLARREELESVPVRQPGYENVELEKTYREVWPGATPEEKRKMLIDAEISIRLGESPGKSLRAELVVNCMSATPD

SEQ ID NO: 48557 - DNA, 50 bp, Mycobacteroides abscessus
  source 1..50: mol_type = genomic DNA
cttctcataggtgtacttctcgatcaacagtagcatacactcttgaaata

SEQ ID NO: 48558 - DNA, 40 bp, Mycobacteroides abscessus; identical to SEQ ID NO: 48548
  source 1..40: mol_type = genomic DNA

SEQ ID NO: 48559 - DNA, 50 bp, Mycobacteroides abscessus
  source 1..50: mol_type = genomic DNA
cttctcataggtgtacttctcgatggacagtagcatacactcttgaaata

SEQ ID NO: 48560 - DNA, 40 bp, Mycobacteroides abscessus; identical to SEQ ID NO: 48550
  source 1..40: mol_type = genomic DNA

SEQ ID NO: 48561 - protein, 510 aa, Mycobacteroides abscessus
MGARVSVLSGPQKVSHEAQIDTATKWAKAHDYPVVGAFEDLGVSASVPPDERPDLGPWIRERSHEWEVIIWSKLDRAFRSMRHCSDFIKWAETNRKVVVFAEDSMTLNYLNPSTGIDSILGELFVQIAAAFAQIELNRFKSRAEDMHRAIRPTTRWAAGLPPLGYQVVDHPSGRGKGLAIDSDAANLVREMADKLVDGWSFVRITEWLNESGKLTSQGRSREARGLEPKGRWTTTNVIEILTGYRTLGIKTHKGQPVLDDSGEPIRLAPPLFTPERWDEVQRAAQLRKGKPRTPSDTSNPMLGVGYCGAPCSHKRSGSECLGDCQGICGSSLAQQFSKTRPRKSDGHVTFYRYYRCSRTPINCKAVFVVADDLDELLSEQFLLERGDRRVTERVFIPGEDNSYELDFINQRIELLREDRASGLFPSGEDELVYRNQMKQLLARRDELASVPVRQAGYENVELEKTYREVWPGAAPEDKRKMLIDAEISIRLRESPGKSIRAEMIVGSPYT

SEQ ID NO: 48562 - DNA, 50 bp, Mycobacteroides abscessus; identical to SEQ ID NO: 48557
  source 1..50: mol_type = genomic DNA

SEQ ID NO: 48563 - DNA, 40 bp, Mycobacteroides abscessus; identical to SEQ ID NO: 48548
  source 1..40: mol_type = genomic DNA

SEQ ID NO: 48564 - DNA, 50 bp, Mycobacteroides abscessus; identical to SEQ ID NO: 48559
  source 1..50: mol_type = genomic DNA

SEQ ID NO: 48565 - DNA, 40 bp, Mycobacteroides abscessus; identical to SEQ ID NO: 48550
  source 1..40: mol_type = genomic DNA

SEQ ID NO: 48566 - protein, 509 aa, Mycobacteroides abscessus
MGARVSVLSGPQKVSHEAQIDTATKWATAHDYPVVGSFEDLGVSASVPPDERPELGPWIRERSHEWEVIIWSKLDRGFRSMRHCSDFIKWAETNRKIVVFAEDGLTLNYLNPASVVESTLSELFVSMAAAFAQIELNRFKSRAEDMHRAIRPTTRWAAGLPPLGYQVVDHPSGRGKGLAIDPDAANLVREMADKLVDGWSFVRITEWLNESGKLTSQGRSRKARGLEPKGRWTTTNVIEILTGYRTLGIKTHKGQPVLDDSGEPIRLAPPLFTPERWDEVQRAAQLRKGKPRTPSDTSNPMLGVGYCGAPCSHKRSGSECPGDCQGICGSSLAQQFSKTRPRKSDGHVTFYRYYRCSRTPINCKAVFVVADDLDELLSEQFLLERGDRRVTERVFIPGEDNSYELDFIKDRIERLREDRVSGLYPSGEDELVFRNQMKQLLARRDELASVPVRQPGYENVELEKTYREVWPGATPEEKRKMLIDAEISIRLGESPGKSLRAELVIGTPY

SEQ ID NO: 48567 - DNA, 50 bp, Mycobacteroides abscessus
  source 1..50: mol_type = genomic DNA
cttctcataggtgtacttctcgatcagcagtagcatacactcttgaaaca

SEQ ID NO: 48568 - DNA, 40 bp, Mycobacteroides abscessus; identical to SEQ ID NO: 48548
  source 1..40: mol_type = genomic DNA

SEQ ID NO: 48569 - DNA, 50 bp, Mycobacteroides abscessus
  source 1..50: mol_type = genomic DNA
cttctcataggtgtacttctcgatgggcagtagcatacactcttgaaaca

SEQ ID NO: 48570 - DNA, 40 bp, Mycobacteroides abscessus; identical to SEQ ID NO: 48550
  source 1..40: mol_type = genomic DNA

SEQ ID NO: 48571 - protein, 491 aa, Mycobacteroides abscessus; identical to SEQ ID NO: 39011

SEQ ID NO: 48572 - DNA, 50 bp, Mycobacteroides abscessus; identical to SEQ ID NO: 48557
  source 1..50: mol_type = genomic DNA

SEQ ID NO: 48573 - DNA, 40 bp, Mycobacteroides abscessus; identical to SEQ ID NO: 48548
  source 1..40: mol_type = genomic DNA

SEQ ID NO: 48574 - DNA, 50 bp, Mycobacteroides abscessus; identical to SEQ ID NO: 48559
  source 1..50: mol_type = genomic DNA

SEQ ID NO: 48575 - DNA, 40 bp, Mycobacteroides abscessus; identical to SEQ ID NO: 48550
  source 1..40: mol_type = genomic DNA

SEQ ID NO: 48576 - protein, 509 aa, Mycobacteroides abscessus; identical to SEQ ID NO: 48566

SEQ ID NO: 48577 - DNA, 50 bp, Mycobacteroides abscessus; identical to SEQ ID NO: 48552
  source 1..50: mol_type = genomic DNA

SEQ ID NO: 48578 - DNA, 40 bp, Mycobacteroides abscessus; identical to SEQ ID NO: 48548
  source 1..40: mol_type = genomic DNA

SEQ ID NO: 48579 - DNA, 50 bp, Mycobacteroides abscessus; identical to SEQ ID NO: 48554
  source 1..50: mol_type = genomic DNA

SEQ ID NO: 48580 - DNA, 40 bp, Mycobacteroides abscessus; identical to SEQ ID NO: 48550
  source 1..40: mol_type = genomic DNA

SEQ ID NO: 48581 - protein, 525 aa, Lachnospiraceae bacterium; identical to SEQ ID NO: 316

SEQ ID NO: 48582 - DNA, 50 bp, Lachnospiraceae bacterium; identical to SEQ ID NO: 47427
  source 1..50: mol_type = genomic DNA

SEQ ID NO: 48583 - DNA, 40 bp, Lachnospiraceae bacterium
  source 1..40: mol_type = genomic DNA
gatgcctcccatttcatcgcatacccttcgtcatacggga

SEQ ID NO: 48584 - DNA, 50 bp, Lachnospiraceae bacterium; identical to SEQ ID NO: 47427
  source 1..50: mol_type = genomic DNA

SEQ ID NO: 48585 - DNA, 40 bp, Lachnospiraceae bacterium
  source 1..40: mol_type = genomic DNA
ggtgcctcccagtacatctcatccacttcttcatctgtga

SEQ ID NO: 48586 - protein, 478 aa, Streptococcus suis
MITTNKVAIYVRVSTTSQAEEGYSIEEQLFSLRKYCEAMNWQVYHEYVDAGFSGGKLDRPEITQLIQDAKNKLFDTILVYKLDRLSRSVPDTLYLVRDVFGKRDIGFVSLQENIDTSSAMGNLFITLLSAIAEFEREQITERMEMGKLGRAKSGKTMAWRVTAFGYDYNKETGNLELDPVKAPLVKMVFDEYMQGTSIDNIAEKMNSLDYTGKERPWAHHGVASLLDNPVYYGMNRYKDKIYKGNHEPVITKELFDLVQKERERRRQGTPESHNTPPWQRKYFATKVCRCGLCGERMKLDRGKKRKKDGFTPMVYYCKNSRPYRSATCHNVLYQRDIVEDYIIREVAKIQNNPNILKRGEYRTKEYELERQRKRLNETIKRNTDKLSKLNNLYLNDLITLEDLKKQSDLLIKRKRYSEERLALTYQTTEDDEREYRLKSFLAFPDLLTADYETQRKAVEMIVDRVELTKDKYIIHYNF

SEQ ID NO: 48587 - DNA, 50 bp, Streptococcus suis
  source 1..50: mol_type = genomic DNA
taaccctttttccctccgcttatctggattagcggaagcaaaaatggaag

SEQ ID NO: 48588 - DNA, 40 bp, Streptococcus suis; identical to SEQ ID NO: 21973
  source 1..40: mol_type = genomic DNA

SEQ ID NO: 48589 - DNA, 50 bp, Streptococcus suis
  source 1..50: mol_type = genomic DNA
taaccctttttccctccgcttatcatgattagcggaagcaaaaatggaag

SEQ ID NO: 48590 - DNA, 40 bp, Streptococcus suis
  source 1..40: mol_type = genomic DNA
ccccaccaggcctgcaatcatacttagccctcaagctgtg

SEQ ID NO: 48591 - protein, 480 aa, Streptomyces californicus
MLRNRASLYVRLSKAAGETNASLEGMIKELRELCAKEGLREVALHVDDGLSGGFRDRPEFQKWINDARQEYADVLMTPHVDRLTREGLNVAASLLDVVEGKDSASGRIVHHPVRLLDAKGIDSSHGDSFRFRFVLQAEVARSERERMRDRTRLSVRRLRRAKRWPGGSPPYGYKVIPNPDGPGQALGLHLEEAATIREAARAVLAGDALTLVCRRLNHHKLRPRRAAEWSRVSLRRVLTGDAVLGRITVNGALLRDDNGEIEEAYPAVLTVDQSVALREALAPDPTRPKSSGRHPARVLSGLLYCHGCPSKMVVARHSGNPVYRCQTRSQGRVCEAPVSVSARLIEDYVTGVYLNAAGSLPYLREEVHVSNASELALVESDIAEAVRLLASEATAEGFARLQQLQARKAELADQRPERLVTFVDTGMKTRDVFEAALVDDQRAMLDAAFEEIVIGPGRRGPKRLSPERVTIRWAADEPDV

SEQ ID NO: 48592 - DNA, 50 bp, Streptomyces californicus
  source 1..50: mol_type = genomic DNA
cgtgcttatgtggaaacttcgggggtgtcgaacgtgccaccaaagacacg

SEQ ID NO: 48593 - DNA, 40 bp, Streptomyces californicus
  source 1..40: mol_type = genomic DNA
gatgccccggaattcgggggtgtcgaacgtgcgcgtggtc

SEQ ID NO: 48594 - DNA, 50 bp, Streptomyces californicus
  source 1..50: mol_type = genomic DNA
cgtgcttatgtggaaacttcggggctgtcgaacgtgccaccaaagacacg

SEQ ID NO: 48595 - DNA, 40 bp, Streptomyces californicus
  source 1..40: mol_type = genomic DNA
aaggcccaggaatgcggcgctgtcggaggtgtgcgcggtg

SEQ ID NO: 48596 - protein, 524 aa, Comamonas testosteroni
MTSTRVYSYRRFSSGRQAHGHSLERQTASARAWCAEHGYELDEEFEISDIATSAYTGKNATDGALAAFLLAANDGKVPSGSILLVESLDRLSRNHLTDAIALLTSIVRTGVRVVSLLDGKEWNQENINDTMNFMMSVLLFARAHEESATKAKRVRAAFAKKRDAGLPVVSHGHGPGWAYPREDRQGWELDETKAESVRMVFDHVAGGLGGIAIARLANAEGWPLPWRNRANTNTRWEHTQVSRLVRDRRVLGEWQPKQMADGALIPLGDPVPDYFPRVITDELWAKVHAALNGRTGIPRIRGVKADVLAGLFYCSCGEKMQRKAPWKRGYSRYYCLGQIAGKSECRAIGEAAIIEHGFSFLGTLENGQFQETDALRLAREAIDDATAKLAELDERATRYVDAIEQGDGQGSRLITQRLREIEAQQDALHAVLNQRRADLAAAPKAGVDFGALFASDVRAAVVDSDAVKERHRIATALNRLLTKIVWHQSLGALLMYTRDGGMATYLFQPGELDRAVRRDKGRGK

SEQ ID NO: 48597 - DNA, 50 bp, Comamonas testosteroni
  source 1..50: mol_type = genomic DNA
tcgtgggttttttgacgcatcagctagctagtacgtcaaaaaacccgcaa

SEQ ID NO: 48598 - DNA, 40 bp, Comamonas testosteroni
  source 1..40: mol_type = genomic DNA
cgtgggatggcgactggactaccacctggccacgccggcg

SEQ ID NO: 48599 - DNA, 50 bp, Comamonas testosteroni
  source 1..50: mol_type = genomic DNA
tcgtgggttttttgacgcatcagcccgctagtacgtcaaaaaacccgcaa

SEQ ID NO: 48600 - DNA, 40 bp, Comamonas testosteroni
  source 1..40: mol_type = genomic DNA
tgggggcgcgagaccggagccccacctggccctgccggcg

SEQ ID NO: 48601 - protein, 475 aa, Limosilactobacillus fermentum
MSVAIYVRVSTLEQAESGYSIGEQTEKLKSYCKIKDWDIAKIYTDPGYSGSSLDRPAIQALISDCKAGFFDAVLVYKLDRLSRSQKDTLYLIEDVFNANNIHFMSLSENFDTSTPFGKAMIGLLSVFAQLEREQIKERMQMGKLGRAKAGKISAWANVPFGYVKNKDTYDIDPLRSEIVKRIYKDYLSGKSITRIMQDLNQEGHIGKDTLWSYRTVRQVLDNETYTGRTKYRGQVFNGLHKSIITKDDWDEVQRLLKIRQLDQAKKSNNPRPFQARYMLSGLLKCVYCGSTLAIAKSHTKDGPLWRYVCPSHNVRKYRNGGSAAHYRIAPINCKFKFKYMSELESAVIHEVKKIALDPSAVISSQDDQPEIDKAAIKAQLKKIKRQQDKLVDLYLLGDDLDVDQLHKRADQLKEQAAALRAQLKPSDKNIESFKKTVKDAKEIEKLDYEHQKSIVRMLIDHVNVGNDGINIFWKM

SEQ ID NO: 48602 - DNA, 50 bp, Limosilactobacillus fermentum
  source 1..50: mol_type = genomic DNA
tgaatatatttagagatcgtcatttcaatagcactccccaaatcttttta

SEQ ID NO: 48603 - DNA, 40 bp, Limosilactobacillus fermentum; identical to SEQ ID NO: 6858
  source 1..40: mol_type = genomic DNA

SEQ ID NO: 48604 - DNA, 50 bp, Limosilactobacillus fermentum
  source 1..50: mol_type = genomic DNA
tgaatatatttagagatcgtcattgaaatagcactccccaaatcttttta

SEQ ID NO: 48605 - DNA, 40 bp, Limosilactobacillus fermentum
  source 1..40: mol_type = genomic DNA
aaacaagaaaattgacattgacacctaaggaaagaccatg

SEQ ID NO: 48606 - protein, 532 aa, Vibrio parahaemolyticus
MIEQNEAQVYLYIRFSRKTQEDGDSERRQLECAHKAAEKYNLTINEDFIMTDRGFSAFKAAHIRRGALGGFLEAVKSGGVAKGSILIVESLDRLSREAPFFAQMQFSSLINDGISIITANDGNIYNTREMNRRPEVFYGIYAVMQRAHEESKRKQALSAGSIKGKILKHEKGEHTTNFTSVPSWITNKKDGYVLNEKAKAVELIVSMYLNHEGLNTISRELAEREIKSPTGRKRWGITTIRKVLDNPALYGLNKFKLRYDSDGVTVEEKFEFENFYPAMISKEEFLVIQERKKKKANSRESYGKVTYLLSSYGKDRCVCSRCGYTTGSQMQKQVNRKGEYTQSVMRLHCRKHKETLDCCSSFKCERLEHAFINAIHKELNPDFLKSHKVVKGNEESIRAQIADIDNEFKMLMKQRKKMKSMSLKLEIMKEIDELDSKREELIEMLNKKLTQSNGEADYEKLKSLANKCLNIKNSNERKLFKQILIQSVKQIVIDFKTESLACYFNNGNHLSLNYITETDSYQTTIFYKRKPR

SEQ ID NO: 48607 - DNA, 50 bp, Vibrio parahaemolyticus
  source 1..50: mol_type = genomic DNA
gcaagttacattataaatttacgctctgtgtagcgtcaaaagtaactttc

SEQ ID NO: 48608 - DNA, 40 bp, Vibrio parahaemolyticus; identical to SEQ ID NO: 7098
  source 1..40: mol_type = genomic DNA

SEQ ID NO: 48609 - DNA, 50 bp, Vibrio parahaemolyticus
  source 1..50: mol_type = genomic DNA
gcaagttacattataaatttacgctgtgtgtagcgtcaaaagtaactttc

SEQ ID NO: 48610 - DNA, 40 bp, Vibrio parahaemolyticus
  source 1..40: mol_type = genomic DNA
caaaaaactaaaagagcagtgaactcaaaggatttcctgc

SEQ ID NO: 48611 - protein, 522 aa, Vibrio parahaemolyticus
MRFSRPEQAKGSSIDRQSQYAEQYALEHGLELDKSLTMMDKGLSAFHGVHKTKGAFGQFLSAVTAGKVPSGSVLVVESLDRLSREDPLIAQAALTDLILAGITVVTAADNQVYSREEIQQNPFKLIMSLVVMIRANEESETKQRRSNAFLKSALNQYQTNGKIRRLGSDPSWLDFNKDDDTYSFNERVEVIRRILNLYNQGIGSLKIARQLTEESIPTLSGKRSAWGQTTVANIIKSHALYGMKRINVQGVDYDLEDFYPALITKSKWLALQQHRSKRSKTMHGRGEVVHLITGHGKGFATCGYCGGGLGAQTQKQYKRSGEYSKTVTRLHCLTHKETSSCCSSVFLEPIESAILFAACIGVQPQSLVPTVNNVNYSTLIDEIENKVKHIVEQVTAGAPWDLFKDAHDRLKSERQKLIKERDSQKPDISQNDIQKWVDKLVKLADKARAGDKEARLKCRTLIHSVCKSIVIKLRGHNLKSEPVVIITFVTDEQFEFKVGKNGAVQFVDNGMAVNRRLKPLLT

SEQ ID NO: 48612 - DNA, 50 bp, Vibrio parahaemolyticus
  source 1..50: mol_type = genomic DNA
tagttatgcactgtgcatttgctctctgtctaatgtatagtgataacttg

SEQ ID NO: 48613 - DNA, 40 bp, Vibrio parahaemolyticus; identical to SEQ ID NO: 7098
  source 1..40: mol_type = genomic DNA

SEQ ID NO: 48614 - DNA, 50 bp, Vibrio parahaemolyticus
  source 1..50: mol_type = genomic DNA
tagttatgcactgtgcatttgctctgtgtctaatgtatagtgataacttg

SEQ ID NO: 48615 - DNA, 40 bp, Vibrio parahaemolyticus; identical to SEQ ID NO: 48610
  source 1..40: mol_type = genomic DNA

SEQ ID NO: 48616 - protein, 621 aa, Vibrio parahaemolyticus
MKIHKTLAPQVYSYSRFSDMEQKKGSSLARQEDYAKKAAEQHGLELNDELVFTDLGKSAFHAIHKKAGAYGAFLKAIEKGLVAKGSYLIVENFDRLSREEAYKAQSDITRLIEADINIITAADGQLYNKQTLAQNPGLLFLMTGTMIRAHEESLTKQKRSVAAIEKKLGKFFDGELVDVGGPTPFWIQRSKGDRESLFSFSEDHNRVEGARIITHSFINGKSYGQIQDLLLEKEILSPKGDVKWGTTTISKVLENEALYGRKTVRLPALKDGTKDAQEHTLDGYFPALISKDDFDLIQQIKRVKKKGRTGYRFNSAKEEGVTSVVYLLSGYGKDKNGDARSVCSRCGGALGSRLQEQFTRKKEYVRTVMRLDCLSRTRKKSCDAKGIAQRELEKSFLQAVSEHVDYNLLNKDDSDARAVEIIDSRLEDLEGVIQRAAELFLLTDDTTAHEIARQKLNDAKAEKAELLKQKDDGKEFVISAEAIKEFEGYIQRAYEDENDFEARSHVKDILLQCVEKLVIDTEPRSVESLGYKNLYRGAKVWTVTVDFRSGKRITIYHDVDTNMSLFNQVEGAGNSFHTFTPEALKIWDQQGDEAFVKHLSETGYGLNSSYVQDFISSLDDK

SEQ ID NO: 48617 - DNA, 50 bp, Vibrio parahaemolyticus
  source 1..50: mol_type = genomic DNA
cgagttacattgccatcttgactgtccgtttggttggtaatgtaacttgc

SEQ ID NO: 48618 - DNA, 40 bp, Vibrio parahaemolyticus; identical to SEQ ID NO: 7098
  source 1..40: mol_type = genomic DNA

SEQ ID NO: 48619 - DNA, 50 bp, Vibrio parahaemolyticus
  source 1..50: mol_type = genomic DNA
cgagttacattgccatcttgactgtgcgtttggttggtaatgtaacttgc

SEQ ID NO: 48620 - DNA, 40 bp, Vibrio parahaemolyticus; identical to SEQ ID NO: 48610
  source 1..40: mol_type = genomic DNA

SEQ ID NO: 48621 - protein, 528 aa, Vibrio parahaemolyticus
MAAQVYSYRRFSSPTQKHGGSLQRQSDYAEEIAKEYGLELNQDLVMTDDGLSAFSAEHIKKGALGQFIREVDKGRVERGSILIVESLDRLSRELPLAAQSQFNELISKGITIITANDRQVYNNDTLANDPSKLFISIAIMIRAHEESLTKQKRSIAFIKQQTKKYLTEGKGDVAGSTPFWISKTNGIYELNYKAEVARMIVDAYLDNNGLNTISRELAKKKIKSPKNKDRWGVTTIRKVLDNTALFGQKKFDLTYLKDGKEVTEPVILDEYYPSLIDKDKYLMIQDKKRKKAGSRESYGSAVYLLSGHGAGRAVCSKCGQNVGSQLQKQKNRQGQYTKSEMRLHCNRNKESLDCCSSFRAQRLENAFVNAMVSLIDSDLLLNPTKNTTKERQNIEAKLDTIDTGMKNLIDRMALDIGDAALKMLDGKLMELDRERAILQSELDSLKSPPINLEGFSKLRNLAEKVKDFSNTSERREFKHVLLQVVKRIVIVFESESLIVEFNNGNKLYLNHESGKYNSTVEYDRKNLT

SEQ ID NO: 48622 - DNA, 50 bp, Vibrio parahaemolyticus
  source 1..50: mol_type = genomic DNA
gtagtagatattttgcctttggcgtcccccttgtatataatctctattac

SEQ ID NO: 48623 - DNA, 40 bp, Vibrio parahaemolyticus; identical to SEQ ID NO: 7098
  source 1..40: mol_type = genomic DNA

SEQ ID NO: 48624 - DNA, 50 bp, Vibrio parahaemolyticus
  source 1..50: mol_type = genomic DNA
gtagtagatattttgcctttggcgtgccccttgtatataatctctattac

SEQ ID NO: 48625 - DNA, 40 bp, Vibrio parahaemolyticus; identical to SEQ ID NO: 48610
  source 1..40: mol_type = genomic DNA

SEQ ID NO: 48626 - protein, 547 aa, Achromobacter xylosoxidans
MPRLISYVRMSTSEQLKGFSLERQRNLIADFARKNGLSLEDSHILEDIGRSSFSDDTEQKELTKFFEDLGNDKFQKGDVFALENIDRLTRRGPIDALMKVNQIISKGLKLAIISDKEQRILEEIDVFSIITLSIDASRANKESQVKSDKGLQNWAFKRELAATHKIAMTAQAPAWIDTETYYIMDETKNKQVKRRRYVLNEDRAKTVKLIFELFQNGNGSLKIKNILNEQNIPTFKGIEYWEPSTISKIIRNPATYGMYQPKKQNTGKRDLVAIGEPIENYFPAVIGKEVFDQCQQITATNTTRKGRRGKLFTNLFTGLLKCADCDGPIHLLNPGIDKRAKNPKPVNYLICKKGKFTKECITKRLRYEDFENAMLKAIQEINLADVLHENNPLENLIKKQRNLQADIDKKKKLLENFERNFVENDGDLPSFMIAQAKQAEIDIKALDIEIKSTQFEISQLNVYNSNIDNAIDELKTNGTYEARSKINLILHEIIKYIVIDFELDDFGVMFKNGAKRFINNGIVQNVFRTESNKQRDDEINEILNHKI

SEQ ID NO: 48627 - DNA, 50 bp, Achromobacter xylosoxidans; identical to SEQ ID NO: 18907
  source 1..50: mol_type = genomic DNA

SEQ ID NO: 48628 - DNA, 40 bp, Achromobacter xylosoxidans
  source 1..40: mol_type = genomic DNA
gccgggcaacgcggtgctgatcaagtccggctatccctgg

SEQ ID NO: 48629 - DNA, 50 bp, Achromobacter xylosoxidans
  source 1..50: mol_type = genomic DNA
tacaggtaaaatatggacgacttgagcaagtctgtcgtataatacctgta

SEQ ID NO: 48630 - DNA, 40 bp, Achromobacter xylosoxidans; identical to SEQ ID NO: 17530
  source 1..40: mol_type = genomic DNA

SEQ ID NO: 48631 - protein, 508 aa, Neobittarella massiliensis
MQKYVIALYIRLSLEDYKYDSMSIENQHLVLNEFVSSMPESTDAEVLEFIDNGYSGTNFERPKVQELIELVRANQIDCIIVKDFSRFGRNSIETGYFIERVFPLFHTRFISINDDFDSDQHKGDTGGMDVAFKYLISEYYSRDMSMKTKSAKYAKMQRGEYQSKICPYGYRKSADGRMEPNPETAAVVQLIFQLAATGIGAAAITRELFKRGIPTPGEYKATHGQQYHDVSRSRGRWSSSTVLRILEDERYIGSYVIGRRAVIEVGGTRSRMKDRDKWFIIPDHHPAIIEKELFEKVQAVQRRFSLPTRKIREYPLKGKVYCGCCDHALSRIAQKKPFYMCRHSTADVNSRCHTIRADAAGLEEAVLITLKKQLEILLPAHEDGTLHLDATAAKCSEYEKQLEDLRDQKQALFERYLLGQIELDTYKSRKTDYDAEIRKVKNAYAAVTAQAKLKREEQARQSNRQEIVHSIAEADALTSELTDLLIEKVYIFPDNRIEIVYKVHDRFE

SEQ ID NO: 48632 - DNA, 50 bp, Neobittarella massiliensis; identical to SEQ ID NO: 19472
  source 1..50: mol_type = genomic DNA

SEQ ID NO: 48633 - DNA, 40 bp, Neobittarella massiliensis
  source 1..40: mol_type = genomic DNA
tactacagagataaacgtatgccgcaaaccgtgtagagta

SEQ ID NO: 48634 - DNA, 50 bp, Neobittarella massiliensis
  source 1..50: mol_type = genomic DNA
tttgtcgtgtgcttgacatacgggtacccttacggtataattacgacaaa

SEQ ID NO: 48635 - DNA, 40 bp, Neobittarella massiliensis
  source 1..40: mol_type = genomic DNA
taaaacaaatataaatatatactgcaaaccttttagaata

SEQ ID NO: 48636 - protein, 511 aa, Rhodococcus pyridinivorans
MSTMGDAPTGLRVLGRLRLSRSTDESTSIERQRETIQRWADAQGHRIVGWAEDVDVSGAVDPFDTPQLGPWLTPDRAAEWDTLAAWKLDRLGRNAIQLNRLFGWCNEHGKTLVSCSESIDLSSWAGRMLAGVIAGLAEGELEAIRERSRSSRAKLRESARWAGGKPPFGYRVVPREGGGWALEPDPVAVPLVRRIVDDVLNGKPLNRVATELNTEGYRTPRDYYVTVKAGAPSVQLEDREERTSRWQASTLRNLLQNPALRGHVHHKGQTVRDDEGVPLVLAEPLVDSEEWDALQAVLEGNRKAREHHKRPDAAPLAGVISCIWCGENLHHNQMTVKGNRYRYYRCPNHREHSDNGVSMVPAAEAETLLEELFLDEAGDLPVTERVWVPGDTRDQELREAVTALDELTRLVGTISSATARERLTGQINAVDRRILELESQPVQEAHWEYREIGGTYGEVWENSDTDERRDLLLRSGIVLRIGVQGRRGGHHGGVWKWELHVPEPITDALGR

SEQ ID NO: 48637 - DNA, 50 bp, Rhodococcus pyridinivorans
  source 1..50: mol_type = genomic DNA
gttaggggatacttgatatccgactcgtggaacactaagtggaacataac

SEQ ID NO: 48638 - DNA, 40 bp, Rhodococcus pyridinivorans
  source 1..40: mol_type = genomic DNA
gttggggggaatgcgcggctcgtggaacatcactctgaac

SEQ ID NO: 48639 - DNA, 50 bp, Rhodococcus pyridinivorans
  source 1..50: mol_type = genomic DNA
gttaggggatacttgatatccgacaggtggaacactaagtggaacataac

SEQ ID NO: 48640 - DNA, 40 bp, Rhodococcus pyridinivorans
  source 1..40: mol_type = genomic DNA
gttgggggacatacagggaaggtggaacaggactctggaa

SEQ ID NO: 48641 - protein, 511 aa, Rhodococcus rhodochrous
MSTMCDAPTGLRVLGRLRLSRSTDESTSIERQRETIQRWADAQGHRIVGWAEDVDVSGAVDPFDTPQLGPWLTPDRAAEWDTLAAWKLDRLGRNAIQLNRLFGWCNEHGKTLVSCSESIDLSSWAGRMLAGVIAGLAEGELEAIRERSRSSRAKLRESARWAGGKPPFGYRATPREGGGWTLERDPLAVPLVRRIVDDVLNGKPLNRVATELNTEGYRTPRDYHVTVKAGAPSVQLDDREERTSRWQASTLRNLLQNPALRGHVHHKGQTVRDDEGVPLVLAEPLVDSEEWDALQAILEGNREARKHHKRPDAAPLAGVISCIWCGENLHHNQMTVKGNRYRYYRCPNHREHGAEGASMVPAAEVEELLESEFLEQAGDLPITERVWVPGDARDQELRDAVAALDELTRLVGTVASATARERLTGQISAVDRRILELESQPVREAHWEYREVGGTYRDAWESADTEGRRSLLLRAGITLRVGVQGRRGGHSGGAWTWELRVPEPVADALAR

SEQ ID NO: 48642 - DNA, 50 bp, Rhodococcus rhodochrous
  source 1..50: mol_type = genomic DNA
gttatggaatacttgatatccgactcgtggaacactaagtggaacataac

SEQ ID NO: 48643 - DNA, 40 bp, Rhodococcus rhodochrous; identical to SEQ ID NO: 48638
  source 1..40: mol_type = genomic DNA

SEQ ID NO: 48644 - DNA, 50 bp, Rhodococcus rhodochrous
  source 1..50: mol_type = genomic DNA
gttatggaatacttgatatccgacaggtggaacactaagtggaacataac

SEQ ID NO: 48645 - DNA, 40 bp, Rhodococcus rhodochrous; identical to SEQ ID NO: 48640
  source 1..40: mol_type = genomic DNA

SEQ ID NO: 48646 - protein, 586 aa, Pseudomonas juntendi
MPTGYAYIRYSTRRQGTDDKDSVTRQKAGIRAIAATHGVDVPEENFFYEDGVSAYTGDNEKKGKLKDLIDQIEALTISEGDYVFVESIDRLSRQRLLQTKDLVYGILKKGVIIVTTIDGYVYRLRENQQDTLHQDIMLSVISTRAHEESLTKSTRRKSAWRKAKTEAETGIVFNKNRLPYGVIFNEAQQSLGIDEVARDEIEFILQNLKREGVTATIKKANQFAKINWTQARVKDLFETKYVLGYFMSQKKIEGKIVFDKYVEDYYPKMVEPSLFLEAKEAMKNRKVRKHSGRVTQDNINIFRHSCFCQRCGKSLVFMNNYNRKGRRYFYMTCQQNIETGACKNRFRYDLAVKIFFDTMKEFDRLNNAKTSVSPIDITQYKELDEATLKEIEDINKALESINENSSGAFKLARKFLELSKAKPSADRETKNKLKELTTRKHQLEVSISNLNKSVEALTSGAIPLVVITRLSKEEQELSSIREEIEKLEVSKNQTKIHRLEFNNLKKTKEFLMTEEGRLNIINFLTSNAIKFSFDFSNDTLAASAYVGSDCIGLLSTKNENRSAPLECYGFENLGSMLTSTSKHQTI

SEQ ID NO: 48647 - DNA, 50 bp, Pseudomonas juntendi
  source 1..50: mol_type = genomic DNA
tgtgttagtatcggtgtgttggtcttgaccgagtggcgttttctaacata

SEQ ID NO: 48648 - DNA, 40 bp, Pseudomonas juntendi
  source 1..40: mol_type = genomic DNA
gatgggcatgtggttggtcttgaagtagatcccgaccatg

SEQ ID NO: 48649 - DNA, 50 bp, Pseudomonas juntendi; identical to SEQ ID NO: 48647
  source 1..50: mol_type = genomic DNA

SEQ ID NO: 48650 - DNA, 40 bp, Pseudomonas juntendi
  source 1..40: mol_type = genomic DNA
tatgtggttatggttggccttgaagtacatcaaaaccatg

SEQ ID NO: 48651 - protein, 452 aa, Listeria monocytogenes
MKAAIYIRVSTQEQIENYSIQAQTEKLTALCRSKDWDVYDIFIDGGYSGSNMNRPALNEMLSKLHEIDAVVVYRLDRLSRSQRDTITLIEEYFLKNNVEFVSLSETLDTSSPFGRAMIGILSVFAQLERETIRDRMVMGKIKRVESGLPLTTAKGRTYGYDVVDTKLYINEEEAQHLQLIYDIFEEEKSITTLQKRLKKLGFKVKSYSSYNNWLTNDLYCGYVSYADKVHAKGVHEPIISEEQFYRVQEIFSRMGKNPNMNKESSSLLNNLIVCEKCGLGYVHRAKDTVSRGKKYHYRYYSCKTYKHTHELEKCGNKIWRADKLEELIIDRVNNYSFASRNVDKEDELDSLNEKLKIEHTKKKRLFDLYISGSYEVSELDAMMSDIDAQINYYEAQIEANEELKKNKKIQENLADLATVDFNSLEFREKQLYLKSLINKIYIDDEQVTIEWL

SEQ ID NO: 48652 - DNA, 50 bp, Listeria monocytogenes; identical to SEQ ID NO: 39242
  source 1..50: mol_type = genomic DNA

SEQ ID NO: 48653 - DNA, 40 bp, Listeria monocytogenes; identical to SEQ ID NO: 7828
  source 1..40: mol_type = genomic DNA

SEQ ID NO: 48654 - DNA, 50 bp, Listeria monocytogenes; identical to SEQ ID NO: 39244
  source 1..50: mol_type = genomic DNA

SEQ ID NO: 48655 - DNA, 40 bp, Listeria monocytogenes
  source 1..40: mol_type = genomic DNA
tatcggtttcagctaaacaataagcaaagaaggaaataaa

SEQ ID NO: 48656 - protein, 452 aa, Listeria monocytogenes; identical to SEQ ID NO: 39126

SEQ ID NO: 48657 - DNA, 50 bp, Listeria monocytogenes; identical to SEQ ID NO: 39127
  source 1..50: mol_type = genomic DNA

SEQ ID NO: 48658 - DNA, 40 bp, Listeria monocytogenes; identical to SEQ ID NO: 7828
  source 1..40: mol_type = genomic DNA

SEQ ID NO: 48659 - DNA, 50 bp, Listeria monocytogenes; identical to SEQ ID NO: 39129
  source 1..50: mol_type = genomic DNA

SEQ ID NO: 48660 - DNA, 40 bp, Listeria monocytogenes; identical to SEQ ID NO: 48655
  source 1..40: mol_type = genomic DNA

SEQ ID NO: 48661 - protein, 477 aa, Listeria monocytogenes; identical to SEQ ID NO: 39146

SEQ ID NO: 48662 - DNA, 50 bp, Listeria monocytogenes; identical to SEQ ID NO: 39142
  source 1..50: mol_type = genomic DNA

SEQ ID NO: 48663 - DNA, 40 bp, Listeria monocytogenes; identical to SEQ ID NO: 7828
  source 1..40: mol_type = genomic DNA

SEQ ID NO: 48664 - DNA, 50 bp, Listeria monocytogenes; identical to SEQ ID NO: 39144
  source 1..50: mol_type = genomic DNA

SEQ ID NO: 48665 - DNA, 40 bp, Listeria monocytogenes; identical to SEQ ID NO: 48655
  source 1..40: mol_type = genomic DNA

SEQ ID NO: 48666 - protein, 452 aa, Listeria monocytogenes
MKAAIYIRVSTQEQIENYSIQAQTEKLTALCRSKDWDVYDIFIDGGYSGSNMNRPALNEMLSKLHEIDAVVVYRLDRLSRSQRDTITLIEEYFLKNNVEFVSLSETLDTSSPFGRAMIGILSVFAQLERETIRDRMVMGKIKRIEAGLPLTTAKGRTFGYDVIDTKLYINEEEAKQLRLIYDIFEEEKSITTLQKRLKKIGFKVKSYSSYNNWLTNDLYCGYVSYADKVHTKGVHEPIISEEQFYRVQEIFSRMGKNPNMNRDSASLLNNLVVCGKCGLGFVHRRKDTVSRGKKYHYRYYSCKTYKHTHELEKCGNKIWRADKLEELIIDRVNNYSFASRNVDKEDELDSLNEKLKIEHTKKKRLFDLYISGSYEVSELDAMMSDIDAQINYYEAQIEANEELKKNKKIQENLADLATVDFNSLEFREKQLYLKSLINKIYIDDEQVTIEWL

SEQ ID NO: 48667 - DNA, 50 bp, Listeria monocytogenes; identical to SEQ ID NO: 39242
  source 1..50: mol_type = genomic DNA

SEQ ID NO: 48668 - DNA, 40 bp, Listeria monocytogenes; identical to SEQ ID NO: 7828
  source 1..40: mol_type = genomic DNA

SEQ ID NO: 48669 - DNA, 50 bp, Listeria monocytogenes; identical to SEQ ID NO: 39244
  source 1..50: mol_type = genomic DNA

SEQ ID NO: 48670 - DNA, 40 bp, Listeria monocytogenes; identical to SEQ ID NO: 48655
  source 1..40: mol_type = genomic DNA

SEQ ID NO: 48671 - protein, 452 aa, Listeria monocytogenes; identical to SEQ ID NO: 39296

SEQ ID NO: 48672 - DNA, 50 bp, Listeria monocytogenes; identical to SEQ ID NO: 39297
  source 1..50: mol_type = genomic DNA

SEQ ID NO: 48673 - DNA, 40 bp, Listeria monocytogenes; identical to SEQ ID NO: 7828
  source 1..40: mol_type = genomic DNA

SEQ ID NO: 48674 - DNA, 50 bp, Listeria monocytogenes; identical to SEQ ID NO: 39299
  source 1..50: mol_type = genomic DNA

SEQ ID NO: 48675 - DNA, 40 bp, Listeria monocytogenes; identical to SEQ ID NO: 48655
  source 1..40: mol_type = genomic DNA

SEQ ID NO: 48676 - protein, 452 aa, Listeria monocytogenes; identical to SEQ ID NO: 39136

SEQ ID NO: 48677 - DNA, 50 bp, Listeria monocytogenes; identical to SEQ ID NO: 39172
  source 1..50: mol_type = genomic DNA

SEQ ID NO: 48678 - DNA, 40 bp, Listeria monocytogenes; identical to SEQ ID NO: 7828
  source 1..40: mol_type = genomic DNA

SEQ ID NO: 48679 - DNA, 50 bp, Listeria monocytogenes; identical to SEQ ID NO: 39174
  source 1..50: mol_type = genomic DNA

SEQ ID NO: 48680 - DNA, 40 bp, Listeria monocytogenes; identical to SEQ ID NO: 48655
  source 1..40: mol_type = genomic DNA

SEQ ID NO: 48681 - protein, 452 aa, Listeria monocytogenes; identical to SEQ ID NO: 39116

SEQ ID NO: 48682 - DNA, 50 bp, Listeria monocytogenes; identical to SEQ ID NO: 39117
  source 1..50: mol_type = genomic DNA

SEQ ID NO: 48683 - DNA, 40 bp, Listeria monocytogenes; identical to SEQ ID NO: 7828
  source 1..40: mol_type = genomic DNA

SEQ ID NO: 48684 - DNA, 50 bp, Listeria monocytogenes; identical to SEQ ID NO: 39119
  source 1..50: mol_type = genomic DNA

SEQ ID NO: 48685 - DNA, 40 bp, Listeria monocytogenes; identical to SEQ ID NO: 48655
  source 1..40: mol_type = genomic DNA

SEQ ID NO: 48686 - protein, 452 aa, Listeria monocytogenes; identical to SEQ ID NO: 39246

SEQ ID NO: 48687 - DNA, 50 bp, Listeria monocytogenes
  source 1..50: mol_type = genomic DNA
tttagttcctcgttttctctcgctggaagaagaataaacgagataccaaa

SEQ ID NO: 48688 - DNA, 40 bp, Listeria monocytogenes; identical to SEQ ID NO: 7828
  source 1..40: mol_type = genomic DNA

SEQ ID NO: 48689 - DNA, 50 bp, Listeria monocytogenes
  source 1..50: mol_type = genomic DNA
tttagttcctcgttttctctcgctataagaagaataaacgagataccaaa

SEQ ID NO: 48690 - DNA, 40 bp, Listeria monocytogenes; identical to SEQ ID NO: 48655
  source 1..40: mol_type = genomic DNA

SEQ ID NO: 48691 - protein, 520 aa, Anaerobutyricum hallii; identical to SEQ ID NO: 36356

SEQ ID NO: 48692 - DNA, 50 bp, Anaerobutyricum hallii; identical to SEQ ID NO: 36357
  source 1..50: mol_type = genomic DNA

SEQ ID NO: 48693 - DNA, 40 bp, Anaerobutyricum hallii
  source 1..40: mol_type = genomic DNA
taatccggaatggggttatggaagactggatctgtatcat

SEQ ID NO: 48694 - DNA, 50 bp, Anaerobutyricum hallii
  source 1..50: mol_type = genomic DNA
tgtagtctttacttgacatcctcgttggaggacgttataataaggctaca

SEQ ID NO: 48695 - DNA, 40 bp, Anaerobutyricum hallii
  source 1..40: mol_type = genomic DNA
taatacagcatggggctttttcagactggctctgtcactt

SEQ ID NO: 48696 - protein, 583 aa, Streptococcus suis; identical to SEQ ID NO: 15121

SEQ ID NO: 48697 - DNA, 50 bp, Streptococcus suis; identical to SEQ ID NO: 15117
  source 1..50: mol_type = genomic DNA

SEQ ID NO: 48698 - DNA, 40 bp, Streptococcus suis
  source 1..40: mol_type = genomic DNA
atttttgctcatagtaggcatgggcttgtagggctggtag

SEQ ID NO: 48699 - DNA, 50 bp, Streptococcus suis
  source 1..50: mol_type = genomic DNA
gtattctcaaggaacagactacactggtggagtgcgtagtgttgctacaa

SEQ ID NO: 48700 - DNA, 40 bp, Streptococcus suis
  source 1..40: mol_type = genomic DNA
tgttttcctcatggatggatggggcttgtggggttgggag

SEQ ID NO: 48701 - protein, 540 aa, Amedibacterium intestinale
MYDYDTDRIFYVYDVKGIYEFLSKKISFTELIMLDVSVLGNDVELISAFLDEMICNKINVISIYDRLVLHTEAYYLSRLEKTFFLTKALKKQEENKKKTYMPINQLNGDFDKKNKKIGAYCRVSSREQVQGYSIDNQKEKIQMYLELFDYEPEKLTFYVDEGKSASSLKRPAMQNMLNDIENDEIDEIIIYKLDRISRSVLDVYYLLNNLLSKDVNLVAILDNLDIKTANGRMVIGILAIFAQWERENTIERTNDGLLRMAREGKYPISTIPFGYKRDEDKYLYIYEKEAAVIRDMFLFAKSGYTFIEISRRLQEKHGYKLSDERVRNIIFNDSYYGEFLYKDFVFYEIVPAIVSKDDALEARKMSGKRNSVYGEGLNHFSFRYKVKCATCGEILICVPTYKKDKHYYYYYCKKCKKRINQTKIVEHVLCDMIQILATRSKSQNLEKRMNKIKRLDKKIKQNVQDYIDDNIDNETYKVAMKQYNRQLKEAYAELSLVEIKNGLSWEGLSNEERRKIVEETISYMTIDLDKKDIVEIEYEK

SEQ ID NO: 48702 - DNA, 50 bp, Amedibacterium intestinale
  source 1..50: mol_type = genomic DNA
gttcgttcgaattacgaagattggcaccatttgtgttaattcgaacttct

SEQ ID NO: 48703 - DNA, 40 bp, Amedibacterium intestinale
  source 1..40: mol_type = genomic DNA
gttcgagtccggcctcgggcaccatgtgataatgaaagcc

SEQ ID NO: 48704 - DNA, 50 bp, Amedibacterium intestinale
  source 1..50: mol_type = genomic DNA
gttcgttcgaattacgaagattggaaccatttgtgttaattcgaacttct

SEQ ID NO: 48705 - DNA, 40 bp, Amedibacterium intestinale
  source 1..40: mol_type = genomic DNA
gttcgagtccagcctgggcaacaatgtgagactccattcc

SEQ ID NO: 48706 - protein, 510 aa, Clostridium tyrobutyricum
MLKIAIYSRKSVETDTGESIKNQIAICKQYFQRQNEECKFEIFEDEGFSGGNINRPDFKRMMQLVKIKQFDVVAVYKVDRIARNIVDFVNVFDELDKLNVKLVSVTEGFDPSTPIGKMMMMLLASFAEMERMNIAQRVKDNMRELAKLGRWSGGTAPSGYSVQKVKENGKEVSYLKKEKDADNIKLIFQKYASGYTAFEIHKYFKLKGFTYNPKTIYGLLTNPTYLEATEESIKYLENKGYTVYGEPNGCGFLPYNRRPRYKGIKAWKDKNMMVGVSRHEPAVDLNLWIAVQSQLEKKTVAPHPHESKFTFLTGGIMKCRCGAGMGVSPGRIRSDGTRLYYFTCSGKRYRQNGCSNLSLRVDWAESKVKAFLEKMRDKETLTEYYNSNKNKSNVDKDIKSINKKIVSNKKAVDSLVDKLILLSNDAAKPLAERIENLTQESNTLKEELLKLEREKLFNSNDKLNIDLIHKSIIQFLDTDSLEEKKKFAKDIFDKITWDSASKELLFFLQM

SEQ ID NO: 48707 - DNA, 50 bp, Clostridium tyrobutyricum
  source 1..50: mol_type = genomic DNA
tgatgttaattaatctggtcagtacctgctgaccggattaattaactgca

SEQ ID NO: 48708 - DNA, 40 bp, Clostridium tyrobutyricum
  source 1..40: mol_type = genomic DNA
agccacggccattggtggacctcctgaccacccccactcg

SEQ ID NO: 48709 - DNA, 50 bp, Clostridium tyrobutyricum
  source 1..50: mol_type = genomic DNA
tgatgttaattaatctggtcagtacatgctgaccggattaattaactgca

SEQ ID NO: 48710 - DNA, 40 bp, Clostridium tyrobutyricum
  source 1..40: mol_type = genomic DNA
accactggccattggtgatcaacttgaccagccccactct

SEQ ID NO: 48711 - protein, 478 aa, Paenibacillus polymyxa
MESTLKMIRAAGYGRVSTEEQANEGHSLDAQREFNLKYIENEKWILSGYFEDPGYSGKNLNRPDVKRLIQEIKSKNLDALVVHKLDRLTRDIKDLYEMLQMFDEYNIKFVSISEKIDTDTAMGRMFVFMLGIFAQWYRENLSEEVTKGMRARAKKGLPNVFVNMFGYTRTPEGELIINEEEAKWVRWIFEQYLNGKGTPTIAKELNNLNIRRARGGRWSQTKVMDVLENQHYVGNITWKSKKDDEEDRIIRKGSHIGIIDQETFDRVQRWIQRRRDGFRSRNSYNYAFGGVLRCGKCGGRYKGKYSVSGGTITYNYVCSNKERYHTCDQSSISEVKLVKMLFKSLDMDNENLFWKDDVKESNNSEEEQIRRAIKASEERRERWQMAYGDGFMPYQDFSNRMKEEMQRVVELEEKLSGLPGAVVSTLDPAEVINVMKDIKDNWWYMERSTQKQLIQELFQEITILKDGKEWGIKGIAFA

SEQ ID NO: 48712 - DNA, 50 bp, Paenibacillus polymyxa
  source 1..50: mol_type = genomic DNA
atttgtacctgtgtaccctttggtaagccattgggtgcataggtacatac

SEQ ID NO: 48713 - DNA, 40 bp, Paenibacillus polymyxa
  source 1..40: mol_type = genomic DNA
tatcatgcctccgattggtaaacttctgggcggcatgaat

SEQ ID NO: 48714 - DNA, 50 bp, Paenibacillus polymyxa
  source 1..50: mol_type = genomic DNA
atttgtacctgtgtaccctttggtccgccattgggtgcataggtacatac

SEQ ID NO: 48715 - DNA, 40 bp, Paenibacillus polymyxa
  source 1..40: mol_type = genomic DNA
taccatgcctaccatggggccacttctggcaagcaacaat

SEQ ID NO: 48716 - protein, 517 aa, Halopseudomonas aestusnigri
MRTAIYARFSSDKQSETSLTDQVNLCQSRAKREGWPLVATHTDNALSGSTQVASRPGGKALLADMLAGRFDVLLVEGLDRLARDQVEQESVVRRMEHRGIRIIGLADGYDSQHQGRKVMRGVRGLINELYLDDLRHKTQRGMHGQVDRGYIAGGKSYGYDIIKDEIGSRYVINEEQAHWVRWIFQKVANGHPFRHIVFELNARGVPSPRGDSWAVSAVYGSPQKGSGIVNNQLYAGCYIWNRSQWVKDPDTGKRQRVDRPRHEWRVQDVPALRIVDQETWDRVRARIDAGRGADGKKRAQRPRSALLSGVLRCPHCGGPLNSGGTTQYICTKGHDRGPTVCPGFSVGRKRLDRRMLSVVRDEVLTDDVAQMIEQLVIERRQLGSDRGAVEALQARREALKAELSNLVDAIAKIGISAPIEQRIRQAEREMHTLEYEIGQASAEPVDLVDVRREFQAVRLDFENAIQVSPAEARRAIVDILGSVQLEVKDEELWAHIATGPALQVAVGADVCNDGCGG

SEQ ID NO: 48717 - DNA, 50 bp, Halopseudomonas aestusnigri
  source 1..50: mol_type = genomic DNA
gatgtctgtaacgatggttgcgggggcccgatacgtccgttaaccatacg

SEQ ID NO: 48718 - DNA, 40 bp, Halopseudomonas aestusnigri
  source 1..40: mol_type = genomic DNA
ttttgaacctggttgcgggggcaggatttgaacctacgac

SEQ ID NO: 48719 - DNA, 50 bp, Halopseudomonas aestusnigri
  source 1..50: mol_type = genomic DNA
gatgtctgtaacgatggttgcgggaccccgatacgtccgttaaccatacg

SEQ ID NO: 48720 - DNA, 40 bp, Halopseudomonas aestusnigri
  source 1..40: mol_type = genomic DNA
ttaggaagcaagttgcaggaccatgatttgaacctaagca

SEQ ID NO: 48721 - protein, 544 aa, Sphingobium yanoikuyae
MNRVALYARYSSDQQSAASIEDQLRVCRERAAREGWHVAGVYEDAAISGASMILRPGIQALVQDAQAGKIDIVLAEALDRVSRDQADVATLFKHLQFARVPLVTLAEGEISELHVGLKGTMNALFLKDLAKKTHRGQRGRVEKGFSAGPVGYGYRTVRRLSSEGELVRGECRIEPSEVPIVERIFREFAAGKSPRAIARDLNADGVPGPSGRPWSDTTIRGKRSLGIGILNNEMYVGVRVWNHKQSVKDPHTGRTVRRPNPESEWVRAEAPQLRIISDDVWQAVKHRQDVLGEQYKPMIDGVHAAQASRMHQARRPVTLLSGLVECGLCGGKVGLAVNGRFGCMNHHRRHTCANSRTIRRDALEERALAGLRERLVSPEKVQAAVAAYAEYINRHNREQRVQIEVDRRSLDKIERAIAGIMTAIEDGLYQPTMKARMAELERQKSEIAARMALAPQAVPDVHPGVAEIYKREMERFIQALEDPETRLDASDAIRSLIHRIVLHPGEKRGEIHATLHGALMGILDFAKEDAQSEPVVTTKVAQGS

SEQ ID NO: 48722 - DNA, 50 bp, Sphingobium yanoikuyae
  source 1..50: mol_type = genomic DNA
tgttacgacaaaggtggctcagggttcgcaagaccacctttgtcgtaatt

SEQ ID NO: 48723 - DNA, 40 bp, Sphingobium yanoikuyae
  source 1..40: mol_type = genomic DNA
aaatagtgggatgccagccttcgctggcatgacggaataa

SEQ ID NO: 48724 - DNA, 50 bp, Sphingobium yanoikuyae
  source 1..50: mol_type = genomic DNA
tgttacgacaaaggtggctcagggagcgcaagaccacctttgtcgtaatt

SEQ ID NO: 48725 - DNA, 40 bp, Sphingobium yanoikuyae
  source 1..40: mol_type = genomic DNA
acactgtggcatgccagccagctctgtcaagacttaatga

SEQ ID NO: 48726 - protein, 486 aa, Mycobacteroides abscessus
MAVQAAQEIRAGCYLRISSDPKDRREGVDRQREDTAALCEVKNWTAAAYYIDNDRSASNGKDRPEWDRLLADVKCGDIDAIAAWDQDRGWRMMSELEELRRFFNSLGRRVQFATTGQGDIDLYSPTGVLAVQIKTAVSEHEIAMMKVRMLRAARQKAEQGKPKWRKAFGYLPETRSKHEDDGRRELDPATAPLVRQAYASVLAGGSLMDIIRDWNARDVCGLNGKPWTAATLSLFLRAPRNAGLRAHNGEIVGPGTWEPLVDEATWRAAQAVMDAPDRAPGRKAVRKHMLTGIMLCGNCAPGLDSRLSGRWAMQTHGAGPRAHSIVYACNTCRGCSVRAEHVEPLLYKLISARLARPDAVDLLKADRHDAEEAEALRLDRMTLLARLDEIADERADGELTGPQAKRATERIQVKLTDIDRRQQDGERLRVFDGIPLGKPEVVAAVKKLSADRFRAVLDVLCTVTIQPVGKSGREFKPERVQVDWKD

SEQ ID NO: 48727 - DNA, 50 bp, Mycobacteroides abscessus
  source 1..50: mol_type = genomic DNA
aagtgcacttcacgcagtcgctaatgttattgactgcgtaaagtacacta

SEQ ID NO: 48728 - DNA, 40 bp, Mycobacteroides abscessus
  source 1..40: mol_type = genomic DNA
gaaggtcttcaacagatgatgcttacggcacaacgctttc

SEQ ID NO: 48729 - DNA, 50 bp, Mycobacteroides abscessus
  source 1..50: mol_type = genomic DNA
aagtgcacttcacgcagtcgctaaggttattgactgcgtaaagtacacta

SEQ ID NO: 48730 - DNA, 40 bp, Mycobacteroides abscessus
  source 1..40: mol_type = genomic DNA
taagttcttcaacagaggaggctaacaggacaaggcactt

SEQ ID NO: 48731 - protein, 644 aa, Klebsiella oxytoca; identical to SEQ ID NO: 36856

SEQ ID NO: 48732 - DNA, 50 bp, Klebsiella oxytoca; identical to SEQ ID NO: 36857
  source 1..50: mol_type = genomic DNA

SEQ ID NO: 48733 - DNA, 40 bp, Klebsiella oxytoca
  source 1..40: mol_type = genomic DNA
tattcatggcatgccgtcctttcgtttttagcacaggttg

SEQ ID NO: 48734 - DNA, 50 bp, Klebsiella oxytoca
  source 1..50: mol_type = genomic DNA
tcccattgattgtggtgtgcgtcctgtcgtatactatgggaacattttga

SEQ ID NO: 48735 - DNA, 40 bp, Klebsiella oxytoca
  source 1..40: mol_type = genomic DNA
gattcatgccatgtatttctgtagtgtttaggacagtttg

SEQ ID NO: 48736 - protein, 496 aa, Adlercreutzia caecimuris
MDTEPLHPGEYVMYLRKSRADIEKEARGEMETLGKHERELVSMSKRMGIVVADIRRELVSGESIQDRHEFRHIMDEVMDRRWSGIVVHAVDRLGRGDMMEYGWILSVLQFTGTLIVTPGRTYDPSNREDMQQLQLQMFFANNELGAIKHRLRDGKEQAARDGQHIATVAPFGYRKVIVDGQKTLEPTEWAPTVVEIFEEVAAGAPLSTLSMRLIAREVPGKWNNRRIKTLIENPVYKGVIAWNRVVRAVESREGLALVKKTVRNDRPILADGLHDAIVSDELWEAANAMLGKNHKTRPATKFRNPLAGILRCEKCGRMMQYSHAGHREKAYSYYKHYKYSTCGCAPSRYEDVVAAVVSALEGVTEDLAVQIRDDGLASRRKAEKADLDRLLESCSRRIDRLMVLFEDDAIDIEEFRRRRRSIDTQIFQARGRLAEIEAMPDEDPRERIATLQSLVATLGDDGIDASARNVAAKKIIDCIYYAKEPGGDLRLKVELR

SEQ ID NO: 48737 - DNA, 50 bp, Adlercreutzia caecimuris
  source 1..50: mol_type = genomic DNA
tttagggatgattggaaccgcatctgaatggcattccgatcatccctata

SEQ ID NO: 48738 - DNA, 40 bp, Adlercreutzia caecimuris
  source 1..40: mol_type = genomic DNA
attggaattgaaccgcatctgaatgagttcgagggccaca

SEQ ID NO: 48739 - DNA, 50 bp, Adlercreutzia caecimuris
  source 1..50: mol_type = genomic DNA
tttagggatgattggaaccgcatccaaatggcattccgatcatccctata

SEQ ID NO: 48740 - DNA, 40 bp, Adlercreutzia caecimuris
  source 1..40: mol_type = genomic DNA
ataggtatctatgtgcatgcaaatgtgttccagggccaca

SEQ ID NO: 48741 - protein, 620 aa, Vibrio cincinnatiensis
MDYFMNKVKAYSYIRYSSPQQAKGDSFRRQFSKTQEYCEKNGYDLDTELNVYTELGKSAFKGEEQENLKRFIEDCKSGIVEKGSLLIVENLDRLSRDTINKAMRQFLHLLDYVNIYTLQDEKFYTSNEDVDNDSQVFDIITSLLIMSRAHEESQTKRKRLRESWEAKRQQIDKRKFATSYPHWLNLSDDWESFTLKPDAVRSIKKIFELCISGSGYNQILRYLNDRLDLYPTPSKRSKSGLWVRSTIQLLLSDRRLIGEMQMYKGAYKNRKPYGEPIPDYYPQIIDEKTFLKAQIAMKERNIGAGKTGAYRFSNIFRGFLHCTECGNVMEFVDKGNTKKRSQKYLTCTNAKRGGDCTSNKHFRYDELESMLLYLISENGFLPKPAEPNDLKLQLQKVTQQHYETDKKLNILLEQDFSAPAIIKKIEQLNHDVALYKQQMKELELKIKSTNTTNYDYDQLVHDIQHEPDDDVKFSNRAKLNGFLQENITNAIIYENHCPIVVFTMKDNTAHSLIMDKKYNFGGCTLPNNQDSFKRINGEGHEQIDKGIWMMMQHFLDLLVNTRDINFTEKEQESLDTILKDINKTTSSIIMNYNIDLFDKIISLIEKATEIVQRKSLFPSV

SEQ ID NO: 48742 - DNA, 50 bp, Vibrio cincinnatiensis
  source 1..50: mol_type = genomic DNA
agatggggatattgacaagcgaacaagtatttatgttataatccccacca

SEQ ID NO: 48743 - DNA, 40 bp, Vibrio cincinnatiensis
  source 1..40: mol_type = genomic DNA
ttccggcgcatacgcataaaagtgaccaaacccaccacca

SEQ ID NO: 48744 - DNA, 50 bp, Vibrio cincinnatiensis
  source 1..50: mol_type = genomic DNA
agatggggatattgacaagcgaactagtatttatgttataatccccacca

SEQ ID NO: 48745 - DNA, 40 bp, Vibrio cincinnatiensis
  source 1..40: mol_type = genomic DNA
tttctgcaaataggcataatagtgagaaaagccactccca

SEQ ID NO: 48746 - protein, 478 aa, Micrococcus luteus
MTKRKAAAAIYVRISRDADGRAAGVERQEADCRALAERMGLTLHPRVFKDNDIGASSRSRKARPAFGELLEAVEAGEVNVILAYSNSRITRRPMEWESLIRLSESHGLQVHTVVSSSAQFDTADGRMVLRVLAANDAAEADRISERVTRAKQQRLEEGAFRGGPRPFGYEADGMTIRETEAQALREAAGRIVAGESLRSVTADLRDRGFKGTRRADSGLQPVQLRRILLRPRNAGLVEHYGKVTGPAAWPAILSEDEWQAVRSVLTDPARKTNHGSNRVKHLGSSLFRCGVCGDHVRASAASRGYRVYRCKTGAHVSRAQEPIDHFIREVMAARLRADPDVLRREDDADDTAPNAIRRELSTLRARRAQLADDYADGLLDGPQVKAAGARIDAKIEATAAELARLTSASVLSGLADAEDAGNAFLTAPIGVQRAIVDALATVTIYPAGKKGRPAGWQTGDHYLDLETVQITWKGSDHD

SEQ ID NO: 48747 - DNA, 50 bp, Micrococcus luteus
  source 1..50: mol_type = genomic DNA
gggcgtcttagttgtactaatgccctggcgaaaggttagactagacacat

SEQ ID NO: 48748 - DNA, 40 bp, Micrococcus luteus
  source 1..40: mol_type = genomic DNA
gcggggtgcgtgccacgacctggcgatcgtcctggcggcc

SEQ ID NO: 48749 - DNA, 50 bp, Micrococcus luteus
  source 1..50: mol_type = genomic DNA
gggcgtcttagttgtactaatgccccggcgaaaggttagactagacacat

SEQ ID NO: 48750 - DNA, 40 bp, Micrococcus luteus
  source 1..40: mol_type = genomic DNA
gccgcccgcgccccacgacccggcgaccgccctggccacc

SEQ ID NO: 48751 - protein, 525 aa, Lachnoclostridium sp An118
MNIAAYCRVSTDKSDQLNSLETQKQFFTEYVQRTGDHLVKVYADEGISGTKIKNRKEFLQMMADAEHGLFDMVVVKDISRFARNTVDLLQNIRRLKALGIETQFLTANMTSMGNSEFVLTIFGALAQEESANTSKRIKFGKKVNAEKGRVPNIVFGYDKTIGDYFNLTINEKEAKVIRQIYQLYTEEGYGCAAISNKLNEQGSRTKRNCKWSQNAVSRILTNELYTGKIINGKQEVADFLTGQRKEKDETEWLVTERPELRIIDNEVFEQAQKILHSRNQAFNLNHERQSNKYLFSTLIKCKECGWSFRRTVRKYKNTYVRWVCSGHNGKGADSCPNAVTLDEEELIEVLQEYFSNVLKNKKKVIQYVVKEFQRVYKAKDENVEYEKELKDKLTKLKAMREKYMDMYTDDLITRQELNDRIGGARQEIERLENELKMVTYQITKGDQLEELLNTTFQSIEDITDVHQMTNTQLKKIIEKIEVDKDGNVDIYLKLLGDLGLDEAILVEDRTEIPDAENAQNNHDRT

SEQ ID NO: 48752 - DNA, 50 bp, Lachnoclostridium sp An118
  source 1..50: mol_type = genomic DNA
acgctcaaaataatcacgaccgcacatatggaagtgataatatagagcga

SEQ ID NO: 48753 - DNA, 40 bp, Lachnoclostridium sp An118
  source 1..40: mol_type = genomic DNA
ggtaagtaaatctaccatacataaagatgtgaccgaccgc

SEQ ID NO: 48754 - DNA, 50 bp, Lachnoclostridium sp An118
  source 1..50: mol_type = genomic DNA
acgctcaaaataatcacgaccgcaactatggaagtgataatatagagcga

SEQ ID NO: 48755 - DNA, 40 bp, Lachnoclostridium sp An118
  source 1..40: mol_type = genomic DNA
ggaaaacagagctaccatgaccaaagatgttacagagcgc

SEQ ID NO: 48756 - protein, 624 aa, Bariatricus massiliensis
MDAQEVMHMTDYSKITALYSRLSVGDEDRDGGESNSIQNQKIFLENYARGQHLTNIRHYIDDDESGRFFDRSAYSRMMDDVENGKIGVCIMKDLTRWGRDYLQVGNAMEIFRRNNVRFIAVNNGIDSEKPDTLEFAPFINIMSEWYAKDISKKVKTGIKTKGMSGKPIATEAPYGYVKSPDNKDFWIIDEEAAGVVRLIFRLFLDGKNRNQIAVYLTQAQIPTPTFYMKERGRGTCKNRALNEANRYKWNKATLTHILTRQEYCGDVVNFKTTKHFRDKRNHYVDRSQWQITENVHEPIIDRTDFETVQRILENAPVKRPNGDGEIHPLSGLLFCKDCGAKMHIRIDYRNGGKRHVAYCSEYHKGKAKNPKCNSPHIIDADLLMQTIAEVLKKIEDYSISNWAEFEALVKKNLAMQQTDKTKKQQKRIPQITTRLEQIDKVLNKLYEDNALGTIPQDRYEQMSQKYSEEYYALKAELAELQEQLSAFENAGGRAQKFLKLTERYAAFTDLTPAILNEFISRIEVHERDKKRAKQAIQHIGIYFNYIGKFENEVTQLTEPTEQEIRQMREKIEEAQKEKSRAYHRQYSREYRARNLEKRREYDRMKAREYRAKKKAQEAAAAPAQ

SEQ ID NO: 48757 - DNA, 50 bp, Bariatricus massiliensis
  source 1..50: mol_type = genomic DNA
aataacacttgacaaaacgcttcatggagtgcataattttaagtgtaaag

SEQ ID NO: 48758 - DNA, 40 bp, Bariatricus massiliensis
  source 1..40: mol_type = genomic DNA
ggaatacggctcggcccggtggggaacgcccgccgatata

SEQ ID NO: 48759 - DNA, 50 bp, Bariatricus massiliensis
  source 1..50: mol_type = genomic DNA
aataacacttgacaaaacgcttcaccgagtgcataattttaagtgtaaag

SEQ ID NO: 48760 - DNA, 40 bp, Bariatricus massiliensis
  source 1..40: mol_type = genomic DNA
gctgtagggctaggccctgccgggaaagccccccgagaca

SEQ ID NO: 48761 - protein, 460 aa, Klebsiella pneumoniae
MGHVMNTAYAYIRFSSEKQSTGDSVRRQQSLIDSWGKNNPDYILSQKIYKDEGLSAFTGKHAAGDLGRLMNDISNGSITAGDVILIESLDRLSRENISTATDRLKAILIHGVNVVTLTDQKQYTPESLNSPMDLIMSILTAQRAHEESESKSKRMREVWAKKRTEAEEGGKIITKSCPRWLTVNSDRTGFGPIPDRVQTINQIFSLRVKGESLSAISKILNEEGRLTFTGKAGKWNQSTIQQLVSNRALIGYKVQSRNSVVNHPDIPDYYPVVVDLQTFQAVQQLKSDQFGKKQTSDIPALVNLFKSVLRCKECGNIMILNSVTVNRDGYYVCSMRRQGRCEAKPINRKATDEALVNGLFYNLDRLMLSKPEQNPVTALEAQKQDLTERLNKLVVALEIAPDITEIISRMNAIKGDIQAIESQIAQHKQRLQSHISASVQGLNLLVKANRVEFQLVNRHG

SEQ ID NO: 48762 - DNA, 50 bp, Klebsiella pneumoniae
  source 1..50: mol_type = genomic DNA
aataacgtttagacatgtgcattggtcatagtaaccatctaaacatgcat

SEQ ID NO: 48763 - DNA, 40 bp, Klebsiella pneumoniae; identical to SEQ ID NO: 20558
  source 1..40: mol_type = genomic DNA

SEQ ID NO: 48764 - DNA, 50 bp, Klebsiella pneumoniae
  source 1..50: mol_type = genomic DNA
aataacgtttagacatgtgcattgtccatagtaaccatctaaacatgcat

SEQ ID NO: 48765 - DNA, 40 bp, Klebsiella pneumoniae
  source 1..40: mol_type = genomic DNA
gtccagggaacggttattgtccatggacaggatgacgttg

SEQ ID NO: 48766 - protein, 577 aa, Pseudomonas psychrophila
METLKIDRSKPLAIAYVRWSSTVQGGDDKDSYDRQTSPLEFFTSSTGVPVVETIIDPGQSAFTGENSKKGKLKGILDRIESGEIRKGDFLVVESIDRITRMRVLDGVALIQDGILKKGVKLYTTTDNKIYSYEDPDKDFENLLMISLIAKRANEESEIKSKRRRSAWNKAKTKATDGVPFNAHNLPYGLRHNLETNSFEIVEDEAQEIKEIFEGLKYEGVSNTLKKVNLTSKRKWSRKTVHLMLTSRYPIGTLMSQKRDGKKKVFERYIENYYPAILSHKEFQDALQAMKLRGKVKDYGRNTEGYLNIFKHCVKCAACGQSLMFEKSINQKGVKYGYFHCYTRKETLSHCDVPRFRFDFAFGTLLQLVRKLTCEDDDFDVHPWAREMPADYKSTMADDEIDMENFENQFLSLLSKSTATEAIKTEFYEAENELAKSKSLYENMTASFSQYKDGRIPSFFIQQMADAELAYENAKANIDALSAQIDNAESSLEIYSYRDIIELYSTDEGRLKLNHFFKSNGLKFVFNYEAKTRTVFMVVRDKKDAEIYRIGKKFTLHNPLKEFGIDNLNEHMNAVVKI

SEQ ID NO: 48767 - DNA, 50 bp, Pseudomonas psychrophila
  source 1..50: mol_type = genomic DNA
agtgttagaaaagactacccctttgagagcggatagacgtatcatgcact

SEQ ID NO: 48768 - DNA, 40 bp, Pseudomonas psychrophila
  source 1..40: mol_type = genomic DNA
agtgttgagggagccaatggagagcggttttatcgtgatt

SEQ ID NO: 48769 - DNA, 50 bp, Pseudomonas psychrophila
  source 1..50: mol_type = genomic DNA
agtgttagaaaagactacccctttaggagcggatagacgtatcatgcact

SEQ ID NO: 48770 - DNA, 40 bp, Pseudomonas psychrophila
  source 1..40: mol_type = genomic DNA
agaatccagggaggcaaagaggagctgtttcagcctgatt

SEQ ID NO: 48771 - protein, 618 aa, Hydrogeniiclostidium mannosilyticum; identical to SEQ ID NO: 11111

SEQ ID NO: 48772 - DNA, 50 bp, Hydrogeniiclostidium mannosilyticum; identical to SEQ ID NO: 11112
  source 1..50: mol_type = genomic DNA

SEQ ID NO: 48773 - DNA, 40 bp, Hydrogeniiclostidium mannosilyticum
  source 1..40: mol_type = genomic DNA
gtacatccggcgttgcaccgaacaggtgcatcaggggctc

SEQ ID NO: 48774 - DNA, 50 bp, Hydrogeniiclostidium mannosilyticum; identical to SEQ ID NO: 38139
  source 1..50: mol_type = genomic DNA

SEQ ID NO: 48775 - DNA, 40 bp, Hydrogeniiclostidium mannosilyticum
  source 1..40: mol_type = genomic DNA
gtacagcgctggctggacccaaaaggtgctgcaggggctc

SEQ ID NO: 48776 - protein, 583 aa, Cronobacter condimenti
MATRLYSYVRWSTDKQSGNTSLDRQTDKAKAFASLHGLEYVQILDAGISAFRGKNTTQGALAGFIEAVKAGAIPNDSYLYVENLDRLTRQDVMTALNLFTGLLSLGLTIVTGMDGKVYSQDSVKNNVTDLMMSLFLFSRANEESLTKQKRAHETALKLIDRHRAGLPVNIKSAGSAPWWIDASMGTYEAVKPHPVHWKAAQKAVELMLEGWGCFRVASYLTDNPDLYPPPRGNRGKGKKRSECWAVANLKAMRSNRALYGEKVITIDGVTHRLSNYFPAVCSQTDFARLQDVACSNRHKVGEVRQTITLLSGLGLLRCGHCGGSMSFFSKEGRIRYVCETGKNKTSACRVWSVSGLLVERCLLAPLIRGYMDLMMGKQGKREDLTQAIEAKRGELNGIESQISNITSAITMGGNIPALVASLQALEHTKSGVLVELERLAQRQALQDGKDHQLESMVDFYELLTPDLLEDTTDERRLKVREVVRAVVRSVTLSKGPDKALILSYELQDKTAYVYTGTLTAEGKKGYTLEVVNGDIQINGTEDNEEAQRLIGVIQDAEQEYHKAISKILAGFPAPVGSHFFGKR

SEQ ID NO: 48777 - DNA, 50 bp, Cronobacter condimenti
  source 1..50: mol_type = genomic DNA
attggaatctaaaaatattttgggttgcccaacttcaaatagatgccaat

SEQ ID NO: 48778 - DNA, 40 bp, Cronobacter condimenti
  source 1..40: mol_type = genomic DNA
atcgaccggatatttcgggttaccgggatgactgatgata

SEQ ID NO: 48779 - DNA, 50 bp, Cronobacter condimenti
  source 1..50: mol_type = genomic DNA
attggaatctaaaaatattttgggaggcccaacttcaaatagatgccaat

SEQ ID NO: 48780 - DNA, 40 bp, Cronobacter condimenti
  source 1..40: mol_type = genomic DNA
atctaccagatattttgggagattaggaagattcatgaga

SEQ ID NO: 48781 - protein, 470 aa, Anaerofustis stercorihominis
MMDDVEAGKVNCIVTKDLSRFGREHVMMDYYLEFLFPEKRVRYIAVAENEDTEKGLSDFVPFKNLFNEWFAKDTSRKVKAAFKAKFATGQRIGAYAPIGYRKHPEIKNKLIIDEETRWIVEKIFDLAIHGRGAASITRILIEEKVPTPGFINFQRDGTFANIYAGAPEEKSYAWTIAQVKSIMKDETYIGHTIHYRETNISFKNKRRVRKPQSEWVRVENTQEPIVSEQVFRQVQEQIANRRRKCKDGTTQIFSGLVKCADCGWSLSYGENRQNSKPYGHYHCSKYGQGTRQCSMHYIRYDVLYAYVLSRLQYWSGLVQHDEERLLKRLLNATDKGQAAARKKQAAELKKAEKRKAEVDTLFARMYEDWAAGRITEYNFSMLSGKYQSEQAELDTKIEQLQSAIATESQNAADAEKWIALMKECVNPTELTAELLNTLIEKIVVHEAVKGEDGSREQEVEIFYRFIGKID

SEQ ID NO: 48782 - DNA, 50 bp, Anaerofustis stercorihominis; identical to SEQ ID NO: 4067
  source 1..50: mol_type = genomic DNA

SEQ ID NO: 48783 - DNA, 40 bp, Anaerofustis stercorihominis
  source 1..40: mol_type = genomic DNA
ggtatcaaaatgggaaagaggactttcttatccggatata

SEQ ID NO: 48784 - DNA, 50 bp, Anaerofustis stercorihominis
  source 1..50: mol_type = genomic DNA
caatatctttaactatgtgataccagggtttcacttagataaagatacca

SEQ ID NO: 48785 - DNA, 40 bp, Anaerofustis stercorihominis
  source 1..40: mol_type = genomic DNA
ggtaacataatgggaaaaaagcattatttatatggatatt

SEQ ID NO: 48786 - protein, 477 aa, Streptomyces leeuwenhoekii
MARRVGIYTRISRDDEGDALGVARQQQDCERLADLRSWQAVKVYEDNDVSAFKRNVVRGEFELMLRDLRAGLIDGIVAYDLDRLARQPRDLERLIEIYDERPRLEFATVTNDVNIGTPDGRTMARIMVAFANKSSHDASRRIKRKHLELAQQGKDSGGPAPYGWRKDDRTRVDPEAAKAIREAQREILAGVRIGTIRTRWQEQGLGNPREGTKRMAHHHVEHILTNPRLVGYRTYHGEILHGDDGRPVMGEWEPINTLEEWEAVCAAIAERKQKQPGKSLARKYLLSGIARCGLCKSKIRGQINQRWQPGSKAARFTYQCSVVNGGCGKVGRTGEPVDHLIARLVLEEQRTRATVTGVPVDQQWPKEAELEQVNQDIAQLVEAERTKQITVSTLLQLLPAKERARDELKLERARFYKDRKQAEAKGEAANLSVEEFFELPIEQQQVIVLHSLSAVIIHPAGRGRRKFDPSLIEPVWH

SEQ ID NO: 48787 - DNA, 50 bp, Streptomyces leeuwenhoekii
  source 1..50: mol_type = genomic DNA
ttatgtactggaggcaagacactccaggctgacttgatcgcatgacggta

SEQ ID NO: 48788 - DNA, 40 bp, Streptomyces leeuwenhoekii
  source 1..40: mol_type = genomic DNA
cacgggcggctggacggaccacgggaagttgatccagtcg

SEQ ID NO: 48789 - DNA, 50 bp, Streptomyces leeuwenhoekii
  source 1..50: mol_type = genomic DNA
ttatgtactggaggcaagacactcagggctgacttgatcgcatgacggta

SEQ ID NO: 48790 - DNA, 40 bp, Streptomyces leeuwenhoekii
  source 1..40: mol_type = genomic DNA
gacggacggcgggacggacagagggaaggagagacagagg

SEQ ID NO: 48791 - protein, 496 aa, Chryseobacterium indologenes; identical to SEQ ID NO: 29931

SEQ ID NO: 48792 - DNA, 50 bp, Chryseobacterium indologenes
  source 1..50: mol_type = genomic DNA
actatcaaatagttgtctccttcagttgtgtgtgaacttgacaggacgct

SEQ ID NO: 48793 - DNA, 40 bp, Chryseobacterium indologenes
  source 1..40: mol_type = genomic DNA
taaaaagtagcgatttcttgtgacctcgacaggattcaaa

SEQ ID NO: 48794 - DNA, 50 bp, Chryseobacterium indologenes
  source 1..50: mol_type = genomic DNA
actatcaaatagttgtctccttcaattgtgtgtgaacttgacaggacgct

SEQ ID NO: 48795 - DNA, 40 bp, Chryseobacterium indologenes
  source 1..40: mol_type = genomic DNA
taaaaaaaatctatttcatatgatttaaacaggattcaga

SEQ ID NO: 48796 - protein, 620 aa, Anaerostipes hadrus; identical to SEQ ID NO: 36306

SEQ ID NO: 48797 - DNA, 50 bp, Anaerostipes hadrus; identical to SEQ ID NO: 11112
  source 1..50: mol_type = genomic DNA

SEQ ID NO: 48798 - DNA, 40 bp, Anaerostipes hadrus
  source 1..40: mol_type = genomic DNA
ggcagctacttgatgaagtgatgttgatcgcagagaaaca

SEQ ID NO: 48799 - DNA, 50 bp, Anaerostipes hadrus; identical to SEQ ID NO: 37649
  source 1..50: mol_type = genomic DNA

SEQ ID NO: 48800 - DNA, 40 bp, Anaerostipes hadrus
  source 1..40: mol_type = genomic DNA
ggaagctacatgctgaaatgctgaagatggcagaggttca

SEQ ID NO: 48801 - protein, 569 aa, Intestinimonas butyriciproducens
MKQSSKNPTMGTAALYCRLSRDDNMDTESNSISNQKKILQKAAKEKGYTDTLFFVDDGITGTTMKRKDFQKMLAAIEAGYISAVFVKDLSRLGRNYIEVGKLTEEFFPQHDVRLVAVADGVDSDEGENEFTPFRNIMNEWYAKDISKKRRIVNKMKGNSGIPLSPPPYGYIKNPDDPRFWVIDPEAAAVVRRIYQMALDGYGLAETAAALEKDGILNPTYYWRAKGASRGGSKSTVEPTKWGHTTIKKILTLQEYCGDVINFKSYSKSYKMKRRIENPEENRAIFLNIHEAVIDRATWEKVQSMKKGTRRKRPTVTQEPSVFSGLLKCPECGGNLNFHFNQSNHDIKFFSCQNHNSGLRKCSKTHYIRLDFLEQVVLYEVRRLAAFANEYEDDFIKAMMGRSAKVAENDRARKQRELDGLLARDKELDVLFERLYEDNVAGKIDDTRFAKMSKRYEQEQGENAKKIKALRLELKKSEGKRMDVDHFLEAVRRYTNADKITQRMAAELIDHIDVYHAEKQDGVTTQRVVIYYNCIGAFEVPERRKIPEADITMRTRKGVAVSYAPAQVAV

SEQ ID NO: 48802 - DNA, 50 bp, Intestinimonas butyriciproducens
  source 1..50: mol_type = genomic DNA
caaatcctataaggacactccgcatggtcggagtgtaattataggactta

SEQ ID NO: 48803 - DNA, 40 bp, Intestinimonas butyriciproducens
  source 1..40: mol_type = genomic DNA
caaatttctcagcactttttggtccgagtgactggattcg

SEQ ID NO: 48804 - DNA, 50 bp, Intestinimonas butyriciproducens
  source 1..50: mol_type = genomic DNA
caaatcctataaggacactccgcacagtcggagtgtaattataggactta

SEQ ID NO: 48805 - DNA, 40 bp, Intestinimonas butyriciproducens
  source 1..40: mol_type = genomic DNA
tcaatttctcagcatttttcaaactgtgttcctggatttg

SEQ ID NO: 48806 - protein, 491 aa, Eggerthella lenta
MGKVVIYTRVSTKEQLQGGSLATQLRTCMTYAMHHCYEVARVFQEEGESAKTADRTELQKMLAYCKEHAGEIDGVVVFAVDRFSRNMGDFVSLRKELERHEIRLLLATREVEDTPEGEFVMNMDAALAQLDNARRAVRTVVGMRDAAEEGKWVHQAPLGYLDACKTGRGSISPDPERAPLVREAWCLIDAGYSEAEALRMVTAKGLTNKRGKEVPKQTFSKMLRNPLYMGVVETMGVRTKSSVIEPIVEQDLWLRVKRRLDGKKHEPSRRRKANPEYPLRGFIEDPEGRRYTGSAPRGASGIRYPAYHCTQRGGRRYPVDKVHREFAALLSALNLDENRAKALREAIRLNYLERHETAENERKRLTKELTVVESSISAAIDKLMTGVLTDEQAKEYLAGREQRKQEIQLRLSELGTTESNVDEIWNFGLGVLSDLSGTWENIANIEVKQRFQRWVFPENLTYDGEEFGTRRIACSLCIKQAINAEVSTMVP

SEQ ID NO: 48807 - DNA, 50 bp, Eggerthella lenta
  source 1..50: mol_type = genomic DNA
ataaacgccgaggtgtcaacgatggtgccccaagataacgtaacttggaa

SEQ ID NO: 48808 - DNA, 40 bp, Eggerthella lenta
  source 1..40: mol_type = genomic DNA
tccggcctggcatttcgtggtgcccccaacgggaatcgaa

SEQ ID NO: 48809 - DNA, 50 bp, Eggerthella lenta
  source 1..50: mol_type = genomic DNA
ataaacgccgaggtgtcaacgatgttgccccaagataacgtaacttggaa

SEQ ID NO: 48810 - DNA, 40 bp, Eggerthella lenta
  source 1..40: mol_type = genomic DNA
tctggctttgcttttccttttgccccctacctcaatcgaa

SEQ ID NO: 48811 - protein, 615 aa, Burkholderia stagnalis
MPQAKPPKAYSYIRFSTPEQQSGDSDRRQTELSRKYAEAHGLALDENLTYRDLGVSAFDKSNVTSGQLGAFLSAVDSGAVEPGSYLLVESLDRLSRAKITDAFEIFMRIINRGVRIVTLADGMEYSKEKANQQFTDLIISIAVMSRAHEESQTKSKRLKEAWKAKRGRIGDAKLTEMAPAWLKLNDERTAYSLIPDRVELVQRMFQWSKDGIGSETIARRLNQQGLPTWGTRKADQWHASYIKKVLDNRAVLGEFQPHVLVNGKRVPEGDPASDYFPRIILDEDFVLAKTARQSRRTNSAGRKGQTFSNVFSGVLRCGYCNGSMVYVNKGHNGPRARLLVCARAKAGKGCHYVPWEYSQFERSVLTYCKGLDFDVFLQTRDTVKSELAALSARIAVLESSIADNEQKQANILEAIESGAKFQQFEARMGELEQNRVKFNAELDETRQKYDLRANAKVDVTAVRASIDGLLQRISELEGDELYDVRARLSQHIKRLIVRIAMYPGGYIEQPFFVERLRAHLVSKGTDTKVADEYIASRLKLTPNVSERFFTMISRSDAVRSIRPDLDNPEILHLQQGEGGQGLAAHAETIGAMLQKLMEIAHKSTGSTEALPDTGR

SEQ ID NO: 48812 - DNA, 50 bp, Burkholderia stagnalis
  source 1..50: mol_type = genomic DNA
gtgggttttattggctacaagataaggacatagggccaaataaacccagc

SEQ ID NO: 48813 - DNA, 40 bp, Burkholderia stagnalis
  source 1..40: mol_type = genomic DNA
gccgggcggcccgaccatcagcatgtgatgcccgccggcc

SEQ ID NO: 48814 - DNA, 50 bp, Burkholderia stagnalis
  source 1..50: mol_type = genomic DNA
gtgggttttattggctacaagataccgacatagggccaaataaacccagc

SEQ ID NO: 48815 - DNA, 40 bp, Burkholderia stagnalis
  source 1..40: mol_type = genomic DNA
cacgggcggccagacccaccccatgtgttccccggcgcgc

SEQ ID NO: 48816 - protein, 609 aa, Burkholderia stagnalis
MPPAPTPKAYSYIRFSTPEQQSGDSYRRQTELSRKYAETHGLTLDENLTYRDLGVSAFDKSNVISGQLGLFLNAVDSGAVEPGSYLLVESLDRLSRAKITDALEIFMRIINRGIHIVTLADGMEYSKEKANHQFTDLIISIAVMSRAHEESQTKSKRLKEAWRAKRGRIGDTKLTEMAPAWLQLNEDRTAYSLIPDRVELVQRMFEWSKDGIGSETIARRLNQQGLPNWGARSAEQWHASYIKKILDNRSVLGEFQPHTLVNGKRVPEGDPALDYFPRIISDEDFVLAKAARQSRRTNSAGRKGQTFSNLFSGILRCGYCDGSMVYVNKGHDGPRARLLVCARAKAGKGCHYVPWEYPQFERSVLTYCKGLDFDAFLETRDTVKSELTALSARIAVLESSITDNEQRQEYLLEAIESGGAKFQQFEARMVQLEKERIKINAELDETRHKYDLRANATVDVTAVRASIDGLLQRIGELEGEELYDMRARLSQHVKRLITRIAMYPGGYIEKSLFVERLRAHLISKGADTKAVDEHIASRLKLTPNVSERFFTMISRSDAVRTIRPDLDNPEILHLQQAEGGLGFAAHAEAIGTILQKLTEIAHIPSGGTA

SEQ ID NO: 48817 - DNA, 50 bp, Burkholderia stagnalis
  source 1..50: mol_type = genomic DNA
gcgggtttatttggccacaagttaagggtgtggggccaaataaacccaat

SEQ ID NO: 48818 - DNA, 40 bp, Burkholderia stagnalis; identical to SEQ ID NO: 48813
  source 1..40: mol_type = genomic DNA

SEQ ID NO: 48819 - DNA, 50 bp, Burkholderia stagnalis
  source 1..50: mol_type = genomic DNA
gcgggtttatttggccacaagttaccggtgtggggccaaataaacccaat

SEQ ID NO: 48820 - DNA, 40 bp, Burkholderia stagnalis; identical to SEQ ID NO: 48815
  source 1..40: mol_type = genomic DNA

SEQ ID NO: 48821 - protein, 566 aa, Pseudomonas putida
MKPKAYSYIRFSSPEQAKGDSYRRQRAAALKYCAENGLELADTKEYRFFDPGRSAFTGKHISDEGEFGRFLTLVNEGKIKPGSFLLVESLDRLSRDKVNVALAQLLNLLETGIKVVTLSDKRTYSNDSPDLATELIVSIAVMMRAHNESSEKGNRVADAWRQKRTLARDKKTPLGAACPYWLKLVNGVYEPLPERVEVVRRIFDMTIQGYGQAVISRRLNQGNVPVFGSTRSTKEKPRNKSGLWGTSSVEKILNNRALLGEYQPTHLVGRVRENDGEPVEGFYPVVISPDVFLQAKAARAQRKTAGATKQSKNFNVWQGLAKCRLCGDAMHLINKGRPPKGYTYLQCYSAKKGICRSGSIRIEQTEVVFKEILANVDSMSLVRGRSAEILKNLEVAEGRIQVVTDRLERATEVYTVVATLAGARLIQELEHEHAQSLAERDALREQLASHRVISREDFFSQLDLVTYEGRAAANSLLKRLELQVVFKRHNPSHFRCWVLDKTDETVSDEIEQMLFGVLWKDGEASTQPLDNDTWQRRIEQGEITEEDVYRDHEGGIDGEWFGSPFR

SEQ ID NO: 48822 - DNA, 50 bp, Pseudomonas putida
  source 1..50: mol_type = genomic DNA
tttggtggatatggttacaacctgcttaggttgtgtgagaatgcaccaac

SEQ ID NO: 48823 - DNA, 40 bp, Pseudomonas putida
  source 1..40: mol_type = genomic DNA
cgccggggcccataacctgctgtttaccggcccgcctggc

SEQ ID NO: 48824 - DNA, 50 bp, Pseudomonas putida
  source 1..50: mol_type = genomic DNA
tttggtggatatggttacaacctgactaggttgtgtgagaatgcaccaac

SEQ ID NO: 48825 - DNA, 40 bp, Pseudomonas putida
  source 1..40: mol_type = genomic DNA
cccgggggccgctgccctaacgtttcccgtcccgcccggc

SEQ ID NO: 48826 - protein, 569 aa, Sulfitobacter sp SK025
MSAAMIPAVIYARYSTDMQSASSVEDQIRLCAERVEREGMAVTQHYADHGISGASLMRPGIQQLLQDAMAGKFQVVFAEALDRISRDQEDIAAVFKRLSFAGVQIITLSEGAVSELHIGLKGTMNALFLKDLSDKTRRGLRGRVEAGKSGGGNSYGYDVVRKVNAAGEPERGDRKINEDQADIVRRIFNEYAAGTSPRVIAKTLNAEHVPGPTGKTWGPSTIHGNKDRGTGILNNELYIGRLVWNRLRYVKDPETGKRLSRLNPPDQWIVQDVPHLRIIDDDLWQKVKARQDATALGKQDKSKAEGFWDRRRPRFLLSGLIKCGCCGSTFVKISQQHFGCASARNKGTCESKRTIRRDVLEASVLNGLQHRLMDDKLLAVFCEEYTRHMNALRMAESGNRAKDEARLQKVIRELDRMIDAICDGVPAERVKDRMIALEAERAEIEKRLEAEPKEEKPLLHPSMGERYRQGVMRLRESLADKNAQHEAVEILRGLIDRIVLHPSSDEASGFVMDIEGDLAGILSLCQTSKKAAGLSPDDLMQIKLVAGARSGHDLPAEDDSGGQMKLVAG

SEQ ID NO: 48827 - DNA, 50 bp, Sulfitobacter sp SK025
  source 1..50: mol_type = genomic DNA
cgggcaaatgaagctggttgcgggagggcgccttggactttgtttgccgt

SEQ ID NO: 48828 - DNA, 40 bp, Sulfitobacter sp SK025
  source 1..40: mol_type = genomic DNA
cgctaaagttggttgcgggagtaggatttgaacctacgac

SEQ ID NO: 48829 - DNA, 50 bp, Sulfitobacter sp SK025
  source 1..50: mol_type = genomic DNA
cgggcaaatgaagctggttgcgggacggcgccttggactttgtttgccgt

SEQ ID NO: 48830 - DNA, 40 bp, Sulfitobacter sp SK025
  source 1..40: mol_type = genomic DNA
cacaaaagttggtggcagcacttggatttgaacctgggga

SEQ ID NO: 48831 - protein, 553 aa, Streptococcus suis
MKRKKAYIYTRVSTNIQVEGFSLDAQETRIHQYANAFDIEIVKTYQDAGKSGKTMLGRTEFMAMISDIEAEKDKVDYVLVFKLSRFGRNAADTLKSLAIMESHGVNLICVDDGLDSSKDSGKLVITILSAVAEMERENIISQAMEGRRQKARAGQWNGGFAPVGYSLVNGQLQVNQEEAESVKMIFDLFANSDMGTIAIAKHLANLDIKKPIRHNSTLPYFSSSGIARILDNPVYNGKIAFGRRESTRDKVSGESKVKQSENYILTDGIHEAIIDDETWKKVRKKREANAHKYKRENPSKGDSIYVLSGLIKCPLCNAGLYGNKSIKRNKHKKDEYYKNYYYYACKHRNHVDGHKCTFNKQLKTGNLDHEVLSIISKLVSRPGFARKLQEKINIQVDTSRIDSEIEQYKSLFRQLNATKMNLIQQIDSLNFEDPHFQQKSIDLDMRLNTIYDKLADVEMLIEASESKREVILKDKMTADNIYKILVNFASFMDVMEDIDKKRLCQMLIEKVEIYDEKNEAGRWVKAIHFKLPIIEEDLEISLDNITSVEAVVK

SEQ ID NO: 48832 - DNA, 50 bp, Streptococcus suis
  source 1..50: mol_type = genomic DNA
agtttggacaatattacatcagttgaggcggttgttaaattgtccaaacg

SEQ ID NO: 48833 - DNA, 40 bp, Streptococcus suis
  source 1..40: mol_type = genomic DNA
tccccacacagcacggacagaggcggttgttaaactaaac

SEQ ID NO: 48834 - DNA, 50 bp, Streptococcus suis
  source 1..50: mol_type = genomic DNA
agtttggacaatattacatcagttagggcggttgttaaattgtccaaacg

SEQ ID NO: 48835 - DNA, 40 bp, Streptococcus suis
  source 1..40: mol_type = genomic DNA
tccccacagcccagggccaagggcggtcttctaactacac

SEQ ID NO: 48836 - protein, 557 aa, Blautia obeum; identical to SEQ ID NO: 11441

SEQ ID NO: 48837 - DNA, 50 bp, Blautia obeum; identical to SEQ ID NO: 12922
  source 1..50: mol_type = genomic DNA

SEQ ID NO: 48838 - DNA, 40 bp, Blautia obeum
  source 1..40: mol_type = genomic DNA
gttccatgaaggtctgtcaaaggtcgctccactccaacca

SEQ ID NO: 48839 - DNA, 50 bp, Blautia obeum
  source 1..50: mol_type = genomic DNA
aagtatcgctatctaacctcagcaggtaatgaggtgtgatagcgatagcg

SEQ ID NO: 48840 - DNA, 40 bp, Blautia obeum
  source 1..40: mol_type = genomic DNA
gttccagggaggcctctcaggggtcactccaaccgaagga

SEQ ID NO: 48841 - protein, 498 aa, Aeromonas dhakensis
MTPIKMTTASKPQAILYSRFSSSQQADGDSIRRQEEAAYKFCEREGLELIESQFKDLGFSGWKRHVKREGLESLLMAVENGTIPSGTWLLVEATDRLSRQGWDHVVQLVKSLVSTGCTFVTLDNNQIYTNDNIQDLMSALPLMISADLAFKESQKKSERLRAVKTNKRTNRVIQGNQPFWIDVVDGKPVLNDKAPLARRIVDMALEGIRPLAIVRQFNTEGIKSPKGKEWEVAVIRRILKNTILYGAKTYFEARDGEYKDVETVAGLYPKICTLAEFEQITIKKKKDDNSYNTSGPFSNLLKCQCGKPLVAKQRRGDDYYKVCSGMQNKTCNYRGYYKNIDFYLTKWLGTLSMEEIAHKSNVIDNSPRITELEQLLIDLEAMRVENKGKTRILQRIYEDIEEAESELEQLQAQKFLSEGDTKTTLRDALSFSDNPTKQNMIFRRYINTIVCRKETKDIIVGEVHFKSGASYEVWIHHDSKLKNTSESISYKYNLKTDR

SEQ ID NO: 48842 - DNA, 50 bp, Aeromonas dhakensis
  source 1..50: mol_type = genomic DNA
ttgtcgtcaaaaagaactagcatcacgatgttagttattttagtatacag

SEQ ID NO: 48843 - DNA, 40 bp, Aeromonas dhakensis
  source 1..40: mol_type = genomic DNA
gagcggcgcaatcagcatcaccttgttgatcatccagacg

SEQ ID NO: 48844 - DNA, 50 bp, Aeromonas dhakensis
  source 1..50: mol_type = genomic DNA
ttgtcgtcaaaaagaactagcatctcgatgttagttattttagtatacag

SEQ ID NO: 48845 - DNA, 40 bp, Aeromonas dhakensis
  source 1..40: mol_type = genomic DNA
gggcgggggaagcaggatgtccttggtgaccatccacact

SEQ ID NO: 48846 - protein, 490 aa, Aeromonas salmonicida
MPQAILYSRFSSSQQADGDSLRRQTEMAERFCMTHGLELSSMTFEDLGVSGWKEVLRDGLKSLLKAVERGVVPNDSFILVEAADRLSRKGWEDVTKIVSELISRGCSLVTIENGQIYNSTNFKTLAGVLPLMISADLAKQESDRKSQRIRSVKTAKREQRVIQGNQPFWIDIVDGAPVLNAKAPLARRIVDLSLSGKRPLAIVREFNTERLESPNGGVWQVAVIRSILKNTILYGAKTYFESRDGEYTPVETVAGLYPKICTKAEFDIIKTGTGKKGRKGKGPFSTLLRCVCGRPLVIKGRRGDDTYRVCSGSIDNVCKLKGYYKNIDEILLNQVAFIEVPNDKPVEVNNDERISELEQRLIDLDEMRKENKGKTRILQMVFEEIEEVEQELEELNKEEPISQDDIDLKTIMDIEDSDKQNAILKRRIKKIECSKDGYFTNVHIVFRTGFQRKMIIDQSRKLKGGYEVMGVAIGGDRLRQELEELGQEEE

SEQ ID NO: 48847 - DNA, 50 bp, Aeromonas salmonicida
  source 1..50: mol_type = genomic DNA
cgtagtgtaaatgaaactaacatcacaatgcttgtttcttttctaccaca

SEQ ID NO: 48848 - DNA, 40 bp, Aeromonas salmonicida
  source 1..40: mol_type = genomic DNA
gagcggtgcaatcagcatcaccttgttgatcatccagacg

SEQ ID NO: 48849 - DNA, 50 bp, Aeromonas salmonicida
  source 1..50: mol_type = genomic DNA
cgtagtgtaaatgaaactaacatctcaatgcttgtttcttttctaccaca

SEQ ID NO: 48850 - DNA, 40 bp, Aeromonas salmonicida; identical to SEQ ID NO: 48845
  source 1..40: mol_type = genomic DNA

SEQ ID NO: 48851 - protein, 521 aa, Streptomyces griseoaurantiacus
MSTMQVVCWIYARISEDPREQRRGVERQLRDLRTYAQQQGWEVRGEFHDNDLSAFKEEDRPGYNDLMHAMTMEMPQVRGEGRRGVILALHSSRVWRRAVQRAQAIDDLQQAKACVAFETGGFFDMTKATDRSMLRQLGEADTQESEVKAERVAREALARAEEGRTNGAVLYGWRRVYDLDDRGRRVGFHDVEHEEQAPIVREVVNRLARMETLRSITEDLNRREVPPPGAHLVMRKKRRAQGNEDGSRWNKTSVKKLALRPANAGIRMHHGTPYPAAWPALVDKDVWQRVKDMLENPKLGIPRNPEEDKAARSLDGHRKHMLSWGIGECGPCGSVLKVTKKGKARSSLYVCDGKGCTGRSEEYVDAWVGAVVVARLTRPDAVEVFGGDDSAAQDALGQAERLRKRLEEAAEEYADGILTRPQLSRITVRLKERIAAFEEEAKRLRPRLPLDTMGELLGVPLEVAEAAWEALTVVQKRKVLEVLNIKVRILPTGRRGPGFDPDFVQVLAQDGTPFAEYAPAA

SEQ ID NO: 48852 - DNA, 50 bp, Streptomyces griseoaurantiacus
  source 1..50: mol_type = genomic DNA
tagtccgtcctggaccccccgggaacacactgtcgtcacgacgggtacta

SEQ ID NO: 48853 - DNA, 40 bp, Streptomyces griseoaurantiacus
  source 1..40: mol_type = genomic DNA
ttgcccaacccgcccgggaagaggcagtccccggtgaaga

SEQ ID NO: 48854 - DNA, 50 bp, Streptomyces griseoaurantiacus
  source 1..50: mol_type = genomic DNA
tagtccgtcctggaccccccgggatcacactgtcgtcacgacgggtacta

SEQ ID NO: 48855 - DNA, 40 bp, Streptomyces griseoaurantiacus
  source 1..40: mol_type = genomic DNA
gggaccaacctgccctggctctggcagtccccggggaggg

SEQ ID NO: 48856 - protein, 561 aa, Nocardia nova; identical to SEQ ID NO: 44191

SEQ ID NO: 48857 - DNA, 50 bp, Nocardia nova; identical to SEQ ID NO: 44192
  source 1..50: mol_type = genomic DNA

SEQ ID NO: 48858 - DNA, 40 bp, Nocardia nova
  source 1..40: mol_type = genomic DNA
gggctcaggtaaggggcctgtggtggagctgccgggaatt

SEQ ID NO: 48859 - DNA, 50 bp, Nocardia nova; identical to SEQ ID NO: 44192
  source 1..50: mol_type = genomic DNA

SEQ ID NO: 48860 - DNA, 40 bp, Nocardia nova
  source 1..40: mol_type = genomic DNA
gggctttgttaaagcccatgtgttggagctgccagaaatt

SEQ ID NO: 48861 - protein, 520 aa, Mycobacteroides chelonae; identical to SEQ ID NO: 36081

SEQ ID NO: 48862 - DNA, 50 bp, Mycobacteroides chelonae; identical to SEQ ID NO: 36082
  source 1..50: mol_type = genomic DNA

SEQ ID NO: 48863 - DNA, 40 bp, Mycobacteroides chelonae
  source 1..40: mol_type = genomic DNA
tccggtggctttcacgttgtactgcgccacttcgatcttg

SEQ ID NO: 48864 - DNA, 50 bp, Mycobacteroides chelonae
  source 1..50: mol_type = genomic DNA
gttgtgtgtgcagccttcacgttgctctgtgccatacatgagacaacagc

SEQ ID NO: 48865 - DNA, 40 bp, Mycobacteroides chelonae
  source 1..40: mol_type = genomic DNA
acaggagacattcacgttgctctaatcctcttggatcttg

SEQ ID NO: 48866 - protein, 499 aa, Alkalihalobacillus lehensis
MIAIYVRVSTEEQGKKGYSVRNQIQMCKDKAGTNDVIQYVDEGFSGEFLERPDLERLRKDVREGLITKVVCYDPDRLSRKLMNALIIDDEFRKKDVEMIYVNGEFASTPEGQLFYSLRGAISEFEKAKINERMTSGRKRKAIEGKVIKNSHAYGYDYDKENGMYVQNEKEANIVRFIFDMFTKPTKDIQGMNGIAKFLTAKEIPTKKGVGVWHRQVVRQILLNEMYTGTYYQNKFNTEGMLANKYKADNKIRMTIRDQSEWIETEIPQIIEQEQFDYAQELLKQARRRWSKSTSARTYLLSGIVRCADCGNTMTGIYRNNWGTKLRYYTDVKNSSGAKNEGCKHHVRADKLETTIWDKIEELLNNPERLEDYKPENGDTFSKFEIDQIDDLKEQIDKAKSGRKKLLQLFALEDMDTEEIRDSIVELKSKEERLKNQLIELEGKVNNQKEVSSSFLMLDEVRQRWLKEDTISEEDKKEILRMLVKEIILSKDGEVSIQLL

SEQ ID NO: 48867 - DNA, 50 bp, Alkalihalobacillus lehensis
  source 1..50: mol_type = genomic DNA
tgtaatagtaatgacattagaatctccgttttgatgtcacgatgtgaacg

SEQ ID NO: 48868 - DNA, 40 bp, Alkalihalobacillus lehensis
  source 1..40: mol_type = genomic DNA
tcgcaaatgcatgagaatctcattctcaatacatcgagct

SEQ ID NO: 48869 - DNA, 50 bp, Alkalihalobacillus lehensis
  source 1..50: mol_type = genomic DNA
tgtaatagtaatgacattagaatcatcgttttgatgtcacgatgtgaacg

SEQ ID NO: 48870 - DNA, 40 bp, Alkalihalobacillus lehensis
  source 1..40: mol_type = genomic DNA
tcacaaatgcatcataagcatctttccatgtcatcgagct

SEQ ID NO: 48871 - protein, 526 aa, Klebsiella oxytoca
MYRKFIMRTAYAYIRFSSEKQSAGDSVRRQQSLIDSWVKNNPDYILSQKTYKDEGLSAFTGKHAAGDLGRLMNDISNGSITAGDVILIESLDRLSRENISTATDRLKAILIHGVNVVTLTDQKQYTPESLNSPMDLIMSILTAQRAHEESQSKSKRMREVWAKKRTEAEESGKVITKSCPRWLTVNSDRTGFEPIPEHVESIRLMFEMRLSGKGFAGIAQALNESGRLTLTGRSKGWNQSSVQQLLSNKALIGYKIPSRKAVVNYIEIPDYFPSVIPLEQFQQVQLIGADKQGQRAANDRPMNVNLFRGVMKCAECGATVIVSGVDDKRAGYYSCSFRRLGRCNTSKPMNRGMVDEALIKGLLYSLDRLTTQGQGENPLMKLEAKRADLTERSQKLLAALEIADDVSAIATRLKAVTDEIRAIETQIKTCKDLEQVHTVQSVQGMDLTVKSQREEVQLLVKKTFREINLDGIRKTVNVYLHNGLTLLNVPVNQIVDAGEWIELLPVIGGDTVDFKDISFKAPRYLD

SEQ ID NO: 48872 - DNA, 50 bp, Klebsiella oxytoca
  source 1..50: mol_type = genomic DNA
acttattgtgaacattggtcatggttacattattagtatgcaaatcgaga

SEQ ID NO: 48873 - DNA, 40 bp, Klebsiella oxytoca; identical to SEQ ID NO: 26728
  source 1..40: mol_type = genomic DNA

SEQ ID NO: 48874 - DNA, 50 bp, Klebsiella oxytoca
  source 1..50: mol_type = genomic DNA
acttattgtgaacattggtcatggtaacattattagtatgcaaatcgaga

SEQ ID NO: 48875 - DNA, 40 bp, Klebsiella oxytoca
  source 1..40: mol_type = genomic DNA
gacaaaatgaaggtcatggtaaggttgatgaccagcagtt

SEQ ID NO: 48876 - protein, 506 aa, Brevibacterium frigoritolerans
MAVRKSAKKVKTGRVAIYIRSSREREGGEDETLFTQRKILTDIAKNKGYSYDIYEEIESSVKEDRDELGKMKNKLVSCEYDRILVTKLDRLARDTGIFTDIKKICIKNGILIETTTEEIDLTKKTDKMMYNFKSLIAESEYDEIKDRLLTGKFNTVAKRNRWMGSVAPLGYRWDRNVKQLIVVPEEKEIIRKMVELALQGYSSRQIASKLNAMGYRGKKGSPFKTDRVLRILSNKAYLGMCEYYSSYLNETAIAKDCHEPIMTVQEYNDIQALIKSRVSKENLSSLGVKSPVNKILKCGVCGKGLTIQLNNKVRKSGKNYSFYQIRPCLHYLDDLNTVRCNNAGVRVSVIEEAVIEYLKQHKPEIEASIQKLESKDTSELENQLMDTIETVKSNISKYQRRLDKAYEAYLDDLITKEKYSKDSETFGQIINELEDELVLLRNKLSNLDTDAQKEKYMDAVEIIEKYELMSMEEQNASLRLLIKEIVYTRTNETNNVPHVTIIWREL

SEQ ID NO: 48877 - DNA, 50 bp, Brevibacterium frigoritolerans
  source 1..50: mol_type = genomic DNA
gaggatgaactgtaattaatcatctttatggttgagcacagttcatccca

SEQ ID NO: 48878 - DNA, 40 bp, Brevibacterium frigoritolerans
  source 1..40: mol_type = genomic DNA
cacctgtgcttgagccatcttaacgaaagcttcacatcct

SEQ ID NO: 48879 - DNA, 50 bp, Brevibacterium frigoritolerans
  source 1..50: mol_type = genomic DNA
gaggatgaactgtaattaatcatccttatggttgagcacagttcatccca

SEQ ID NO: 48880 - DNA, 40 bp, Brevibacterium frigoritolerans
  source 1..40: mol_type = genomic DNA
cacttctgctggtgccatcctggcccaagcaccacatcct

SEQ ID NO: 48881 - protein, 578 aa, Klebsiella quasipneumoniae
MTKHQIHVYTRISKTSQQEGSGLDEQLSRIDAYIKSKPEFLGSEITYWQDVGVSAFKNKNIHDGQLAEFIKQVESGSIGAGHALVIYSLDRLSRRSSWDEDTIQKLVKNGVDIHDVSTPVVLKRDDPFSKIIMELIVARGNNESRIKSERSIAGWEKRLKETREQGKVFTRKLPRWLSTDENGYVVITEQAEIIKRIFLEYTNGLSSPMIARRLNEEGIKSTGSSMWRPNTITKLIKDERLRGYLRRNSDQTLIPDIFPVVIDEEIFVLANRILKNNASGIKGRPRENNITREVNNILTGIVRCGKCGARVTTSKNSRGVRYVVCLNRRNYEICGQKSIKLDAFEKIVISHVQQVDMSKVFSYDKVDTSHESTLNSELSNLEIDEKNCITDIEARKKAKKTASLVLANTLVEIQDRIEEIKQQLLELKIEEPLPEIQHFSINDLTNQSNIELRMSLRKFLTQAVDKITFRSLNDNILIEIKYHNNVYRHILITDKKVKEVLHEVDIVKNGDVINYTTNGFLITENEHENTCVFHGIYNVHYTDYFLLANYIGSLKNKHWIVDKMYETENMSIVMTNEK

SEQ ID NO: 48882 - DNA, 50 bp, Klebsiella quasipneumoniae
  source 1..50: mol_type = genomic DNA
aagtgtgaaaatattactatgaccgtggtaatgtgatacaattcacacat

SEQ ID NO: 48883 - DNA, 40 bp, Klebsiella quasipneumoniae; identical to SEQ ID NO: 23063
  source 1..40: mol_type = genomic DNA

SEQ ID NO: 48884 - DNA, 50 bp, Klebsiella quasipneumoniae
  source 1..50: mol_type = genomic DNA
aagtgtgaaaatattactatgaccgcggtaatgtgatacaattcacacat

SEQ ID NO: 48885 - DNA, 40 bp, Klebsiella quasipneumoniae
  source 1..40: mol_type = genomic DNA
gggacgcaacgccgagaccgcgagcagaggctgcgcacag

SEQ ID NO: 48886 - protein, 472 aa, Mycobacterium avium
MRFLARVRLSVSTDESTSVERQREIITQWSKLHDHTIVGWAEDIDVSGKLSPFDTPQFGDWLNNRYPEFDGVVAWKLDRLARNMFGLNDLFQWAKANNKTVVSITESLDLSTTVGVMVAQILAGVAQMELEAIQARQSGSQAHLRQVGRWPGGNAPYGYRVVRNGNGCKLDLDPEKAAVVSMIVDRILDGNTMASVCRELNSAGVPAPKGGKWQISTMRHLLRSPALRGHRVHKGQVILGDDGQPVAFGPELVDAETFQRLQAALVPGNGAGGRKNASPLSGLAKCAECGAAMGYESSTGRDHRRRYYYRAKCDHRTAMRADQLEQMAESMLLWHYGDKEITRREWIPGEDHTIALQEAVARYDALSARLTANLPEIAKQRLEKQLEAVEAELGRLSELPQVEGHWAQVGTGRTWNMEWLDADVDQRRAMLREAGMSFLVAPKGARVTLAVNGLPQIDRTEAARRFAGHPVM

SEQ ID NO: 48887 - DNA, 50 bp, Mycobacterium avium
  source 1..50: mol_type = genomic DNA
gtttcggattcacggcgaaccgctggacggcgttgcggtttttccgaaca

SEQ ID NO: 48888 - DNA, 40 bp, Mycobacterium avium
  source 1..40: mol_type = genomic DNA
gtttccgacacggcgcgctggacagcgttgcaccgggcca

SEQ ID NO: 48889 - DNA, 50 bp, Mycobacterium avium
  source 1..50: mol_type = genomic DNA
gtttcggattcacggcgaaccgctccacggcgttgcggtttttccgaaca

SEQ ID NO: 48890 - DNA, 40 bp, Mycobacterium avium
  source 1..40: mol_type = genomic DNA
gtttccttcaggtcgccctccaccccgaggcacccggcca

SEQ ID NO: 48891 - protein, 493 aa, Lawsonella clevelandensis
MATTGAQRAAIYARISLDKQEEAGVKRQIHLATKQAEADEAEIVATYVDNNVSAFSRDPRPGYKKLIHAIESREIDVVYVYALDRLTRRTKDTLALFELCEKHNVTVKANRGYNIDPSDPASRLTIVILGLIAEQESIDRAARIRAAYEDRARTGRPKTGGRRMFGYGADAVTVVDDEAEALRDAAAMVIAGKTLRETVREVFHARELTATTGRPMTAPTLRDILLNPRVRGISTFNPTDPDTGYRLIKDRQIVGAGNWPAIIDEATGEKLDAILRDPTRKHSHSGNAPRYFLASVLTCTCGDPMYSRSRKNSKGEARRFYTCKRTEPGGTHVSIGAEVDDLIEAVILKRMQQPDAMDALQQALTPEDDSLTEQLQELTGQRNALLAKREQFEEVTIDVDGDIDMSTFTRMSKKIEARIAVIDKKVHELTASRDADPLAAELANGPDFAEWWRSASVEDKRRLTRLLMDIHILPGKAGAKTFDPQRVSITWRQ

SEQ ID NO: 48892 - DNA, 50 bp, Lawsonella clevelandensis
  source 1..50: mol_type = genomic DNA
cgtactcactacccgtgttcaagtaatcccgagcacgggtttggggtacg

SEQ ID NO: 48893 - DNA, 40 bp, Lawsonella clevelandensis
  source 1..40: mol_type = genomic DNA
cggcgcgacgggctctggtaaatcggaactgctgcgcacc

SEQ ID NO: 48894 - DNA, 50 bp, Lawsonella clevelandensis
  source 1..50: mol_type = genomic DNA
cgtactcactacccgtgttcaagtgttcccgagcacgggtttggggtacg

SEQ ID NO: 48895 - DNA, 40 bp, Lawsonella clevelandensis
  source 1..40: mol_type = genomic DNA
ccctgagacggcctctgctgtctctgagctgctgcgcccc

SEQ ID NO: 48896 - protein, 541 aa, Faecalibacterium prausnitzii; identical to SEQ ID NO: 47626

SEQ ID NO: 48897 - DNA, 50 bp, Faecalibacterium prausnitzii
  source 1..50: mol_type = genomic DNA
gtcacctccgagaactatcctacagatgcagggtagtgcggttaggtgac

SEQ ID NO: 48898 - DNA, 40 bp, Faecalibacterium prausnitzii
  source 1..40: mol_type = genomic DNA
cagcgtgatctgtgctacggatgcaggacgcgagggagaa

SEQ ID NO: 48899 - DNA, 50 bp, Faecalibacterium prausnitzii
  source 1..50: mol_type = genomic DNA
gtcacctccgagaactatcctacatgtgcagggtagtgcggttaggtgac

SEQ ID NO: 48900 - DNA, 40 bp, Faecalibacterium prausnitzii
  source 1..40: mol_type = genomic DNA
caccgtgacctctgcttcctgtgcagcaggcaatggaaaa

SEQ ID NO: 48901 - protein, 556 aa, Faecalicoccus pleomorphus
MSNTKRTGQTALYERLSRDDEMQGESNSITNQKQLLESYAKRNGFANIYHYTDDGVSGTTFDREGFQKMIKAVEENKVSTVIVKDMSRFGRDYLKVGFYTEILFKEKGVRFIAINNGIDSEKQAESDFTPFLNIMNEWYARDTSRKIQSIFRARMEEGKRVSPSVPYGYFRNPKNKQELLVDKESAKVVKRIYRLVIEGYGVTKIADILTKDKVLIPSAYAEIHYPENNHSSKKRGIEDPYFWTPTTVGYILEKREYMGHTVLGKTICLDYKTKKRRKAKEDELIIFKNTHEAIIDEETWNNAQRLRKTVRRSPKYGTTSHPFTGLLICSDCGGKLSYREPAEHKEKKYDCDYCFVCQHYRHRKGTCSMHYIKVKTVNEILLKSIKEITDFAKEEKQEFLKVMNKLSDEKREAKYQGDKEKLEKLSSRNAELTTLITKLYEDHALGKIPVKHFDRLFNIYDTEQQDLEKQIQYFEQEIESYHQRKVDTDKFLKMIEKYTDIEELTVPMINEYIEKVVVHEATGGRKGKDRKQQVDVYFNFIGNCQVPQKEEIEKLA

SEQ ID NO: 48902 - DNA, 50 bp, Faecalicoccus pleomorphus
  source 1..50: mol_type = genomic DNA
ttatgtccttgacaaatctttccaaaaggattaaccttataaggacagag

SEQ ID NO: 48903 - DNA, 40 bp, Faecalicoccus pleomorphus
  source 1..40: mol_type = genomic DNA
ctctttttaaatgatgccaaatggatcaataccgcacgca

SEQ ID NO: 48904 - DNA, 50 bp, Faecalicoccus pleomorphus
  source 1..50: mol_type = genomic DNA
ttatgtccttgacaaatctttccaggaggattaaccttataaggacagag

SEQ ID NO: 48905 - DNA, 40 bp, Faecalicoccus pleomorphus
  source 1..40: mol_type = genomic DNA
cttttttaaaaaaaatcaaggtggatgaatatggcacgca

SEQ ID NO: 48906 - protein, 479 aa, Mycobacterium avium; identical to SEQ ID NO: 3691

SEQ ID NO: 48907 - DNA, 50 bp, Mycobacterium avium; identical to SEQ ID NO: 3692
  source 1..50: mol_type = genomic DNA

SEQ ID NO: 48908 - DNA, 40 bp, Mycobacterium avium; identical to SEQ ID NO: 8928
  source 1..40: mol_type = genomic DNA

SEQ ID NO: 48909 - DNA, 50 bp, Mycobacterium avium
  source 1..50: mol_type = genomic DNA
agggtatattaggaacttgtcaccaggctgaaatatcgctaaactaccct

SEQ ID NO: 48910 - DNA, 40 bp, Mycobacterium avium
  source 1..40: mol_type = genomic DNA
cggtccccacgaggtggccaggctggtgctgggtggccca

SEQ ID NO: 48911 - protein, 504 aa, Burkholderia cenocepacia
MDLDASLSLRDEGLSAYHQRHVRQGALGVFLRAVEDGQVPVGSVLIVEGLDRLSRAEPLQAQAQLAQIVNAGITVVTASDGREYNRERLKAQPMDLVYSLLVMIRAHEESDTKSKRVKAAIRRQCQGWIAGTWRAPIRVGKDPHWVQETETGTFELADDRAAAVRLVIEMFKQGHGAVRIVRELADRGLKITDSGRSASSHIYRLLANRMLIGEKSVEVDGETFRLEGYYPELLTPAEFADVRYLAEQRGRRKGKGEIPGVVTGLGITYCGYCGAAIVAQNIMGRRRAADGRPYPGHRRLHCVTYSQSTGCKVSGSCSVVPVERALMLYCSDQINLTRLLAGESGTVPLAAQLTSARQRVAELEVQVQRVTDALLFDDGEAPAAVLRRVRELESQLAIERRGVDSLEHQLTTSASNVAPAAAEAWRELVHGVENLDYDARMLARQLVADTFSKIVVYQSGFRPDEDQGSIGLLLVAKRGSTRMLHIDRKTGAWRSAEEHDHTLS

SEQ ID NO: 48912 - DNA, 50 bp, Burkholderia cenocepacia
  source 1..50: mol_type = genomic DNA
ggtatatatttcactaccttcgggcacccgagggataccatacctatacg

SEQ ID NO: 48913 - DNA, 40 bp, Burkholderia cenocepacia
  source 1..40: mol_type = genomic DNA
atcgacgagcgctttggggcagccgagggatacgaaccct

SEQ ID NO: 48914 - DNA, 50 bp, Burkholderia cenocepacia
  source 1..50: mol_type = genomic DNA
ggtatatatttcactaccttcgggcgcccgagggataccatacctatacg

SEQ ID NO: 48915 - DNA, 40 bp, Burkholderia cenocepacia
  source 1..40: mol_type = genomic DNA
atggaggactgcattggggcgattgagggatatgagccct

SEQ ID NO: 48916 - protein, 490 aa, Fusobacterium necrophorum
MINVVGYARFSSDNQRQESIDAQVRAIEEYCLKNGYNLIKVYKDEAVTGTSFKDREQFLEMIDDSKNKLFEFVIVHKFDRFARNRYDHIICEKKLNNNGVKLLSVLEQLNDSPESVILKSVLQGMNEYYSLNLAREVKKGLKENALKCIHTGGIPPLGYDIGEDRKYIINEIEADSVRLIFKLYNEGMGYASISDYLNSLGRKNKRGLPFRKTSIRDILLNEKYIGVFVFGKKDAHGHLTGNEIKIDNGLPAIVDKEIFYLVEAKMKKRKTGTRSTAHIPYYLTGVCYCGECGGKFSGGYRAKNRNGDITYGYTCINRKAKVNDCKNKPIRKELLEDTVFNLIKKEIFTEKRIQSIASKVVKTIEERNLAKGTQLEKIEKELGKLKEQNEKLLSLFLKGRISDELFNKKHNELSTEITFYKQEMMKYTSDKKIDRETVLKFLYTFKENFKKEQTKKALIETFVKEIKVYEKHVEIVLRLFPLYIDSSGGS

SEQ ID NO: 48917 - DNA, 50 bp, Fusobacterium necrophorum
  source 1..50: mol_type = genomic DNA
tatattgatagtagtggtggaagtggggagaaactctatttatcagtata

SEQ ID NO: 48918 - DNA, 40 bp, Fusobacterium necrophorum
  source 1..40: mol_type = genomic DNA
aaaatactatggtggaagtggcgggaatcgaacccgcgtc

SEQ ID NO: 48919 - DNA, 50 bp, Fusobacterium necrophorum
  source 1..50: mol_type = genomic DNA
tatattgatagtagtggtggaagtgcggagaaactctatttatcagtata

SEQ ID NO: 48920 - DNA, 40 bp, Fusobacterium necrophorum
  source 1..40: mol_type = genomic DNA
acaaaactacaatggagatgccggggatcgaacccggggc

SEQ ID NO: 48921 - protein, 557 aa, Intestinimonas butyriciproducens
MLQSNKITALYCRLSQEDMQAGESGSIQHQKMILQRYADEHHFLNTKFFVDDGFSGVSFEREGLQAMLQEVEAGRVATVITKDLSRLGRNYLKTGELIEIVFPENGVRYIAINDGVDTAREDNEFTPLRNWFNEFYARDTSKKIRAVKQAQAQKGERVNGEYPYGYIPDPNNRHHLIPDPETAPIVKQVFAMFVSGVRMCEIQKWLAENKVLTIGALRYQRTGQARYQRAMIAPYTWPDKTLYDILARQEYLGHTITAKTHKVSYKSKKTRKNEEEQRYFFPNTHEPLVDEETFELAQKRIATRHRPTKAAEIDIFSGLLFCAGCGHKMYYQQGVNIEPRKFSYSCGAWRNRARTGSECTSHYIRKNVLLDLVLEDMRRILRYVKEHEQDFICKATEYGDMEARKALAQQQKELSKAQARMTELDTLFRKLYEDNALGRLTDERFVFLTSGYEDEKKSLAARIDELQQQIATVTERKRDISRFIQIVGKYSDIQELTYENVHEFIDRILIHELDRETNTRKIEIHYSFVGQVDTEQEPTQVVNHDRRNMVDVKSIAI

SEQ ID NO: 48922 - DNA, 50 bp, Intestinimonas butyriciproducens; identical to SEQ ID NO: 12922
  source 1..50: mol_type = genomic DNA

SEQ ID NO: 48923 - DNA, 40 bp, Intestinimonas butyriciproducens
  source 1..40: mol_type = genomic DNA
tgtaactcccggtctgaagaagaatggaccggaaatacct

SEQ ID NO: 48924 - DNA, 50 bp, Intestinimonas butyriciproducens
  source 1..50: mol_type = genomic DNA
aagtatcgctatctaacctcagcagttaatgaggtgtgatagcgatagcg

SEQ ID NO: 48925 - DNA, 40 bp, Intestinimonas butyriciproducens
  source 1..40: mol_type = genomic DNA
tgttattcctggtatgaaggtgaatggacaagaaatggag

SEQ ID NO: 48926 - protein, 461 aa, Selenomonas ruminantium
MAGTRAALYIRVSSDEQAKHGLSLDEQKHDLREYAIRHGYTIAGVYMDEGTTARKSIQRRKELQRLLQDVEAGSVDVILFIKLDRWFRNIADYYKVQAVLDAHKVDWIAIHEDYNTNTSAGRLNLNIRLSIAQNESDQTSDRIKFVFEGKKRRREVLTGNIPYGYRIVDKHFDHDKEQAAAIRDIFEHFLVSQSVLETTTYAREKYGIMWRHISMRRALQNERYIGTFYDIPDYTRGIVDKDTFHRVQQVLTARRMDTPRKPAVPFLFSGLIYCPECGHVLVGCKGHKYANQTEYKNKFYRCGIHSIEKTCHFTGTIFERPLERFLLDNLKERLMEHAATLQQQRKTTGEERAARKIKAAREALDRLKDLYVTGYIDRAAYDTDFKKYNKQLQEALKAAPPKGRTMTDKLKGLLNMDIVSTYSQLSLEGKRKFWHAILYRIDVEHYEKGRGGRKEYRLTFL

SEQ ID NO: 48927 - DNA, 50 bp, Selenomonas ruminantium
  source 1..50: mol_type = genomic DNA
tgtgggtttttacgaacgtagtccacagagtacgaatgttaaaaaccaca

SEQ ID NO: 48928 - DNA, 40 bp, Selenomonas ruminantium
  source 1..40: mol_type = genomic DNA
atgtgctttcacatagtccaccggacggctccagtcaacg

SEQ ID NO: 48929 - DNA, 50 bp, Selenomonas ruminantium
  source 1..50: mol_type = genomic DNA
tgtgggtttttacgaacgtagtccatagagtacgaatgttaaaaaccaca

SEQ ID NO: 48930 - DNA, 40 bp, Selenomonas ruminantium
  source 1..40: mol_type = genomic DNA
atttgcttatacatagtccatcagagggcttcattcccca

SEQ ID NO: 48931 - protein, 629 aa, Catenulispora pinistramenti
MGSTPAAFGGATPYGVNAAASESGALVWATGAAARSSRTAPLRVAFLARTSTEDQQDPTISIPRQLRSCENVLPEHAVIVAHYYDVESGRKDLAARGRGSGHTRFSIPVPRDGGIADLLEAAESGTAEFDAVICESIDRVARRTYYGTMIEHRLERAGISLLASDEPIVLTGGRKGKSATQTLTRRVKQGVAEWYVMDMLEKSWGGFEQHTEQGFNIGQPPYGYLADKIPHPVPARRQEGRTKHRLVPDPVRAPVVRRIFDMRVVDRLAFAVIADRLNRDLVLNPPPVPPDPSRAVGAWTYSSIREVIFNPKYTGHMVWNRRATKSNKGKLNPIEEWVWSPEPTHEAIISVEKFLQAQAIAKHKRTSRTGAGAHTALGRPVRIYPLRSYIFCMECGRRMCGQFKDGVVYYSCIPKSGPTPESHPRSLSIREDKLTPTINDFFRTRVFGAARTKFVSDARVSTATRAAAEAHDRTRALRAKIVDAEKRQEKLVRSIELAEEVDAEFLRIVQRRVSEIKAERKALTEELADIEHLGEGREEPQLLDAVPIGDMDVTDLPDESQQEIFNRFCLDIRYDRPNRTIDIQVTLRAETIAAVVETATAALQVYDQMNVQVSETANPPFRGVCSVPP

SEQ ID NO: 48932 - DNA, 50 bp, Catenulispora pinistramenti
  source 1..50: mol_type = genomic DNA
tcggggggtttgcagcgtgcccccggtggggcacgctacaaaccccccgg

SEQ ID NO: 48933 - DNA, 40 bp, Catenulispora pinistramenti
  source 1..40: mol_type = genomic DNA
ccatcctgacggtgcccccggtaggattcgaacctacgca

SEQ ID NO: 48934 - DNA, 50 bp, Catenulispora pinistramenti
  source 1..50: mol_type = genomic DNA
tcggggggtttgcagcgtgcccccgctggggcacgctacaaaccccccgg

SEQ ID NO: 48935 - DNA, 40 bp, Catenulispora pinistramenti
  source 1..40: mol_type = genomic DNA
acagcctgtcggtggccaagctgggattcaaacccaggca

SEQ ID NO: 48936 - protein, 405 aa, Mycobacteroides chelonae
MLAALEAGKAQAVIAWHTDRLHRRPMELEGFIDLCERKKIDVRTVQAGTVDLSTSGGRMIARMLGAAARHEVEHMIERAKSAKKQAALDGKFRGGRRSFGYEPDGLRLREEEADAIRTGAERVLSGVSLHQIARDWNAAGLRTSLDTGEFDSRRVRKILLRPRNAGIVLHEGQRVARGQWEPIIDADTLAALETMLCDPSRSHTHGYERKYQGSGVYLCGTCGATVDGGSQVRRAGAILRAYRCRKARHLGRLVEYVDEYVDEHVIARLSAPDAQRVILGAEADVTALHAQREGLRVRLDALSAMFAEGSIDGPQLKRGTADLKAQMNAVDAELASIRSSSAVASILAEDDIRAAWKAAPPDVRGKVIDTLMTVTILPATRGRKPGGGYFDPTKIQIEWKGGGAG

SEQ ID NO: 48937 - DNA, 50 bp, Mycobacteroides chelonae
  source 1..50: mol_type = genomic DNA
aagggttgtatctaacctattgactagtcattaaggcgtttgttaccctt

SEQ ID NO: 48938 - DNA, 40 bp, Mycobacteroides chelonae
  source 1..40: mol_type = genomic DNA
atccagcgtcatctgcgcgtagtcgttggtcacgacctcg

SEQ ID NO: 48939 - DNA, 50 bp, Mycobacteroides chelonae
  source 1..50: mol_type = genomic DNA
aagggttgtatctaacctattgacctgtcattaaggcgtttgttaccctt

SEQ ID NO: 48940 - DNA, 40 bp, Mycobacteroides chelonae
  source 1..40: mol_type = genomic DNA
gtccagagtgttctgccctctgtcttaagtcacgaccccg

SEQ ID NO: 48941 - protein, 539 aa, Streptomyces prasinopilosus
MGKRTRSRRATDRRQYEVEAEWTEADLALLEELKKAEAALPDDAPRALLSVRLSVLTDDTTSPVRQELDLRRLALDRGCRVVGVASDLNVSATKVPPWKRKELGDWLNNRAPEFDEILFWKLDRFVRRLTDLSTMIDWCLKYGKNLVSKNDSIDLTTTAGKIMVTIIGGIAEIEAANTSTRVASLWNYTKTQSDWLVGKPTYGYETAEDENGRVVLAIDEDAYRALHWCRTAAMRDKPASARRMVKVLVRAGLCGPGLTASTLLRRLRNPALMGYRVEEDKNGGVRRSKIVLGNDAKPIRVADPIFTEDEFQRLQEALDLRGKKQPTRRPDGATKFLGVLICHDCGSNMTVQQNHVNGRFYKYLRCGKCKGGGHGAPNPDEIYSKLVEDVLRVLGDEPVMTREYRQGAEARKELQRLEQSISYYMTGLEPGGRFTKTRFTKEQAEKTLDDLIKQLETIDPESTKDRWVAVHNGKTFRTHWEEGGMEAMAADLLRVGVQCVVKRTKVKGVRAPRIHMKLRIPKDVRDRLVLKQDDFAEAF

SEQ ID NO: 48942 - DNA, 50 bp, Streptomyces prasinopilosus
  source 1..50: mol_type = genomic DNA
cggtccgatttgtatggccgtgtccatctgcggccatataccgacaagcc

SEQ ID NO: 48943 - DNA, 40 bp, Streptomyces prasinopilosus
  source 1..40: mol_type = genomic DNA
cgatctgaatgctggtgtccatctgcgggcacaccccgca

SEQ ID NO: 48944 - DNA, 50 bp, Streptomyces prasinopilosus
  source 1..50: mol_type = genomic DNA
cggtccgatttgtatggccgtgtccttctgcggccatataccgacaagcc

SEQ ID NO: 48945 - DNA, 40 bp, Streptomyces prasinopilosus
  source 1..40: mol_type = genomic DNA
cggtctgaaggctggcatccttctctgggaactccccacc

SEQ ID NO: 48946 - protein, 489 aa, Rhodococcus rhodochrous
MNPLPVSHTPKAVIYCRISSDKTGAGLGVERQEKDCRELARRLKMQVVEVLSENDTSAYSGAPRPKYERLLEMMRSGSIDAVLALHTDRLHRSLVELEEYVNASEQGSVTTHTVMAGPIDLSTPSGRLVARQLGAVARYEVEHAIERVKAAKLQMAQSGKYLGGQRPFGFEPGRTAIREEEAAVIREIVQRVIDGDSFRAIAMDLNRRGITTTHQREWNALKVRNVALRPINTGIVRHNGIDYEANSPAIIPRDQWEDFLIAVQLNRTRSNHPGTFRKHVLNGFVFCGECGKKMVHKTKVSRGKKSTIVSCESGNRQTGGNGGCGRVARSVDPIIELVRQSIIYRLNSPELVSALHAQKTSAETLKELHAKQRAAEGRAQEVLDDYYVHNLLTREQFERAKVQADAALKAINERIESEYSHAVTSAIDLNGNLEEAWENGTLEWRRDLIALLIDKIIVHRVPRETGYKRPMFCGKWRFDPDLIDIQWRA

SEQ ID NO: 48947 - DNA, 50 bp, Rhodococcus rhodochrous
  source 1..50: mol_type = genomic DNA
gggtgtcacagccaatcttccgactcgtcgagggatggccaaagacaccc

SEQ ID NO: 48948 - DNA, 40 bp, Rhodococcus rhodochrous
  source 1..40: mol_type = genomic DNA
cgtccccatctcggcgacctcgtcgaggaacagcacgccg

SEQ ID NO: 48949 - DNA, 50 bp, Rhodococcus rhodochrous
  source 1..50: mol_type = genomic DNA
gggtgtcacagccaatcttccgacgcgtcgagggatggccaaagacaccc

SEQ ID NO: 48950 - DNA, 40 bp, Rhodococcus rhodochrous
  source 1..40: mol_type = genomic DNA
cctcccgaacccggccaccgctccgaggaccagcacccca

SEQ ID NO: 48951 - protein, 540 aa, Mycobacterium marinum
MARVLGRVRLSRLTDESTSAERQRELIEQWSAMNDHTVVGWAEDLDISGSVDPFDTPQLGDWLRNRAPEFDLIACWKLDRLSRNTININGLFAWCIKYGKTVVSVTESIDLGTPVGRLIANVLSFLAEGELEAIRERTKAGRQKVVSLGRWPGGPAPYGFTAVKLDGGGFKLKPRADQVKVIKRISDLILSGLSMEAVAKRLNDDGVPSPTGKAWRSARLFLIMESKLLLGHSTYKGQTVRDAQGMPVMVSEPILEPDEWDRLQAAIQARRLPSAVKRTQNTSPLYGVIFCKSCGSMMYNRKYGHRASDRGYRYDYYMCPKSCGRMIHAELIYELLQKVFLLEVGDEKVMERVYVPAESHETEMKEAQRAVDEITPLLGVITSETIRKQLTTQLLALDSRIKVLESKPVRESHWEYQETGGTYTQAWEAADLAGKRDLLVKSGITAYAFKPKTGAGLEFELEIPPDIREQMGLGTRQSTRVTVTDVLATMRESGIAGIETESGKYVDTFTVHPVDGDPLAVHTLTDEGEAQAAEFYGWNA

SEQ ID NO: 48952 - DNA, 50 bp, Mycobacterium marinum
  source 1..50: mol_type = genomic DNA
gttctacaaaccccctttaacgacccgtcgtcagattcgttatgtagaat

SEQ ID NO: 48953 - DNA, 40 bp, Mycobacterium marinum
  source 1..40: mol_type = genomic DNA
gtcgacatcctttaacgacccgtccggagaggcggagaag

SEQ ID NO: 48954 - DNA, 50 bp, Mycobacterium marinum
  source 1..50: mol_type = genomic DNA
gttctacaaaccccctttaacgactcgtcgtcagattcgttatgtagaat

SEQ ID NO: 48955 - DNA, 40 bp, Mycobacterium marinum
  source 1..40: mol_type = genomic DNA
acctccatcctttgaagactcctccggggaagcggagcag

SEQ ID NO: 48956 - protein, 455 aa, Listeria booriae
MKAAIYIRVSTDEQAKKFSIPAQERLAKAFCESKGWKIYKIYTDGGFSGKNLDRPALQEMLSETDKFDAVIVYRLDRLSRSQVDTMTLIETFFLKNDIEFISLTETLDTTSPGGRAMIGVLAAFSQMERESIRERSIMGRIQRVKSGLRDSPVKKRNFGYDIVDGKLYINESEAAVIREVCNRFEVLQSVGKIQQEQKSQGREVITRARIMNYLTNDLYIGYVHYLDEVHRKGIHEPIISEDQYYRIQAILERIKRAPNINKKSQSLLSGLVRCATCGSPYHHAVKGAKKYASGKVIEYRYYTCKKNRRKPESEGCTNKSHRGEKLEDIVINRIKNYSVDTRTDEKMKDLAENREKLDAQVVKKNRLLALYVDGVYQKSDLDPLMQEIDAEIKRLTDEASQQSKEINNKEITKRLLNKNQTLDFDSLDFAEKQRLLRGIIKEIVINGDNVKVYWL

SEQ ID NO: 48957 - DNA, 50 bp, Listeria booriae
  source 1..50: mol_type = genomic DNA
tttagtccctcatatagttatgacggtagataacttcatgagaacctaat

SEQ ID NO: 48958 - DNA, 40 bp, Listeria booriae
  source 1..40: mol_type = genomic DNA
ttttggttcaagttatgacggtagacgagaaggtacacga

SEQ ID NO: 48959 - DNA, 50 bp, Listeria booriae
  source 1..50: mol_type = genomic DNA
tttagtccctcatatagttatgacagtagataacttcatgagaacctaat

SEQ ID NO: 48960 - DNA, 40 bp, Listeria booriae
  source 1..40: mol_type = genomic DNA
atttgggtcagcttattaaaggaggcaagaaggtacagga

SEQ ID NO: 48961 - protein, 580 aa, Pseudomonas lactis
MPTGYAYIRYSTRRQGADDKDSVTRQKASIRAIAARHGVEVPEENFFYENGVSAYTGENSKTGKLKDLIDQIENLSIAPGDFVFVESIDRLSRQRLLQAKDLVYGILKKGVILVTTMDGYIYKLHEDQADIMKQDIMLTVISSRAHEESLTKSNRRKSAWKKAKTEAEETGIVFNKNRLPYGVIFDEKTNTLVIDKKAQEEIEFILENLKREGVTSTIKKANAFAAINWTQARVKDIFDTKYVLGYFMSQTKIDGKMVLDKHIENYYPKIVSASLFLEAKEAMSNRKVKKHQGRVTQNNANIFRHSCFCERCGKSLVFMNNYNSKGSRYFYMTCQQNIENGNCKNRFRYDLAVKLFLDTMQEFDRLNRKSVSLEPIDVTQYASLDEATLKEIEEMNMSLSVIIDGSSGAFKLAKKFVELSKSNKVEDTKTRQKLKKLRDRQSDLEVSVENLNKSVGTIKSGIIPSAILNRLSKEEVELNEIKEEIEKLAISKNKSKVQELEFTNLDKTIDFLKTEEGRLNIINFLTSNNIRFSFEYISDTLNSTAYVNNERIGQLSTQNDNKSAPLGIYGFDNLGNVFTQ

SEQ ID NO: 48962 - DNA, 50 bp, Pseudomonas lactis
  source 1..50: mol_type = genomic DNA
tgtgttagtattggcttgttggtcttgacctagtgcctgttactcacaca

SEQ ID NO: 48963 - DNA, 40 bp, Pseudomonas lactis
  source 1..40: mol_type = genomic DNA
caccggcatgtggttggtcttgaagtaaatcccgaccatg

SEQ ID NO: 48964 - DNA, 50 bp, Pseudomonas lactis
  source 1..50: mol_type = genomic DNA
tgtgttagtattggcttgttggtcgggacctagtgcctgttactcacaca

SEQ ID NO: 48965 - DNA, 40 bp, Pseudomonas lactis
  source 1..40: mol_type = genomic DNA
cactggcatgggggtggtcggggagaagagcccaactaag

SEQ ID NO: 48966 - protein, 582 aa, Pseudomonas carnis
MNARTPAGYAYIRHSTKRQGGDDKDSVTRQKESIRLLALQHNVEIPDENFFYENGVSAYTGKNLTHGKLKDLIDQIDSLRIRPGDYVFVESIDRLSRQRLLQAKELVNGILEKGIVLVTTIDNQRYEKATEKNGIDDLSQDILLSVISKRSHEESRTKSVRRLSAWSKAKNAAVENQKIFNKGRPPFGVRYNELTQKFEPHPEQSAEVVRIFESLKLQGVTLTIKEINKDSLVRWTNNRVKDMLESKYPLGFMYSQKKIDGKMVFDKYIENYYPQIISFELFEQARQAMQNRKVNRRNGRACQDNTNIFRHTARCGICDESIFFSNHFGNKTQRYFYMSCRSNFEQEKKCSNRFRYDYAVAALLHIIGSTFFWDFLSQKPAMFEAVKKSDFMIGTAKGIKIETADEMENYSKLGKQFMRFLDGNNENKPAHKEKIEKEIALSKKKMTLENLEKTVESITDGAVPASILKMLMKAEEDVAKAKEELEILTVNSVDTTAKLKVKNVDDFIALFKTEKGRLEIINFLATNGLTFLFKFDKKTNILETQVAVNKEIMATYTLKTEPNVLEQYGLKNLGEEFKLADA

SEQ ID NO: 48967 - DNA, 50 bp, Pseudomonas carnis
  source 1..50: mol_type = genomic DNA
ttgttagtaacgtagaccctcgtcttgaacaggtgtagtattactaacaa

SEQ ID NO: 48968 - DNA, 40 bp, Pseudomonas carnis; identical to SEQ ID NO: 48963
  source 1..40: mol_type = genomic DNA

SEQ ID NO: 48969 - DNA, 50 bp, Pseudomonas carnis
  source 1..50: mol_type = genomic DNA
ttgttagtaacgtagaccctcgtcgggaacaggtgtagtattactaacaa

SEQ ID NO: 48970 - DNA, 40 bp, Pseudomonas carnis; identical to SEQ ID NO: 48965
  source 1..40: mol_type = genomic DNA

SEQ ID NO: 48971 - protein, 580 aa, Pseudomonas veronii
MPTGYAYIRYSTRRQGADDKDSVTRQKASIRAIAIRHGVEVPEENFFYENGVSAYTGENSKTGKLKDLIDQIENLSIAPGDFVFVESIDRLSRQRLLQAKDLVYGILKKGVILVTTMDGYIYKLHEDQADIMKQDIMLTVISSRAHEESLTKSNRRKSAWKKAKTEAEETGIVFNKNRLPYGVIFEEKTNTLVIDKKAQEEIEFVLENLKREGVTSTIKKANAFAAINWTQARVKDIFDTKYVLGYFMSQTKIDGKMVLDKHIENYYPKIVSASLFLEAKEAMTNRKVKKHQGRVTQNNANIFRHSCFCERCGKSLVFMNNYNSKGSRYFYMTCQQNIENGNCKNRFRYDLAVKLFLDTMQEFDRLNKKSVSLEPIDVSQYANLDEATLKEIEEVNKSLSIISDGSSGAFKLAKKFVELSKSNKVEDTKTRQKLKKLRDRQSDLEISVENLSKSVGTIKSGIIPSAILNRLSKEEVELNAIKEEIEKLSISKNKSKVQELEFTNLDKTIDFLKTEEGRLNIINFLTSNNIRFSFEYISDTLNSTAYVNNERIGQLSTQNDNKSAPLGVYGFDNLGNVFTQ

SEQ ID NO: 48972 - DNA, 50 bp, Pseudomonas veronii
  source 1..50: mol_type = genomic DNA
tgtgttagtattggcttgttggtcttgacctagtgactgttactcacaca

SEQ ID NO: 48973 - DNA, 40 bp, Pseudomonas veronii; identical to SEQ ID NO: 48963
  source 1..40: mol_type = genomic DNA

SEQ ID NO: 48974 - DNA, 50 bp, Pseudomonas veronii
  source 1..50: mol_type = genomic DNA
tgtgttagtattggcttgttggtcgggacctagtgactgttactcacaca

SEQ ID NO: 48975 - DNA, 40 bp, Pseudomonas veronii; identical to SEQ ID NO: 48965
  source 1..40: mol_type = genomic DNA

SEQ ID NO: 48976 - protein, 580 aa, Pseudomonas rhodesiae
MPTGYAYIRYSTRRQGADDKDSVTRQKSSIRAIAARHGVEVPEENFFYENGVSAYTGENSKTGKLKDLIDQIENLSIAPGDFVFVESIDRLSRQRLLQAKDLVYGILKKGVILVTTMDGYIYKLHEDQADIMKQDIMLTVISSRAHEESLTKSNRRKSAWKKAKTEAEETGIVFNKNRLPYGVIFEEKTNTLVIDKKAQEEIEFILENLKREGVTSTIKKANAFAAINWTQARVKDIFDTKYVLGYFMSQTKIDGKMVLDKHIENYYPKIVSASLFLEAKEAMTNRKVKKHQGRVTQNNANIFRHSCFCERCGKSLVFMNNYNSKGSRYFYMTCQQNIENGNCKNRFRYDLAVKLFLDTMQEFDRLNKKSVSLEPIDVTQYANLDEATLKEIEEVNKSLSMISDGSSGAFKLAKKFVELSKSNKVEDTKTRQKLKKLRDRQSDLEISVENLNKSVGTIKSGIIPSAILNRLSKEEVELNEIKEEIEKLAISKNKSKVQELEFTNLDKTIDFLKTEEGRLNIINFLTSNNIRFSFEYISNTLNSTAYVNNERIGQLSTQNDNKSAPLGIYGFDNLGNVFTQ

SEQ ID NO: 48977 - DNA, 50 bp, Pseudomonas rhodesiae; identical to SEQ ID NO: 43317
  source 1..50: mol_type = genomic DNA

SEQ ID NO: 48978 - DNA, 40 bp, Pseudomonas rhodesiae; identical to SEQ ID NO: 23258
  source 1..40: mol_type = genomic DNA

SEQ ID NO: 48979 - DNA, 50 bp, Pseudomonas rhodesiae
  source 1..50: mol_type = genomic DNA
tgtgttagtattggtttgttggtcgggacctagtggctgttactcacaca

SEQ ID NO: 48980 - DNA, 40 bp, Pseudomonas rhodesiae; identical to SEQ ID NO: 48965
  source 1..40: mol_type = genomic DNA

SEQ ID NO: 48981 - protein, 476 aa, Mycobacterium attenuatum
MSATQTAIYLRQSLDRDHNELAIERQRAACLQLCAANGWTDTIEYADNDTSASVGYRSGYARMLADIEGGAVQAVVCYHLDRLHRQPRELEDFIELADKRRIALATVTGEVDLATDTGRLVARITGAVAKAEVERKSARQKRANQQRAQAGKVWNARVFGWDANEIVVHEAEAIRTASRDLLNGASLWSIAAQWNSQALKTAKGCGWTGGTVRQVLTRASNAGLVTYDLRAAQAEARTKGKPVHMAGIVEGAEPGRPAIVDRDVWEGVCTLLADPKRHTGRSPGRKHLLSGIAICDACGKPIGTGVRGTRTGGKRAVYSCKRIGCMKIVRGVELTDKRVVDAITKRLAEPDAAVTLARPTVDAKALRDQIELLRGQIREAEADYDDGQITAARMNARIERVEAKLKPLQNKLLASRMSADVMSLAGRPDAAKRFAALPLDRQRGVIDTLATVTIHALNRPGGRFDPKAITVDFERK

SEQ ID NO: 48982 - DNA, 50 bp, Mycobacterium attenuatum
  source 1..50: mol_type = genomic DNA
ctgtatcttgggtcaatgcccgcgggcaccgtcattgatctaagatacta

SEQ ID NO: 48983 - DNA, 40 bp, Mycobacterium attenuatum
  source 1..40: mol_type = genomic DNA
cgacagacagctgcctgacggcacggtgatctggacctct

SEQ ID NO: 48984 - DNA, 50 bp, Mycobacterium attenuatum
  source 1..50: mol_type = genomic DNA
ctgtatcttgggtcaatgcccgcgagcaccgtcattgatctaagatacta

SEQ ID NO: 48985 - DNA, 40 bp, Mycobacterium attenuatum
  source 1..40: mol_type = genomic DNA
cgacagatagcggctgcacagcaggctgttcaagacctct

SEQ ID NO: 48986 - protein, 572 aa, Kineosporiaceae bacterium
MTAELTPTGGTFAAPTAVIYLRVSTPSQVKTDYDPEGISIPAQREACLRKAAQLGVRVVEEYIEPGKSATSMDKRPAFQEMLHRIRTMRDVNYVIVYKLSRMNRNRVDDALVMASLRKYKTTLISATESIDETPVGQLMHGMLAAFNEYRSAEDGADIRYKMAEKAKRGGTLGRAKLGYTNVRERFEGREVRTVVLDEERAPFVALAFELFATNQYSFERLADELTTRGLRTRPGRYPAGPVTDSKLAVMLRDRYYLGIVTFKGIEYPGRHEPLVSQELFDHVQVILDARGVAGERKRVHDHYLKGSLWCARCHAHDRRGRLIITKVTNRHGADYWYFLCRGRQDGICDLPYLPMEHVEDAVIDHWGTQTLPEDFVMRARANVTATLDDTNASARLLHEQLTAELAKIDVQEENLLDLAADASLATDKIRTRLTRLQNQRHGIQKRLKATDDGMEQGAAVLLSQLDLLAHPQALYQRVPDQGRRLLNQAMFDELLIDRGDDLETKVVDQTYTEPVRGLMASARAFRQHAAATSLAYDNRPTANGEPAIWGTLAGLLDPVSLDGGSSRTAMVE

SEQ ID NO: 48987 - DNA, 50 bp, Kineosporiaceae bacterium
  source 1..50: mol_type = genomic DNA
gttcgagtagaaccgccatggtggagctcctgggacgttactccaactgg

SEQ ID NO: 48988 - DNA, 40 bp, Kineosporiaceae bacterium
  source 1..40: mol_type = genomic DNA
cgggtgcttctcgttgtggagctgaggggattcgaacccc

SEQ ID NO: 48989 - DNA, 50 bp, Kineosporiaceae bacterium
  source 1..50: mol_type = genomic DNA
gttcgagtagaaccgccatggtggccctcctgggacgttactccaactgg

SEQ ID NO: 48990 - DNA, 40 bp, Kineosporiaceae bacterium
  source 1..40: mol_type = genomic DNA
cgggtgtctctccttgttgcccaggctggtttcgaactcc

SEQ ID NO: 48991 - protein, 503 aa, Flavonifractor plautii
MNNRIDAIYARQSVDKKDSISIESQIEFCKYELKGGNCKEYRDKGYSGKNTERPEFQQLMRDIESGLVRKVVVYKLDRISRSILDFAKMMDFFQKYDVEFVSSTEKFDTSTPMGRAMLNICIVFAQLERETIQKRVQDAWHSRCQRGFKMGGKTPYGFRTEPYVMDGIRTKKLVIEPTEAAFVRQMYEMYADPQVSLHDITRKLTADGMRTNRGRPLSRATLSVILRNPIYVMADLDIYEFFKSQGTDIYNDAADFAGTNGCYYYQGKGNTEDKHRHLQGQTLVLAPSEGFIPSELWLKCRKKLLASQSYQPARKARNTWMAGKIKCGKCGYALMSAHSNGILYLRCTVHADNKACPGCGCVKLHELEAVVYGAMVKKLKDFKTLTGRKKAAKISPKLAAKRLELAQVESEIEKLLDTLTGATPVLLSYANSRIEELDAKRQLISDEIAKLSADAVPAEKIESISGYLDDWENVSFEDKRQVVDALITVIRATNEKVEIEWKI

SEQ ID NO: 48992 - DNA, 50 bp, Flavonifractor plautii
  source 1..50: mol_type = genomic DNA
ctttgtgcccttgtctatatcagcgaaatactatggacaagggcacaaag

SEQ ID NO: 48993 - DNA, 40 bp, Flavonifractor plautii
  source 1..40: mol_type = genomic DNA
tcaggtgggacagtacacggagatctactttccggaaaag

SEQ ID NO: 48994 - DNA, 50 bp, Flavonifractor plautii
  source 1..50: mol_type = genomic DNA
ctttgtgcccttgtctatatcagcaaaatactatggacaagggcacaaag

SEQ ID NO: 48995 - DNA, 40 bp, Flavonifractor plautii
  source 1..40: mol_type = genomic DNA
acaggtatgacagtacatgaagttttacctaccagagaag

SEQ ID NO: 48996 - protein, 676 aa, Bacteroides xylanisolvens
MDKKVLIYCRVSTQQQTTDRQKEELLKFAVENHWNVEEEDIFIDVISGFKKGEFRPEYVKMLERVEYGDIDIILFSEFSRLARNATELLEQIKLFIDKGINLYFDKQKLWVRDSNKDVGSIILLHVLAVMSSYEIELFIERSLSGKITKVQAGHGGGDERAYGYMHNKNKQIVINPIESKIVTRIFEMYVGGYSSIQISEILNAEKVPAPYVRKLNEYKKNREAKGLEVKEYKFDTDNLKWRISTINRLMHNELYKGNRRITFYKPDPTNPLPLSERQDREIVYEYSEHVESLRIVSDELFQQAEDKLSKAHYNKNNAVRHENLLKHLMVCGECGANFSVGKSNETSKNYISGGRTYKCYGRVNRKDKPRTCTNGAELRQWKLDGLVLQLSIQMFAEINIQQTNILKIENLGKEIEELVQIKSSKNTELVEAENLYKKTLKRLIAIEDDEVAKNLISDAKHKYDETKNVLNKTMDKLSREITTKRITIDNLKRLNANPLLINKMDEIRKNRDLVKTMVDEYIDKITIFRLHELWLLVVVSYKGGEEMWGTIKCARYKKEEMFYDELHCHYGVEFQGWLLNNTEHCFSYDKSTRIITYHGGSKIYVEFKSGEYDYDTFNQMIQETGWMGCFPFYAYEDSDKDLSVPFNEKFRKSLQENRVDWKAHNDKVLERLLSES

SEQ ID NO: 48997 - DNA, 50 bp, Bacteroides xylanisolvens
  source 1..50: mol_type = genomic DNA
aaggatgtgtttgtttcgactgtatgcataggtgcgattgacacatcctg

SEQ ID NO: 48998 - DNA, 40 bp, Bacteroides xylanisolvens
  source 1..40: mol_type = genomic DNA
gagtaaatgctctgctgtatgcataggaggatactcctgc

SEQ ID NO: 48999 - DNA, 50 bp, Bacteroides xylanisolvens
  source 1..50: mol_type = genomic DNA
aaggatgtgtttgtttcgactgtaaccataggtgcgattgacacatcctg

SEQ ID NO: 49000 - DNA, 40 bp, Bacteroides xylanisolvens
  source 1..40: mol_type = genomic DNA
tagcacattctcagatgtgaccatgggaagatactccttc

SEQ ID NO: 49001 - protein, 676 aa, Bacteroides thetaiotaomicron; identical to SEQ ID NO: 10986

SEQ ID NO: 49002 - DNA, 50 bp, Bacteroides thetaiotaomicron; identical to SEQ ID NO: 10987
  source 1..50: mol_type = genomic DNA

SEQ ID NO: 49003 - DNA, 40 bp, Bacteroides thetaiotaomicron
  source 1..40: mol_type = genomic DNA
tagtaaatgctctgctgtatgcataggaggatactcctgt

SEQ ID NO: 49004 - DNA, 50 bp, Bacteroides thetaiotaomicron
  source 1..50: mol_type = genomic DNA
aagggtgtgttcatttcgactgtaaccataggtgcgattgacacatcctg

SEQ ID NO: 49005 - DNA, 40 bp, Bacteroides thetaiotaomicron; identical to SEQ ID NO: 49000
  source 1..40: mol_type = genomic DNA

SEQ ID NO: 49006 - protein, 676 aa, Bacteroides thetaiotaomicron; identical to SEQ ID NO: 10976

SEQ ID NO: 49007 - DNA, 50 bp, Bacteroides thetaiotaomicron; identical to SEQ ID NO: 10977
  source 1..50: mol_type = genomic DNA

SEQ ID NO: 49008 - DNA, 40 bp, Bacteroides thetaiotaomicron; identical to SEQ ID NO: 49003
  source 1..40: mol_type = genomic DNA

SEQ ID NO: 49009 - DNA, 50 bp, Bacteroides thetaiotaomicron
  source 1..50: mol_type = genomic DNA
aaggatgtgttcatttcggcagtaaccataggtgcgattgacacatcctg

SEQ ID NO: 49010 - DNA, 40 bp, Bacteroides thetaiotaomicron; identical to SEQ ID NO: 49000
  source 1..40: mol_type = genomic DNA

SEQ ID NO: 49011 - protein, 676 aa, Bacteroides thetaiotaomicron; identical to SEQ ID NO: 10986

SEQ ID NO: 49012 - DNA, 50 bp, Bacteroides thetaiotaomicron; identical to SEQ ID NO: 40127
  source 1..50: mol_type = genomic DNA

SEQ ID NO: 49013 - DNA, 40 bp, Bacteroides thetaiotaomicron; identical to SEQ ID NO: 49003
  source 1..40: mol_type = genomic DNA

SEQ ID NO: 49014 - DNA, 50 bp, Bacteroides thetaiotaomicron
  source 1..50: mol_type = genomic DNA
aaggatgtgttcatttcgactataaccataggtgcgattgacacatcctg

SEQ ID NO: 49015 - DNA, 40 bp, Bacteroides thetaiotaomicron; identical to SEQ ID NO: 49000
  source 1..40: mol_type = genomic DNA

SEQ ID NO: 49016 - protein, 679 aa, Bacteroides thetaiotaomicron
MNNMDKKVLIYCRVSTQQQTTDRQKEELLKFAAENHWNVEEEDIFIDVISGFKKGEFRPEYVKMLERVEYGDIDIILFSEFSRLARNATELLEQIKLFIDKGINLYFDKQKLWVRDSNKDVGSIILLHVLAVMSSYEIELFVERSLSGKITKVQAGHGGGDERAYGYMHNENKQIVINPIESKIVARIFEMYVGGYSSIQISEILNAEKVPAPYVRKLNEYKKNREAKGLEVKEYKFDTDNLKWRISTINRLMHNELYKGNRRITFYKPDPTNPLPLSERQDREIVYEYSEHVESLRIVSDELFQQAQDKLSKAHYNKNNAVRHENLLKHLMVCGECGANFSVGKSNETSKNYISGGRTYKCYGRVNRKDKPRTCTNGAELRQWKLDGLVLQLSIQMFAEINIQQTNILKIENLGKEIEELVQIKSSKNTELVEAENLYKKTLKRLIAIEDDEVAKNLISDAKHKYDETKNVLNKTMDKLSREITTKRITIDNLKRLNANPLLINKMDEIRKNRDLVKTMVDEYIDKITIFRLHELWLLVVVSYKGGEEMWGTIKCARYKKEEMFYDELHCHYGVEFQGWLLNNTEHCFSYDKSTRIITYHGGSKIYVEFKSGEYDYDTFNQMIQATGWMGCFPFYAYEDSGKDLSVPSNEDFGKSLQENRTDWKVHNDKVLERLLSKS

SEQ ID NO: 49017 - DNA, 50 bp, Bacteroides thetaiotaomicron; identical to SEQ ID NO: 40127
  source 1..50: mol_type = genomic DNA

SEQ ID NO: 49018 - DNA, 40 bp, Bacteroides thetaiotaomicron; identical to SEQ ID NO: 49003
  source 1..40: mol_type = genomic DNA

SEQ ID NO: 49019 - DNA, 50 bp, Bacteroides thetaiotaomicron; identical to SEQ ID NO: 49014
  source 1..50: mol_type = genomic DNA

SEQ ID NO: 49020 - DNA, 40 bp, Bacteroides thetaiotaomicron; identical to SEQ ID NO: 49000
  source 1..40: mol_type = genomic DNA

SEQ ID NO: 49021 - protein, 676 aa, Bacteroides thetaiotaomicron
MDKKVLIYCRVSTQQQTTDRQKEELLKFAAENHWNVEEEDIFIDVISGFKKGEFRPEYVKMLERVEYGDIDIILFSEFSRLARNATELLEQIKLFIDKGINLYFDKQKLWVRDSNKDVGSIILLHVLAVMSSYEIELFVERSLSGKITKVQAGHGGGDERAYGYMHNENKQIVINPIESKIVARIFEMYVGGYSSIQISEILNAEKVPAPYVRKLNEYKKNREAKGLEVKEYKFDTDNLKWRISTINRLMHNELYKGNRRITFYKPDPTNPLPLSERQDREIVYEYSEHVESLRIVSDELFQQAQDKLSKAHYNKNNAVRHENLLKHLMVCGECGANFSVGKSNETSKNYISGGRTYKCYGRVNRKDKPRTCTNGAELRQWKLDGLVLQLSIQMFAEINIQQTNILKIENLGKEIEELVQIKSSKNTELVEAENLYKKTLKRLIAIEDDEVAKNLISDAKHKYDETKNVLNKTMDKLSREITTKRITIDNLKRLNANPLLINKMDEIRKNRDLVKTMVDEYIDKITIFRLHELWLLVVVSYKGGEEMWGTIKCARYKKEEMFYDELHCHYGVEFQGWLLNNTEHCFSYDKSTRIITYHGGSKIYVEFKSGEYDYDTFNQMIQATGWMGCFPFYAYEDSGKDLSVPSNEDFGKSLQENRTDWKVHNDKVLERLLSKS

SEQ ID NO: 49022 - DNA, 50 bp, Bacteroides thetaiotaomicron; identical to SEQ ID NO: 40127
  source 1..50: mol_type = genomic DNA

SEQ ID NO: 49023 - DNA, 40 bp, Bacteroides thetaiotaomicron; identical to SEQ ID NO: 49003
  source 1..40: mol_type = genomic DNA

SEQ ID NO: 49024 - DNA, 50 bp, Bacteroides thetaiotaomicron; identical to SEQ ID NO: 49014
  source 1..50: mol_type = genomic DNA

SEQ ID NO: 49025 - DNA, 40 bp, Bacteroides thetaiotaomicron; identical to SEQ ID NO: 49000
  source 1..40: mol_type = genomic DNA

SEQ ID NO: 49026 - protein, 566 aa, Pseudomonas helleri
MHRSTPVYAYIRMSTVEQAKGDSERRQLGQIERFLQENNGELVEPVFLDRLSSFNGKNIKKGAIKDFLDRVKKGEIEKGSILVIESFDRISRQGGYIAHSVILDIINNGVDIATLSPYKRYSIDSENQFIENIEIQTLLYRAHEESRTKSDRITRQHQNRREKAKDKKVVYGSLPFWLERTPDWIEFREPEASDVKLCLSLLKTYGMYTATAKINEQRKSDKVFSKETVSHLLNRSSVCGDLQTHRIEYDEHGNKIRVPGEVIHDYYPALISRSEFEELRAEIQNRRTTKSTGRVSGFKNIFRNVMTCTYCFSPMRLAHMKWKSGGKKYLVCTKSETNQCIEKGRLWYDYDDVERVFFNEINLSILKKSLTQKTKIDDAEIEKLRSNLIKTEDQKTNILNAIEMGTVSKTLVNRLEELEKNSDEIQKRIYELKAENALKRSQNEAEIFDYGQLDAALKNEEQRAIINKILRTNQADISISKGEEGCDFIIEISIDDRLETEISYHKQDDFINRVEHDLPINQTSDLVIHEDHTDPYADEIEGQIFEVFDSASMPIIEINQHNKKSD

SEQ ID NO: 49027 - DNA, 50 bp, Pseudomonas helleri
  source 1..50: mol_type = genomic DNA
aacatacgaattgactacgccagcatgcaggcataacctgttcgtatagc

SEQ ID NO: 49028 - DNA, 40 bp, Pseudomonas helleri
  source 1..40: mol_type = genomic DNA
gaccatgccgctggcctgcatgaaggcgtagcaaatggtc

SEQ ID NO: 49029 - DNA, 50 bp, Pseudomonas helleri
  source 1..50: mol_type = genomic DNA
aacatacgaattgactacgccagcttgcaggcataacctgttcgtatagc

SEQ ID NO: 49030 - DNA, 40 bp, Pseudomonas helleri
  source 1..40: mol_type = genomic DNA
gaccatgtgactggctgacttggaggagaagctaatggtc

SEQ ID NO: 49031 - protein, 566 aa, Pseudomonas helleri; identical to SEQ ID NO: 35511

SEQ ID NO: 49032 - DNA, 50 bp, Pseudomonas helleri
  source 1..50: mol_type = genomic DNA
tttatacgaattgactacgccttcatacaggcataacctgttcgtatagc

SEQ ID NO: 49033 - DNA, 40 bp, Pseudomonas helleri; identical to SEQ ID NO: 49028
  source 1..40: mol_type = genomic DNA

SEQ ID NO: 49034 - DNA, 50 bp, Pseudomonas helleri
  source 1..50: mol_type = genomic DNA
tttatacgaattgactacgccttcttacaggcataacctgttcgtatagc

SEQ ID NO: 49035 - DNA, 40 bp, Pseudomonas helleri; identical to SEQ ID NO: 49030
  source 1..40: mol_type = genomic DNA

SEQ ID NO: 49036 - protein, 607 aa, Glutamicibacter arilaitensis
MTRKSQTPDTAAPKKAVLYLRVSSAAQTKTATDIDKDGNSIATQREYGLQKAHELNADVVEEFVEPGVSAQTITKRKAFRNMLTYLKENPGIDYVIIYARSRAFRNFTDAAITRRSLDDMGIKLISVREDFGEGVYADAMEAFTDIMNQVQNQLSGEDIKLKMRNKAKNGGTIGKAKLGYLNVRKDVDGYLVNSIALDPERAPLVKEAFELYATGEYTLEQLCEEMDDRGLRTRPTPKRPSAPLSRSYVHRFLKDLYYTGVVTYEGEIFAGRHEPIIPKELFDRVQEVMADRSGSGTKERTHLHYLRGLMRCMNCAKQGKESRLIFTESVGRRGDRHQYYFCVERQQRRTCDLPFLPVWLVEERMIDVLDQVTITDDFSRDVTEHLDDALANEQSSLQIARQQLERELAAVVSQEERLVDMIADGLLTKEVAQKKLNGITLKKGSIQQRIDQNQEKLAQGAEIFRDLANLMLTPKEHYRRATDEFRRTALQTYFHHINVGDDGIYAGKVREPFASIRRANDIFTFPQTAGEIAMSAKRPGACPPVENVHSVNVTEWVQKTAQNADFDVPNGISEQRENDAENSASPLLSSLIRFYSDSGSNKTHMVE

SEQ ID NO: 49037 - DNA, 50 bp, Glutamicibacter arilaitensis
  source 1..50: mol_type = genomic DNA
gttcgaataaaacacatatggtggaggccattcaacaactttcacggacg

SEQ ID NO: 49038 - DNA, 40 bp, Glutamicibacter arilaitensis
  source 1..40: mol_type = genomic DNA
ttaggatttaatttggtggaggtaaggggattcgaacccc

SEQ ID NO: 49039 - DNA, 50 bp, Glutamicibacter arilaitensis
  source 1..50: mol_type = genomic DNA
gttcgaataaaacacatatggtgggggccattcaacaactttcacggacg

SEQ ID NO: 49040 - DNA, 40 bp, Glutamicibacter arilaitensis
  source 1..40: mol_type = genomic DNA
tcagcattcaggttggtaagggtgaggggatcctaacccc

SEQ ID NO: 49041 - protein, 511 aa, Labilithrix sp
MQVVDVYSDAAESGSHIERAGVQRMLHEARVRGGSPFKNVLVDDLSRLSRDLGNTWNVVFGDLADRDIGVVDVTSGMASTDPNARITFAALGMVNDQFLQSVRKQTHRGLEGRALAGFWAGGRCYGYATVQEENPPDPEHPRKRPVIDETQAALVRRVFHLFADGQSLKAIASLLNEEGIAAPNDGGRGNKNGRGWGHTTIRAMLQNERYLGRFIWNQHKWLHASGKKNRRRVKRPESEWIRREYPELAIVDRELWDAVQDRFRRYTKPAGGRPPGTCTHRTPLVSGLMRCGVCGGSMAILARKTKAGVSYAQFGCVAHYSRGATICANNMTISELKVTKALLGALKDTLGHPEFIERFREQAQRRIGAAGKKGTQSDPEIDRRIRESERRIANLTDSLGKLGWSDAIGAKLKEEEGLLGRLKAERAKLKPEAPPPLPHPKVLVDGLTHLMAVLKSDPMRGRDVLSRFVSPLVMTPEGENPDRSYRATGAFDLSFFLDPPRAESLKTGVAR

SEQ ID NO: 49042 - DNA, 50 bp, Labilithrix sp
  source 1..50: mol_type = genomic DNA
gtctttgaaaaccggggttgcgcgggcgtgcgactttcgtattcaagccc

SEQ ID NO: 49043 - DNA, 40 bp, Labilithrix sp
  source 1..40: mol_type = genomic DNA
cgggcttatcagttgcgcgggtaggatttgaacctacgac

SEQ ID NO: 49044 - DNA, 50 bp, Labilithrix sp
  source 1..50: mol_type = genomic DNA
gtctttgaaaaccggggttgcgcgtccgtgcgactttcgtattcaagccc

SEQ ID NO: 49045 - DNA, 40 bp, Labilithrix sp
  source 1..40: mol_type = genomic DNA
cgggctaataagtggtccctctagaatttgaacccatgtc

SEQ ID NO: 49046 - protein, 548 aa, Faecalibacterium prausnitzii
MKEKTKVYIYTRVSTAVQVDGYSLDAQKSRMKAYAEFNDFEIVGEYEDAGKSGKSIEGRLEFNRMMEDIKSGKDGVSYVLVFKLSRFGRNAADVLSTLQVMQDFDVNLICVEDGIDSSKDAGKLMISVLSAVAEIERENIRVQTMEGRIQKAREGKWNGGFAPYGYKLEKGMLYINEEEAEAIRIIFDQYVHTDIGANGLAKYLANHGINKIQRQNGKNPLFDAALIRRILKNPVYCGKIAYGRRRTEKVHGTRNDYRLVEQENYLLVDGLHEAIVSEGLWHEAQVKLLAQAKKYEKVNNGKDNKVHLLTGLLKCPICGAGMYGNKSIKHKPDGTKYKDFFYYGCKHRTMTRGHKCEYKKQINEELLDGAVAEVIIKLVSNPKFAAMMQQKINMKIDTSAIEQEIANYEKQLRQSYATKSRLIDEIDTLDPDDKHYIKRKADLDDRLYKMYDKIEDTENLLIEARAKKMAIEAEKLTADNIYKVLIYFEKLYAVMDEQEKRQIMESLISEIHIYEERQPNGQWLKSIKFKLPIIEEDMEMSLDSDTHV

SEQ ID NO: 49047 - DNA, 50 bp, Faecalibacterium prausnitzii
  source 1..50: mol_type = genomic DNA
agtttggacagtgatacacatgtcgaggttgtgagttgttataccaaaac

SEQ ID NO: 49048 - DNA, 40 bp, Faecalibacterium prausnitzii
  source 1..40: mol_type = genomic DNA
cccgaggacgaaacattgcgaatgcgtgctcttgatgtca

SEQ ID NO: 49049 - DNA, 50 bp, Faecalibacterium prausnitzii
  source 1..50: mol_type = genomic DNA
agtttggacagtgatacacatgtcagggttgtgagttgttataccaaaac

SEQ ID NO: 49050 - DNA, 40 bp, Faecalibacterium prausnitzii
  source 1..40: mol_type = genomic DNA
cccaaggactaaacctttaagatgccagctcttaaaatca

SEQ ID NO: 49051 - protein, 537 aa, Enterococcus faecalis; identical to SEQ ID NO: 36661

SEQ ID NO: 49052 - DNA, 50 bp, Enterococcus faecalis; identical to SEQ ID NO: 45192
  source 1..50: mol_type = genomic DNA

SEQ ID NO: 49053 - DNA, 40 bp, Enterococcus faecalis
  source 1..40: mol_type = genomic DNA
ttctgttagttcgacatcatcagtccaaattatggggtac

SEQ ID NO: 49054 - DNA, 50 bp, Enterococcus faecalis
  source 1..50: mol_type = genomic DNA
ttacgtccatttgacatatcatcgaatgacgaaaagacgaatagacgtag

SEQ ID NO: 49055 - DNA, 40 bp, Enterococcus faecalis
  source 1..40: mol_type = genomic DNA
ttctcttatttgaattttaaaaattgaaattatggggtac

SEQ ID NO: 49056 - protein, 537 aa, Enterococcus faecalis
MREQQNYRAAIYCRLSSEDGADHESMSIGNQRALLAEYVQKQGWEIVDTYIDDGFSGTNFDRPGFQRMIADIEKGRINLVITKDLSRLGRNYIMCGQYTEIYFPERHVRYIALNDGVDTLNQTSSMDITPFKHILNDMYAKDISTKIKSTLHTKAKRGEYLGALDPYGYLRHPDDKHKLIINEETAPVVRRMFEMCAAGIGSKSIATTLNREGILSPTEYTRFRKHNPERDGEFERRSFWTRTYVQFMLKNEIYVGSMVQGRQYTPSYRSKKREPIPKKDWIVVPNMHEPTVSRELFDEAQKRMGARKKTIKAKDEPDLFAGLFFCEACGTSMVPKVSQQKYFYYTCGRSHAIGNLACSAHYINRDTFHQAVLEDIRRNARLFSEDTEKAAQKLMELKCADQQKQTAAMKRDLASAKKRLADLDVKLKRTYEDNMSGKLPDHIFAMFIADYDTERETLKAKVAELEKALEKVRDAKADIDRFAALIQKYTSFEKLDRFMLHELIDRITIYETPGMGRCRKGKEKRITIYYKFVGTIQ

SEQ ID NO: 49057 - DNA, 50 bp, Enterococcus faecalis; identical to SEQ ID NO: 45192
  source 1..50: mol_type = genomic DNA

SEQ ID NO: 49058 - DNA, 40 bp, Enterococcus faecalis; identical to SEQ ID NO: 49053
  source 1..40: mol_type = genomic DNA

SEQ ID NO: 49059 - DNA, 50 bp, Enterococcus faecalis; identical to SEQ ID NO: 49054
  source 1..50: mol_type = genomic DNA

SEQ ID NO: 49060 - DNA, 40 bp, Enterococcus faecalis; identical to SEQ ID NO: 49055
  source 1..40: mol_type = genomic DNA

SEQ ID NO: 49061 - protein, 555 aa, Oscillibacter sp
MTKQPDKITALYCRLSRDDEQDGLSGSIKNQQTILEKYAQENGFKNTRVFIDDGWSGTNFARPAFTEIMELAEKGLIGTLIVKDHSRLGRNRLIVGQLLEEGFDSLGIRYIAIMDNIDTAKGISDLVPMQDLFNEWHAKNTSQKVRNVFKSKGMSGAPLTTNPPFGYLKDPESKNGWIIDEAAAKTVRQIFTWCVDGFGPTQIAKRLKAGKVPTPTEHWGNIGRNCSKPPAVPYNWCSATVADILGKQEYCGDTVNFRSTTKSFKNKKKIERPPEEWQIFKDAHPAIVDRETFALVQELRKHRRRPTKSGIVSPFSGLLYCADCGEKLYYSVTNNYKREQAYFFCSSYRKNSEVCSAHYIREKVVEQIVLESMQRILLNVQVFEKEFARKQMDCYTEDKKKLLAAKRRELSKAKKRIAEIDALIQKIYEDNASGKLSDERYATLSLSYEEEQEKLKAAVPEMQTYLEAETDKTESLQRFIQKVKQITELKALTPELIHEFVDKIVVYAPRYLDGKRVQLLDIYYSGVGILHELTPEEMEEAFQQHLTERNKEKTA

SEQ ID NO: 49062 - DNA, 50 bp, Oscillibacter sp
  source 1..50: mol_type = genomic DNA
caccttccttacggagggtgccccgaaggaggcacttcgtaaggaagtgt

SEQ ID NO: 49063 - DNA, 40 bp, Oscillibacter sp
  source 1..40: mol_type = genomic DNA
gtaaaaaaatcagggccccgaggccctgatttttttgcgc

SEQ ID NO: 49064 - DNA, 50 bp, Oscillibacter sp
  source 1..50: mol_type = genomic DNA
caccttccttacggagggtgcccccaaggaggcacttcgtaaggaagtgt

SEQ ID NO: 49065 - DNA, 40 bp, Oscillibacter sp
  source 1..40: mol_type = genomic DNA
ttcaaaaaatcagtgaccccaggagctgattttttggaaa

SEQ ID NO: 49066 - protein, 538 aa, Dialister succinatiphilus; identical to SEQ ID NO: 13576

SEQ ID NO: 49067 - DNA, 50 bp, Dialister succinatiphilus; identical to SEQ ID NO: 13577
  source 1..50: mol_type = genomic DNA

SEQ ID NO: 49068 - DNA, 40 bp, Dialister succinatiphilus
  source 1..40: mol_type = genomic DNA
gtacttcttcccctcaatgaaaaggctgggcacgtagtag

SEQ ID NO: 49069 - DNA, 50 bp, Dialister succinatiphilus
  source 1..50: mol_type = genomic DNA
ttgcttctttatcacacataagcaactgctcatgtacggtaaggaagcaa

SEQ ID NO: 49070 - DNA, 40 bp, Dialister succinatiphilus
  source 1..40: mol_type = genomic DNA
gtcctccttcccatcaatcacaagtctgggcctctagcac

SEQ ID NO: 49071 - protein, 570 aa, Oscillibacter sp
MAMTAENDNQEKITALYCRLSVEDIKDDKDKKRKGQEDESNSISNQKQILLDYAKKHGYTNTMFFVDDGISGTSFDRNDFNRMHRMVEEGKIGTIIVKDLSRFGREHIEGGRLAEIVYPTLGVTFISIQENVNSSTGEGMEMLPFYNIFNEWYAAQTSKKIRAVWQSKSDNGERVSATVAFGYRKADDDSKQWVIDEPAAKVVRYIFQLCIEGLGVTKIARRLEAEKILTPTAYYNSIGRKTRNKVIDPYHWSENSVDHILCNMQYTGCTVNFKSSTVSFKVHKTVYNSPEDWVIIPNTQEAIIDMDTWERVQEIKKHRRRNTATGRQSIFSGLMYCGDCGSKLYFCAAKSVKEHQEFYRCSAYKENRGSCTIHFIRNVVLERMVLKLIREAAEYITEYEPVFLYLYSKQHQLNKANNLKAAKQELEKNKKRIVALDKLIEAAFEKNVLGTLRDNLFERMTANYEKEQKELIQAVAEAEQRLANAEQDNIDLRAFLSIIRKCTDLKELTPELVHRLITKIEVFDSTKDENGKKHVPIKLHFIGVGVLEIPDGKTILEIYEEIRKNPPIVA

SEQ ID NO: 49072 - DNA, 50 bp, Oscillibacter sp
  source 1..50: mol_type = genomic DNA
gactgtcctttgccacctctggcaaatgcccggtgttcttaaggacagta

SEQ ID NO: 49073 - DNA, 40 bp, Oscillibacter sp
  source 1..40: mol_type = genomic DNA
aataaaaatccggctctcaaacgagagccggattttcatg

SEQ ID NO: 49074 - DNA, 50 bp, Oscillibacter sp
  source 1..50: mol_type = genomic DNA
gactgtcctttgccacctctggcaagtgcccggtgttcttaaggacagta

SEQ ID NO: 49075 - DNA, 40 bp, Oscillibacter sp
  source 1..40: mol_type = genomic DNA
aattaaaatcagtatctcaagagatatctgcagtttcatg

SEQ ID NO: 49076 - protein, 540 aa, Faecalibacterium prausnitzii
MKQPYNTTIYNTALYLRLSRDDELQGESGSIQTQRMMLRQYAAEHGLTVVDEYIDDGWSGTNFERPSFQRMIDDIEDGKINCVVTKDLSRLGRNYILTGQYTEIYFPSKGVRYIAINDNVDTINGESELAPFLNILNEMHARQTSKKVKAAMHTRFANGAHYGAYAPLGYVKDPDKKGHLLIDPETRWIVEKIFDLAVHGRGAASITRILVEEKVPTPGWLNYERYGTFANIYAGEPAEKAYAWTIAQVKSILKEETYIGHSIHNKQSNISFKNKKKVRKPQEEWYRVENTHEAIISEEVFQKVQELIASRRRKRRNGTTQIFAGLIKCADCGWSLAYGENKQNKNPYGYYHCSKNGQGLRQCSMHYIRYDVLYAYVLARLQYWSMLAQKDEDNLLKRLLNASDRERNSAKKKQAAELKKAEKRKAEVDGLFAKMYEDWSAGRITEYNFNMLSEKYQNEQKELETKIRQLHETMEAAVQTAADAEKWIALMKQYVNPVELTAELLNTLIEKITVHEAVKGEDGSREQEVEIYYRFIGKID

SEQ ID NO: 49077 - DNA, 50 bp, Faecalibacterium prausnitzii; identical to SEQ ID NO: 2472
  source 1..50: mol_type = genomic DNA

SEQ ID NO: 49078 - DNA, 40 bp, Faecalibacterium prausnitzii
  source 1..40: mol_type = genomic DNA
aataacgggattcaagccgggcgcatcactccccgatata

SEQ ID NO: 49079 - DNA, 50 bp, Faecalibacterium prausnitzii
  source 1..50: mol_type = genomic DNA
caatatctttaattaagggagacgatagtttcccatagttaaagatacca

SEQ ID NO: 49080 - DNA, 40 bp, Faecalibacterium prausnitzii
  source 1..40: mol_type = genomic DNA
aataaagggattatggaaaatggcatcactctcctatata

SEQ ID NO: 49081 - protein, 548 aa, Streptococcus anginosus; identical to SEQ ID NO: 14666

SEQ ID NO: 49082 - DNA, 50 bp, Streptococcus anginosus
  source 1..50: mol_type = genomic DNA
tttacaatctctaattaggcataaaacaatttatggcaaaataaggacgg

SEQ ID NO: 49083 - DNA, 40 bp, Streptococcus anginosus
  source 1..40: mol_type = genomic DNA
gcaaaatctcaaggtattaagcagctaatggctggtggag

SEQ ID NO: 49084 - DNA, 50 bp, Streptococcus anginosus
  source 1..50: mol_type = genomic DNA
tttacaatctctaattaggcataatccaatttatggcaaaataaggacgg

SEQ ID NO: 49085 - DNA, 40 bp, Streptococcus anginosus
  source 1..40: mol_type = genomic DNA
gcaaaatctaaagatcttatccagccaatctgatgtagag

SEQ ID NO: 49086 - protein, 540 aa, Winogradskyella forsetii
MQKYFVSIFKIVVKHMKDQTIFDQFAKKGKGQKLRTDGKAVIYTRVSTKEQAENNASLETQLKYCKELANKKGLEVSEYFGGTYESAKSDERKEFQKMLNYVKRRSNVGYIIVYSYDRFSRTGANGAYISDQLKRQGIVTISATQEVDTSTSAGSFQQNLYYMFSQFDNELRRDKSVSGMQEKLRKGHWTGAYPFGYTNANPGKGKTPKFVITKEGRLLKQAFLWKANSNMSHVEIANKLQEKGLKINDKRLSVLFRNPFYCGLIVNSLIPGEVIEGNHQPMITKELFLKIHNLLNTGTETRKYCVDDENLPLKTFLKSTTCGTPYTGFIVKKKGLYYYKNRRKGSKENRSAKKLHQEFLELLETYKLKDKKFVAPLKEMVYDTFVGMNEEAIKETKELSSGIVAIEMKLDRLEERYVFEEINKSQYDRFRTKLVAEVNQKKKNLSKHSFDSSNLKKSINIALKYALNLPLLWSSGDIEVKRKLQYMVFPDGLGYDFQNKRVQTFRVNSIFAQIACLSDTLEGNKKGNFQNNIENSRLVT

SEQ ID NO: 49087 - DNA, 50 bp, Winogradskyella forsetii
  source 1..50: mol_type = genomic DNA
aatatcgaaaattcccgtttagtgacctcgacaagacagagttcaaactt

SEQ ID NO: 49088 - DNA, 40 bp, Winogradskyella forsetii
  source 1..40: mol_type = genomic DNA
gctttttgatttattcgtgaccgcgaagggattcgaaccc

SEQ ID NO: 49089 - DNA, 50 bp, Winogradskyella forsetii
  source 1..50: mol_type = genomic DNA
aatatcgaaaattcccgtttagtgccctcgacaagacagagttcaaactt

SEQ ID NO: 49090 - DNA, 40 bp, Winogradskyella forsetii
  source 1..40: mol_type = genomic DNA
gctatctaatttatgagtgccagagaagagatttcaaccc

SEQ ID NO: 49091 - protein, 543 aa, Anaerotruncus rubiinfantis
MDIRRARGEMRLGRPVFDLPLRVTFYARVSTDRDEQLNSLENQVQYYTELIQSKPNWTYVEGYIDEGISGTSTKRRDSFNRMIADAKAGRFDFIITKEISRFSRSTLDSIRYTQELLEHGVGVLFQNDNINTLDSDSEFRLVVMAGVAQDEVRKLSERLKFGFRQAIKNGHVLGNDRLWGYDKKDCALTINEGEAQVVRRIFDLYANQQMGIRRISQTLFDEGFTSRKGNPFNVLTIRNILQNPKYKGWYCANKSQTVDYRSKRKIFLDESEWVMYPDSAVPAIVSEELWDRANALYKRRSQQMMAHQSAAEFHNRYPYSGKIICEEHGTSFHRQVLKSARGEKEVWQCRVYRNRGRAACSAPQLRTAALDQIMAQIFDQLAQNKQAIVDAVVKVIKSVPDEHDYGRDVLRIEEDLSAINAKKDRLLEMSMAEAISIEEFKHRNDGFNEQIRELEERLEHIKTEEQKSKSSVEQLDKIKTVLEQELSFANGINSELVTTILDHMVVKKGSTREEVYLDIYLKFGGPYRAVFDRENSSFRINRY

SEQ ID NO: 49092 - DNA, 50 bp, Anaerotruncus rubiinfantis
  source 1..50: mol_type = genomic DNA
ttcctccttccgcatcaatcgttatttattgaagcaagcaaaaggaaaga

SEQ ID NO: 49093 - DNA, 40 bp, Anaerotruncus rubiinfantis
  source 1..40: mol_type = genomic DNA
gaaggcggagtaatatttcttaataatatgtgcgaccagc

SEQ ID NO: 49094 - DNA, 50 bp, Anaerotruncus rubiinfantis
  source 1..50: mol_type = genomic DNA
ttcctccttccgcatcaatcgttatatattgaagcaagcaaaaggaaaga

SEQ ID NO: 49095 - DNA, 40 bp, Anaerotruncus rubiinfantis
  source 1..40: mol_type = genomic DNA
gaaggcagggaaatatttgtaaataatatatcggacaaaa

SEQ ID NO: 49096 - protein, 543 aa, Anaerotruncus rubiinfantis
MDIRRARGEMRLGRPVFDLPLRVTFYARVSTDRDEQLNSLENQVQYYTELIQSKPNWTYVEGYIDEGISGTSTKRRDSFNRMIADAKAGRFDFIITKEISRFSRSTLDSIRYTQELLEHGVGVLFQNDNINTLDSDSEFRLVVMAGVAQDEVRKLSERLKFGFRQAIKNGHVLGNDRLWGYDKKDCALTINEGEAQVVRRIFDLYANQQMGIRRISQTLFDEGFTSRKGNPFNVLTIRNILQNPKYKGWYCANKSQTVDYRSKRKIFLDESEWVMYPDSAVPAIVSEELWDRANALYKRRSQQMMAHQSAAEFHNRYPYSGKIICEEHGTSFHRQVLKSARGEKEVWQCRVYRNRGRAACSAPQLRTAALDQIMAQIFDQLAQNKQAIVDAVVKVIKSVPDEHDYGRDVLRIEEDLSAINAKKDRLLEMSMAEAISIEEFKRRNDGFNEQIRELGERLEHIKTEEQKSKSSVEQLDKIKTVLEQELSFANGINSELVTTILDHMVVKKGSTREEVYLDIYLKFGGPYRAVFDRENSSFRINRY

SEQ ID NO: 49097 - DNA, 50 bp, Anaerotruncus rubiinfantis; identical to SEQ ID NO: 49092
  source 1..50: mol_type = genomic DNA

SEQ ID NO: 49098 - DNA, 40 bp, Anaerotruncus rubiinfantis; identical to SEQ ID NO: 49093
  source 1..40: mol_type = genomic DNA

SEQ ID NO: 49099 - DNA, 50 bp, Anaerotruncus rubiinfantis; identical to SEQ ID NO: 49094
  source 1..50: mol_type = genomic DNA

SEQ ID NO: 49100 - DNA, 40 bp, Anaerotruncus rubiinfantis; identical to SEQ ID NO: 49095
  source 1..40: mol_type = genomic DNA

SEQ ID NO: 49101 - protein, 549 aa, Streptomyces scabiei
MTPGLRYLACLRLSADSDGSTSIEWQRGVIRHHVSSPLLSGVLVGEAEDTDVSGSISPFKRPRLGKWLTSRADEFDVIIAAKMDRLTRRSMHFNELLEWAQQNGKFIVCVEEGFDLSTPQGKMMARMTAVFAEAEWDTIQARILNGVQSRLENRSWLTGAPPTGYRIKAVEGGKRKVLEIDQDFHPYVEEIFTRVREGQSTHRIARDFNGRGVLTWGDHLRKLKGEETKGTQWQSTIINKFIRSSWVPGIYAYKGEAVLDDQGEPVILPEKPLASMDEWTDLVDRIKPAPNSYTGGTRVSAKSLLSSIAHCGNCGAPVTSLLNSGHTRKDGERIPGHRYYRCSNKFKGGACTQGLYIRADALDAAVDQAIRDSVGTWDMYERAGTGPSQARELQETRARLENLEAKYIAGEYDGEGQEESYMRMHKGLSAKVALLAKQEEERANPTLKAMGKKYGEVWEAKDQEDRREFLRTYGVKLWAWKQGDMSNDLGMVIDLGDIQAMAQELRLNKEEGMDRLLIGQNVPAHWTNPELREFGPDDVPSFLKELESA

SEQ ID NO: 49102 - DNA, 50 bp, Streptomyces scabiei
  source 1..50: mol_type = genomic DNA
gcgtgtgctttgccgactggcaaggtcaagccagttacctaggcacacag

SEQ ID NO: 49103 - DNA, 40 bp, Streptomyces scabiei; identical to SEQ ID NO: 29348
  source 1..40: mol_type = genomic DNA

SEQ ID NO: 49104 - DNA, 50 bp, Streptomyces scabiei
  source 1..50: mol_type = genomic DNA
gcgtgtgctttgccgactggcaagatcaagccagttacctaggcacacag

SEQ ID NO: 49105 - DNA, 40 bp, Streptomyces scabiei
  source 1..40: mol_type = genomic DNA
agaactgcttagagtcaaaatcaaatggctcaacagagtg

SEQ ID NO: 49106 - protein, 535 aa, Oscillibacter sp
MLQVAAYCRVSTDKDDQANSFAAQQRYFHERIEREPDWELQGIYADEGISGTSTKNRAEFNRMLRAAEMGKIDLIVTKEVSRFARNTVDALKITRELRKRDIGVLFLNDNIDTRDHDSEFRLSIMSSVAQEESRKTSDRSKWGQTRSMEQGVVFGGSLLGYDVQGGKMTVDPKGAAIVRLIFRKYLDECKGCGTIARELREAGILSSRGQCRWSSATVVKILKNEKYCGDLVQKKTYTPDFLTHEKRYNHGQEPIVEIKDHHEPIIDRETWQAVQQELRRRNRARGSGGHGNRYPLSGKIRCGACGKSFVRRTKTRKDGSSYRRWCCFTATSEGLRRTDGAGNPLGCSVGRQLREDVAMDILRRSVDAVTPDKMAIISDLFRIVEQVLSNGEDDEQQEKCRLEQELEKLQGRSDAILDRFLDQTLSRADFQRAKARCEAEIVRTQEKLEAVRRQQKPDTDTGTRKPDIRAAITGIVTGQTAGDSFYGRLLHHMTVYQDGRVEVALNLLPTKWTYVLDGSEKYRAKTGVQNASSVP

SEQ ID NO: 49107 - DNA, 50 bp, Oscillibacter sp
  source 1..50: mol_type = genomic DNA
ggggtacaaaacgcttcctcagtaccgacaaaggaagcaaaatagccaat

SEQ ID NO: 49108 - DNA, 40 bp, Oscillibacter sp
  source 1..40: mol_type = genomic DNA
atgacccagttcctcagtgccgatgtcagtcagcagtccc

SEQ ID NO: 49109 - DNA, 50 bp, Oscillibacter sp
  source 1..50: mol_type = genomic DNA
ggggtacaaaacgcttcctcagtagggacaaaggaagcaaaatagccaat

SEQ ID NO: 49110 - DNA, 40 bp, Oscillibacter sp
  source 1..40: mol_type = genomic DNA
ctgagtcatttccacagtgggcaagtcagtcacaaatccc

SEQ ID NO: 49111 - protein, 503 aa, Roseburia hominis
MNNRIDAIYARQSVDKKDSISIESQIEFCKYELKGGNCKEYTDKGYSGKNTDRPKFQELVRDIKRGLIAKVVVYKLDRISRSILDFANMMELFQQYNVEFVSSTEKFDTSTPMGRAMLNICIVFAQLERETIQKRVTDAYYSRSQRGFKMGGKAPYGFHTEPIKMDGINTKKLVVNPDEAANIRLMFEMYAQPTTSYGDITRYFAEQEILFHGKELIRPTLAQMLRNPVYVQADLDVYEFFKSQGTVIVNDAADFTGMNGCYLYQGRDVKPSKKNDLKDQMLVLAPHEGIVPSDIWLTCRKKLMNNMKIQSARKATHTWLAGKIKCGNCGYALMSIYNPSGKQYLRCTKRLDNKSCSGCGKIITSELETVVYQQMVKKLASYKTLTGRKKAAKANPKIAALQVKLAHVDSEIEKLVDSLTGANNVLLSYVNVKIAELDGRKQELLARIAELTVEAISPEQVSQISGYLDTWENVSFDDKRRVVDLMITTIAATSDSLNITWKI

SEQ ID NO: 49112 - DNA, 50 bp, Roseburia hominis; identical to SEQ ID NO: 12
  source 1..50: mol_type = genomic DNA

SEQ ID NO: 49113 - DNA, 40 bp, Roseburia hominis
  source 1..40: mol_type = genomic DNA
cagcggtttaatgaccgtgttaatggagttcacgaattca

SEQ ID NO: 49114 - DNA, 50 bp, Roseburia hominis; identical to SEQ ID NO: 324
  source 1..50: mol_type = genomic DNA

SEQ ID NO: 49115 - DNA, 40 bp, Roseburia hominis
  source 1..40: mol_type = genomic DNA
tagaggtttagagaccattacaagctagttcacgaatcca

SEQ ID NO: 49116 - protein, 527 aa, Vibrio splendidus
MTTAYSYIRFSSTTQSQGDSLRRQTQLAQEYCLKHSLTLSEQSFQDLGISAFRSDNTNEDNGLGQFLKALEQGVVPNGSYLLVESLDRLSRNNTLIAMGQLLNIIGKGVTVVTLIDDHKYSSETKNPSMDILISLSHMERAHNESKTKSERIKAAWANKRANPFDTNRTSITPFWLKLNKDRRTYSVLENQAAIIKRIFQLSIDGHGVISIVRILNEEGIAAPKGGTWAQTTVSRTLNSKAVIGHYMPKRGRAKTNSLIENYYPAIISEDTYYLSQSRKSERSNPKSAGRKTTFPNAFNQVAKCSQCGSTMYYDNKSPTLKYLTCREFKKKTCTNKPIRIELMHRFIIEQFLHPQHFEQFNELVAEDNISNSGVIMLEGKLETEKEALKQLLSLSTDFSNSVIQEEIKTRSESIQSLEQQVENEKASTVNTTHSVHLNFRESCQLVADALQTEVYGKQPAPQSKEELFKVRVKLNRSLKQTFSEITVTHCPDTKKASITANDFVFEAHKSAMKTDLRDTVWRTISIY

SEQ ID NO: 49117 - DNA, 50 bp, Vibrio splendidus
  source 1..50: mol_type = genomic DNA
tacaggtaaatattgccaactagtgtaatagtcggtaacatttacctttc

SEQ ID NO: 49118 - DNA, 40 bp, Vibrio splendidus
  source 1..40: mol_type = genomic DNA
ttcaggtagccccaccaatgtaaacccaggcataccgttg

SEQ ID NO: 49119 - DNA, 50 bp, Vibrio splendidus
  source 1..50: mol_type = genomic DNA
tacaggtaaatattgccaactagttcaatagtcggtaacatttacctttc

SEQ ID NO: 49120 - DNA, 40 bp, Vibrio splendidus
  source 1..40: mol_type = genomic DNA
ttcaggtggccacaccctttcaaatccagccatgtgggtg

SEQ ID NO: 49121 - protein, 618 aa, Ruminococcus torques; identical to SEQ ID NO: 11111

SEQ ID NO: 49122 - DNA, 50 bp, Ruminococcus torques; identical to SEQ ID NO: 11112
  source 1..50: mol_type = genomic DNA

SEQ ID NO: 49123 - DNA, 40 bp, Ruminococcus torques
  source 1..40: mol_type = genomic DNA
tattcctgacagcacgacagaggttggtaagtgtgcgttt

SEQ ID NO: 49124 - DNA, 50 bp, Ruminococcus torques; identical to SEQ ID NO: 19274
  source 1..50: mol_type = genomic DNA

SEQ ID NO: 49125 - DNA, 40 bp, Ruminococcus torques
  source 1..40: mol_type = genomic DNA
gagtcctgactgcacgccaaaggttgttaagtggctttct

SEQ ID NO: 49126 - protein, 642 aa, Vibrio vulnificus
MSLELQNDRVVLEQLATQYQTTVSDRVYQDAGVSSFKGANAKTGELARLLKDIESNLVVSGDVLVLRSLDRLSRQNLTASEVLYNTIINAGVFIHTTIDNHLYKKDCPMSSILATLALKTANEESSKKSHLTNRYAAHRIQQHQDGVRVDGYSYDVAIGRHPFWVHVDTTTKTVREHPVNWAIAKSLVKATLQGDGVGTVLRLARTHGLDITYSTVAKMFNSRSIYGVLEINHAGTDHVLEGYYPALVTEQEYYQIRAIKESATKVSNNQRKRVSILGGIQRLYCDCCGSVMVIARNVKQQVEYYRCSNRMVKCYPYLKQSDLDYVALLAIRAKLFVHQLNSNNTEDDLVLLGMETQLNELTTSYKKRQTLILDNPDLFDADFKLALSTQKSEIETLQVSIDQHKVESAKNDLNTDIDTSFLLGAIDVLDEHTKTLDSYINADCDLKTEIRGVVRDLVARITVDHRHMVTIQFKDSTVERYLIPRRRDGGKQRQRYCIKINTVTGDELVEMQSLFPEVAMVTATEETVSTLNPHLEALQEHQIPLIPIPTYKVVKDKVNEFYGLLTDGMYEWKRAVIMSVGATTTQWQEHKDDDVSIHGWTKVDVELITKYYTKRRTTIIYRGQLDLVHAAKTLGVIKVTIK

SEQ ID NO: 49127 - DNA, 50 bp, Vibrio vulnificus
  source 1..50: mol_type = genomic DNA
atgtcagtacaacttgttttagcatcaaccaattcgtagtatactcacgc

SEQ ID NO: 49128 - DNA, 40 bp, Vibrio vulnificus
  source 1..40: mol_type = genomic DNA
atccacgctatctttggcatcaccaaagagcattgatgtg

SEQ ID NO: 49129 - DNA, 50 bp, Vibrio vulnificus
  source 1..50: mol_type = genomic DNA
atgtcagtacaacttgttttagcataaaccaattcgtagtatactcacgc

SEQ ID NO: 49130 - DNA, 40 bp, Vibrio vulnificus
  source 1..40: mol_type = genomic DNA
atcctcgttatctttggaataaagaaaatgctttcgtgtg

SEQ ID NO: 49131 - protein, 528 aa, Eubacterium ventriosum
MAYCIYLRKSRADRELELQGFGETLKRHRDTLIELAKKKNLPIGEIYEEVVSGDSIAARPQMQRLLNDVSDGKWEGVLVMEIERLARGDTSDQGIVTKTFTYSNTLIITPMKTFNPTDEFDQEYFEFGLYMSRREYKTIKRRLHAGMEASCKEGNYIHHTPPFGYSIVKNKKSKGYRLEPKPGEAEIVKLIFQWYTKGILKEDGSYELLGTARIADKLNSEYSINPLGGVWTIPTISTMLRNEHYLGYIVFGKKKRKKVVENGIIVDKWTRNESYGLYKGKHPALVSQDTFNLAQERLSRNPRRPSKTITNPLAGVIKCGMCGRSMYRRPYQKRGQSASLICSEKTCHNVSSAFYLVEDALLTAIKEWIDGYEIKEEANKYDTSVLESKTKLLEEQQKQLITYKNQLTKVFEAYENGIYDSDTFLNRQKTVSESISSTEEAIVKLNKEIANEREIISHQEEIIPKARKILEIYKTSDDVQLKNDLMKSILDKVVYTKTANGHFKDQRQDDFKLELFPKLPKNKGNSSE

SEQ ID NO: 49132 - DNA, 50 bp, Eubacterium ventriosum
  source 1..50: mol_type = genomic DNA
gaatgatatagtcgaaccaccaacgaactcgtagtctaactatatcatta

SEQ ID NO: 49133 - DNA, 40 bp, Eubacterium ventriosum
  source 1..40: mol_type = genomic DNA
caacgatattgcggtggaagaacttgggcatctcgaaatg

SEQ ID NO: 49134 - DNA, 50 bp, Eubacterium ventriosum
  source 1..50: mol_type = genomic DNA
gaatgatatagtcgaaccaccaacgtactcgtagtctaactatatcatta

SEQ ID NO: 49135 - DNA, 40 bp, Eubacterium ventriosum
  source 1..40: mol_type = genomic DNA
caatcatatttccatggaagtactttgccaactctaactg

SEQ ID NO: 49136 - protein, 522 aa, Blautia wexlerae; identical to SEQ ID NO: 36056

SEQ ID NO: 49137 - DNA, 50 bp, Blautia wexlerae
  source 1..50: mol_type = genomic DNA
tgttgcacttatgcagttgcaccatctggcacgaccttgtaagtacaaca

SEQ ID NO: 49138 - DNA, 40 bp, Blautia wexlerae
  source 1..40: mol_type = genomic DNA
agtagaacgggctttctgctctgcagcaagatcctcgaac

SEQ ID NO: 49139 - DNA, 50 bp, Blautia wexlerae
  source 1..50: mol_type = genomic DNA
tgttgcacttatgcagttgcaccatttggcacgaccttgtaagtacaaca

SEQ ID NO: 49140 - DNA, 40 bp, Blautia wexlerae
  source 1..40: mol_type = genomic DNA
tgaagatacagctttcagctttgctgtaagatcatcgaac

SEQ ID NO: 49141 - protein, 473 aa, Mycobacterium intracellulare
MSTNTQVRAGCYCRISSDPKDKREGVDRQREDTAALCEVKGWTPVDYYIDNDRSASSGKQRPEWDRLLADVKAGRIDAIAAWDQDRGWRMMHELEQLRRFFTGLGRQIPLATTGQGDIDLYSPTGVLAAQIKTAVSEHEIAMMKVRQRRAARDRAKKGIPKWRRAFGYLPETRKKEDDDGTREIDETTAPLVVQAYRDLLRGVSISEIARQFNSIGAYGLTGRPWTASTMSMFLRAPRNAGLRAHNGEIVGEGTWPPLVDRKTWDRAQAKLTAPGRSRPKTVRKHLLTGVMACGKPGCGGRLAGFQTSHGAGAYRCTTCLGVAIRTKDVEPLMYELVGGRLARDDAADLLKAKGVDDAEDSAIRAELSLLYAEIEQIGIERGKRLLTGEQAKTATEIITAEIATLERRQQDSELAELFADIPLGRPEAVEAVRALEPGRFRRVVGVLMDPVVMPVGKGNHVFRPERLHPNWRT

SEQ ID NO: 49142 - DNA, 50 bp, Mycobacterium intracellulare
  source 1..50: mol_type = genomic DNA
agtgttggtttctcagacggagacattaccacatcgccggagtacacttt

SEQ ID NO: 49143 - DNA, 40 bp, Mycobacterium intracellulare
  source 1..40: mol_type = genomic DNA
aaggcgctgtgccgtacgcatcatttggtgaaaacgtttt

SEQ ID NO: 49144 - DNA, 50 bp, Mycobacterium intracellulare
  source 1..50: mol_type = genomic DNA
agtgttggtttctcagacggagacgataccacatcgccggagtacacttt

SEQ ID NO: 49145 - DNA, 40 bp, Mycobacterium intracellulare
  source 1..40: mol_type = genomic DNA
aaggctttgtggcataggagacatttggtggaaatctttc

SEQ ID NO: 49146 - protein, 473 aa, Mycobacterium intracellulare; identical to SEQ ID NO: 49141

SEQ ID NO: 49147 - DNA, 50 bp, Mycobacterium intracellulare
  source 1..50: mol_type = genomic DNA
gagtgttggtttctcagacggagacattaccacatcgccggagtacactt

SEQ ID NO: 49148 - DNA, 40 bp, Mycobacterium intracellulare
  source 1..40: mol_type = genomic DNA
caaggcgctgtgccgtacgcatcatttggtgaaaacgttt

SEQ ID NO: 49149 - DNA, 50 bp, Mycobacterium intracellulare
  source 1..50: mol_type = genomic DNA
gagtgttggtttctcagacggagaagttaccacatcgccggagtacactt

SEQ ID NO: 49150 - DNA, 40 bp, Mycobacterium intracellulare
  source 1..40: mol_type = genomic DNA
taaggctttgtggcataggagacatttggtggaaatcttt

SEQ ID NO: 49151 - protein, 479 aa, Streptococcus agalactiae
MTKVAIYVRVSTKGQVEEGYSIEEQISMLTSYCSIHKWTVFDTYVDAGISGATIERPELSRLSRDAQKKKFNTMIVYDLKRLGRSQRNNIAFIEDILEKNGIGFISLTENFDTSTPLGKAMVGILSAFGQLDRDTIRERMMMGKIGRAKSGKPMMTSTIAFGYTYDKLTSSLNINQAEAIIVKIIYDEYLAGKSLTKLRDYLNENNLLRKGKPWNYQGVSRVLRNPVYIGMVRFRGEVYQGNHEAIIDAEIFEAAQKELKRRQLETYEFNKNPRPFRAKYMLSGIIKCGLCGCPMEITLGTKRKDGTRNIRYQCVNRFPRTTKGITVYNNGQKCNSGFYEKSDIEIYVLGQVRLLQLNEAKLDKMFESPEIINVEEIENQINSLNNKMKRLNDLYLNDMISLDDLKTKTYTFLKQKELLENELDNNPAIQQEENRKQFQKLLGTNDITQLSYEEQAFAVKNLIDKVFVKPGIIDINWKI

SEQ ID NO: 49152 - DNA, 50 bp, Streptococcus agalactiae
  source 1..50: mol_type = genomic DNA
acaacatatttagatactctaatctcaaatagcgtatctaaaactcttgt

SEQ ID NO: 49153 - DNA, 40 bp, Streptococcus agalactiae
  source 1..40: mol_type = genomic DNA
caccggaacgctcttaacttcagtcgcttgtaacttactg

SEQ ID NO: 49154 - DNA, 50 bp, Streptococcus agalactiae; identical to SEQ ID NO: 49152
  source 1..50: mol_type = genomic DNA

SEQ ID NO: 49155 - DNA, 40 bp, Streptococcus agalactiae
  source 1..40: mol_type = genomic DNA
aaccagaaccatcttaacttcagtcccatgtttctgtctg

SEQ ID NO: 49156 - protein, 563 aa, Ruminococcus gnavus
MKTQINGKIAIYSRKSKFTGKGESIGNQIEECKKHIAYKYQITDMNQIVVYEDEGFSGKNTKRPQFQQMLKACRNHEISMIVCYRLDRISRNTIDFALLYQELERLDINFISVTENFDTTTPLGRAMLSISSAFAQLERDTIAERIRDNMLALAKTGRWLGGTTPLGYISTAKTSVDIEGKIRTAYRLKTDSDNFSLARLIFDKFLEFRSLTKVETYLLNYHYKTRNGKNFSRTGIRDILKNPAYAAADEDTLCYFNEIGTLIFNESSEFNGTHGLMVYNKSNQASEIPHKQHNYSEWIVAIGKHKPLLTGKEWLQVQELLEQNKSKSYRKPKDNTALLSGILICADCGSYMRPKANRSLDENGNKRFSYLCETKEKSHGQLCSMNRPDGNLLDKTVCDKIKEIAQGEDVDKFHEQLKYAKKQLLSKEVSNTTKIDHLQKVLHDTDRKIENLVIALSEADNTPAFSHINKQINNFHEEKLKIEKQIHTLNELLQNQNILLANFDVLIEKLSSFSDSFDMMSIEEKRTTLRILVDKVVWDGTHVHLYLVGQNNQKTKPQQAGCK

SEQ ID NO: 49157 - DNA, 50 bp, Ruminococcus gnavus
  source 1..50: mol_type = genomic DNA
cgaagccacaacaagcgggttgcaaaagcgaccccaccgctttggcttca

SEQ ID NO: 49158 - DNA, 40 bp, Ruminococcus gnavus; identical to SEQ ID NO: 34258
  source 1..40: mol_type = genomic DNA

SEQ ID NO: 49159 - DNA, 50 bp, Ruminococcus gnavus
  source 1..50: mol_type = genomic DNA
cgaagccacaacaagcgggttgcattagcgaccccaccgctttggcttca

SEQ ID NO: 49160 - DNA, 40 bp, Ruminococcus gnavus
  source 1..40: mol_type = genomic DNA
tgccccccagtgtgaggaattctaatacctgttgcttcat

SEQ ID NO: 49161 - protein, 597 aa, Enterobacter cloacae
MKRKLYSYQRWSSAVQSDGTTKARQTFAAEEYAKRNDLEVVEIVDAGISGFKSDNSKSGALSKFLAAVDEGLIPNNAYLFVESLDRITRDEIDVALELFMGILRRGITIVTGMDNKVYTRAGIKGNPIDLLTSILLFTRAHEESKTKQNRTNGNALAMIRRFQSGLPTTIKAVGSHPWWIDCSTDKFEAVRRHPTLWQPAQDAINMFMEGVSVFKVVQYLNEKYPHAYKSKAWKTANIRKLRFNKAVYGVREITVDGTDYALPNYFPSLITEGQFLRLEKIRETTKYIGKVGEGKTITDEEGNSKVIAERNNINLLAGMKLFRCGHCGGTMMAMRHGDTIRYLCEKGRGHQNDCKTWSLPGILVEHTLMLVTTIAYINMQRKGGVDKEDYTAQISSTEKLIEDISKKISNGTSLVLGGLGDVEEVIAQLQELKDSRSNLVLELEVLQRKQLLAEDHTFEGLMMDFFTYAQYGVLQDPIHEYRSKLRDIVYSSIGDVRAWKVDRRLMISFQIKGDDEYYTFSAGDEQYNYIFYYGSPVQLNEGLSPQGNYELPEEIKQRIREHRGVYEATMALMNTAHELLATVNYPQLDGRLFWPRK

SEQ ID NO: 49162 - DNA, 50 bp, Enterobacter cloacae
  source 1..50: mol_type = genomic DNA
agatgtgcagaaattcatgcagggaatcctaaacgaatttctacacatta

SEQ ID NO: 49163 - DNA, 40 bp, Enterobacter cloacae
  source 1..40: mol_type = genomic DNA
tattattagccaccccggcaacccgaagtacccgattgat

SEQ ID NO: 49164 - DNA, 50 bp, Enterobacter cloacae
  source 1..50: mol_type = genomic DNA
agatgtgcagaaattcatgcagggcttcctaaacgaatttctacacatta

SEQ ID NO: 49165 - DNA, 40 bp, Enterobacter cloacae; identical to SEQ ID NO: 18150
  source 1..40: mol_type = genomic DNA

SEQ ID NO: 49166 - protein, 597 aa, Enterobacter cloacae
MKRKLYSYQRWSSAVQSDGTTKARQTFAAEEYAKRNDLEVVEIVDAGISGFKSDNSKSGALSKFLAAVDEGLIPNNAYLFVESLDRITRDEIDVALELFMGILRRGITIVTGMDNKVYTRAGIKGNPIDLLTSILLFTRAHEESKTKQNRTNGNALAMIRRFQSGLPTTIKAVGSHPWWIDCSTDKFEAVRRHPTLWQPAQDAINMFMEGVSVFKVVQYLNEKYPHAYKSKAWKTANIRKLRFNKAVYGVREITVDGTDYALPNYFPSLITEGQFLRLEKIRETTKYIGKVGEGKTITDEEGNSKVIAERNNINLLAGMKLFRCGHCGGTMMAMRHGDTIRYLCEKGRGHQNDCKTWSLPGILVEHTLMLVTTIAYINMQRKGGVDKEDYTAQISSTEKLIEDISKKISNGTSLVLGGLGDVEEVIAQLQELKDSRSNLVLELEVLQRKQLLAEDHTFEGLMMDFFTYAQYGVLQDPIHEYRSKLRDIVYSSIGDVRAWKVDRRLMISFQIKGDDEYYTFSAGDEQYNYIFYYGSPVQLKEGLSPQGNYELPEEIKQRIREHRGVYEATMALMNTAHELLATVNYPQLDGRLFWPRK

SEQ ID NO: 49167 - DNA, 50 bp, Enterobacter cloacae; identical to SEQ ID NO: 49162
  source 1..50: mol_type = genomic DNA

SEQ ID NO: 49168 - DNA, 40 bp, Enterobacter cloacae
  source 1..40: mol_type = genomic DNA
tattattagccaccccggcaacccgaagtacccaatcgat

SEQ ID NO: 49169 - DNA, 50 bp, Enterobacter cloacae; identical to SEQ ID NO: 49164
  source 1..50: mol_type = genomic DNA

SEQ ID NO: 49170 - DNA, 40 bp, Enterobacter cloacae; identical to SEQ ID NO: 18150
  source 1..40: mol_type = genomic DNA

SEQ ID NO: 49171 - protein, 466 aa, Dermabacter jinjuensis
MTLDQLSGLDISGLRRLARTTPRPDTTASGSEGKVAAISYLRVSTKDQATRNGLEEGLSIPAQREAAQRKAEQLGAVIVKEFIEPGESAKTAQRRALQEMLDYATTHPVRYCIINKVDRLARNRLDDAKIHAALRDANISLVSVTENIDETPSGMLMHGILASMAEFYSLNLAQEVLKGMTQKAAIGGTPTKAPLGYLNVRTTDAQGRESREIEIDPERADLIRFAFTAYATGDWSLSRLAKELTARGLTTRPTPSQPAKPVTTTGLHKILTNPYYQGTVTFRGVTYDGTHQPLVDAETWLRVQTNLDANNARGERPQKYDHYLKGTLYCACGAKLMIERPRDKAGDRYEYFTCSGRRRKTTQCTRSAILAERAEAEIERTYQRNSLTQTQAEHVRKVLNDVFDQLEGSSEDERKLLTAQRNKLEAERLKLVQAHYADAIPLDLLKSEQDRIRASLDQITTRLDNL

SEQ ID NO: 49172 - DNA, 50 bp, Dermabacter jinjuensis
  source 1..50: mol_type = genomic DNA
agatcaccacccggctcgacaacctcgggcaaggatgctcgggcggcgcg

SEQ ID NO: 49173 - DNA, 40 bp, Dermabacter jinjuensis
  source 1..40: mol_type = genomic DNA
ggagaccggcatggcaacgtcaccgacacctacgccgacg

SEQ ID NO: 49174 - DNA, 50 bp, Dermabacter jinjuensis
  source 1..50: mol_type = genomic DNA
agatcaccacccggctcgacaaccgcgggcaaggatgctcgggcggcgcg

SEQ ID NO: 49175 - DNA, 40 bp, Dermabacter jinjuensis
  source 1..40: mol_type = genomic DNA
ggtttccaggacggctacggcactgagacctactccgacg

SEQ ID NO: 49176 - protein, 611 aa, Streptococcus sp group B
MSWKCGIIKLHRKIQKKEAGAVKRDVKVIKGDTTLKRTASGCVERSIKRVAAYCRVSTDTEDQINSYNSQVEHYTDFIKQNNEWTLAGIYADEAITGTQVDRRIDFQRLINDCMNGDIDMVITKSISRFARNTLDTLKYVRKLKEYNVAVFFEEENINTLTMDGELLLTILSSVAQQEVENISANVKKGLRMKMERGEMVGFQGCLGYDYDPETKSISVNEKEAEIVRYIFRRYLEGVGGMVISRELEEQGYLSPRGHKRWTETTVLGIIKNEKYKGDLLMGKTFTVDPISKRRLDNFGEQDKFYIENHHEPIISEEDFEKAQGIRLRRAKNRNTVANNGGKREKYSRKYAFSSMLECGFCGHMLSRRNWHSSSEYTKVIWQCVNATKNGKKYCPHSKGIEEEAIEKAFMESYRQVCHNNVEITNEFLKTVEEELKDNSLAKDLKKISNQLDKILKKEKDLVELRLNEAISMEIYQEKYNEIAISKEKLLEEKRTLEVTLTDEKALKKRLEGFKKLLESNKYLEEFDRTVFESIVDKIVIGGTNDDGDIDPAMITIIYKTGKKDSQNGRLFKSRRKNAKVVEENDGDKLYSQSSNEVNKLCSYSTNNTCGV

SEQ ID NO: 49177 - DNA, 50 bp, Streptococcus sp group B
  source 1..50: mol_type = genomic DNA
gtgttcctattcaacaaacaacacatgtggagtgcatagcgttgatacaa

SEQ ID NO: 49178 - DNA, 40 bp, Streptococcus sp group B; identical to SEQ ID NO: 23678
  source 1..40: mol_type = genomic DNA

SEQ ID NO: 49179 - DNA, 50 bp, Streptococcus sp group B
  source 1..50: mol_type = genomic DNA
gtgttcctattcaacaaacaacactggtggagtgcatagcgttgatacaa

SEQ ID NO: 49180 - DNA, 40 bp, Streptococcus sp group B
  source 1..40: mol_type = genomic DNA
tcataccagaagacacatctgtgggactgtatgtctctgc

SEQ ID NO: 49181 - protein, 611 aa, Streptococcus sp group B
MSWKCGIIKLHRKIQKKEAGAVKRDVKVIKGDTTLKRTASGCVERSIKRVAAYCRVSTDTEDQINSYNSQVEHYTDFIKQNNEWTLAGIYADEAITGTQVDRRIDFQRLINDCMNGDIDMVITKSISRFARNTLDTLKYVRKLKEYNVAVFFEEENINTLTMDGELLLTILSSVAQQEVENISANVKKGLRMKMERGEMVGFQGCLGYDYDPETKSISVNEKEAEIVRYIFRRYLEGVGGMVISRELEEQGYLSPRGHKRWTETTVLGIIKNEKYKGDLLMGKTFTVDPISKRRLDNFGEQDKFYIENHHEPIISEEDFEKAQGIRLRRAKNRNTVANNGGKREKYSRKYAFSSMLECGFCGHMLSRRNWHSSSEYTKVIWQCVNATKNGKKYCPHSKGIEEEAIEKAFMESYRQVCHNNVEITNEFLKTVEEELKDNSLAKDLKKISNQLDKILKKEKDLVELRLNEAISMEIYQEKYNEIAISKEKLLEEKRTLEVTLTDEKALKKRLEGFKKLLESNKYLEEFDRTVFESIVDKIVIGGTNDDGDIDPAMITIIYKTGKKDSQNGRLFKSRRKNAKVVEENDGDKLYSQSSNEVNKLCSYSTDNTCGV

SEQ ID NO: 49182 - DNA, 50 bp, Streptococcus sp group B; identical to SEQ ID NO: 19727
  source 1..50: mol_type = genomic DNA

SEQ ID NO: 49183 - DNA, 40 bp, Streptococcus sp group B; identical to SEQ ID NO: 23678
  source 1..40: mol_type = genomic DNA

SEQ ID NO: 49184 - DNA, 50 bp, Streptococcus sp group B
  source 1..50: mol_type = genomic DNA
gtgttcctattcaacagacaacactggtggagtgcatagcgttgatacaa

SEQ ID NO: 49185 - DNA, 40 bp, Streptococcus sp group B; identical to SEQ ID NO: 49180
  source 1..40: mol_type = genomic DNA

SEQ ID NO: 49186 - protein, 590 aa, Streptococcus sp group B
MKKDVKVIKGDTTLKRTASGCVERSIKRVAAYCRVSTDSEDQINSYNSQVEHYTEFIQKNKEWTLAGIYADEAITGTQVDRRIDFQRLINDCMNGDIDMIITKSISRFARNTLDTLKYVRKLKEFNVAVFFEEENINTLTMDGELLLTILSSVAQQEVENISANVKKGLRMKMERGEMVGFQGCLGYDYDPETKSISINEKEAEIVRYIFRRYIEGVGGMVISRELEEQGYLSPRGNKRWTETTVLGIIKNEKYKGDLMMGKTYTVDPISKRRLDNFGEQDKFYIENHHEPIISEEDFEKAQGIRLRRSKNRNTVANNGGKREKYSRKYAFSSMLECGFCGHNLSRRNWHSSSEYTKVIWQCVNATKNGKKYCPHSKGIEEEAIEKAFMESYRQVCHNNVEITNEFLKTVEEELKDNNLAKDLKKITNQLDKILKKEKDLVELRLNESISMDIYQDKYNEIAISKEKLLAEKRTLEVTLTDEKALKKRLEGFKKLLESNKYLEEFDRAVFESIVDKIIIGGTNDEGEIDPAMITIIYKTGKKDSQDGRLFKSRRKNAKEVNEETDNKLYPHSSDEVNNLYSYPIDNTCGV

SEQ ID NO: 49187 - DNA, 50 bp, Streptococcus sp group B; identical to SEQ ID NO: 19692
  source 1..50: mol_type = genomic DNA

SEQ ID NO: 49188 - DNA, 40 bp, Streptococcus sp group B; identical to SEQ ID NO: 23678
  source 1..40: mol_type = genomic DNA

SEQ ID NO: 49189 - DNA, 50 bp, Streptococcus sp group B
  source 1..50: mol_type = genomic DNA
gtattcctatcctattgacaacactggtagagtgcatagcgttgatacaa

SEQ ID NO: 49190 - DNA, 40 bp, Streptococcus sp group B; identical to SEQ ID NO: 49180
  source 1..40: mol_type = genomic DNA

SEQ ID NO: 49191 - protein, 610 aa, Streptococcus sp group B
MFCKCGIIELHRKIQKGGSAVKKDVKVIKGDTTLKRTASGCVQRSIKRVAAYCRVSTDTEDQINSYNSQVEHYTEFIQKNKEWTLAGIYADEAITGTQVDRRIDFQRLINDCMNGDIDMIITKSISRFARNTLDTLKYVRKLKEFNVAVFFEEENINTLTMDGELLLTILSSVAQQEVENISANVKKGLRMKMERGEMVGFQGCLGYDYDPETKSISINEKEAEIVRYIFRRYIEGVGGMVISRELEEQGYLSPRGNKRWTETTVLGIIKNEKYKGDLMMGKTYTVDPISKRRLDNFGEQDKFYIENHHEPIISEEDFEKAQGIRLRRSKNRNTVANNGGKREKYSRKYAFSSMLECGFCGHNLSRRNWHSSSEYTKVIWQCVNATKNGKKYCPHSKGIEEEAIEKAFMESYRQVCHNNVEITNEFLKTVEEELKDNSLAKDLKKITNQLDKILKKEKDLVELRLNESISMDIYQDKYNEIAISKEKLLAEKRTLEVTLTDEKALKKRLEGFKKLLESNKYLEEFDRAVFESIVDKIIIGGTNDEGEIDPAMITIIYKTGKKDSQDGRLFKSRRKNAKEVNEETDNKLYPHSSDEVNNLYSYPIDNTCGV

SEQ ID NO: 49192 - DNA, 50 bp, Streptococcus sp group B; identical to SEQ ID NO: 1792
  source 1..50: mol_type = genomic DNA

SEQ ID NO: 49193 - DNA, 40 bp, Streptococcus sp group B; identical to SEQ ID NO: 23678
  source 1..40: mol_type = genomic DNA

SEQ ID NO: 49194 - DNA, 50 bp, Streptococcus sp group B
  source 1..50: mol_type = genomic DNA
gtattcctatcctattgacaacactggtggagtgcatagcgttgatacaa

SEQ ID NO: 49195 - DNA, 40 bp, Streptococcus sp group B; identical to SEQ ID NO: 49180
  source 1..40: mol_type = genomic DNA

SEQ ID NO: 49196 - protein, 590 aa, Streptococcus agalactiae
MKKDVKVIKGDTTLKRTASGCVERSIKRVAAYCRVSTDTEDQINSYNSQVEHYTEFIQKNNEWTLAGIYADEAITGTQVDRRIDFQRLINDCMNGDIDMIITKSISRFARNTLDTLKYVRKLKEFNVAVFFEEENINTLTMDGELLLTILSSVAQQEVENISANVKKGLRMKMERGEMVGFQGCLGYDYDPETKSISINEKEAEIVRYIFRRYIEGVGGMVISRELEEQGYLSPRGNKRWTETTVLGIIKNEKYKGDLMMGKTYTVDPISKRRLDNYGEQDKFYIENHHEPIISEEDFEKAQGIRLRRSKNRNTVANNGGKREKYSRKYAFSSMLECGFCGYNLSRRNWHSSSEYTKVIWQCVNATKNGKKYCPHSKGIEEEAIEKAFMESYRQVCHNNVEITNEFLKTVEEELKDNSLSKDLKKISNQLDKILKKEKDLVELRLNESISMDIYQDKYNEIAISKEKLLAEKRTLEVTLTDEKALKKRLEGFKKLLESNKYLEEFDRAVFESIVDKIIIGGTNDEGEIDPAMITIIYKTGKKDSQDGRLFKSRRKNAKEVNEKADSKLYPQSSDEVNNLYSYPIDNTCGV

SEQ ID NO: 49197 - DNA, 50 bp, Streptococcus agalactiae; identical to SEQ ID NO: 19692
  source 1..50: mol_type = genomic DNA

SEQ ID NO: 49198 - DNA, 40 bp, Streptococcus agalactiae; identical to SEQ ID NO: 23678
  source 1..40: mol_type = genomic DNA

SEQ ID NO: 49199 - DNA, 50 bp, Streptococcus agalactiae; identical to SEQ ID NO: 49189
  source 1..50: mol_type = genomic DNA

SEQ ID NO: 49200 - DNA, 40 bp, Streptococcus agalactiae; identical to SEQ ID NO: 49180
  source 1..40: mol_type = genomic DNA

SEQ ID NO: 49201 - protein, 590 aa, Streptococcus agalactiae
MKKDVKVIKGDTTLKRTASGCVERSIKRVAAYCRVSTDTEDQINSYNSQVEHYTEFIQKNKEWTLAGIYADEAITGTQVDRRIDFQRLINDCMNGDIDMVITKSISRFARNTLDTLKYVRKLKEFNVAVFFEEENINTLTMDGELLLTILSSVAQQEVENISANVKKGLRMKMERGEMVGFQGCLGYDYDPETKSISINEKEAEIVRYIFRRYIEGVGGMVISRELEEQGYLSPRGNKRWTETTVLGIIKNEKYKGDLMMGKTYTVDPISKRRLDNFGEQDKFYIENHHEPIISEEDFEKAQGIRLRRSKNRNTVANNGGKREKYSRKYAFSSMLECGFCGHNLSRRNWHSSSEYTKVIWQCVNATKNGKKYCPHSKGIEEEAIEKAFMESYRQVCHNNVEITNEFLKTVEEELKDNSLAKDLKKITNQLDKILKKEKDLVELRLNESISMDIYQDKYNEIAISKEKLLAEKRTLEVTLTDEKALKKRLEGFKKLLESNKYLEEFDRAVFESIVDKIIIGGTNDEGEIDPAMITIIYKTGKKDSQDGRLFKSRRKNAKEVNEETDNKLYPHSSDEVNNLCSYPMDNTCGV

SEQ ID NO: 49202 - DNA, 50 bp, Streptococcus agalactiae; identical to SEQ ID NO: 1787
  source 1..50: mol_type = genomic DNA

SEQ ID NO: 49203 - DNA, 40 bp, Streptococcus agalactiae; identical to SEQ ID NO: 23678
  source 1..40: mol_type = genomic DNA

SEQ ID NO: 49204 - DNA, 50 bp, Streptococcus agalactiae
  source 1..50: mol_type = genomic DNA
gtgttcctatcctatggacaacactggtggagtgcatagcgttgatacaa

SEQ ID NO: 49205 - DNA, 40 bp, Streptococcus agalactiae; identical to SEQ ID NO: 49180
  source 1..40: mol_type = genomic DNA

SEQ ID NO: 49206 - protein, 590 aa, Streptococcus agalactiae
MKKEVKVIKGDTTLKRTASGCVERSIKRVAAYCRVSTDTEDQINSYNSQVEHYTEFIQKNNEWTLAGIYADEAITGTQVDRRIDFQRLINDCMNGDIDMIITKSISRFARNTLDTLKYVRKLKEFNVAVFFEEENINTLTMDGELLLTILSSVAQQEVENISANVKKGLRMKMERGEMVGFQGCLGYDYDPETKSISINEKEAEIVRYIFRRYIEGVGGMVISRELEEQGYLSPRGNKKWTETTVLGIIKNEKYKGDLMMGKTYTVDPISKRRLDNYGEQDKFYIENHHEPIISEEDFEKAQGIRLRRSKNRNTVANNGGKREKYSRKYAFSSMLECGFCGHNLSRRNWHSSSEYTKVIWQCVNATKNGKKYCPHSKGIEEEAIEKAFMESYRQVCHNNVEITNEFLKTVEEELKDNSLAKDLKKITNQLDKVLKKEKDLVELRLNESISMDIYQDKYNEIAISKEKLLAEKRTLEVTLTDEKALKKRLEGFKKLLESNKYLEEFDRAVFESIVDKIIIGGTNDEGEIDPAMITIIYKTGKKDSQDGRLFKSRRKNAKEVDEGTDNKLYPQSSDEVNNLCSYPMDNTCGV

SEQ ID NO: 49207 - DNA, 50 bp, Streptococcus agalactiae; identical to SEQ ID NO: 37077
  source 1..50: mol_type = genomic DNA

SEQ ID NO: 49208 - DNA, 40 bp, Streptococcus agalactiae; identical to SEQ ID NO: 23678
  source 1..40: mol_type = genomic DNA

SEQ ID NO: 49209 - DNA, 50 bp, Streptococcus agalactiae
  source 1..50: mol_type = genomic DNA
gtgttcctatcctatggacaacactggtagagtgcatagcgttgatacaa

SEQ ID NO: 49210 - DNA, 40 bp, Streptococcus agalactiae; identical to SEQ ID NO: 49180
  source 1..40: mol_type = genomic DNA

SEQ ID NO: 49211 - protein, 590 aa, Streptococcus agalactiae
MKRDVKVIKGDTTLKRTASGCVERSIKRVAAYCRVSTDTEDQINSYNSQVEHYTDFIKQNNEWTLAGIYADEAITGTQVDRRIDFQRLINDCMNGDIDMVITKSISRFARNTLDTLKYVRKLKEYNVAVFFEEENINTLTMDGELLLTILSSVAQQEVENISANVKKGLRMKMERGEMVGFQGCLGYDYDPETKSISVNEKEAEIVRYIFRRYLEGVGGMVISRELEEQGYLSPRGHKRWTETTVLGIIKNEKYKGDLLMGKTFTVDPISKRRLDNFGEQDKFYIENHHEPIISEEDFEKAQGIRLRRAKNRNTVANNGGKREKYSRKYAFSSMLECGFCGHMLSRRNWHSSSEYTKVIWQCVNATKNGKKYCPHSKGIEEEAIEKAFMESYRQVCHNNVEITNEFLKTVEEELKDNSLAKDLKKISNQLDKILKKEKDLVELRLNEAISMEIYQEEYNEIAISKEKLLEEKRTLEVTLTDEKALKKRLEGFKKLLESNKYLEEFDRTVFESIVDKIVIGGTNDDGDIEPAMITIIYKTGKKDSQNGRLFKSRRKNAKVVEENDGDKLYSQSSNEVNKLCSYSTDNTCGV

SEQ ID NO: 49212 - DNA, 50 bp, Streptococcus agalactiae; identical to SEQ ID NO: 19727
  source 1..50: mol_type = genomic DNA

SEQ ID NO: 49213 - DNA, 40 bp, Streptococcus agalactiae; identical to SEQ ID NO: 23678
  source 1..40: mol_type = genomic DNA

SEQ ID NO: 49214 - DNA, 50 bp, Streptococcus agalactiae; identical to SEQ ID NO: 49184
  source 1..50: mol_type = genomic DNA

SEQ ID NO: 49215 - DNA, 40 bp, Streptococcus agalactiae; identical to SEQ ID NO: 49180
  source 1..40: mol_type = genomic DNA

SEQ ID NO: 49216 - protein, 611 aa, Streptococcus agalactiae
MFCECGIIKLHRKIQKKEADAVKKDVKVIKGDTTLKRTASGCVERSIKRVAAYCRVSTDSEDQINSYNSQVEHYTEFIQKNNEWTLAGIYADEAITGTQVDRRIDFQRLINDCMNGDIDMIITKSISRFARNTLDTLKYVRKLKEFNVAVFFEEENINTLTMDGELLLTILSSVAQQEVENISANVKKGLRMKMERGEMVGFQGCLGYDYDPETKSISINEKEAEIVRYIFRRYIEGVGGMVISRELEEQGYLSPRGNKRWTETTVLGIIKNEKYKGDLMMGKTYTVDPISKRRLDNYGEQDKFYIENHHEPIISEEDFEKAQGIRLRRSKNRNTVANNGGKREKYSRKYAFSSMLECGFCGHNLSRRNWHSSSEYTKVIWQCVNATKNGKKYCPHSKGIEEEAIEKAFMESYRQVCHNNVEITNEFLKTVEEELKDNSLAKDLKKITNQLDKILKKEKDLVELRLNESISMDIYQDKYNEIAISKEKLLAEKRTLEVTLTDEKALKKRLEGFKKLLESNKYLEDFDRAVFESIVDKIIIGGTNDEGEIDPAMITIIYKTGKKDSQDGRLFKSRRKNAKEVNEETDNKLYPQSSDEVNNLCSYPMDNTCGV

SEQ ID NO: 49217 - DNA, 50 bp, Streptococcus agalactiae; identical to SEQ ID NO: 1787
  source 1..50: mol_type = genomic DNA

SEQ ID NO: 49218 - DNA, 40 bp, Streptococcus agalactiae; identical to SEQ ID NO: 23678
  source 1..40: mol_type = genomic DNA

SEQ ID NO: 49219 - DNA, 50 bp, Streptococcus agalactiae; identical to SEQ ID NO: 49204
  source 1..50: mol_type = genomic DNA

SEQ ID NO: 49220 - DNA, 40 bp, Streptococcus agalactiae; identical to SEQ ID NO: 49180
  source 1..40: mol_type = genomic DNA

SEQ ID NO: 49221 - protein, 610 aa, Streptococcus agalactiae; identical to SEQ ID NO: 43311

SEQ ID NO: 49222 - DNA, 50 bp, Streptococcus agalactiae; identical to SEQ ID NO: 1792
  source 1..50: mol_type = genomic DNA

SEQ ID NO: 49223 - DNA, 40 bp, Streptococcus agalactiae; identical to SEQ ID NO: 23678
  source 1..40: mol_type = genomic DNA

SEQ ID NO: 49224 - DNA, 50 bp, Streptococcus agalactiae; identical to SEQ ID NO: 49194
  source 1..50: mol_type = genomic DNA

SEQ ID NO: 49225 - DNA, 40 bp, Streptococcus agalactiae; identical to SEQ ID NO: 49180
  source 1..40: mol_type = genomic DNA

SEQ ID NO: 49226 - protein, 611 aa, Streptococcus agalactiae
MFCKCGIIRLHRKIQKKEADAVKKEVKVIKGDTTLKRTASGCVERSIKRVAAYCRVSTDTEDQINSYNSQVEHYTEFIQKNNEWTLAGIYADEAITGTQVDRRIDFQRLINDCMNGDIDMIITKSISRFARNTLDTLKYVRKLKEFNVAVFFEEENINTLTMDGELLLTILSSVAQQEVENISANVKKGLRMKMERGEMVGFQGCLGYDYDPETKSISINEKEAEIVRYIFRRYIEGVGGMVISRELEEQGYLSPRGNKRWTETTVLGIIKNEKYKGDLMMGKTYTVDPISKRRLDNFGEQDKFYIENHHEPIISEEDFEKAQGIRLRRSKNRNTVANNGGKREKYSRKYAFSSMLECGFCGYNLSRRNWHSSSEYTKVIWQCVNATKNGKKYCPHSKGIEEEAIEKAFMESYRQVCHNNVEITNEFLKTVEEELKDNSLSKDLKKISNQLDKILKKEKDLVELRLNESISMDIYQDKYNEIAISKEKLLAEKRTLEVTLTDEKALKKRLEGFKKLLESNKYLEEFDRAVFESIVDKIIIGGTNDEGEIDPAMITIIYKTGKKDSQDGRLFKSRRKNAKEVNEKADSKLYPQSSDEVNNLYSYPIDNTCGV

SEQ ID NO: 49227 - DNA, 50 bp, Streptococcus agalactiae; identical to SEQ ID NO: 1792
  source 1..50: mol_type = genomic DNA

SEQ ID NO: 49228 - DNA, 40 bp, Streptococcus agalactiae; identical to SEQ ID NO: 23678
  source 1..40: mol_type = genomic DNA

SEQ ID NO: 49229 - DNA, 50 bp, Streptococcus agalactiae; identical to SEQ ID NO: 49194
  source 1..50: mol_type = genomic DNA

SEQ ID NO: 49230 - DNA, 40 bp, Streptococcus agalactiae; identical to SEQ ID NO: 49180
  source 1..40: mol_type = genomic DNA

SEQ ID NO: 49231 - protein, 590 aa, Streptococcus agalactiae
MKKAVKVIKGDTTLKRTASGCVERSIKRVAAYCRVSTDTEDQINSYNSQVEHYTEFIQKNNEWTLAGIYADEAITGTQVDRRIDFQRLINDCMNGDIDMIITKSISRFARNTLDTLKYVRKLKEFNVAVFFEEENINTLTMDGELLLTILSSVAQQEVENISANVKKGLRMKMERGEMVGFQGCLGYDYDPETKSISINEKEAEIVRYIFRRYIEGVGGMVISRELEEQGYLSPRGNKRWTETTVLGIIKNEKYKGDLMMGKTYTVDPISKRRLDNYGEQDKFYIENHHEPIISEEDFEKAQGIRLRRSKNRNTVANNGGKREKYSRKYAFSSMLECGFCGHNLSRRNWHSSSEYTKVIWQCVNATKNGKKYCPHSKGIEEEAIEKAFMESYRQVCHNNVEITNEFLKTVEEELKDNSLAKDLKKITNQLDKILKKEKDLVELRLNDSISMDIYQDKYNEIAISKEKLLAEKRTLEVTLTDEKALKKRLEGFKKLLESNKYLEEFDRAVFESIVDKIIIGGTNDEGEIDPAMITIIYKTGKKDSQDGRLFKSRRKNAKEVDEGTDNKLYPQSSDEVNNLCSYPIDNTCGV

SEQ ID NO: 49232 - DNA, 50 bp, Streptococcus agalactiae
  source 1..50: mol_type = genomic DNA
gtgttcctatcctattgacaacacatgtggagtgcatagcgttgatacaa

SEQ ID NO: 49233 - DNA, 40 bp, Streptococcus agalactiae; identical to SEQ ID NO: 23678
  source 1..40: mol_type = genomic DNA

SEQ ID NO: 49234 - DNA, 50 bp, Streptococcus agalactiae
  source 1..50: mol_type = genomic DNA
gtgttcctatcctattgacaacactggtggagtgcatagcgttgatacaa

SEQ ID NO: 49235 - DNA, 40 bp, Streptococcus agalactiae; identical to SEQ ID NO: 49180
  source 1..40: mol_type = genomic DNA

SEQ ID NO: 49236 - protein, 586 aa, Streptococcus agalactiae
MNTKVKVIKASNTGARNRNALHLDLKRVAAYCRVSTDSKDQLESYKSQVDYYTNLIKNNKNWTLAGIYADEATTGTTATKRADFMRLISDCQNGDIDMIITKSISRFARNTLDTLKYVRLLKENNVGVVFEEENIDTLTMDGELLLTILSSVAQQEVENTSAHVKKGLKMKMEKGELIGFQGCLGYDYDPTTKSISINEEEAKIVRYIFKRYLEGNGGSVIGRELEEQGYLTPRGKTKWSDTTVLGIIKNEKYIGDILMGKTFTVDPITKRRLANFGESDKYHIENHHEPIISKEDFEKAQEIRLRRAQNRNTIANKDRKREKLSRQYAFSSMLECGFCGEILSRRTWHTSSIYKKINWQCVRSTKKGKKYCPHSKGIQEAAIEKAFVESYRQLCHADSTVIDDFLKIVEEEINDNTLVKDLKKIENQLNRIISQEKKLVDLHLEDSIDEEVYAKKYKKLTKQKEELLDEKKTLELTIKDENSIKERLKQFKKVLENKEIIEEFNRTVFESIVDKVVVGRIDKDGTVHPYDLTFYFKTGVKDSQDSNNFKDKRKNAKDNDINKLCSYKNDEDKKLCSQAKDNACGV

SEQ ID NO: 49237 - DNA, 50 bp, Streptococcus agalactiae
  source 1..50: mol_type = genomic DNA
atgttcccaagcaaaagacaacgcatgtggagtgcatagcgttgatacaa

SEQ ID NO: 49238 - DNA, 40 bp, Streptococcus agalactiae; identical to SEQ ID NO: 23678
  source 1..40: mol_type = genomic DNA

SEQ ID NO: 49239 - DNA, 50 bp, Streptococcus agalactiae
  source 1..50: mol_type = genomic DNA
atgttcccaagcaaaagacaacgctggtggagtgcatagcgttgatacaa

SEQ ID NO: 49240 - DNA, 40 bp, Streptococcus agalactiae; identical to SEQ ID NO: 49180
  source 1..40: mol_type = genomic DNA

SEQ ID NO: 49241 - protein, 590 aa, Streptococcus agalactiae
MKKDVKVIKGDTTLKRTASGCVERSIKRVAAYCRVSTDNEDQINSYNSQVEHYTEYIKKNNEWTLAGIYADEAITGTQVDRRIDFQRLINDCMNGDIDMIITKSISRFARNTLDTLKYVRKLKEVNVAVFFEEENINTLTMDGELLLTILSSVAQQEVENISANVKKGLRMKMERGEMVGFQGCLGYDYDPETKSISVNEKEAEIVRYIFRRYLEGVGGMVISRELEEQGYLSPRGYKKWTETTVLGIIKNEKYKGDLLMGKTYTVDPISKRRLDNFGEQDKFYIENHHEPIISEEDFEKAQGIRLRRSKNRNTVANNGGKREKYSRKYAFSSMLECGFCGYTLSRRTWHSSTEHSKIIWQCVNATKNGKKHCPHSKGLEEEAIEKAFMESYRQVCHNNVEITNEFLKTVEEELKDNSLSKELKKVSNQLDKVLKKEKDLVELRLNEAISMDLYQEKYNEITLSKEKLLGEKRTLEVTLTDEKALKKRLEGFKRLLESNKYLEKFDRAVFESIVDKIIIGGTNDDGEIDPAKITIIYKTGKKDSQDGRLFKSRRKNAKAVDRENDNKLYPQSSNEANELCSYQIDNTCGV

SEQ ID NO: 49242 - DNA, 50 bp, Streptococcus agalactiae
  source 1..50: mol_type = genomic DNA
gtgttcctatcaaatagacaacacatgtggagtgcatagcgttgatacaa

SEQ ID NO: 49243 - DNA, 40 bp, Streptococcus agalactiae; identical to SEQ ID NO: 23678
  source 1..40: mol_type = genomic DNA

SEQ ID NO: 49244 - DNA, 50 bp, Streptococcus agalactiae
  source 1..50: mol_type = genomic DNA
gtgttcctatcaaatagacaacactggtggagtgcatagcgttgatacaa

SEQ ID NO: 49245 - DNA, 40 bp, Streptococcus agalactiae; identical to SEQ ID NO: 49180
  source 1..40: mol_type = genomic DNA

SEQ ID NO: 49246 - protein, 590 aa, Streptococcus agalactiae
MKKEVKVIKGDTTLKRTASGCVERSIKRVAAYCRVSTDTEDQINSYNSQVEHYTEFIQKNNEWTLAGIYADEAITGTQVDRRIDFQRLINDCMNGDIDMIITKSISRFARNTLDTLKYVRKLKEFNVAVFFEEENINTLTMDGELLLTILSSVAQQEVENISANVKKGLRMKMERGEMVGFQGCLGYDYDPETKSISINEKEAEIVRYIFRRYIEGVGGMVISRELEEQGYLSPRGNKRWTETTVLGIIKNEKYKGDLMMGKTYTVDPISKRRLDNFREQDKFYIENHHEPIISEEDFEKAQGIRLRRSKNRNTVANNGGKREKYSRKYAFSSMLECGFCGYNLSRRNWHSSSEYTKVIWQCVNATKNGKKYCPHSKGIEEEAIEKAFMESYRQVCHNNVEITNEFLKTVEEELKDNSLSKDLKKISNQLDKILKKEKDLVELRLNESISMDIYQDKYNEIAISKEKLLAEKRTLEVTLTDEKALKKRLEGFKKLLESNKYLEEFDRAVFESIVDKIIIGGTNDEGEIDPAMITIIYKTGKKDSQDGRLFKSRRKNAKEVNEKADSKLYPQSSDEVNNLYSYPIDNTCGV

SEQ ID NO: 49247 - DNA, 50 bp, Streptococcus agalactiae; identical to SEQ ID NO: 1792
  source 1..50: mol_type = genomic DNA

SEQ ID NO: 49248 - DNA, 40 bp, Streptococcus agalactiae; identical to SEQ ID NO: 23678
  source 1..40: mol_type = genomic DNA

SEQ ID NO: 49249 - DNA, 50 bp, Streptococcus agalactiae; identical to SEQ ID NO: 49194
  source 1..50: mol_type = genomic DNA

SEQ ID NO: 49250 - DNA, 40 bp, Streptococcus agalactiae; identical to SEQ ID NO: 49180
  source 1..40: mol_type = genomic DNA

SEQ ID NO: 49251 - protein, 590 aa, Streptococcus agalactiae
MKKDVKVIKGDTTLKRTASGCVQRSIKRVAAYCRVSTDTEDQINSYNSQVEHYTEFIQKNKEWTLAGIYADEAITGTQVDRRIDFQRLINDCMSGDIDMIITKSISRFARNTLDTLKYVRKLKEFNVAVFFEEENINTLTMDGELLLTILSSVAQQEVENISANVKKGLRMKMERGEMVGFQGCLGYDYDPETKSISINEKEAEIVRYIFRRYIEGVGGMVISRELEEQGYLSPRGNKRWTETTVLGIIKNEKYKGDLMMGKTYTVDPISKRRLDNFGEQDKFYIENHHEPIISEEDFEKAQGIRLRRSKNRNTVANNGGKREKYSRKYAFSSMLECGFCGHNLSRRNWHSSSEYTKVIWQCVNATKNGKKYCPHSKGIEEEAIEKAFMESYRQVCHNNVEITNEFLKTVEEELKDNSLAKDLKKITNQLDKILKKEKDLVELRLNESISMDIYQDKYNEIAISKEKLLAEKRTLEVTLTDEKALKKRLEGFKKLLESNKYLEEFDRAVFESIVDKIIIGGTNDEGEIDPAMITIIYKTGKKDSQDGRLFKSRRKNAKEVNEETDNKLYPHSSDEVNNLYSYPIDNTCGV

SEQ ID NO: 49252 - DNA, 50 bp, Streptococcus agalactiae; identical to SEQ ID NO: 19692
  source 1..50: mol_type = genomic DNA

SEQ ID NO: 49253 - DNA, 40 bp, Streptococcus agalactiae; identical to SEQ ID NO: 23678
  source 1..40: mol_type = genomic DNA

SEQ ID NO: 49254 - DNA, 50 bp, Streptococcus agalactiae; identical to SEQ ID NO: 49189
  source 1..50: mol_type = genomic DNA

SEQ ID NO: 49255 - DNA, 40 bp, Streptococcus agalactiae; identical to SEQ ID NO: 49180
  source 1..40: mol_type = genomic DNA

SEQ ID NO: 49256 - protein, 590 aa, Streptococcus agalactiae
MKKEVKVIKGDTTLKRTASGCVERSIKRVAAYCRVSTDTEDQINSYNSQVEHYTEFIQKNNEWTLAGIYADEAITGTQVDRRIDFQRLINDCMNGDIDMIITKSISRFARNTLDTLKYVRKLKEFNVAVFFEEENINTLTMDGELLLTILSSVAQQEVENISANVKKGLRMKMERGEMVGFQGCLGYDYDPETKSISINEKEAEIVRYIFRRYIEGVGGMVISRELEEQGYLSPRGNKRWTETTVLGIIKNEKYKGDLMMGKTYTVDPISKRRLDNFGEQDKFYIENHHEPIISEEDFEKAQGIRLRRSKNRNTVANNGGKREKYSRKYAFSSMLECGFCGYNLSRRNWHSSSEYTKVIWQCVNATKNGKKYCPHSKGIEEEAIEKAFMESYRQVCHNNVEITNEFLKTVEEELKDNSLSKDLKKISNQLDKILKKEKDLVELRLNESISMDIYQDKYNEIAISKEKLLAEKRTLEVTLTDEKALKKRLEGFKKLLESNKYLEEFDRAVFESIVDKIIIGGTNDEGEIDPAMITIIYKTGKKDSQDGRLFKSRRKNAKEVNEKADSKLYPQSSDEVNNLYSYPIDNTCGV

SEQ ID NO: 49257 - DNA, 50 bp, Streptococcus agalactiae; identical to SEQ ID NO: 1792
  source 1..50: mol_type = genomic DNA

SEQ ID NO: 49258 - DNA, 40 bp, Streptococcus agalactiae; identical to SEQ ID NO: 23678
  source 1..40: mol_type = genomic DNA

SEQ ID NO: 49259 - DNA, 50 bp, Streptococcus agalactiae; identical to SEQ ID NO: 49194
  source 1..50: mol_type = genomic DNA

SEQ ID NO: 49260 - DNA, 40 bp, Streptococcus agalactiae; identical to SEQ ID NO: 49180
  source 1..40: mol_type = genomic DNA

SEQ ID NO: 49261 - protein, 590 aa, Streptococcus agalactiae
MKKDVKVIKGDTTLKRTASGCVERSIKRVAAYCRVSTDTEDQINSYNSQVEHYTEFIQKNNEWTLAGIYADEAITGTQVDRRIDFQRLINDCMNGDIDMIITKSISRFARNTLDTLKYVRKLKEFNVAVFFEEENINTLTMDGELLLTILSSVAQQEVENISANVKKGLRMKMERGEMVGFQGCLGYDYDPETKSISINEKEAEIVRYIFRRYIEGVGGMVISRELEEQGYLSPRGNKRWTETTVLGIIKNEKYKGDLMMGKTYTVDPISKRRLDNYGEQDKFYIENHHEPIISEEDFEKAQGIRLRRSKNRNTVANNGGKREKYSRKYAFSSMLECGFCGHNLSRRNWHSSSEYTKVIWQCVNATKNGKKYCPHSKGIEEEAIEKAFMESYRQVCHNNVEITNEFLKTVEEELKDNSLAKDLKKISNQLDKIIKKEKDLVELRLNESISMDIYQDKYNEIAISKEKLLAEKRTLEVTLTDEKALKKRLEGFKKLLESNKYLDEFDRAVFESIVDKIIIGGTNDEEEIDPAMITIIYKTGKKDSQDGRLFKSRRKNAKEVDEETDNKLYPQSSDEVNDLCSYPMDNTCGV

SEQ ID NO: 49262 - DNA, 50 bp, Streptococcus agalactiae; identical to SEQ ID NO: 37077
  source 1..50: mol_type = genomic DNA

SEQ ID NO: 49263 - DNA, 40 bp, Streptococcus agalactiae; identical to SEQ ID NO: 23678
  source 1..40: mol_type = genomic DNA

SEQ ID NO: 49264 - DNA, 50 bp, Streptococcus agalactiae; identical to SEQ ID NO: 49209
  source 1..50: mol_type = genomic DNA

SEQ ID NO: 49265 - DNA, 40 bp, Streptococcus agalactiae; identical to SEQ ID NO: 49180
  source 1..40: mol_type = genomic DNA

SEQ ID NO: 49266 - protein, 590 aa, Streptococcus agalactiae
MKKEVKVIKGDTTLKRTASGCVERSIKRVAAYCRVSTDTEDQINSYNSQVEHYTEFIQKNNEWTLAGIYADEAITGTQVDRRIDFQRLINDCMNGDIDMIITKSISRFARNTLDTLKYVRKLKEFNVAVFFEEENINTLTMDGELLLTILSSVAQQEVENISANVKKGLRMKMERGEMVGFQGCLGYDYDPETKSISINEKEAEIVRYIFRRYIEGVGGMVISRELEEQGYLSPRGNKKWTETTVLGIIKNEKYKGDLMMGKTYTVDPISKRRLDNFGEQDKFYIENHHEPIISEEDFEKAQGIRLRRSKNRNTVANNGGKREKYSRKYAFSSMLECGFCGHNLSRRNWHSSSEYTKVIWQCVNATKNGKKYCPHSKGIEEEAIEKAFMESYRQVCHNNVEITNEFLKTVEEELKDNSLAKDLKKITNQLDKILKKEKDLVELRLNESISMDIYQDKYNEIAISKEKLLAEKRTLEVTLTDEKALKKRLEGFKKLLESNKYLEEFDRAVFESIVDKIIIGGTNDEGEIDPAMITIIYKTGKKDSQDGRLFKSRRKNAKEVDEGTDNKLYPQSSDEVNNLCSYPMDNTCGV

SEQ ID NO: 49267 - DNA, 50 bp, Streptococcus agalactiae; identical to SEQ ID NO: 1787
  source 1..50: mol_type = genomic DNA

SEQ ID NO: 49268 - DNA, 40 bp, Streptococcus agalactiae; identical to SEQ ID NO: 23678
  source 1..40: mol_type = genomic DNA

SEQ ID NO: 49269 - DNA, 50 bp, Streptococcus agalactiae; identical to SEQ ID NO: 49204
  source 1..50: mol_type = genomic DNA

SEQ ID NO: 49270 - DNA, 40 bp, Streptococcus agalactiae; identical to SEQ ID NO: 49180
  source 1..40: mol_type = genomic DNA

SEQ ID NO: 49271 - protein, 610 aa, Streptococcus agalactiae
MFCKCGIIELHRKIQKGGGAVKKDVKVIKGDTTLKRTASGCVQRSIKRVAAYCRVSTDTEDQINSYNSQVEHYTEFIQKNKEWTLAGIYADEAITGTQVDRRIDFQRLINDCMNGDIDMIITKSISRFARNTLDTLKYVRKLKEFNVAVFFEEENINTLTMDGELLLTILSSVAQQEVENISANVKKGLRMKMERGEMVGFQGCLGYDYDPETKSISINEKEAEIVRYIFRRYIEGVGGMVISRELEEQGYLSPRGNKRWTETTVLGIIKNEKYKGDLMMGKTYTVDPISKRRLDNFGEQDKFYIENHHEPIISEEDFEKAQGIRLRRSKNRNTVANNGGKREKYSRKYAFSSMLECGFCGHNLSRRNWHSSSEYTKVIWQCVNATKNGKKYCPHSKGIEEEAIEKAFMESYRQVCHNNVEITNEFLKTVEEELKDNSLAKDLKKITNQLDKILKKEKDLVELRLNESISMDIYQDKYNEIAISKEKLLAEKRTLEVTLTDEKALKKRLEGFKKLLESNKYLEEFDRAVFESIVDKIIIGGTNDEGEIDPAMITIIYKTGKKDSQDGRLFKSRRKNAKEVNEETDNKLYPHSSDEVNNLYSYPIDNTCGV

SEQ ID NO: 49272 - DNA, 50 bp, Streptococcus agalactiae; identical to SEQ ID NO: 1792
  source 1..50: mol_type = genomic DNA

SEQ ID NO: 49273 - DNA, 40 bp, Streptococcus agalactiae; identical to SEQ ID NO: 23678
  source 1..40: mol_type = genomic DNA

SEQ ID NO: 49274 - DNA, 50 bp, Streptococcus agalactiae; identical to SEQ ID NO: 49194
  source 1..50: mol_type = genomic DNA

SEQ ID NO: 49275 - DNA, 40 bp, Streptococcus agalactiae; identical to SEQ ID NO: 49180
  source 1..40: mol_type = genomic DNA

SEQ ID NO: 49276 - protein, 611 aa, Streptococcus agalactiae
MFCKCGIIRLHRKIQKKEADAVKKEVKVIKGDTTLKRTASGCVERSIKRVAAYCRVSTDTEDQINSYNSQVEHYTEFIQKNNEWTLAGIYADEAITGTQVDRRIDFQRLINDCMNGDIDMIITKSISRFARNTLDTLKYVRKLKEFNVAVFFEEENINTLTMDGELLLTILSSVAQQEVENISANVKKGLRMKMERGEMVGFQGCLGYDYDPETKSISINEKEAEIVRYIFRRYIEGVGGMVISRELEEQGYLSPRGNKRWTETTVLGIIKNEKYKGDLMMGKTYTVDPISKRRLDNFGEQDKFYIENHHEPIISEEDFEKAQGIRLRRSKNRNTVANNGGKREKYSRKYAFSSMLECGFCGHNLSRRNWHSSSEYTKVIWQCVNATKNGKKYCPHSKGIEEEAIEKAFMESYRQVCHNNVEITNEFLKTVEEELKDNSLSKDLKKISNQLDKILKKEKDLVELRLNESISMDIYQDKYNEIAISKEKLLAEKRTLEVTLTDEKALKKRLEGFKKLLESNKYLEEFDRAVFESIVDKIIIGGTNDEGEIDPAMITIIYKTGKKDSQDGRLFKSRRKNAKEVNEETENKLYPQSSDEVNNLCSYPMDNTCGV

SEQ ID NO: 49277 - DNA, 50 bp, Streptococcus agalactiae; identical to SEQ ID NO: 1787
  source 1..50: mol_type = genomic DNA

SEQ ID NO: 49278 - DNA, 40 bp, Streptococcus agalactiae; identical to SEQ ID NO: 23678
  source 1..40: mol_type = genomic DNA

SEQ ID NO: 49279 - DNA, 50 bp, Streptococcus agalactiae; identical to SEQ ID NO: 49204
  source 1..50: mol_type = genomic DNA

SEQ ID NO: 49280 - DNA, 40 bp, Streptococcus agalactiae; identical to SEQ ID NO: 49180
  source 1..40: mol_type = genomic DNA

SEQ ID NO: 49281 - protein, 610 aa, Streptococcus agalactiae; identical to SEQ ID NO: 49271

SEQ ID NO: 49282 - DNA, 50 bp, Streptococcus agalactiae
  source 1..50: mol_type = genomic DNA
gtattcctatcccattgacaacacatgtggagtgcatagcgttgatacaa

SEQ ID NO: 49283 - DNA, 40 bp, Streptococcus agalactiae; identical to SEQ ID NO: 23678
  source 1..40: mol_type = genomic DNA

SEQ ID NO: 49284 - DNA, 50 bp, Streptococcus agalactiae
  source 1..50: mol_type = genomic DNA
gtattcctatcccattgacaacactggtggagtgcatagcgttgatacaa

SEQ ID NO: 49285 - DNA, 40 bp, Streptococcus agalactiae; identical to SEQ ID NO: 49180
  source 1..40: mol_type = genomic DNA

SEQ ID NO: 49286 - protein, 610 aa, Streptococcus agalactiae
MFCKCGIIELHRKIQKGGGSVKKDVKVIKGDTTLKRTASGCVQRSIKRVAAYCRVSTDTEDQINSYNSQVEHYTEFIQKNKEWTLAGIYADEAITGTQVDRRIDFQRLINDCMNGDIDMIITKSISRFARNTLDTLKYVRKLKEFNVAVFFEEENINTLTMDGELLLTILSSVAQQEVENISANVKKGLRMKMERGEMVGFQGCLGYDYDPETKSISINEKEAEIVRYIFRRYIEGVGGMVISRELEEQGYLSPRGNKRWTETTVLGIIKNEKYKGDLMMGKTYTVDPISKRRLDNFGEQDKFYIENHHEPIISEEDFEKAQGIRLRRSKNRNTVANNGGKREKYSRKYAFSSMLECGFCGHNLSRRNWHSSSEYTKVIWQCVNATKNGKKYCPHSKGIEEEAIEKAFMESYRRVCHNNVEITNEFLKTVEEELKDNSLAKDLKKITNQLDKILKKEKDLVELRLNESISMDIYQDKYNEIAISKEKLLAEKRTLEVTLTDEKALKKRLEGFKKLLESNKYLEEFDRAVFESIVDKIIIGGTNDEGEIDPAMITIIYKTGKKDSQDGRLFKSRRKNAKEVNEETDNKLYPHSSDEVNNLYSYPIDNTCGV

SEQ ID NO: 49287 - DNA, 50 bp, Streptococcus agalactiae; identical to SEQ ID NO: 1792
  source 1..50: mol_type = genomic DNA

SEQ ID NO: 49288 - DNA, 40 bp, Streptococcus agalactiae; identical to SEQ ID NO: 23678
  source 1..40: mol_type = genomic DNA

SEQ ID NO: 49289 - DNA, 50 bp, Streptococcus agalactiae; identical to SEQ ID NO: 49194
  source 1..50: mol_type = genomic DNA

SEQ ID NO: 49290 - DNA, 40 bp, Streptococcus agalactiae; identical to SEQ ID NO: 49180
  source 1..40: mol_type = genomic DNA

SEQ ID NO: 49291 - protein, 611 aa, Streptococcus agalactiae
MFCKCGIMKLHRKIQKKEADAVKKDVKVIKGDTTLKRTASGCVERSIKRVAAYCRVSTDTEDQINSYNSQVEHYTEFIQKNNEWTLAGIYADEAITGTQVDRRIDFQRLINDCINGDIDMIITKSISRFARNTLDTLKYVRKLKEFNVAVFFEEENINTLTMDGELLLTILSSVAQQEVENISANVKKGLRMKMERGEMVGFQGCLGYDYDPETKSISINEKEAEIVRYIFRRYIEGVGGMVISRELEEQGYLSPRGNKRWTETTVLGIIKNEKYKGDLMMGKTYTVDPISKRRLDNYGEQDKFYIENHHEPIISEEVFEKAQGIRLRRSKNRNTVANNGGKREKYSRKYAFSSMLECGFCGHNLSRRNWHSSSEYTKVIWQCVNATKNGKKYCPHSKGIEEEAIEKAFMESYRQVCHNNVEITNEFLKTVEEELKDNSLAKDLKKITNQLDKVLKKEKDLVELRLNESISMDIYQDKYNEIAISKEKLLAEKRTLEVTLTDEKALKKRLEGFKKILESNKYLEKFDRAVFESIVDKIIIGGTNDEGEIDPAMITIIYKTGKKDSQDGRLFKSRRKNAKEVNEETDNKLYPQSSDEVNNLCSYPMDNTCGV

SEQ ID NO: 49292 - DNA, 50 bp, Streptococcus agalactiae; identical to SEQ ID NO: 1787
  source 1..50: mol_type = genomic DNA

SEQ ID NO: 49293 - DNA, 40 bp, Streptococcus agalactiae; identical to SEQ ID NO: 23678
  source 1..40: mol_type = genomic DNA

SEQ ID NO: 49294 - DNA, 50 bp, Streptococcus agalactiae; identical to SEQ ID NO: 49204
  source 1..50: mol_type = genomic DNA

SEQ ID NO: 49295 - DNA, 40 bp, Streptococcus agalactiae; identical to SEQ ID NO: 49180
  source 1..40: mol_type = genomic DNA

SEQ ID NO: 49296 - protein, 611 aa, Streptococcus agalactiae; identical to SEQ ID NO: 49181

SEQ ID NO: 49297 - DNA, 50 bp, Streptococcus agalactiae
  source 1..50: mol_type = genomic DNA
gtgttcctattcaacagacaacacatgtagagtgcatagcgttgatacaa

SEQ ID NO: 49298 - DNA, 40 bp, Streptococcus agalactiae; identical to SEQ ID NO: 23678
  source 1..40: mol_type = genomic DNA

SEQ ID NO: 49299 - DNA, 50 bp, Streptococcus agalactiae
  source 1..50: mol_type = genomic DNA
gtgttcctattcaacagacaacactggtagagtgcatagcgttgatacaa

SEQ ID NO: 49300 - DNA, 40 bp, Streptococcus agalactiae; identical to SEQ ID NO: 49180
  source 1..40: mol_type = genomic DNA

SEQ ID NO: 49301 - protein, 590 aa, Streptococcus agalactiae
MKRDVKVIKGDTTLKRTASGCVERSIKRVAAYCRVSTDTEDQINSYNSQVEHYTDFIKQNNEWTLAGIYADEAITGTQVDRRIDFQRLINDCMNGDIDMVITKSISRFARNTLDTLKYVRKLKEYNVAVFFEEENINTLTMDGELLLTILSSVAQQEVENISANVKKGLRMKMERGEMVGFQGCLGYDYDPETKSISVNEKEAEIVRYIFRRYLEGVGGMVISRELEEQGYLSPRGHKRWTEATVLGIIKNEKYKGDLLMGKTFTVDPISKRRLDNFGEQDKFYIENHHEPIISEEDFEKAQGIRLRRAKNRNTVANNGGKREKYSRKYAFSSMLECGFCGHMLSRRNWHSSSEYTKVIWQCVNATKNGKKYCPHSKGIEEEAIEKAFMESYRQVCHNNVEITNEFLKTVEEELKDNSLAKDLKKISNQLDKILKKEKDLVELRLNEAISMEIYQEKYNEIAISKEKLLEEKRTLEVTLTDEKALKKRLEGFKKLLESNKYLEEFDRTVFESIVDKIVIGGTNDDGDIDPAMITIIYKTGEKDSQNGRLFKSRRKNAKVVEENDGDKLYSQSSNEVNKLCSYSTDNTCGV

SEQ ID NO: 49302 - DNA, 50 bp, Streptococcus agalactiae; identical to SEQ ID NO: 19727
  source 1..50: mol_type = genomic DNA

SEQ ID NO: 49303 - DNA, 40 bp, Streptococcus agalactiae; identical to SEQ ID NO: 23678
  source 1..40: mol_type = genomic DNA

SEQ ID NO: 49304 - DNA, 50 bp, Streptococcus agalactiae; identical to SEQ ID NO: 49184
  source 1..50: mol_type = genomic DNA

SEQ ID NO: 49305 - DNA, 40 bp, Streptococcus agalactiae; identical to SEQ ID NO: 49180
  source 1..40: mol_type = genomic DNA

SEQ ID NO: 49306 - protein, 611 aa, Streptococcus agalactiae
MFCKCGIIRLHRKIQKKEADAVKKEVKVIKGDTTLKRTASGCVERSIKRVAAYCRVSTDTEDQINSYNSQVEHYTEFIQKNNEWTLAGIYADEAITGTQVDRRIDFQRLINDCMNGDIDMIITKSISRFARNTLDTLKYVRKLKEFNVAVFFEEENINTLTMDGELLLTILSSVAQQEVENISANVKKGLRMKMERGEMVGFQGCLGYDYDPETKSISINEKEAEIVRYIFRRYIEGVGGMVISRELEEQGYLSPRGNKRWTETTVLGIIKNEKYKGDLMMGKTYTVDPISKRRLDNYGEQDKFYIENHHEPIISEEDFEKAQGIRLRRSKNRNTVANNGGKREKYSRKYAFSSMLECGFCGHNLSRRNWHSSSEYTKVIWQCVNATKNGKKYCPHSKGIEEEAIEKAFMESYRQVCHNNVEITNEFLKTVEEELKDNSLAKDLKKITNQLDKVLKKEKDLVELRLNESISMDIYQDKYNEIAISKEKLLAEKRTLEVTLTDEKALKKRLEGFKKLLESNKYLEEFDRAVFESIVDKIIIGGTNDEGEIDPAMITIIYKTGKKDSQDGRLFKSRRKNAKEVDEKTDNKLYPQSSDEVNNLCSYPIDNTCGV

SEQ ID NO: 49307 - DNA, 50 bp, Streptococcus agalactiae; identical to SEQ ID NO: 49232
  source 1..50: mol_type = genomic DNA

SEQ ID NO: 49308 - DNA, 40 bp, Streptococcus agalactiae; identical to SEQ ID NO: 23678
  source 1..40: mol_type = genomic DNA

SEQ ID NO: 49309 - DNA, 50 bp, Streptococcus agalactiae; identical to SEQ ID NO: 49234
  source 1..50: mol_type = genomic DNA

SEQ ID NO: 49310 - DNA, 40 bp, Streptococcus agalactiae; identical to SEQ ID NO: 49180
  source 1..40: mol_type = genomic DNA

SEQ ID NO: 49311 - protein, 610 aa, Streptococcus agalactiae
MFCKCGIIELHRKIQKGGGSVKKDVKVIKGDTTLKRTASGCVQRSIKRVAAYCRVSTDTEDQINSYNSQVEHYTEFIQKNKEWTLAGIYADEAITGTQVDRRIDFQRLINDCMNGDIDMIITKSISRFARNTLDTLKYVRKLKEFNVAVFFEEENINTLTMDGELLLTILSSVAQQEVENISANVKKGLRMKMERGEMVGFQGCLGYDYDPETKSISINEKEAEIVRYIFRRYIEGVGGMVISRELEEQGYLSPRGNKRWTETTVLGIIKNEKYKGDLMMGKTYTVDPISKRRLDNFGEQDKFYIENHHEPIISEEDFEKAQGIRLRRSKNRNTVANNGGKREKYSRKYAFSSMLECGFCGHNLSRRNWHSSSEYTKVIWQCVNATKNGKKYCPHSKGIEEEAIEKAFMESYRQVCHNNVEITNEFLKTVEEELKDNSLAKDLKKITNQLDKILKKEKDLVELRLNESISMDIYQDKYNEIAISKEKLLAEKRTLEVTLTDEKALKKRLEGFKKLLESNKYLEEFDRAVFESIVDKIIIGGTNDEGEIDPAMITIIYKTGKKDSQDGRLFKSRRKNAKEVNEETDNKLYPHSSDEVNNLYSYPIDNTCGV

SEQ ID NO: 49312 - DNA, 50 bp, Streptococcus agalactiae; identical to SEQ ID NO: 1792
  source 1..50: mol_type = genomic DNA

SEQ ID NO: 49313 - DNA, 40 bp, Streptococcus agalactiae; identical to SEQ ID NO: 23678
  source 1..40: mol_type = genomic DNA

SEQ ID NO: 49314 - DNA, 50 bp, Streptococcus agalactiae; identical to SEQ ID NO: 49194
  source 1..50: mol_type = genomic DNA

SEQ ID NO: 49315 - DNA, 40 bp, Streptococcus agalactiae; identical to SEQ ID NO: 49180
  source 1..40: mol_type = genomic DNA

SEQ ID NO: 49316 - protein, 590 aa, Streptococcus agalactiae
MKKDVKVIKGDTTLKRTASGCVERSIKRVAAYCRVSTDTEDQINSYNSQVEHYTEFIQKNKEWTLAGIYADEAITGTQVDRRIDFQRLINDCMNGDIDMIITKSISRFARNTLDTLKYVRKLKEFNVAVFFEEENINTLTMDGELLLTILSSVAQQEVENISANVKKGLRMKMERGEMVGFQGCLGYDYDPETKSISINEKEAEIVRYIFRRYIEGVGGMVISRELEEQGYLSPRGNKRWTETTVLGIIKNEKYKGDLMMGKTYTVDPISKRRLDNFGEQDKFYIENHHEPIISEEDFEKAQGIRLRRSKNRNTVANNGGKREKYSRKYAFSSMLECGFCGHNLSRRNWHSSSEYTKVIWQCVNATKNGKKYCPHSKGIEEEAIEKAFMESYRQVCHNNVEITNEFLKTVEEELKDNSLAKDLKKITNQLDKILKKEKDLVELRLNESISMDIYQDKYNEIAISKEKLLAEKRTLEVTLTDEKALKKRLEGFKKLLESNKYLEEFDRAVFESIVDKIIIGGTNDEGEIDPAMITIIYKTGKKDSQDGRLFKSRRKNAKEVNEETDNKLYPHSSDEVNNLYSYPIDNTCGV

SEQ ID NO: 49317 - DNA, 50 bp, Streptococcus agalactiae
  source 1..50: mol_type = genomic DNA
gtattcctatcctattgacaacacatgtcgagtgcatagcgttgatacaa

SEQ ID NO: 49318 - DNA, 40 bp, Streptococcus agalactiae; identical to SEQ ID NO: 23678
  source 1..40: mol_type = genomic DNA

SEQ ID NO: 49319 - DNA, 50 bp, Streptococcus agalactiae
  source 1..50: mol_type = genomic DNA
gtattcctatcctattgacaacactggtcgagtgcatagcgttgatacaa

SEQ ID NO: 49320 - DNA, 40 bp, Streptococcus agalactiae; identical to SEQ ID NO: 49180
  source 1..40: mol_type = genomic DNA

SEQ ID NO: 49321 - protein, 590 aa, Streptococcus agalactiae
MKKDVKVIKGDTTLKRTASGCVERSIKRVAAYCRVSTDSEDQINSYNSQVEHYTEFIQKNNEWTLAGIYADEAITGTQVDRRIDFQRLINDCMNGDIDMIITKSISRFARNTLDTLKYVRKLKEFNVAVFFEEENINTLTMDGELLLTILSSVAQQEVENISANVKKGLRMKMERGEMVGFQGCLGYDYDPETKSISINEKEAEIVRYIFRRYIEGVGGMVISRELEEQGYLSPRGNKRWTETTVLGIIKNEKYKGDLMMGKTYTVDPISKRRLDNYGEQDKFYIENHHEPIISEEDFEKAQGIRLRRSKNRNTVANNGGKREKYSRKYAFSSMLECGFCGHNLSRRNWHSSSEYTKVIWQCVNATKNGKKYCPHSKGIEEEAIEKAFMESYRQVCHNNVEITNEFLKTVEEELKDNSLAKDLKKITNQLDKILKKEKDLVELRLNESISMDIYQDKYNEIAISKEKLLAEKRTLEVTLTDEKALKKRLEGFKKLLESNKYLEDFDRAVFESIVDKIIIGGTNDEGEIDPAMITIIYKTGKKDSQDGRLFKSRRKNAKEVNEETDNKLYPQSSDEVNNLCSYPMDNTCGV

SEQ ID NO: 49322 - DNA, 50 bp, Streptococcus agalactiae; identical to SEQ ID NO: 37077
  source 1..50: mol_type = genomic DNA

SEQ ID NO: 49323 - DNA, 40 bp, Streptococcus agalactiae; identical to SEQ ID NO: 23678
  source 1..40: mol_type = genomic DNA

SEQ ID NO: 49324 - DNA, 50 bp, Streptococcus agalactiae; identical to SEQ ID NO: 49209
  source 1..50: mol_type = genomic DNA

SEQ ID NO: 49325 - DNA, 40 bp, Streptococcus agalactiae; identical to SEQ ID NO: 49180
  source 1..40: mol_type = genomic DNA

SEQ ID NO: 49326 - protein, 590 aa, Streptococcus agalactiae
MKKEVKVIKGDTTLKRTASGCVERSIKRVAAYCRVSTDTEDQINSYNSQVEHYTEFIQKNNEWTLAGIYADEAITGTQVDRRIDFQRLINDCMNGDIDMIITKSISRFARNTLDTLKYVRKLKEFNVAVFFEEENINTLTMDGELLLTILSSVAQQEVENISANVKKGLRMKMERGEMVGFQGCLGYDYDPETKSISINEKEAEIVRYIFRRYIEGVGGMVISRELEEQGYLSPRGNKRWTETTVLGIIKNEKYKGDLMMGKTYTVDPISKRRLDNFGEQDKFYIENHHEPIISEEDFEKAQGIRLRRSKNRNTVANNGGKREKYSRKYAFSSMLECGFCSHNLSRRNWHSSSEYTKVIWQCVNATKNGKKYCPHSKGIEEEAIEKAFMESYRQVCHNNVEITNEFLKTVEEELKDNSLSKDLKKISNQLDKILKKEKDLVELRLNESISMDIYQDKYNEIAISKEKLLAEKRTLEVTLTDEKALKKRLEGFKKLLESNKYLEEFDRAVFESIVDKIIIGGTNDEGEIDPAMITIIYKTGKKDSQDGRLFKSRRKNAKEVNEETENKLYPQSSDEVNNLCSYPMDNTCGV

SEQ ID NO: 49327 - DNA, 50 bp, Streptococcus agalactiae; identical to SEQ ID NO: 37077
  source 1..50: mol_type = genomic DNA

SEQ ID NO: 49328 - DNA, 40 bp, Streptococcus agalactiae; identical to SEQ ID NO: 23678
  source 1..40: mol_type = genomic DNA

SEQ ID NO: 49329 - DNA, 50 bp, Streptococcus agalactiae; identical to SEQ ID NO: 49209
  source 1..50: mol_type = genomic DNA

SEQ ID NO: 49330 - DNA, 40 bp, Streptococcus agalactiae; identical to SEQ ID NO: 49180
  source 1..40: mol_type = genomic DNA

SEQ ID NO: 49331 - protein, 590 aa, Streptococcus agalactiae
MKKEVKVIKGDTTLKRTASGCVERSIKRVAAYCRVSTDTEDQINSYNSQVEHYTEFIQKNNEWTLAGIYADEAITGTQVDRRIDFQRLINDCMNGDIDMIITKSISRFARNTLDTLKYVRKLKEFNVAVFFEEENINTLTMDGELLLTILSSVAQQEVENISANVKKGLRMKMERGEMVGFQGCLGYDYDPETKSISINEKEAEIVRYIFRRYIEGVGGMVISRELEEQGYLSPRGNKRWTETTVLGIIKNEKYKGDLMMGKTYTVDPISKRRLDNYGEQDKFYIENHHDPIISEEDFEKAQGIRLRRSKNRNTVANNGGKREKYSRKYPFSSMLECGFCGYNLSRRNWHSSSEYTKVIWQCVNATKNGKKYCPHSKGIEEEAIEKAFMESYRQVCHNNVEITNEFLKTVEEELKDNSLSKDLKKITNQLDKILKKEKDLVELRLNESISMDIYQDKYNEIAISKEKLLAEKRTLEVTLTDEKALKKRLEGFKKLLESNKYLEEFDRAVFESIVDKIIIGGTNDEGEIDPAMITIIYKTGKKDSQDGRLFKSRRKNAKEVNEETDNKLYPQSSDEVNNLCSYPMDNTCGV

SEQ ID NO: 49332 - DNA, 50 bp, Streptococcus agalactiae; identical to SEQ ID NO: 1787
  source 1..50: mol_type = genomic DNA

SEQ ID NO: 49333 - DNA, 40 bp, Streptococcus agalactiae; identical to SEQ ID NO: 23678
  source 1..40: mol_type = genomic DNA

SEQ ID NO: 49334 - DNA, 50 bp, Streptococcus agalactiae; identical to SEQ ID NO: 49204
  source 1..50: mol_type = genomic DNA

SEQ ID NO: 49335 - DNA, 40 bp, Streptococcus agalactiae; identical to SEQ ID NO: 49180
  source 1..40: mol_type = genomic DNA

SEQ ID NO: 49336 - protein, 590 aa, Streptococcus agalactiae
MKKEVKVIKGDTTLKRTASGCVERSIKRVAAYCRVSTDTEDQINSYNSQVEHYTEFIQKNNEWTLAGIYADEAITGTQVDRRIDFQRLINDCMNGDIDMIITKSISRFARNTLDTLKYVRKLKEFNVAVFFEEENINTLTMDGELLLTILSSVAQQEVENISANVKKGLRMKMERGEMVGFQGCLGYDYDPETKSISINEKEAEIVRYIFRRYIEGVGGMVISRELEEQGYLSPRGNKRWTETTVLGIIKNEKYKGDLMMGKTYTVDPISKRRLDNFGEQDKFYIENHHEPIISEEDFEKAQGIRLRRSKNRNTVANNGGKREKYSRKYAFSSMLECGFCGYNLSRRNWHSSSEYTKVIWQCVNATKNGKKYCPHSKGIEEEAIEKAFMESYRQVCHNNVEITNEFLKTVEEELKDNSLAKDLKKITNQLDKILKKEKDLVELRLNESISMDIYQDKYNEIAISKEKLLAEKRTLEVTLTDEKALKKRLEGFKKLLESNKYLEEFDRAVFESIVDKIIIGGTNDEGEIDPAMITIIYKTGKKDSQDGRLFKSRRKNAKEVDEGTDNKLYPQSSDEVNNLCSYPMDNTCGV

SEQ ID NO: 49337 - DNA, 50 bp, Streptococcus agalactiae; identical to SEQ ID NO: 37077
  source 1..50: mol_type = genomic DNA

SEQ ID NO: 49338 - DNA, 40 bp, Streptococcus agalactiae; identical to SEQ ID NO: 23678
  source 1..40: mol_type = genomic DNA

SEQ ID NO: 49339 - DNA, 50 bp, Streptococcus agalactiae; identical to SEQ ID NO: 49209
  source 1..50: mol_type = genomic DNA

SEQ ID NO: 49340 - DNA, 40 bp, Streptococcus agalactiae; identical to SEQ ID NO: 49180
  source 1..40: mol_type = genomic DNA

SEQ ID NO: 49341 - protein, 585 aa, Streptococcus agalactiae
MNTKVKVIKASNTGARNRNALHLDLKRVAAYCRVSTDSKDQLESYKSQVDYYTNLIKNNKNWTLAGMYADEATTGTTATKRADFMRLISDCQNGDIDMIITKSISRFARNTLDTLKYVRLLKENNVGVVFEEENIDTLTMDGELLLTILSSVAQQEVENTSAHVKKGLKMKMEKGELIGFQGCLGYDYDPTTKSISINEEEAKIVRYIFKRYLEGNGGSVIGRELEEQGYLTPRGKTKWSDTTVLGIIKNEKYIGDILMGKTFTVDPITKRRLANFGESDKYHIENHHEPIISKEDFEKAQEIRLRRAQNRNTIANKDRKREKLSRQYAFSSMLECGFCGEILSRRTWHTSSIYKKINWQCVRSTKKGKKYCPNSKGIQEAAIEKAFVESYRQLCHADSTVIDDFLKIVEEEINDNTLVKDLKKIENQLNRIISQERKLVDLHLEDSIDEEVYAKKYKKLTKQKQELLDEKKTLELTIKDENSIKERLKQFKKVLENREIIEEFNRTVFESIVDKVVVGRIDKDGTVHPYDLTFYFKTGVKDSQDSNNFKDKRKNAKDNDINKLCSYKNDEYKKLCSQAKDNACG

SEQ ID NO: 49342 - DNA, 50 bp, Streptococcus agalactiae; identical to SEQ ID NO: 14774
  source 1..50: mol_type = genomic DNA

SEQ ID NO: 49343 - DNA, 40 bp, Streptococcus agalactiae; identical to SEQ ID NO: 23678
  source 1..40: mol_type = genomic DNA

SEQ ID NO: 49344 - DNA, 50 bp, Streptococcus agalactiae
  source 1..50: mol_type = genomic DNA
atgttcccaagcaaaagacaacgctggtggaagctatagcgttgatacaa

SEQ ID NO: 49345 - DNA, 40 bp, Streptococcus agalactiae; identical to SEQ ID NO: 49180
  source 1..40: mol_type = genomic DNA

SEQ ID NO: 49346 - protein, 587 aa, Streptococcus agalactiae
MKKDVKVIKGDTTLKRTASGCVERSIKRVAAYCRVSTDTEDQINSYNSQVEHYTEFIQKNNEWTLAGIYADEAITGTQVDRRIDFQRLINDCINGDIDMIITKSISRFARNTLDTLKYVRKLKEFNVAVFFEEENINTLTMDGELLLTILSSVAQQEVENISANVKKGLRMKMERGEMVGFQGCLGYDYDPETKSISINEKEAEIVRYIFRRYIEGVGGMVISRELEEQGYLSPRGNKRWTETTVLGIIKNEKYKGDLMMGKTYTVDPISKRRLDNYGEQDKFYIENHHDPIISEEDFEKAQGIRLRRSKNRNTVANNGGKREKYSRKYPFSSMLECGFCGYNLSRRNWHSSSEYTKVIWQCVNATKNGKKYCPHSKGIEEEAIEKAFMESYRQVCHNNVEITNEFLKTVEEELKDNSLSKDLKKISNQLDKILKKEKDLVELRLNESISMDIYQDKYNEIAISKEKLLAEKRTLEVTLTDEKALKKRLEGFKKLLESNKYLEEFDRAVFESIVDKIIIGGTNDEGEIDPAMITIIYKTGKKDSQDGRLFKSRRKNAKEVNEKADSKLYPQSSDEVNNLYSYPIDNT

SEQ ID NO: 49347 - DNA, 50 bp, Streptococcus agalactiae
  source 1..50: mol_type = genomic DNA
gtattcctatcctattgacaacacacgtcgagtgcatagcgttgatacaa

SEQ ID NO: 49348 - DNA, 40 bp, Streptococcus agalactiae; identical to SEQ ID NO: 23678
  source 1..40: mol_type = genomic DNA

SEQ ID NO: 49349 - DNA, 50 bp, Streptococcus agalactiae; identical to SEQ ID NO: 49319
  source 1..50: mol_type = genomic DNA

SEQ ID NO: 49350 - DNA, 40 bp, Streptococcus agalactiae; identical to SEQ ID NO: 49180
  source 1..40: mol_type = genomic DNA

SEQ ID NO: 49351 - protein, 610 aa, Streptococcus agalactiae
MFCKCGIIELHRKIQKGGGAVKKDVKVIKGDTTLKRTASGCVQRSIKRVAAYCRVSTDTEDQINSYNSQVEHYTEFIQKNKEWTLAGIYADEAITGTQVDRRINFQRLINDCMNGDIDMIITKSISRFARNTLDTLKYVRKLKEFNVAVFFEEENINTLTMDGELLLTILSSVAQQEVENISANVKKGLRMKMERGEMVGFQGCLGYDYDPETKSISINEKEAEIVRYIFRRYIEGVGGMVISRELEEQGYLSPRGNKRWTETTVLGIIKNEKYKGDLMMGKTYTVDPISKRRLDNFGEQDKFYIENHHEPIISEEDFEKAQGIRLRRSKNRNTVANNGGKREKYSRKYAFSSMLECGFCGHNLSRRNWHSSSEYTKVIWQCVNATKNGKKYCPHSKGIEEEAIEKAFMESYRQVCHNNVEITNEFLKTVEEELKDNSLAKDLKKITNQLDKILKKEKDLVELRLNESISMDIYQDKYNEIAISKEKLLAEKRTLEVTLTDEKALKKRLEGFKKLLESNKYLEEFDRAVFESIVDKIIIGGTNDEGEIDPAMITIIYKTGKKDSQDGRLFKSRRKNAKEVNEETGGKLYPQSSDEVNNLYSYPIDNTCGV

SEQ ID NO: 49352 - DNA, 50 bp, Streptococcus agalactiae; identical to SEQ ID NO: 1792
  source 1..50: mol_type = genomic DNA

SEQ ID NO: 49353 - DNA, 40 bp, Streptococcus agalactiae; identical to SEQ ID NO: 23678
  source 1..40: mol_type = genomic DNA

SEQ ID NO: 49354 - DNA, 50 bp, Streptococcus agalactiae; identical to SEQ ID NO: 49194
  source 1..50: mol_type = genomic DNA

SEQ ID NO: 49355 - DNA, 40 bp, Streptococcus agalactiae; identical to SEQ ID NO: 49180
  source 1..40: mol_type = genomic DNA

SEQ ID NO: 49356 - protein, 590 aa, Streptococcus agalactiae
MKKDVKVIKGDTTLKRTASGCVQRSIKRVAAYCRVSTDTEDQINSYNSQVEHYTEFIQKNKEWTLAGIYADEAITGTQVDRRIDFQRLINDCMNGDIDMIITKSISRFARNTLDTLKYVRKLKEFNVAVFFEEENINTLTMDGELLLTILSSVAQQEVENISANVKKGLRMKMERGEMVGFQGCLGYDYDPETKSISINEKEAEIVRYIFRRYIEGVGGMVISRELEEQGYLSPRGNKRWTETTVLGIIKNEKYKGDLMMGKTYTVDPISKRRLDNFGEQDKFYIENHHEPIISEEDFEKAQGIRLRRAKNRNTVANNGGKREKYSRKYAFSSMLECGFCGHNLSRRNWHSSSEYTKVIWQCVNATKNGKKYCPHSKGIEEEAIEKAFMESYRQVCHNNVEITNEFLKTVEEELKDNSLAKDLKKITNQLDKILKKEKDLVELRLNESISMDIYQDKYNEIAISKEKLLAEKRTLEVTLTDEKALKKRLEGFKKLLESNKYLEEFDRAVFESIVDKIIIGGTNDEGEIDPAMITIIYKTGKKDSQDGRLFKSRRKNAKEVNEETDNKLYPHSSDEVNNLYSYPIDNTCGV

SEQ ID NO: 49357 - DNA, 50 bp, Streptococcus agalactiae; identical to SEQ ID NO: 1792
  source 1..50: mol_type = genomic DNA

SEQ ID NO: 49358 - DNA, 40 bp, Streptococcus agalactiae; identical to SEQ ID NO: 23678
  source 1..40: mol_type = genomic DNA

SEQ ID NO: 49359 - DNA, 50 bp, Streptococcus agalactiae; identical to SEQ ID NO: 49194
  source 1..50: mol_type = genomic DNA

SEQ ID NO: 49360 - DNA, 40 bp, Streptococcus agalactiae; identical to SEQ ID NO: 49180
  source 1..40: mol_type = genomic DNA

SEQ ID NO: 49361 - protein, 590 aa, Streptococcus agalactiae
MKRDVKVIKGDTTLKRTASGCVERSIKRVAAYCRVSTDTEDQINSYNSQVEHYTEFIQKNNEWTLAGIYADEAITGTQVDRRIDFQRLINDCINGDIDMIITKSISRFARNTLDTLKYVRKLKEFNVAVFFEEENINTLTMDGELLLTILSSVAQQEVENISANVKKGLRMKMERGEMVGFQGCLGYDYDPETKSISINEKEAEIVRYIFRRYIEGVGGMVISRELEEQGYLSPRGNKRWTETTVLGIIKNEKYKGDLMMGKTYTVDPISKRRLDNFGEQDKFYIENHHEPIISEEDFEKAQGIRLRRSKNRNTVANNGGKREKYSRKYAFSSMLECGFCGHNLSRRNWHSSSEYTKVIWQCVNATKNGKKYCPHSKGIEEEAIEKAFMESYRQVCHNNVEITNEFLKTVEEELKDNSLAKDLKKITNQLDKILKKEKDLVELRLNESISMDIYQDKYNEIAISKEKLLAEKRTLEVTLTDEKALKKRLEGFKKLLESNKYLEEFDRAVFESIVDKIIIGGTNDEGEIDPAMITIIYKTGKKDSQDGRLFKSRRKNAKEVNEETDNKLYPHSSDEVNNLYSYPIDNTCGV

SEQ ID NO: 49362 - DNA, 50 bp, Streptococcus agalactiae; identical to SEQ ID NO: 1792
  source 1..50: mol_type = genomic DNA

SEQ ID NO: 49363 - DNA, 40 bp, Streptococcus agalactiae; identical to SEQ ID NO: 23678
  source 1..40: mol_type = genomic DNA

SEQ ID NO: 49364 - DNA, 50 bp, Streptococcus agalactiae; identical to SEQ ID NO: 49194
  source 1..50: mol_type = genomic DNA

SEQ ID NO: 49365 - DNA, 40 bp, Streptococcus agalactiae; identical to SEQ ID NO: 49180
  source 1..40: mol_type = genomic DNA

SEQ ID NO: 49366 - protein, 590 aa, Streptococcus agalactiae
MKKEVKVIKGDTTLKRTASGCVERSIKRVAAYCRVSTDTEDQINSYNSQVEHYTEFIQKNNEWTLAGIYADEAITGTQVDRRIDFQRLINDCMNGDIDMIITKSISRFARNTLDTLKYVRKLKEFNVAVFFEEENINTLTMDGELLLTILSSVAQQEVENISANVKKGLRMKMERGEMVGFQGCLGYDYDPETKSISINEKEAEIVRYIFRRYIEGVGGMVISRELEEQGYLSPRGNKRWTETTVLGIIKNEKYKGDLMMGKTYTVDPISKRRLDNYGEQDKFYIENHHEPIISEEDFEKAQGIRLRRSKNRNTVANNGGKREKYSRKYAFSSMLECGFCGHNLSRRNWHSSSEYTKIIWQCVNATKNGKKYCPHSKGIEEEAIEKAFMESYRQVCHNNVEITNEFLKTVEEELKDNSLAKDLKKITNQLDKVLKKEKDLVELRLNESISMDIYQDKYNEIAISKEKLLAEKRTLEVTLTDEKALKKRLEGFKKLLESNKYLEEFDRAVFESIVDKIIIGGTNDEGEIDPAMITIIYKTGKKDSQDGRLFKSRRKNAKEVDEGTDNKLYPQSSDEVNNLCSYPMDNTCGV

SEQ ID NO: 49367 - DNA, 50 bp, Streptococcus agalactiae; identical to SEQ ID NO: 37077
  source 1..50: mol_type = genomic DNA

SEQ ID NO: 49368 - DNA, 40 bp, Streptococcus agalactiae; identical to SEQ ID NO: 23678
  source 1..40: mol_type = genomic DNA

SEQ ID NO: 49369 - DNA, 50 bp, Streptococcus agalactiae; identical to SEQ ID NO: 49209
  source 1..50: mol_type = genomic DNA

SEQ ID NO: 49370 - DNA, 40 bp, Streptococcus agalactiae; identical to SEQ ID NO: 49180
  source 1..40: mol_type = genomic DNA

SEQ ID NO: 49371 - protein, 590 aa, Streptococcus agalactiae
MKKDVKVIKGDTTLKRTASGCVERSIKRVAAYCRVSTDTEDQINSYNSQVEHYTEFIQKNNEWTLAGIYADEAITGTQVDRRIDFQRLINDCINGDIDMIITKSISRFARNTLDTLKYVRKLKEFNVAVFFEEENINTLTMDGELLLTILSSVAQQEVENISANVKKGLRMKMERGEMVGFQGCLGYDYDPETKSISINEKEAEIVRYIFRRYIEGVGGMVISRELEEQGYLSPRGNKRWTETTVLGIIKNEKYKGDLMMGKTYTVDPISKRRLDNYGEQDKFYIENHHEPIISEEVFEKAQGIRLRRSKNRNTVANNGGKREKYSRKYAFSSMLECGFCGHNLSRRNWHSSSEYTKVIWQCVNATKNGKKYCPHSKGIEEEAIEKAFMESYRQVCHNNVEITNEFLKTVEEELKDNSLAKDLKKITNQLDKVLKKEKDLVELRLNESISMDIYQDKYNEIAISKEKLLAEKRTLEVTLTDEKALKKRLEGFKKILESNKYLEKFDRAVFESIVDKIIIGGTNDEGEIDPAMITIIYKTGKKDSQDGRLFKSRRKNAKEVNEETDNKLYPQSSDEVNNLCSYPMDNTCGV

SEQ ID NO: 49372 - DNA, 50 bp, Streptococcus agalactiae; identical to SEQ ID NO: 1787
  source 1..50: mol_type = genomic DNA

SEQ ID NO: 49373 - DNA, 40 bp, Streptococcus agalactiae; identical to SEQ ID NO: 23678
  source 1..40: mol_type = genomic DNA

SEQ ID NO: 49374 - DNA, 50 bp, Streptococcus agalactiae; identical to SEQ ID NO: 49204
  source 1..50: mol_type = genomic DNA

SEQ ID NO: 49375 - DNA, 40 bp, Streptococcus agalactiae; identical to SEQ ID NO: 49180
  source 1..40: mol_type = genomic DNA

SEQ ID NO: 49376 - protein, 611 aa, Streptococcus agalactiae
MSWKCGIIKLHRKIQKKEAGAVKRDVKVIKGDTTLKRTASGCVERSIKRVAAYCRVSTDTEDQINSYNSQVEHYTDFIKQNNEWTLAGIYADEAITGTQVDRRIDFQRLINDCMNGDIDMVITKSISRFARNTLDTLKYVRKLKEYNVAVFFEEENINTLTMDGELLLTILSSVAQQEVENISANVKKGLRMKMERGEMVGFQGCLGYDYDPETKSISVNEKEAEIVRYIFRRYLEGVGGMVISRELEEQGYLSPRGHKRWTETTVLGIIKNEKYKGDLLMGKTFTVDPISKRRLDNFGEQDKFYIENHHESIISEEDFEKAQGIRLRRAKNRNTVANNGGKREKYSRKYAFSSMLECGFCGHMLSRRNWHSSSEYTKVIWQCVNATKNGKKYCPHSKGIEEEAIEKAFMESYRQVCHNNVEITNEFLKTVEEELKDNSLAKDLKKISNQLDKILKKEKDLVELRLNEAISMEIYQEKYNEIAISKEKLLEEKRTLEVTLTDEKALKKRLEGFKKLLESNKYLEEFDRTVFESIVDKIVIGGTNDDGDIDPAMITIIYKTGKKDSQNGRLFKSRRKNAKVVEENDGDKLYSQSSNEVNKLCSYSTDNTCGV

SEQ ID NO: 49377 - DNA, 50 bp, Streptococcus agalactiae; identical to SEQ ID NO: 49297
  source 1..50: mol_type = genomic DNA

SEQ ID NO: 49378 - DNA, 40 bp, Streptococcus agalactiae; identical to SEQ ID NO: 23678
  source 1..40: mol_type = genomic DNA

SEQ ID NO: 49379 - DNA, 50 bp, Streptococcus agalactiae; identical to SEQ ID NO: 49299
  source 1..50: mol_type = genomic DNA

SEQ ID NO: 49380 - DNA, 40 bp, Streptococcus agalactiae; identical to SEQ ID NO: 49180
  source 1..40: mol_type = genomic DNA

SEQ ID NO: 49381 - protein, 590 aa, Streptococcus agalactiae
MKRDVKVIKGDTTLKRTASGCVERSIKRVAAYCRVSTDTEDQINSYNSQVEHYTDFIKQNKEWTLAGIYADEAITGTQVDRRIDFQRLINDCMNGDIDMIITKSISRFARNTLDTLKYVRKLKEFNVAVFFEEENINTLTMDGELLLTILSSVAQQEVENISANVKKGLRMKMERGEMVGFQGCLGYDYDPETKSISINEKEAEIVRYIFRRYIEGVGGMVISRELEEQGYLSPRGNKRWTETTVLGIIKNEKYKGDLMMGKTYTVDPISKRRLDNFGEQDKFYIENHHEPIISEEDFEKAQGIRLRRSKNRNTVANNGGKREKYSRKYAFSSMLECGFCGHNLSRRNWHSSSEYTKVIWQCVNATKNGKKYCPHSKGIEEEAIEKAFMESYRQVCHNNVEITNEFLKTVEEELKDNSLAKDLKKITNQLDKILKKEKDLVELRLNESISMDIYQDKYNEIAISKEKLLAEKRTLEVTLTDEKALKKRLEGFKKLLESNKYLEEFDRAVFESIVDKIIIGGTNDEGEIDPAMITIIYKTGKKDSQDGRLFKSRRKNAKEVNEETDNKLYPHSSDEVNNLYSYPIDNTCGV

SEQ ID NO: 49382 - DNA, 50 bp, Streptococcus agalactiae; identical to SEQ ID NO: 19692
  source 1..50: mol_type = genomic DNA

SEQ ID NO: 49383 - DNA, 40 bp, Streptococcus agalactiae; identical to SEQ ID NO: 23678
  source 1..40: mol_type = genomic DNA

SEQ ID NO: 49384 - DNA, 50 bp, Streptococcus agalactiae; identical to SEQ ID NO: 49189
  source 1..50: mol_type = genomic DNA

SEQ ID NO: 49385 - DNA, 40 bp, Streptococcus agalactiae; identical to SEQ ID NO: 49180
  source 1..40: mol_type = genomic DNA

SEQ ID NO: 49386 - protein, 611 aa, Streptococcus agalactiae
MSWKCGIIKLHRKIQKKEAGAVKRDVKVIKGDTTLKRTASGCVERSIKRVAAYCRVSTDTEDQINSYNSQVEHYTDFIKQNNEWTLAGIYADEAITGTQVDRRIDFQRLINDCMNGDIDMVITKSISRFARNTLDTLKYVRKLKEYNVAVFFEEENINTLTMDGELLLTILSSVAQQEVENISANVKKGLRMKMERGEMVGFQGCLGYDYDPETKSISVNEKEAEIVRYIFRRYLEGVGGMVISRELEEQGYLSPRGHKRWTETTVLGIIKNEKYKGDLLMGKTFTVDPISKRRLDNFGEQDKFYIENHHEPIISEEDFEKAQGIRLRRAKNRNTVANNGGKREKYSRKYAFSSMLECGFCGHMLSRRNWHSSSEYTKVIWQCVNATKNGKKYCPHSKGIEEEAIEKAFMESYRQVCHNNVEITNEFLKTVEEELKDNSLAKDLKKISNQLDKILKKEKDLVELRLNEAISMEIYQEEYNEIAISKEKLLEEKRTLEVTLTDEKALKKRLEGFKKLLESNKYLEEFDRTVFESIVDKIVIGGTNDDGDIDPAMITIIYKTGKKDSQNGRLFKSRRKNAKVVEENDGDKLYSQSSNEVNKLCSYSTDNTCGV

SEQ ID NO: 49387 - DNA, 50 bp, Streptococcus agalactiae; identical to SEQ ID NO: 19727
  source 1..50: mol_type = genomic DNA

SEQ ID NO: 49388 - DNA, 40 bp, Streptococcus agalactiae; identical to SEQ ID NO: 23678
  source 1..40: mol_type = genomic DNA

SEQ ID NO: 49389 - DNA, 50 bp, Streptococcus agalactiae; identical to SEQ ID NO: 49184
  source 1..50: mol_type = genomic DNA

SEQ ID NO: 49390 - DNA, 40 bp, Streptococcus agalactiae; identical to SEQ ID NO: 49180
  source 1..40: mol_type = genomic DNA

SEQ ID NO: 49391 - protein, 590 aa, Streptococcus agalactiae
MKKEVKVIKGDTTLKRTASGCVERSIKRVAAYCRVSTDTEDQINSYNSQVEHYTEFIQKNNEWTLAGIYADEAITGTQVDRRIDFQRLINDCMNGDIDMIITKSISRFARNTLDTLKYVRKLKEFNVAVFFEEENINTLTMDGELLLTILSSVAQQEVENISANVKKGLRMKMERGEMVGFQGCLGYDYDPETKSISINEKEAEIVRYIFRRYIEGVGGMVISRELEEQGYLSPRGNKRWTETTVLGIIKNEKYKGDLMMGKTYTVDPISKRRLDNYGEQDKFYIENHHEPIISEEDFEKAQGIRLRRSKNRNTVANNGGKREKYSRKYAFSSMLECGFCGHNLSRRNWHSSSEYTKVIWQCVNATKNGKKYCPHSKGIEEEAIEKAFMESYRQVCHNNVEITNEFLKTVEEELKDNSLAKDLKKITNQLDKILKKEKDLVELRLNESISMDIYQDKYNEIAISKEKLLAEKRTLEVTLTDEKALKKRLEGFKKLLESNKYLEEFDRAVFESIVDKIIIGGTNDEGEIDPAMITIIYKTGKKDSQDGRLFKSRRKNAKEVNEKADSKLYPQSSDEVNNLYSYPIDNTCGV

SEQ ID NO: 49392 - DNA, 50 bp, Streptococcus agalactiae; identical to SEQ ID NO: 19692
  source 1..50: mol_type = genomic DNA

SEQ ID NO: 49393 - DNA, 40 bp, Streptococcus agalactiae; identical to SEQ ID NO: 23678
  source 1..40: mol_type = genomic DNA

SEQ ID NO: 49394 - DNA, 50 bp, Streptococcus agalactiae; identical to SEQ ID NO: 49189
  source 1..50: mol_type = genomic DNA

SEQ ID NO: 49395 - DNA, 40 bp, Streptococcus agalactiae; identical to SEQ ID NO: 49180
  source 1..40: mol_type = genomic DNA

SEQ ID NO: 49396 - protein, 590 aa, Streptococcus agalactiae; identical to SEQ ID NO: 49336

SEQ ID NO: 49397 - DNA, 50 bp, Streptococcus agalactiae; identical to SEQ ID NO: 1787
  source 1..50: mol_type = genomic DNA

SEQ ID NO: 49398 - DNA, 40 bp, Streptococcus agalactiae; identical to SEQ ID NO: 23678
  source 1..40: mol_type = genomic DNA

SEQ ID NO: 49399 - DNA, 50 bp, Streptococcus agalactiae; identical to SEQ ID NO: 49204
  source 1..50: mol_type = genomic DNA

SEQ ID NO: 49400 - DNA, 40 bp, Streptococcus agalactiae; identical to SEQ ID NO: 49180
  source 1..40: mol_type = genomic DNA

SEQ ID NO: 49401 - protein, 590 aa, Streptococcus agalactiae
MKKDVKVIKGDTTLKRTASGCVERSIKRVAAYCRVSTDSEDQINSYNSQVEHYTEFIQKNNEWTLAGIYADEAITGTQVDRRIDFQRLINDCMNGDIDMIITKSISRFARNTLDTLKYVRKLKEFNVAVFFEEENINTLTMDGELLLTILSSVAQQEVENISANVKKGLRMKMERGEMVGFQGCLGYDYDPETKSISINEKEAEIVRYIFRRYIEGVGGMVISRELEEQGYLSPRGNKRWTETTVLGIIKNEKYKGDLMMGKTYTVDPISKRRLDNFGEQDKFYIENHHEPIISEEDFEKAQGIRLRRSKNRNTVANNGGKREKYSRKYAFSSMLECGFCGHNLSRRNWHSSSEYTKVIWQCVNATKNGKKYCPHSKGIEEEAIEKAFMESYRQVCHNNVEITNEFLKTVEEELKDNSLAKDLKKITNQLDKILKKEKDLVELRLNESISMDIYQDKYNEIAISKEKLLAEKRTLEVTLTDEKALKKRLEGFKKLLESNKYLEEFDRAVFESIVDKIIIGGTNDEGEIDPAMITIIYKTGKKDSQDGRLFKSRRKNAKKVNEETDNKLYPHSSDEVSNLYSYPIDNTCGV

SEQ ID NO: 49402 - DNA, 50 bp, Streptococcus agalactiae; identical to SEQ ID NO: 1792
  source 1..50: mol_type = genomic DNA

SEQ ID NO: 49403 - DNA, 40 bp, Streptococcus agalactiae; identical to SEQ ID NO: 23678
  source 1..40: mol_type = genomic DNA

SEQ ID NO: 49404 - DNA, 50 bp, Streptococcus agalactiae; identical to SEQ ID NO: 49194
  source 1..50: mol_type = genomic DNA

SEQ ID NO: 49405 - DNA, 40 bp, Streptococcus agalactiae; identical to SEQ ID NO: 49180
  source 1..40: mol_type = genomic DNA

SEQ ID NO: 49406 - protein, 590 aa, Streptococcus agalactiae
MKKEVKVIKGDTTLKRTASGCVERSIKRVAAYCRVSTDTEDQINSYNSQVEHYTEFIQKNKEWTLAGIYADEAITGTQVDRRIDFQRLINDCMNGDIDMIITKSISRFARNTLDTLKYVRKLKEFNVAVFFEEENINTLTMDGELLLTILSSVAQQEVENISANVKKGLRMKMERGEMVGFQGCLGYDYDPETKSISINEKEAEIVRYIFRRYIEGVGGMVISRELEEQGYLSPRGNKKWTETTVLGIIKNEKYKGDLMMGKTYTVDPISKRRLDNYGEQDKFYIENHHEPIISEEDFEKAQGIRLRRSKNRNTVANNGGKREKYSRKYAFSSMLECGFCGHNLSRRNWHSSSEYTKVIWQCVNATKNGKKYCPHSKGIEEEAIEKAFMESYRQVCHNNVEITNEFLKTVEEELKDNSLAKDLKKITNQLDKVLKKEKDLVELRLNESISMDIYQDKYNEIAISKEKLLAEKRTLEVTLTDEKALKKRLEGFKKLLESNKYLEEFDRAVFESIVDKIIIGGTNDEGEIDPAMITIIYKTGKKDSQDGRLFKSRRKNAKEVDEGTDNKLYPQSSDEVNNLCSYPMDNTCGV

SEQ ID NO: 49407 - DNA, 50 bp, Streptococcus agalactiae; identical to SEQ ID NO: 1787
  source 1..50: mol_type = genomic DNA

SEQ ID NO: 49408 - DNA, 40 bp, Streptococcus agalactiae; identical to SEQ ID NO: 23678
  source 1..40: mol_type = genomic DNA

SEQ ID NO: 49409 - DNA, 50 bp, Streptococcus agalactiae; identical to SEQ ID NO: 49204
  source 1..50: mol_type = genomic DNA

SEQ ID NO: 49410 - DNA, 40 bp, Streptococcus agalactiae; identical to SEQ ID NO: 49180
  source 1..40: mol_type = genomic DNA

SEQ ID NO: 49411 - protein, 611 aa, Streptococcus agalactiae
MSWKCDIIKLHRKIQKKEAGAVKRDVKVIKGDTTLKRTASGCVERSIKRVAAYCRVSTDTEDQINSYNSQVEHYTDFIKQNNEWTLAGIYADEAITGTQVDRRIDFQRLINDCMNGDIDMVITKSISRFARNTLDTLKYVRKLKEYNVAVFFEEENINTLTMDGELLLTILSSVAQQEVENISANVKKGLRMKMERGEMVGFQGCLGYDYDPETKSISVNEKEAEIVRYIFRRYLEGVGGMVISRELEEQGYLSPRGHKRWTETTVLGIIKNEKYKGDLLMGKTFTVDPISKRRLDNFGEQDKFYIENHHEPIISEEDFEKAQGIRLRRAKNRNTVANNGGKREKYSRKYAFSSMLECGFCGHMLSRRNWHSSSEYTKVIWQCVNATKNGKKYCPHSKGIEEEAIEKAFMESYRQVCHNNVEITNEFLKTVEEELKDNSLAKDLKKISNQLDKILKKEKDLVELRLNEAISMEIYQEKYNEIAISKEKLLEEKRTLEVTLTDEKALKKRLEGFKKLLESNKYLEEFDRTVFESIVDKIVIGGTNDDGDIDPAMITIIYKTGKKDSQNGRLFKSRRKNAKVVEENDGDKLYSQSSNEVNKLCSYSTDNTCGV

SEQ ID NO: 49412 - DNA, 50 bp, Streptococcus agalactiae; identical to SEQ ID NO: 19727
  source 1..50: mol_type = genomic DNA

SEQ ID NO: 49413 - DNA, 40 bp, Streptococcus agalactiae; identical to SEQ ID NO: 23678
  source 1..40: mol_type = genomic DNA

SEQ ID NO: 49414 - DNA, 50 bp, Streptococcus agalactiae; identical to SEQ ID NO: 49184
  source 1..50: mol_type = genomic DNA

SEQ ID NO: 49415 - DNA, 40 bp, Streptococcus agalactiae; identical to SEQ ID NO: 49180
  source 1..40: mol_type = genomic DNA

SEQ ID NO: 49416 - protein, 590 aa, Streptococcus agalactiae
MKKEVKVIKGDTTLKRTASGCVERSIKRVAAYCRVSTDTEDQINSYNSQVEHYTEFIQKNNEWTLAGIYADEAITGTQVDRRIDFQRLINDCMNGDIDMIITKSISRFARNTLDTLKYVRKLKEFNVAVFFEEENINTLTMDGELLLTILSSVAQQEVENISANVKKGLRMKMERGEMVGFQGCLGYDYDPETKSISINEKEAKIVRYIFRRYIEGVGGMVISRELEEQGYLSPRGNKKWTETTVLGIIKNEKYKGDLMMGKTYTVDPISKRRLDNYGEQDKFYIENHHEPIISEEDFEKAQGIRLRRSKNRNTVANNGGKREKYSRKYAFSSMLECGFCGHNLSRRNWHSSSEYTKVIWQCVNATKNGKKYCPHSKGIEEEAIEKAFMESYRQVCHNNVEITNEFLKTVEEELKDNSLAKDLKKITNQLDKVLKKEKDLVELRLNESISMDIYQDKYNEIAISKEKLLAEKRTLEVTLTDEKALKKRLEGFKKLLESNKYLEEFDRAVFESIVDKIIIGGTNDEGEIDPAMITIIYKTGKKDSQDGRLFKSRRKNAKEVDEGTDNKLYPQSSDEVNNLCSYPMDNTCGV

SEQ ID NO: 49417 - DNA, 50 bp, Streptococcus agalactiae; identical to SEQ ID NO: 37077
  source 1..50: mol_type = genomic DNA

SEQ ID NO: 49418 - DNA, 40 bp, Streptococcus agalactiae; identical to SEQ ID NO: 23678
  source 1..40: mol_type = genomic DNA

SEQ ID NO: 49419 - DNA, 50 bp, Streptococcus agalactiae; identical to SEQ ID NO: 49209
  source 1..50: mol_type = genomic DNA

SEQ ID NO: 49420 - DNA, 40 bp, Streptococcus agalactiae; identical to SEQ ID NO: 49180
  source 1..40: mol_type = genomic DNA

SEQ ID NO: 49421 - protein, 590 aa, Streptococcus agalactiae
MKKEVKVIKGDTTLKRTASGCVERSIKRVAAYCRVSTDTEDQINSYNSQVEHYTEFIQKNNEWTLAGIYADEAITGTQVDRRIDFQRLINDCMNGDIDMIITKSISRFARNTLDTLKYVRKLKEFNVAVFFEEENINTLTMDGELLLTILSSVAQQEVENISANVKKGLRMKMERGEMVGFQGCLGYDYDPETKSISINEKEAEIVRYIFRRYIEGVGGMVISRELEEQGYLSPRGNKRWTETTVLGIIKNEKYKGDLMMGKTYTVDPISKRRLDNFGEQDKFYIENHHEPIISEEDFEKAQGIRLRRSKNRNTVANNGGKREKYSRKYAFSSMLECGFCGHNLSRRNWHSSSEYTKVIWQCVNATKNGKKYCPHSKGIEEEAIEKAFMESYRQVCHNNVEITNEFLKTVEEELKDNSLAKDLKKITNQLDKILKKEKDLVELRLNESISMDIYQDKYNEIAISKEKLLAEKRTLEVTLTDEKALKKRLEGFKKLLESNKYLEEFDRAVFESIVDKIIIGGTNDEGEIDPAMITIIYKTGKKDSQDGRLFKSRRKNAKEVNEETDNKLYPHSSDEVNNLYSYPIDNTCGV

SEQ ID NO: 49422 - DNA, 50 bp, Streptococcus agalactiae; identical to SEQ ID NO: 1792
  source 1..50: mol_type = genomic DNA

SEQ ID NO: 49423 - DNA, 40 bp, Streptococcus agalactiae; identical to SEQ ID NO: 23678
  source 1..40: mol_type = genomic DNA

SEQ ID NO: 49424 - DNA, 50 bp, Streptococcus agalactiae; identical to SEQ ID NO: 49194
  source 1..50: mol_type = genomic DNA

SEQ ID NO: 49425 - DNA, 40 bp, Streptococcus agalactiae; identical to SEQ ID NO: 49180
  source 1..40: mol_type = genomic DNA

SEQ ID NO: 49426 - protein, 590 aa, Streptococcus agalactiae
MKKDVKVIKGDTTLKRTASGCVERSIKRVAAYCRVSTDTEDQINSYNSQVEHYTEFIQKNKEWTLAGIYADEAITGTQVDRRIDFQRLINDCMNGDIDMIITKSISRFARNTLDTLKYVRKLKEFNVAVFFEEENINTLTMDGELLLTILSSVAQQEVENISANVKKGLRMKMERGEMVGFQGCLGYDYDPETKSISINEKEAEIVRYIFRRYIEGVGGMVISRELEEQGYLSPRGNKRWTETTVLGIIKNEKYKGDLMMGKTYTVDPISKRRLDNFGEQDKFYIENHHEPIISEEDFEKAQGIRLRRSKNRNTVANNGGKREKYSRKYAFSSMLECGFCGHNLSRRNWHSSSEYTKVIWQCVNATKNGKKYCPHSKGIEEEAIEKAFMESYRQVCHNNVEITNEFLKTVEEELKDNSLAKDLKKITNQLDKILKKEKDLVELRLNESISMDIYQDKYNEIAISKEKLLAEKRTLEVTLTDEKALKKRLEGFKKLLESNKYLEEFDRAVFESIVDKIIIGGTNDEGEIDPAMITIIYKTGKKDSQDGRLFKSRRKNAKEVNEETDNKLYPRSSDEVNNLCSYPMDNTCGV

SEQ ID NO: 49427 - DNA, 50 bp, Streptococcus agalactiae; identical to SEQ ID NO: 1787
  source 1..50: mol_type = genomic DNA

SEQ ID NO: 49428 - DNA, 40 bp, Streptococcus agalactiae; identical to SEQ ID NO: 23678
  source 1..40: mol_type = genomic DNA

SEQ ID NO: 49429 - DNA, 50 bp, Streptococcus agalactiae; identical to SEQ ID NO: 49204
  source 1..50: mol_type = genomic DNA

SEQ ID NO: 49430 - DNA, 40 bp, Streptococcus agalactiae; identical to SEQ ID NO: 49180
  source 1..40: mol_type = genomic DNA

SEQ ID NO: 49431 - protein, 610 aa, Streptococcus agalactiae
MFCKCGIIELHRKIQKGGGAVKKEVKVIKGDTTLKRTASGCVQRSIKRVAAYCRVSTDTEDQINSYNSQVEHYTEFIQKNKEWTLAGIYADEAITGTQVDRRIDFQRLINDCMNGDIDMIITKSISRFARNTLDTLKYVRKLKEFNVAVFFEEENINTLTMDGELLLTILSSVAQQEVENISANVKKGLRMKMERGEMVGFQGCLGYDYDPETKSISINEKEAEIVRYIFRRYIEGVGGMVISRELEEQGYLSPRGNKRWTETTVLGIIKNEKYKGDLMMGKTYTVDPISKRRLDNFGEQDKFYIENHHEPIISEEDFEKAQGIRLRRSKNRNTVANNGGKREKYSRKYAFSSMLECGFCGHNLSRRNWHSSSEYTKVIWQCVNATKNGKKYCPHSKGIEEEAIEKAFMESYRQVCHNNVEITNEFLKTVEEELKDNSLAKDLKKITNQLDKILKKEKDLVELRLNESISMDIYQNKYNEIAISKEKLLAEKRTLEVTLTDEKALKKRLEGFKKLLESNKYLEEFDRAVFESIVDKIIIGGTNDEGEIDPAMITIIYKTGKKDSQDGRLFKSRRKNAKEVNEETDNKLYPHSSDEVNNLYSYPIDNTCGV

SEQ ID NO: 49432 - DNA, 50 bp, Streptococcus agalactiae; identical to SEQ ID NO: 19692
  source 1..50: mol_type = genomic DNA

SEQ ID NO: 49433 - DNA, 40 bp, Streptococcus agalactiae; identical to SEQ ID NO: 23678
  source 1..40: mol_type = genomic DNA

SEQ ID NO: 49434 - DNA, 50 bp, Streptococcus agalactiae; identical to SEQ ID NO: 49189
  source 1..50: mol_type = genomic DNA

SEQ ID NO: 49435 - DNA, 40 bp, Streptococcus agalactiae; identical to SEQ ID NO: 49180
  source 1..40: mol_type = genomic DNA

SEQ ID NO: 49436 - protein, 585 aa, Streptococcus agalactiae
MNTKVKVIKASNTGARNRNSIHLDLKRVAAYCRVSTDSKDQLESYKSQVDYYTNLIKNNKSWTLAGIYADEATTGTTATKRADFIRLISDCQNGDIDMIITKSISRFARNTLDTLKYVRLLKENNVGVVFEEENIDTLTMDGELLLTILSSVAQQEVENTSAHVKKGLKMKMEKGELIGFQGCLGYDYDPTTKSISINEEEAKIVRYIFKRYLEGNGGSVIGRELEEQGYLTPRGKTKWSDTTVLGIIKNEKYIGDILMGKTFTVDPITKRRLANFGESDKYHIENHHEPIISREDFEKAQEIRLRRAQNRNTIANKDRKREKLSRQYAFSSMLECGFCGEILSRRTWHTSSIYKKINWQCVKSTKKGKKYCPHSKGIQEAAIEKAFVESYRQLCHADSTVIDDFLKIVEEEINDNTLVKDLKKLENQLNRIISQERKLVDLHLEDSIDEEVYAKKYKKLTKQKEELLDEKKTLELTIKDENSIKERLKQFKKVLENKEIIEEFNRTVFESIVDKVVVGRIDKDGTVHPYDLTFYFKTGDKDSQDSNNFKDKRKNAKDNDINKLCSYKDDEDKKLCSQSKDNTCG

SEQ ID NO: 49437 - DNA, 50 bp, Streptococcus agalactiae
  source 1..50: mol_type = genomic DNA
atgttcccaatcaaaagacaacacatgtggagactatagcgttgatacaa

SEQ ID NO: 49438 - DNA, 40 bp, Streptococcus agalactiae; identical to SEQ ID NO: 23678
  source 1..40: mol_type = genomic DNA

SEQ ID NO: 49439 - DNA, 50 bp, Streptococcus agalactiae
  source 1..50: mol_type = genomic DNA
atgttcccaatcaaaagacaacactggtggagactatagcgttgatacaa

SEQ ID NO: 49440 - DNA, 40 bp, Streptococcus agalactiae; identical to SEQ ID NO: 49180
  source 1..40: mol_type = genomic DNA

SEQ ID NO: 49441 - protein, 590 aa, Streptococcus agalactiae
MKKDVKVIKGDTTLKRTASGCVERSIKRVAAYCRVSTDTEDQINSYNSQVEHYTEFIQKNNEWTLAGIYADEAITGTQVDRRIDFQRLINDCINGDIDMIITKSISRFARNTLDTLKYVRKLKEFNVAVFFEEENINTLTMDGELLLTILSSVAQQEVENISANVKKGLRMKMERGEMVGFQGCLGYDYDPETKSISINEKEAEIVRYIFRRYIEGVGGMVISRELEEQGYLSPRGNKRWTETTVLGIIKNEKYKGDLMMGKTYTVDPISKRRLDNYGEQDKFYIENHHEPIISEEVFEKAQGIRLRRSKNRNTVANNGGKREKYSRKYAFSSMLECGFCGHNLSRRNWHSSSEYTKVIWQCVNATKNGKKYCPHSKGIEEEAIEKAFMESYRQVCHNNVEITNEFLKTVEEELKDNSLAKDLKKITNQLDKILKKEKDLVELRLNDSISMDIYQDKYNEIAISKEKLLAEKRTLEVTLTDEKALKKRLEGFKKLLESNKYLEEFDRAVFESIVDKIIIGGTNDEGEIDPAMITIIYKTGKKDSQDGRLFKSRRKNAKEVDEGTDNKLYPQSSDEVNNLCSYPIDNTCGV

SEQ ID NO: 49442 - DNA, 50 bp, Streptococcus agalactiae; identical to SEQ ID NO: 49232
  source 1..50: mol_type = genomic DNA

SEQ ID NO: 49443 - DNA, 40 bp, Streptococcus agalactiae; identical to SEQ ID NO: 23678
  source 1..40: mol_type = genomic DNA

SEQ ID NO: 49444 - DNA, 50 bp, Streptococcus agalactiae; identical to SEQ ID NO: 49234
  source 1..50: mol_type = genomic DNA

SEQ ID NO: 49445 - DNA, 40 bp, Streptococcus agalactiae; identical to SEQ ID NO: 49180
  source 1..40: mol_type = genomic DNA

SEQ ID NO: 49446 - protein, 435 aa, Streptococcus agalactiae
MSWKCGIIKLHRKIQKKEAGAVKRDVKVIKGDTTLKRTASGCVERSIKRVAAYCRVSTDTEDQINSYNSQVEHYTDFIKQNNEWTLAGIYADEAITGTQVDRRIDFQRLINDCMNGDIDMVITKSISRFARNTLDTLKYVRKLKEYNVAVFFEEENINTLTMDGELLLTILSSVAQQEVENISANVKKGLRMKMERGEMVGFQGCLGYDYDPETKSISVNEKEAEIVRYIFRRYLEGVGGMVISRELEEQGYLSPRGHKRWTETTVLGIIKNEKYKGDLLMGKTFTVDPISKRRLDNFGEQDKFYIENHHEPIISEEDFEKAQGIRLRRAKNRNTVANNGGKREKYSRKYAFSSMLECGFCGHMLSRRNWHSSSEYTKVIWQCVNATKNGKKYCPHSKGIEEEAIEKAFMESYRQVCHNNVEITKWRYIKRNIMK

SEQ ID NO: 49447 - DNA, 50 bp, Streptococcus agalactiae; identical to SEQ ID NO: 19727
  source 1..50: mol_type = genomic DNA

SEQ ID NO: 49448 - DNA, 40 bp, Streptococcus agalactiae; identical to SEQ ID NO: 23678
  source 1..40: mol_type = genomic DNA

SEQ ID NO: 49449 - DNA, 50 bp, Streptococcus agalactiae; identical to SEQ ID NO: 49184
  source 1..50: mol_type = genomic DNA

SEQ ID NO: 49450 - DNA, 40 bp, Streptococcus agalactiae; identical to SEQ ID NO: 49180
  source 1..40: mol_type = genomic DNA

SEQ ID NO: 49451 - protein, 590 aa, Streptococcus agalactiae
MKKEVKVIKGDTTLKRTASGCVERSIKRVAAYCRVSTDTEDQINSYNSQVEHYTEFIQKNKEWTLAGIYADEAITGTQVDRRIDFQRLINDCMNGDIDMIITKSISRFARNTLDTLKYVRKLKEFNVAVFFEEENINTLTMDGELLLTILSSVAQQEVENISANVKKGLRMKMERGEMVGFQGCLGYDYDPETKSISINEKEAEIVRYIFRRYIEGVGGMVISRELEEQGYLSPRGNKRWTETTVLGIIKNEKYKGDLMMGKTYTVDPISKRRLDNFGEQDKFYIENHHEPIISEEDFEKAQGIRLRRSKNRNTVANNGGKREKYSRKYAFSSMLECGFCGHNLSRRNWHSSSEYTKVIWQCVNATKNGKKYCPHSKGIEEEAIEKAFMESYRQVCHNNVEITNEFLKTVEEELKDNSLAKDLKKITNQLDKILKKEKDLVELRLNESISMDIYQDKYNEIAISKEKLLAEKRTLEVTLTDEKALKKRLEGFKKLLESNKYLEEFDRAVFESIVDKIIIGGTNDEGEIDPAMITIIYKTGKKDSQDGRLFKSRRKNAKEVDEGTANKLYPQSSDEVNNLCSYPMDNTCGV

SEQ ID NO: 49452 - DNA, 50 bp, Streptococcus agalactiae; identical to SEQ ID NO: 1787
  source 1..50: mol_type = genomic DNA

SEQ ID NO: 49453 - DNA, 40 bp, Streptococcus agalactiae; identical to SEQ ID NO: 23678
  source 1..40: mol_type = genomic DNA

SEQ ID NO: 49454 - DNA, 50 bp, Streptococcus agalactiae; identical to SEQ ID NO: 49204
  source 1..50: mol_type = genomic DNA

SEQ ID NO: 49455 - DNA, 40 bp, Streptococcus agalactiae; identical to SEQ ID NO: 49180
  source 1..40: mol_type = genomic DNA

SEQ ID NO: 49456 - protein, 579 aa, Streptococcus agalactiae
MWYNRTASGCVQRSIKRVAAYCRVSTDTEDQINSYNSQVEHYTEFIQKNKEWTLAGIYADEAITGTQVDRRIDFQRLINDCMNGDIDMIITKSISRFARNTLDTLKYVRKLKEFNVAVFFEEENINTLTMDGELLLTILSSVAQQEVENISANVKKGLRMKMERGEMVGFQGCLGYDYDPETKSISINEKEAEIVRYIFRRYIEGVGGMVISRELEEQGYLSPRGNKRWTETTVLGIIKNEKYKGDLMMGKTYTVDPISKRRLDNFGEQDKFYIENHHEPIISEEDFEKAQGIRLRRSKNRNTVANNGGKREKYSRKYAFSSMLECGFCGHNLSRRNWHSSSEYTKVIWQCVNATKNGKKYCPHSKGIEEEAIEKAFMESYRQVCHNNVEITNEFLKTVEEELKDNSLAKDLKKITNQLDKILKKEKDLVELRLNESISMDIYQDKYNEIAISKEKLLAEKRTLEVTLTDEKALKKRLEGFKKLLESNKYLEEFDRSVFESIVDKIIIGGTNDEGEIDPAMITIIYKTGKKDSQDGRLFKSRRKNAKEVNEETDNKLYPHSSDEVNNLYSYPIDNTCGV

SEQ ID NO: 49457 - DNA, 50 bp, Streptococcus agalactiae; identical to SEQ ID NO: 1792
  source 1..50: mol_type = genomic DNA

SEQ ID NO: 49458 - DNA, 40 bp, Streptococcus agalactiae; identical to SEQ ID NO: 23678
  source 1..40: mol_type = genomic DNA

SEQ ID NO: 49459 - DNA, 50 bp, Streptococcus agalactiae; identical to SEQ ID NO: 49194
  source 1..50: mol_type = genomic DNA

SEQ ID NO: 49460 - DNA, 40 bp, Streptococcus agalactiae; identical to SEQ ID NO: 49180
  source 1..40: mol_type = genomic DNA

SEQ ID NO: 49461 - protein, 590 aa, Streptococcus agalactiae; identical to SEQ ID NO: 49321

SEQ ID NO: 49462 - DNA, 50 bp, Streptococcus agalactiae
  source 1..50: mol_type = genomic DNA
gtgttcctatcctatggacaacacacgtggagtgcatagcgttgatacaa

SEQ ID NO: 49463 - DNA, 40 bp, Streptococcus agalactiae; identical to SEQ ID NO: 23678
  source 1..40: mol_type = genomic DNA

SEQ ID NO: 49464 - DNA, 50 bp, Streptococcus agalactiae; identical to SEQ ID NO: 49204
  source 1..50: mol_type = genomic DNA

SEQ ID NO: 49465 - DNA, 40 bp, Streptococcus agalactiae; identical to SEQ ID NO: 49180
  source 1..40: mol_type = genomic DNA

SEQ ID NO: 49466 - protein, 590 aa, Streptococcus agalactiae
MKKDVKVIKGDTTLKRTASGCVERSIKRVAAYCRVSTDTEDQINSYNSQVEHYTEFIQKNNEWTLAGIYADEAITGTQVDRRIDFQRLINDCINGDIDMIITKSISRFARNTLDTLKYVRKLKEFNVAVFFEEENINTLTMDGELLLTILSSVAQQEVENISANVKKGLRMKMERGEMVGFQGCLGYDYDPETKSISINEKEAEIVRYIFRRYIEGVGGMVISRELEEQGYLSPRGNKRWTETTVLGIIKNEKYKGDLMMGKTYTVDPISKRRLDNYGEQDKFYIESHHEPIISEEVFEKAQGIRLRRSKNRNTVANNGGKREKYSRKYAFSSMLECGFCGHNLSRRNWHSSSEYTKVIWQCVNATKNGKKYCPHSKGIEEEAIEKAFMESYRQVCHNNVEITNEFLKTVEEELKDNSLAKDLKKITNQLDKVLKKEKDLVELRLNESISMDIYQDKYNEIAISKEKLLAEKRTLEVTLTDEKALKKRLEGFKKILESNKYLEKFDRAVFESIVDKIIIGGTNDEGEIDPAMITIIYKTGKKDSQDGRLFKSRRKNAKEVNEETDNKLYPQSSDEVNNLCSYPMDNTCGV

SEQ ID NO: 49467 - DNA, 50 bp, Streptococcus agalactiae; identical to SEQ ID NO: 1787
  source 1..50: mol_type = genomic DNA

SEQ ID NO: 49468 - DNA, 40 bp, Streptococcus agalactiae; identical to SEQ ID NO: 23678
  source 1..40: mol_type = genomic DNA

SEQ ID NO: 49469 - DNA, 50 bp, Streptococcus agalactiae; identical to SEQ ID NO: 49204
  source 1..50: mol_type = genomic DNA

SEQ ID NO: 49470 - DNA, 40 bp, Streptococcus agalactiae; identical to SEQ ID NO: 49180
  source 1..40: mol_type = genomic DNA

SEQ ID NO: 49471 - protein, 611 aa, Streptococcus agalactiae
MFCKCGIIRLHRKIQKKEADAVKKEVKVIKGDTTLKRTASGCVERSIKRVAAYCRVSTDTEDQINSYNSQVEHYTEFIQKNKEWTLAGIYADEAITGTQVDRRIDFQRLINDCMNGDIDMIITKSISRFARNTLDTLKYVRKLKEFNVAVFFEEENINTLTMDGELLLTILSSVAQQEVENISANVKKGLRMKMERGEMVGFQGCLGYDYDPETKSISINEKEAEIVRYIFRRYIEGVGGMVISRELEEQGYLSPRGNKRWTETTVLGIIKNEKYKGDLMMGKTYTVDPISKRRLDNFGEQDKFYIENHHEPIISEEDFEKAQGIRLRRSKNRNTVANNGGKREKYSRKYAFSSMLECGFCGHNLSRRNWHSSSEYTKVIWQCVNATKNGKKYCPHSKGIEEEAIEKAFMESYRQVCHNNVEITNEFLKTVEEELKDNSLAKDLKKITNQLDKILKKEKDLVELRLNESISMDIYQDKYNEIAISKEKLLAEKRTLEVTLTDEKALKKRLEGFKKLLESNKYLEEFDRAVFESIVDKIIIGGTNDEGEIDPAMITIIYKTGKKDSQDGRLFKSRRKNAKEVNEETDNKLYPHSSDEVNNLYSYPIDNTCGV

SEQ ID NO: 49472 - DNA, 50 bp, Streptococcus agalactiae; identical to SEQ ID NO: 19692
  source 1..50: mol_type = genomic DNA

SEQ ID NO: 49473 - DNA, 40 bp, Streptococcus agalactiae; identical to SEQ ID NO: 23678
  source 1..40: mol_type = genomic DNA

SEQ ID NO: 49474 - DNA, 50 bp, Streptococcus agalactiae; identical to SEQ ID NO: 49189
  source 1..50: mol_type = genomic DNA

SEQ ID NO: 49475 - DNA, 40 bp, Streptococcus agalactiae; identical to SEQ ID NO: 49180
  source 1..40: mol_type = genomic DNA

SEQ ID NO: 49476 - protein, 590 aa, Streptococcus agalactiae
MKKEVKVIKGDTTLKRTASGCVERSIKRVAAYCRVSTDTEDQINSYNSQVEHYTEFIQKNKEWTLAGIYADEAITGTQVDRRIDFQRLINDCMNGDIDMIITKSISRFARNTLDTLKYVRKLKEFNVAVFFEEENINTLTMDGELLLTILSSVAQQEVENISANVKKGLRMKMERGEMVGFQGCLGYDYDPETKSISINEKEAEIVRYIFRRYIEGVGGMVISRELEEQGYLSPRGNKRWTETTVLGIIKNEKYKGDLMMGKTYTVDPISKRRLDNFGEQDKFYIENHHEPIISEEDFEKAQGIRLRRSKNRNTVANNGGKREKYSRKYAFSSMLECGFCGHNLSRRNWHSSSEYTKVIWQCVNATKNGKKYCPHSKGIEEEAIEKAFMESYRQVCHNNVEITNEFLKTVEEELKDNSLAKDLKKITNQLDKVLKKEKDLVELRLNESISMDIYQDKYNEIAISKEKLLAEKRTLEVTLTDEKALKKRLEGFKKLLESNKYLEEFDRAVFESIVDKIIIGGTNDEGEIDPAMITIIYKTGKKDSQDGRLFKSRRKNAKEVDEGTDNKLYPQSSDEVNNLCSYPMDNTCGV

SEQ ID NO: 49477 - DNA, 50 bp, Streptococcus agalactiae; identical to SEQ ID NO: 1787
  source 1..50: mol_type = genomic DNA

SEQ ID NO: 49478 - DNA, 40 bp, Streptococcus agalactiae; identical to SEQ ID NO: 23678
  source 1..40: mol_type = genomic DNA

SEQ ID NO: 49479 - DNA, 50 bp, Streptococcus agalactiae; identical to SEQ ID NO: 49204
  source 1..50: mol_type = genomic DNA

SEQ ID NO: 49480 - DNA, 40 bp, Streptococcus agalactiae; identical to SEQ ID NO: 49180
  source 1..40: mol_type = genomic DNA

SEQ ID NO: 49481 - protein, 590 aa, Streptococcus agalactiae
MKKDVKVIKGDTTLKRTASGCVERSIKRVAAYCRVSTDTEDQINSYNSQVEHYTEFIQKNKEWTLAGIYADEAITGTQVDRRIDFQRLINDCMNGDIDMIITKSISRFARNTLDTLKYVRKLKEFNVAVFFEEENINTLTMDGELLLTILSSVAQQEVENISANVKKGLRMKMERGEMVGFQGCLGYDYDLETKSISINEKEAEIVRYIFRRYIEGVGGMVISRELEEQGYLSPRGNKRWTETTVLGIIKNEKYKGDLMMGKTYTVDPISKRRLDNFGEQDKFYIENHHEPIISEEDFEKAQGIRLRRSKNRNTVANNGGKREKYSRKYAFSSMLGCGFCGHNLSRRNWHSSSEYTKVIWQCVNATKNGKKYCPHSKGIEEEAIEKAFMESYRQVCHNNVEITNEFLKTVEEELKDNSLAKDLKKITNQLDKILKKEKDLVELRLNESISMDIYQDKYNEIAISKEKLLAEKRTLEVTLTDEKALKKRLEGFKKLLESNKYLEEFDRAVFESIVDKIIIGGTNDEGEIDPAMITIIYKTGKKDSQDGRLFKSRRKNAKEVNEETDNKLYPHSSDEVNNLCSYPMDNTCGV

SEQ ID NO: 49482 - DNA, 50 bp, Streptococcus agalactiae; identical to SEQ ID NO: 1787
  source 1..50: mol_type = genomic DNA

SEQ ID NO: 49483 - DNA, 40 bp, Streptococcus agalactiae; identical to SEQ ID NO: 23678
  source 1..40: mol_type = genomic DNA

SEQ ID NO: 49484 - DNA, 50 bp, Streptococcus agalactiae; identical to SEQ ID NO: 49204
  source 1..50: mol_type = genomic DNA

SEQ ID NO: 49485 - DNA, 40 bp, Streptococcus agalactiae; identical to SEQ ID NO: 49180
  source 1..40: mol_type = genomic DNA

SEQ ID NO: 49486 - protein, 590 aa, Streptococcus agalactiae
MKKEVKVIKGDTTLKRTASGCVERSIKRVAAYCRVSTDTEDQINSYNSQVEHYTEFIQKNNEWTLAGIYADEAITGTQVDRRIDFQRLINDCMNGDIDMIITKSISRFARNTLDTLKYVRKLKEFNVAVFFEEENINTLTMDGELLLTILSSVAQQEVENISANVKKGLRMKMERGEMVGFQGCLGYDYDPGTKSISINEKEAEIVRYIFRRYIEGVGGMVISRELEEQGYLSPRGNKKWTETTVLGIIKNEKYKGDLMMGKTYTVDPISKRRLDNYGEQDKFYIENHHEPIISEEDFEKAQGIRLRRSKNRNTVANNGGKREKYSRKYAFSSMLECGFCGHNLSRRNWHSSSEYTKVIWQCVNATKNGKKYCPHSKGIEEEAIEKAFMESYRQVCHNNVEITNEFLKTVEEELKDNSLAKDLKKITNQLDKVLKKEKDLVELRLNESISMDIYQDKYNEIAISKEKLLAEKRTLEVTLTDEKALKKRLEGFKKLLESNKYLEEFDRAVFESIVDKIIIGGTNDEGEIDPAMITIIYKTGKKDSQDGRLFKSRRKNAKEVDEGTDNKLYPQSSDEVNNLCSYPMDNTCGV

SEQ ID NO: 49487 - DNA, 50 bp, Streptococcus agalactiae; identical to SEQ ID NO: 1787
  source 1..50: mol_type = genomic DNA

SEQ ID NO: 49488 - DNA, 40 bp, Streptococcus agalactiae; identical to SEQ ID NO: 23678
  source 1..40: mol_type = genomic DNA

SEQ ID NO: 49489 - DNA, 50 bp, Streptococcus agalactiae; identical to SEQ ID NO: 49204
  source 1..50: mol_type = genomic DNA

SEQ ID NO: 49490 - DNA, 40 bp, Streptococcus agalactiae; identical to SEQ ID NO: 49180
  source 1..40: mol_type = genomic DNA

SEQ ID NO: 49491 - protein, 590 aa, Streptococcus agalactiae
MKKEVKVIKGDTTLKRTASGCVERSIKRVAAYCRVSTDTEDQINSYNSQVEHYTEFIQKNNEWTLAGIYADEAITGTQVDRRIDFQRLINDCMNGDIDMIITKSISRFARNTLDTLKYVRKLKEFNVAVFFEEENINTLTMDGELLLTILSSVAQQEVENISANVKKGLRMKMERGEMVGFQGCLGYDYDPETKSISINEKEAEIVRYIFRRYIEGVGGMVISRELEEQGYLSPRGNKRWTETTVLGIIKNEKYKGDLMMGKTYTVDPISKRRLDNFGEQDKFYIENHHEPIISEEDFEKAQGIRLRRSKNRNTVANNGGKREKYSRKYAFSSMLECGFCGHNLSRRNWHSSSEYTKVIWQCVNATKNGKKYCPHSKGIEEEAIEKAFMESYRQVCHNNVEITNEFLKTVEEELKDNSLSKDLKKISNQLDKILKKEKDLVELRLNESISMDIYQDKYNEIAISKEKLLAEKRTLEVTLTDEKALKKRLEGFKKLLESNKYLEEFDRAVFESIVDKIIIGGTNDEGEIDPAMITIIYKTGKKDSQDGRLFKSRRKNAKEVNEETENKLYPQSSDEVNNLCSYPMDNTCGV

SEQ ID NO: 49492 - DNA, 50 bp, Streptococcus agalactiae; identical to SEQ ID NO: 1787
  source 1..50: mol_type = genomic DNA

SEQ ID NO: 49493 - DNA, 40 bp, Streptococcus agalactiae; identical to SEQ ID NO: 23678
  source 1..40: mol_type = genomic DNA

SEQ ID NO: 49494 - DNA, 50 bp, Streptococcus agalactiae; identical to SEQ ID NO: 49204
  source 1..50: mol_type = genomic DNA

SEQ ID NO: 49495 - DNA, 40 bp, Streptococcus agalactiae; identical to SEQ ID NO: 49180
  source 1..40: mol_type = genomic DNA

SEQ ID NO: 49496 - protein, 590 aa, Streptococcus agalactiae
MKKEVKVIKGDTTLKRTASGCVERSIKRVAAYCRVSTDTEDQINSYNSQVEHYTEFIQKNNEWTLAGIYADEAITGTQVDRRIDFQRLINDCMNGDIDMIITKSISRFARNTLDTLKYVRKLKEFNVAVFFEEENINTLTMDGELLLTILSSVAQQEVENISANVKKGLRMKMERGEMVGFQGCLGYDYDPETKSISINEKEAEIVRYIFRRYIEGVGGMVISRELEEQGYLSPRGNKRWTETTVLGIIKNEKYKGDLMMGKTYTVDPISKRRLDNYGEQDKFYIENHHEPIISEEDFEKAQGIRLRRSKNRNTVANNGGKREKYSRKYAFSSMLECGFCGHNLSRRNWHSSSEYTKVIWQCVNATKNGKKYCPHSKGIEEEAIEKAFMESYRQVCHNNVEITNEFLKTVEEELKDNSLSKDLKKISNQLDKILKKEKDLVELRLNESISMDIYQDKYNEIAISKEKLLAEKRTLEVTLTDEKALKKRLEGFKKLLESNKYLEEFDRAVFESIVDKIIIGGTNDEGEIDPAMITIIYKTGKKDSQDGRLFKSRRKNAKEVNEETDNKLYPHSSDEVNNLYSYPIDNTCGV

SEQ ID NO: 49497 - DNA, 50 bp, Streptococcus agalactiae; identical to SEQ ID NO: 19692
  source 1..50: mol_type = genomic DNA

SEQ ID NO: 49498 - DNA, 40 bp, Streptococcus agalactiae; identical to SEQ ID NO: 23678
  source 1..40: mol_type = genomic DNA

SEQ ID NO: 49499 - DNA, 50 bp, Streptococcus agalactiae; identical to SEQ ID NO: 49189
  source 1..50: mol_type = genomic DNA

SEQ ID NO: 49500 - DNA, 40 bp, Streptococcus agalactiae; identical to SEQ ID NO: 49180
  source 1..40: mol_type = genomic DNA

SEQ ID NO: 49501 - protein, 590 aa, Streptococcus agalactiae; identical to SEQ ID NO: 49466

SEQ ID NO: 49502 - DNA, 50 bp, Streptococcus agalactiae; identical to SEQ ID NO: 37077
  source 1..50: mol_type = genomic DNA

SEQ ID NO: 49503 - DNA, 40 bp, Streptococcus agalactiae; identical to SEQ ID NO: 23678
  source 1..40: mol_type = genomic DNA

SEQ ID NO: 49504 - DNA, 50 bp, Streptococcus agalactiae; identical to SEQ ID NO: 49209
  source 1..50: mol_type = genomic DNA

SEQ ID NO: 49505 - DNA, 40 bp, Streptococcus agalactiae; identical to SEQ ID NO: 49180
  source 1..40: mol_type = genomic DNA

SEQ ID NO: 49506 - protein, 610 aa, Streptococcus agalactiae
MFCKCGIIRLHRKIQKGGSAVKKDVKVIKGDTTLKRTASGCVQRSIKRVAAYCRVSTDTEDQINSYNSQVEHYTEFIQKNKEWTLAGIYADEAITGTQVDRRIDFQRLINDCMNGDIDMIITKSISRFARNTLDTLKYVRKLKEFNVAVFFEEENINTLTMDGELLLTILSSVAQQEVENISANVKKGLRMKMERGEMVGFQGCLGYDYDPETKSISINEKEAEIVRYIFRRYIEGVGGMVISRELEEQGYLSPRGNKRWTETTVLGIIKNEKYKGDLMMGKTYTVDPISKRRLDNFGEQDKFYIENHHEPIISEEDFEKAQGIRLRRSKNRNTVANNGGKREKYSRKYAFSSMLECGFCGYNLSRRNWHSSSEYTKVIWQCVNATKNGKKYCPHSKGIEEEAIEKAFMESYRQVCHNNVEITNEFLKTVEEELKDNSLAKDLKKITNQLDKILKKEKDLVELRLNESISMDIYQDKYNEIAISKEKLLAEKRTLEVTLTDEKALKKRLEGFKKLLESNKYLEEFDRAVFESIVDKIIIGGTNDEGEIDPAMITIIYKTGKKDSQDGRLFKSRRKNAKEVDEGTDNKLYPQSSDEVNNLCSYPMDNTCGV

SEQ ID NO: 49507 - DNA, 50 bp, Streptococcus agalactiae; identical to SEQ ID NO: 1787
  source 1..50: mol_type = genomic DNA

SEQ ID NO: 49508 - DNA, 40 bp, Streptococcus agalactiae; identical to SEQ ID NO: 23678
  source 1..40: mol_type = genomic DNA

SEQ ID NO: 49509 - DNA, 50 bp, Streptococcus agalactiae; identical to SEQ ID NO: 49204
  source 1..50: mol_type = genomic DNA

SEQ ID NO: 49510 - DNA, 40 bp, Streptococcus agalactiae; identical to SEQ ID NO: 49180
  source 1..40: mol_type = genomic DNA

SEQ ID NO: 49511 - protein, 514 aa, Gordonibacter pamelaeae
MYDSMPAEWLCCAYLRKSREDEEREKQGRYKTLERHKAILESLSSDNGHKIAQWYPEIVSGETIEGRPEVKKLLADLASGKWDAVYVVEASRLGRGGGSDQEKIVNAFRYTNTWLVTEEKVYDPSSKADMRQLKNDLRSSEDELDSITTRLTRGKYRSAQEGRWQATGRTPYGWRAVRIAGLWQLRPDENHCHMLRIYDLLESGLTPWDVANIYNAEGIPTPRGGDHWTAAIVRAIALNPANCGYVVFGKHKTMRIFDPVTFEAKKVRVKNDKPVMVKGLHYGTGGISEERFERITGHLVGSAHLRKGLELKNPLARLLKCGKCGYAMNHHRMSSGKSYGYFYQHPAKRNMTRACDGCRGARDDLVMDTLVASLRSLCNDIELRIKADNRASEHEAHIEALRKELEKVRAARSRAMEAYEAGAYTIAELKARKDEAEKRMESIERAIKDAKPPKYTPELVVSINKCIDMLLDDTVSVQVKNDFLKSVIGRIDYYNDTPPFVHDNKVHLEIFLRQ

SEQ ID NO: 49512 - DNA, 50 bp, Gordonibacter pamelaeae
  source 1..50: mol_type = genomic DNA
aacacctatgagaagggtaagcatccatgcaatcgttgatgacaggtgtt

SEQ ID NO: 49513 - DNA, 40 bp, Gordonibacter pamelaeae
  source 1..40: mol_type = genomic DNA
gcagcggtgccagaagcatccgttgacgaacagggccacc

SEQ ID NO: 49514 - DNA, 50 bp, Gordonibacter pamelaeae
  source 1..50: mol_type = genomic DNA
aacacctatgagaagggtaagcatgaatgcaatcgttgatgacaggtgtt

SEQ ID NO: 49515 - DNA, 40 bp, Gordonibacter pamelaeae
  source 1..40: mol_type = genomic DNA
acagcagtgccggaaacaagagtccttgaacagggccagc

SEQ ID NO: 49516 - protein, 615 aa, Burkholderia ambifaria
MLQAKTPKAYSYIRFSTPEQQFGDSERRQTELSQKYAEAHGLTLDENLKYRDLGVSAFDKSNIRNGELGTFLRAIDSGAVEPGSYLLVESLDRLSRAKVTDALEVFMSIINRGIRLVTLMDGREYSKERINEQFTDLIISIVVMSRAHEESQTKSKRLKEAWKAKRGRIGDAKLTEMAPAWLKLNDERTAYSLVPDRVELVQRMFQWSKDGIGSETIARRLNQQGLPTWGTRKADQWHASYIKKVLDNRAVLGEFQPHVLVNGKRVPEGDPAPDYFPRIVSDEDFVLAKTARQSRRTNSAGRKGQTFSNVFSGILRCGYCNGSMVYVNKGHNGPRARLLVCARAKAGKGCHYVPWEYSPFERSVLTYCKGLDFDAFLQTRDTVKSELAALSARIAVLESSITDNEHKQANILEAIESGAKFQQFEARMVELEQSRMKFNAELDAMRQQHDLRANAKVDVTAVRASIEGLLQRISELEGDELYDMRARLSQHLKRLIVRIAMYPGGHIEQPFFVEKLRAHLVSRGTDAKAADEYIAGRLKLTPNVNERFFTMISRSDAVRTIRPDLDNPEILHLQSIGGEQGLAAHAETIGAILAKFTELARKSSGVAKSTPDTGS

SEQ ID NO: 49517 - DNA, 50 bp, Burkholderia ambifaria
  source 1..50: mol_type = genomic DNA
ctgggattaattggctatgcgttaaggatccggggccaattagacccaat

SEQ ID NO: 49518 - DNA, 40 bp, Burkholderia ambifaria
  source 1..40: mol_type = genomic DNA
gccgggcggcccgatcatcagcatgtggtgcccgcccgcg

SEQ ID NO: 49519 - DNA, 50 bp, Burkholderia ambifaria
  source 1..50: mol_type = genomic DNA
ctgggattaattggctatgcgttagcgatccggggccaattagacccaat

SEQ ID NO: 49520 - DNA, 40 bp, Burkholderia ambifaria
  source 1..40: mol_type = genomic DNA
gccatgcgccctgctccccgccctgtggcccccgcccgcg

SEQ ID NO: 49521 - protein, 575 aa, Bradyrhizobium guangzhouense
MKPSAYSYIRFSSPEQAKGDSLRRQSAGASKWADKNGYQIVEVLEDRGISAFRGKNTTKGRLGEFLALVKAKKIYPGSALVIESLDRFSRQQVSEVLPDFLNIINAGIRIVTLMDGREYTKDSLDKDTYDLFGSLSIMARAHEESQRKGERVAEAWEEKRRKARDKNSEKLTDRVPAWLDAKRDDAGRRWFEPNGHIGIVKRIFEETANGYGRRMIAKRLNAEERWSFKSKKPWQPSSIAKILTGRAVLGEYQPHKRNRKGKRLPDGPVIQGYYPCVIDEDLWQRANAAMRRRRTDAAGRPHAEAANLIRSIARCTCGARMMFVNKGKPPRGGRYFLCSNAARSGGCTLTRLWKNELVERSLFRRLDKAVLEQTVVGGAEPTRQSSRDYDLLIQDLVRKQKRVVDFLADSKDHEDDPVFDSKIKTLRAEIAAAERDRDLAAKAELSRANLPETRSSWAEARAFARRLDSASDEERVNLRRLIIQRIRTVFVEVRFSSHSIAVVVELPGKPTEMPVGPMTWIRTIESKIDEKTQRYFICDKIYTDDPEHAVRMGREPYTPGAGSFLYPMDRLPEAG

SEQ ID NO: 49522 - DNA, 50 bp, Bradyrhizobium guangzhouense
  source 1..50: mol_type = genomic DNA
acctgagttttgtatcacatcatgagaagattgcgctacatttactggtg

SEQ ID NO: 49523 - DNA, 40 bp, Bradyrhizobium guangzhouense
  source 1..40: mol_type = genomic DNA
accaggcgcgccgatcatcagcaggtgatggccgccggcg

SEQ ID NO: 49524 - DNA, 50 bp, Bradyrhizobium guangzhouense
  source 1..50: mol_type = genomic DNA
acctgagttttgtatcacatcatgtcaagattgcgctacatttactggtg

SEQ ID NO: 49525 - DNA, 40 bp, Bradyrhizobium guangzhouense
  source 1..40: mol_type = genomic DNA
cgcacgcgctccgttcagctccgggtggcggccgccggag

SEQ ID NO: 49526 - protein, 558 aa, Streptomyces tendae
MPRSLQTATDTAARRVIRCFAYARISEDREGAHLATERQLDDMRQLAEQLSTPAVEYRIVKVFEDNDLSAYSGKPRPDYKDMLTRLRNGEADCVLAWHTDRLHRSPVELEEYIDVCSPRTIDTRTVKAGHLDLSTATGRMIARQLGVQARYEVERMIERSKRARDQKASHGEYSGGPRPFGYEADGVTPRTLECPRCHQEGPDGFTMRRTCEECEAAGRFTRDLVCQACDARDALRVDFVCDQCRVPAEFAEGSEASAVHPALEAVVVGASLSGTARGWAGQGFVSSRGKAPDVNQVRTILMRPRNAGLLQHRGQIAGRGGWMALTDEGTWRSAMAVLEDPSRYTSGSNVRKYLGSNIYECGECGTAKLTGFPRPVSRKKKTGKQPVGRVGDKEPAYRCENGCVVRDGQSLDDYVLLHFFRRLQEEDAAALFARRSEPVVDVAQVRKDMRRARAKLDELAAALGRNEMDMQEWRVASGEARKRLHAAEDQMKDAVAANPVAELLAADDPEQVWNDVFDLSRRRAAVDYVMRVRVGKARPGRQPDGTYFDKSTILIDWK

SEQ ID NO: 49527 - DNA, 50 bp, Streptomyces tendae
  source 1..50: mol_type = genomic DNA
tggttccctagaccaatgttggacaagccgaacatctcccaaagtaactg

SEQ ID NO: 49528 - DNA, 40 bp, Streptomyces tendae
  source 1..40: mol_type = genomic DNA
cagggacgtcatgttgctgaagccgaactcgaactggccg

SEQ ID NO: 49529 - DNA, 50 bp, Streptomyces tendae
  source 1..50: mol_type = genomic DNA
tggttccctagaccaatgttggacacgccgaacatctcccaaagtaactg

SEQ ID NO: 49530 - DNA, 40 bp, Streptomyces tendae
  source 1..40: mol_type = genomic DNA
caggggcgtctcgtggaagacggccaactcgaggtggccg

SEQ ID NO: 49531 - protein, 621 aa, Vibrio anguillarum
MKIHKTLAPQVYSYSRFSDMEQKKGSSLARQEDYAKKAAEQHGLELNDELVFTDLGKSAFHAIHKKAGAYGAFLKAIEKGLVAKGSYLIVESFDRLSREEAYKAQSDITRLIEADINIITAADGQLYNKQTLAQNPGLLFLMTGTMIRAHEESLTKQKRSVAAIEKKLGKFFDGELVDVGGPTPFWIQRSKDDRESLFSFSEDHNRVEGARIITQSFINGKSYGQIQDLLLEKEILSPKGDVKWGTTTISKVLENEALYGRKTVRLPALKDGTKDAQEHTLDGYFPALISKDDFDLIQQIKRVKKKGRTGYRFNSAKEEGVTSVVYLLSGYGKDKNGDARSVCSKCGGALGSRLQEQFTRKKEYVRTVMRLDCLSRTRKKSCDAKGIAQRELEKSFLQAVSEHVDYNLLNKDDSDARAVEIIDSRLEDLEGVIQRAAELFLLTDDTTAHEIARQKLNDAKAEKVELLKQKDDGKEFVISAEAIKEFEGYIQRAYEDENDFEARSYVKDILLQCVEKLVIDTEPRSVESLGYKNLYKGAKVWTVTVDFRSGKRITIYHDVDTNMSLFNQVEGGGNSFHTFTPEALEIWDQQGDEAFVKHLSETGYGLNSSYVQDFISSLDDK

SEQ ID NO: 49532 - DNA, 50 bp, Vibrio anguillarum
  source 1..50: mol_type = genomic DNA
tgggttacattacgttgcttactgtccgtttggttggtaatgtaacttgc

SEQ ID NO: 49533 - DNA, 40 bp, Vibrio anguillarum
  source 1..40: mol_type = genomic DNA
gaagtagccaaagcttccatctgtccagtggatgtcttgc

SEQ ID NO: 49534 - DNA, 50 bp, Vibrio anguillarum
  source 1..50: mol_type = genomic DNA
tgggttacattacgttgcttactgttcgtttggttggtaatgtaacttgc

SEQ ID NO: 49535 - DNA, 40 bp, Vibrio anguillarum
  source 1..40: mol_type = genomic DNA
aaagcacccaaagctagcatttctccagtgcctatcttgt

SEQ ID NO: 49536 - protein, 676 aa, Bacteroides thetaiotaomicron; identical to SEQ ID NO: 41661

SEQ ID NO: 49537 - DNA, 50 bp, Bacteroides thetaiotaomicron; identical to SEQ ID NO: 40127
  source 1..50: mol_type = genomic DNA

SEQ ID NO: 49538 - DNA, 40 bp, Bacteroides thetaiotaomicron; identical to SEQ ID NO: 27413
  source 1..40: mol_type = genomic DNA

SEQ ID NO: 49539 - DNA, 50 bp, Bacteroides thetaiotaomicron
  source 1..50: mol_type = genomic DNA
aaggatgtgttcatttcgactataggcataggtgcgattgacacatcctg

SEQ ID NO: 49540 - DNA, 40 bp, Bacteroides thetaiotaomicron
  source 1..40: mol_type = genomic DNA
ttatcactgctatgctgtagggacaggaggggaatcctct

SEQ ID NO: 49541 - protein, 676 aa, Bacteroides thetaiotaomicron
MDKKVLIYCRVSTQQQTTDRQKEELLKFAAENHWNVEEEDIFIDVISGFKKGEFRPEYVKMLERVEYGDIDIILFSEFSRLARNATELLEQIKLFIDKGINLYFDKQKLWVRDSNKDVGSIILLHVLAVMSSYEIELFVERSLSGKITKVQAGHGGGDERAYGYMHNENKQIVINPIESKIVTRIFEMYVGGYSSIQISEILNAEKVPAPYVRKLNEYKKNREAKGLEVKEYKFDTDNLKWRISTINRLMHNELYKGNRRITFYKPDPTNPLPLSERQDREIVYEYSEHVESLRIVSDELFQQAQDKLSKAHYNKNNAVRHENLLKHLMVCGECGANFSVGKSNETSKNYISGGRTYKCYGRVNRKDKPRTCTNGAELRQWKLDGLVLQLSIQMFAEINIQQTNILKIENLGKEIEELVQIKSSKNTELVEAENLYKKTLKRLIAIEDDEVAKNLISDAKHKYDETKNVLNKTMDKLSREITTKRITIDNLKRLNANPLLINKMDEIRKNRDLIKTMVDEYIDKITIFRLHELWLLVVVSYKGGEEMWGTIKCARYKKEEMFYSELHCHYGVEFQGWLLNNTEHCFSYDKSTRIITYHGGSKIYVEFKSGEYDYDTFNQMIQETGWMGCFPFYAYEDSDENLSVPFNEKFRKSLQENRIDWKAHNDKVLERLLSKS

SEQ ID NO: 49542 - DNA, 50 bp, Bacteroides thetaiotaomicron; identical to SEQ ID NO: 48997
  source 1..50: mol_type = genomic DNA

SEQ ID NO: 49543 - DNA, 40 bp, Bacteroides thetaiotaomicron; identical to SEQ ID NO: 27413
  source 1..40: mol_type = genomic DNA

SEQ ID NO: 49544 - DNA, 50 bp, Bacteroides thetaiotaomicron
  source 1..50: mol_type = genomic DNA
aaggatgtgtttgtttcgactgtaggcataggtgcgattgacacatcctg

SEQ ID NO: 49545 - DNA, 40 bp, Bacteroides thetaiotaomicron; identical to SEQ ID NO: 49540
  source 1..40: mol_type = genomic DNA

SEQ ID NO: 49546 - protein, 511 aa, Agathobaculum butyriciproducens
MNIAAYCRVSTDKADQLNSLETQKEFFSEYTQRTGDTLVRLYADEGISGTKIKNRKEFLRMMADAEHGLFDMVVVKDISRFARNTVDLLQNVRKLKALGIETQFLTANMTSMGNSEFVLTIFGALAQEESANTSKRIKFGKKINAEKGRVPNIVYGYDKIIGDYFNLKINEKEAEVIRQMYRWYVEDGYGAAKISQFLNERDWRTKRNCKWSQNGVCRVLTNELYTGKIINGKQEIADFLTGRRAEKDETEWSVVERPELRIIEPELFERAQQVMQSRGKAFKVDRERQSNKYLFSTLIKCKECGWSFRRTVRTYKNTYVRWVCSGHNGRGADSCPNAVTVDEDELIETLQHYFASVLKEKKNVIRYVVREFQRVYKAKDENLNYEKELNAKLDKLKKTRQKYMDMYTDDLISREELNDKIGGMKTEIERLENELKMVSYHLTKGEQLENILHRTFQEIEDITDVREMTNAQLKRLIQKIVVDKEGNVDIYLRLMGDLGLDETVLINHDRT

SEQ ID NO: 49547 - DNA, 50 bp, Agathobaculum butyriciproducens
  source 1..50: mol_type = genomic DNA
ccgttctgattaaccacgaccgtacatatagaagtaatgaaaatgagcgg

SEQ ID NO: 49548 - DNA, 40 bp, Agathobaculum butyriciproducens
  source 1..40: mol_type = genomic DNA
aatatccaagtcaaccgtacataaggatatcacaacgcgc

SEQ ID NO: 49549 - DNA, 50 bp, Agathobaculum butyriciproducens
  source 1..50: mol_type = genomic DNA
ccgttctgattaaccacgaccgtagttatagaagtaatgaaaatgagcgg

SEQ ID NO: 49550 - DNA, 40 bp, Agathobaculum butyriciproducens
  source 1..40: mol_type = genomic DNA
attatcctagtcaaccctggttaggaaaatcccaacaccc

SEQ ID NO: 49551 - protein, 496 aa, Mitsuokella jalaludinii
MNAAIYARVSTDWQAEHGYSIETQLESCRAKAKEIGATVIKEYIDDGYSGGFLERPGLDALRDAVSDGLYDVVIFHDPDRMARKLIHQLIITEELEKARVSPVFVLERFDSSPEGQMNYQMKGVFAEYERAKIRERTMRGKRAKLRAGKAICDSHIYGYDFDRASSSYVVNPAEAAVVRRVYQLYVVERVGGCETIADILNADNIPSPTGRKWSPSSVRNMLSRPHYTGRYYANTTYHKKTGPRSEKRLPRPREEWIEMSCPQILPAEMHEKALAIKAGQRTYKVWKRNEKVALLQGIAYCGSCGSRIYVSGGGKRGRRFYECGAARAPSYCPARLMEVPVADDLFWNVLERICKSPAALEKYIGENVAEKGSRPAAAEKPEKIARQLEKIAGEKKAIMSWFSQSLLTQSEATERLSALKTEELRLQSELADLRAKSSREPEKIAPSDICAAVAACSVDLAARRRVVLAVVERVDVLRRDFNYGHKYIVDFKIKFK

SEQ ID NO: 49552 - DNA, 50 bp, Mitsuokella jalaludinii
  source 1..50: mol_type = genomic DNA
agtcctttgcatcgccagcctatgtccagcggttgttgatagaacggact

SEQ ID NO: 49553 - DNA, 40 bp, Mitsuokella jalaludinii
  source 1..40: mol_type = genomic DNA
gattgtcacagcccggtcctccaacggctgccgcaggacc

SEQ ID NO: 49554 - DNA, 50 bp, Mitsuokella jalaludinii
  source 1..50: mol_type = genomic DNA
agtcctttgcatcgccagcctatgtgcagcggttgttgatagaacggact

SEQ ID NO: 49555 - DNA, 40 bp, Mitsuokella jalaludinii
  source 1..40: mol_type = genomic DNA
agatgtcccagaccagtcctgctagtgctgccccaggacc

SEQ ID NO: 49556 - protein, 496 aa, Bacillus wiedmannii
MIANENIKNVAIYLRLSRDEENRGIENVLENHRNKLIQHCEQNKWKYDIYQEIASSRTIELRDQLITMLERVEQNLYDAVVVIDIDRLSRNEFDSPRIYKILSDTNTAIVTPYKTYDWSKDEDNLLLGIQSLVAAQEYKQIKKRMTAGKRSASEKGLWVHGIPPLGYDKDPETRKLIPNEDAKHVTFIFDSIVNGKTVSDVYHELNKMGVKTRTNSTFAFNSVIRIINNEAYKGTIASNKYLDKNAMRPKNEWHYVENVHPAIVDEVTWEKANKIVNTYSFSTPRSKNRIYPTTKLIFCGNCGKVQGAQMAGTGKMYLKVCQRCKNRTFLYEPILKLIKERMENYIPNVLKQITEIEQKDNSAEIEYKKQQIQKRIGIAQKAIEKIKEAYELDEYTIADFKERKTKREDEIKQLKAELGQIEQQNPKDKIADLTEIKRRIEHLLQNWQCIDGEGLTDEEVNRNLHFIIERIEWTYGKTDETPHLNIVWKADESYVD

SEQ ID NO: 49557 - DNA, 50 bp, Bacillus wiedmannii
  source 1..50: mol_type = genomic DNA
aaataatccctaaattcgtaacaaactggttgagaacttagggactacgt

SEQ ID NO: 49558 - DNA, 40 bp, Bacillus wiedmannii; identical to SEQ ID NO: 5763
  source 1..40: mol_type = genomic DNA

SEQ ID NO: 49559 - DNA, 50 bp, Bacillus wiedmannii
  source 1..50: mol_type = genomic DNA
aaataatccctaaattcgtaacaaattggttgagaacttagggactacgt

SEQ ID NO: 49560 - DNA, 40 bp, Bacillus wiedmannii
  source 1..40: mol_type = genomic DNA
attagtatttattgaatgaatgggttcggggatggcaaca

SEQ ID NO: 49561 - protein, 496 aa, Bacillus wiedmannii
MIANENIKNVAIYLRLSRDEENRGIENVLENHRNKLIQHCEQNKWKYDIYQEIASSRTIELRDQLITMLERVEQNLYDAVVVIDIDRLSRNEFDSPRIYKILSDTNTAIVTPYKTYDWSKDEDNLLLGIQSLVAAQEYKQIKKRMTAGKRSASEKGLWVHGIPPLGYDKDPETRKLIPNEDAKHVTFIFDSIVNGKTVSDVYHELNKMGVKTRTNSTFAFNSVIRIINNEAYKGTIASNKYLDKNAMRPKNEWHYVENVHPAIVDEVTWEKANKIVNTYSFSTPRSKNRIYPTTKLIFCGNCGKVQGAQMAGTGKMYLKVCQRCKNRTFLYEPILKLIKERMENHIPNVLKQITEIEQKDNSAEIEYKKQQIQKRIGIAQKAIEKIKEAYELDEYTIADFKERKTKREDEIKQLKAELGQIEQQNPKDKIADLTEIKRRIEHLLQNWQCIDGEGLTDEEVNRNLHFIIERIEWTYGKTDETPHLNIVWKADESYVD

SEQ ID NO: 49562 - DNA, 50 bp, Bacillus wiedmannii; identical to SEQ ID NO: 49557
  source 1..50: mol_type = genomic DNA

SEQ ID NO: 49563 - DNA, 40 bp, Bacillus wiedmannii; identical to SEQ ID NO: 5763
  source 1..40: mol_type = genomic DNA

SEQ ID NO: 49564 - DNA, 50 bp, Bacillus wiedmannii; identical to SEQ ID NO: 49559
  source 1..50: mol_type = genomic DNA

SEQ ID NO: 49565 - DNA, 40 bp, Bacillus wiedmannii; identical to SEQ ID NO: 49560
  source 1..40: mol_type = genomic DNA

SEQ ID NO: 49566 - protein, 555 aa, Paenibacillus polymyxa
MLRTLTGSEKFTKTELEALVAKIKALIYARVSTDGQVENYSIESQVERCMDLAKQKGINEDEVVVLVEDGESGDNPNRPMINYVLFLLEYGIGDHVIFLHPNRMSRFLHLQTQLSNRIWGLGKDFWFVEFDFDKSSPESMLNFNIQGSIAEYNKAKILADTKRGRITKVKNGQIPGLNRIYGYTYDTELDTLVENPVEKEIYLKMVDMLLHKDYSCSRIAEELSLRNVPAPKKDRWYQVTISRIFKNETYTGNYYFGKTKVIHNADGTKKQVPQPREEWRRISVPVYIDMETYYRIQKRLDELNKNKPGRPTEDYLLQGICRCGRCGAAVSSGVTTKTKNRLLKYYVCQHKTKKSYEVGTGESNPICKGRNWRVDYVDKIVWEYVKNIISEPTEFFERIIKQQSENSNSDELLKQKKKLEKSLQEKEASRERYTEMYAAGIIKSMKDLEDKVSAVDEQIKDIKEELHTIDQSLSTVLNKKNHIELVQKSLRSFKYLIDNDHIDTETKRKVTRLFIKKVILNEDNKINIYLHLGFIDNHEKESDNQHISTNNCQGH

SEQ ID NO: 49567 - DNA, 50 bp, Paenibacillus polymyxa
  source 1..50: mol_type = genomic DNA
aacacataagtaccaacaattgccaaggccatggtttgacaatctatgca

SEQ ID NO: 49568 - DNA, 40 bp, Paenibacillus polymyxa
  source 1..40: mol_type = genomic DNA
agcgattgataccctggtaaaggccatggaagaccaaaaa

SEQ ID NO: 49569 - DNA, 50 bp, Paenibacillus polymyxa
  source 1..50: mol_type = genomic DNA
aacacataagtaccaacaattgccctggccatggtttgacaatctatgca

SEQ ID NO: 49570 - DNA, 40 bp, Paenibacillus polymyxa
  source 1..40: mol_type = genomic DNA
agcaaatgatagcaaggaactagccatggaagaacaagga

SEQ ID NO: 49571 - protein, 465 aa, Ruminococcus gnavus
MQEKILRCAIYIRVSTFEQSVHGKSLQAQKECLEQYATDNNMSIVGVYADEGKTARKELKKRKAIHALVEDVKRDKIDVIIFWRLDRWFRNLSDFYKVQDVLDEHGVRWISVSEPGINMETRDGRLQLNVVLSIGQNEVDTTSERIKFVNEASIRQKKLIFGDANMPFGYKTGVVDGKKCMVKDSETEHMVEDFFEYFRNHNSKKGAIRYMQETYGIDFSYGMLRTMLSSEFYKGTYRGYPYCPAYLSEKEWDEMQTISKRNIKNTPSGRIYLFTGLMRCPVCGQKLVGTGCSSIINRKTGEKRTYCYYRCNRALIDHICTYRHRVSQNLIEKYLLENLEREYEKYKVRTNQISEELKKQKKAKDPKKLRKEMERLNLLFQKGRISFEYYDTEYNRLEEEYVHSSNPCQQKEEARNTRYIEELLQTDFRQMYNSLLLENRRSFWRSTIQEIYLNDDNTIKAVDFL

SEQ ID NO: 49572 - DNA, 50 bp, Ruminococcus gnavus
  source 1..50: mol_type = genomic DNA
ttttgtactaagtgtttagccccatttggggcagtataattagtacaaaa

SEQ ID NO: 49573 - DNA, 40 bp, Ruminococcus gnavus
  source 1..40: mol_type = genomic DNA
actggagctcgtcacaggatttggagccgacaaaacgatg

SEQ ID NO: 49574 - DNA, 50 bp, Ruminococcus gnavus
  source 1..50: mol_type = genomic DNA
ttttgtactaagtgtttagccccaaatggggcagtataattagtacaaaa

SEQ ID NO: 49575 - DNA, 40 bp, Ruminococcus gnavus
  source 1..40: mol_type = genomic DNA
gctggggctcctcccaggaaatggagccaagaacaagagc

SEQ ID NO: 49576 - protein, 464 aa, Ruminococcus gnavus
MPEKILRCAIYIRVSTFEQSVHGKSLQAQKECLEQYATDNNMSIVGVYADEGKTARKELKKRKAIHALVEDVKKDRIDVILFWRLDRWFRNLSDFYKVQDVLDEHGVRWISVSEPGINMETRDGRLQLNVVLSIGQNEVDTTSERIKFVNEASIRQRKLIFGDANMPFGYKTGVVDGKKCMVKDPETEHMVEDFFNYFRIHNSKKGAVRYMQEAYGIDFSYGMLRTMLSSEFYKGTYRGYPYCPAYLSEKEWNEMQTISKRNIKSTPSGRVYLFTGLIRCPVCGQKLVGTGCSSIINRETRKKRTYCYYRCNRALIDHICTYRHRMSQNLIEKYLLENLEREYEKYKVRSNQISEELKKEKKAKDPEKLRKEMERLNLLFQKGRISFDYYDNEYQRLEEEYSVSAAFPEEEETRSLHYVEELLKTDFRQMYDSLSLENRRSFWRSTIREIYLNEDNTIKCVDFI

SEQ ID NO: 49577 - DNA, 50 bp, Ruminococcus gnavus
  source 1..50: mol_type = genomic DNA
tcttgtactaaacatctagctccatttggagtagtataattagtacaaaa

SEQ ID NO: 49578 - DNA, 40 bp, Ruminococcus gnavus
  source 1..40: mol_type = genomic DNA
actggagctcgtcacaggatttggagccgataaaacgatg

SEQ ID NO: 49579 - DNA, 50 bp, Ruminococcus gnavus
  source 1..50: mol_type = genomic DNA
tcttgtactaaacatctagctccaaatggagtagtataattagtacaaaa

SEQ ID NO: 49580 - DNA, 40 bp, Ruminococcus gnavus; identical to SEQ ID NO: 49575
  source 1..40: mol_type = genomic DNA

SEQ ID NO: 49581 - protein, 583 aa, Enterococcus faecium
MKEVEVIKARNDLQTRTRGKTIELMRVGAYCRVSTDSADQLNSYKSQVAYYTDMIKKNKEWVLADIYADEAITGTQVAKREDFQRMINDCMNGEIDMVITKSISRFARNTLDTLKYVRVLKERNIAVYFEDEKINTLTMDGELLLVVLSSVAQQEVENISANVKKGLKMKMKRGELVGFQGCLGYDYHKDTKTITVNEEEAEIVRYIFNRYIEGAGGSVIAHELENLGYKTKYGSSTWVQSTVIGIIKNEKYKGDLLLGKTFTVDPISKRRLENFGEEDKFYIRNHHEPIISEEVFEKAQEILSRRNVNRGKIGEGNTKREKYSRKYAFSCMLECGFCGGTLTRRNWHSSSQYSKVIWQCVTATKKGKKFCKHSKGIPETAIEEAFVESYRLLCDDNKDVLEEFLQRMDDTLSCSAVSKQLAKAEKEIDALEKKKSKLVDMRLEEIVDKETYESKYADLVSKQEQLVEERQKLQETSDNEKDIKKRLKEFKKTLEQNEVLDKFDRYVFESIVEKVIVGGLDENGNVDPAQLTFVYKTGLKNSVDGAKFKPQRKNARGRHRTDELCSHDSNEVDKMCSDSSNDT

SEQ ID NO: 49582 - DNA, 50 bp, Enterococcus faecium
  source 1..50: mol_type = genomic DNA
tgtgttccgatagtagtaacgacacatgtcgagacttgtgtgttgctaca

SEQ ID NO: 49583 - DNA, 40 bp, Enterococcus faecium
  source 1..40: mol_type = genomic DNA
tcttttcccgcaaacccatcatatcgaattagtcgcttca

SEQ ID NO: 49584 - DNA, 50 bp, Enterococcus faecium
  source 1..50: mol_type = genomic DNA
tgtgttccgatagtagtaacgacatatgtcgagacttgtgtgttgctaca

SEQ ID NO: 49585 - DNA, 40 bp, Enterococcus faecium
  source 1..40: mol_type = genomic DNA
tcttctccagaaaatccattaaatagaatgatttgcttct

SEQ ID NO: 49586 - protein, 583 aa, Enterococcus faecium
MKTNNVEIIKADSLVRRRGVNVERHLKRVAAYCRVSSDSEDQKNSYESQVRHYKDYISQRSDWELADIYADEGISGTQVGKRQDFQRLINDCVNGEIDYIVTKAIARFARNTLDTLKYVRMLKDMQIGVYFEEENIDTLTMDGELLLTILSSVAQQEVENTSAHVKKGLKMKMQRGELIGFQGCLGYDYDVETKQLSINKKEAKIVRYIFERYLEGIGGKVIARELDELGYKSPRGLDHWNDTTVLGIIKNEKYKGDILMGKTFTVDPISKRRLSNFGEEDKYYIKDNHEPIISKEDFEKAQEIRLRRAGNKKTVANVNGKRERYSKMYAFSSMLECGFCGSLLSRRSWHCRSDYRKVVWHCVTSIKKGKKYCKHSKGLEELAIEGAFMEAYRQLYHSNENLMTDLLETIESELNDNSLNKELKRITNKLRTLLKKEENLVNLKLEGKISDTIYNEKYNEISSEKVFLAEEKVNIETTLKSEIDVKKRLTEFKHLLSSQKMLTEFDRAVFESIVEKIIVGGVNSDGEIDPAMLTIIFKTGETQNKDGNQFKSKRKNAKLETDKLCPQNSDEDKKMYSQGPDNT

SEQ ID NO: 49587 - DNA, 50 bp, Enterococcus faecium; identical to SEQ ID NO: 9832
  source 1..50: mol_type = genomic DNA

SEQ ID NO: 49588 - DNA, 40 bp, Enterococcus faecium; identical to SEQ ID NO: 49583
  source 1..40: mol_type = genomic DNA

SEQ ID NO: 49589 - DNA, 50 bp, Enterococcus faecium
  source 1..50: mol_type = genomic DNA
tgtattctcaaggaccagacaacatacgtggagtgcgtagtgttgctaca

SEQ ID NO: 49590 - DNA, 40 bp, Enterococcus faecium; identical to SEQ ID NO: 49585
  source 1..40: mol_type = genomic DNA

SEQ ID NO: 49591 - protein, 583 aa, Enterococcus faecium; identical to SEQ ID NO: 41596

SEQ ID NO: 49592 - DNA, 50 bp, Enterococcus faecium; identical to SEQ ID NO: 41597
  source 1..50: mol_type = genomic DNA

SEQ ID NO: 49593 - DNA, 40 bp, Enterococcus faecium; identical to SEQ ID NO: 49583
  source 1..40: mol_type = genomic DNA

SEQ ID NO: 49594 - DNA, 50 bp, Enterococcus faecium
  source 1..50: mol_type = genomic DNA
tatgttcctatactagtaccaacatatgtggagactattgtgttgataca

SEQ ID NO: 49595 - DNA, 40 bp, Enterococcus faecium; identical to SEQ ID NO: 49585
  source 1..40: mol_type = genomic DNA

SEQ ID NO: 49596 - protein, 577 aa, Enterococcus faecium
MEIELIKANDFSNESVRKRIERLRVAAYCRVSTDDEDQIKSYNSMVTYYTDLIQNNKEWVFVGVYADKAITGTKVDKRDEFQRLIQDCMDGKIDLIIAKSIPRFARNTLDTLKYVRMLKERNIAVYFEVEKINTLKDGEFLMTILSSVAQQEVENTSAYVKKGLKMKMKRGELVGFQGCMGYDYDVATKSISINEEGAKVVRYIFERYVAGAGSTMIARELNEQGIMTIKGNPWVSSSVMGIINNEKYKGDILLGKTFTVDPISKRRLENFGEEDRYYIHDHHEPIISEEMFARAQEIRNRRNGNRKHGVTPGKREKFSRQYAFSCMLECGYCGGNLSRRRWHSNSKYKKTIWQCAKATKDGKRFCPDSKGIPEQVIEEAFVESYRMLCRDNKDVLEEFLKRTEKALGENSAEDQLNKLQKRIDNLSYKRKKLLDNYLNGVVQQDIYEETDVSLKRDLSNEKAKLEYLQQQLDEESSLQRRIADFKKALSQNEVLEEFDRGIFESIIEKVIVGGYDENGEKDPYKITFIYKTGFKNEIGNAKERFGKSDDIGDKVKKLCSDISDKVKGVCSDVSDNT

SEQ ID NO: 49597 - DNA, 50 bp, Enterococcus faecium
  source 1..50: mol_type = genomic DNA
tgtgttccgatgttagtgacaacacatgtcgagactgtggtaagactaca

SEQ ID NO: 49598 - DNA, 40 bp, Enterococcus faecium; identical to SEQ ID NO: 49583
  source 1..40: mol_type = genomic DNA

SEQ ID NO: 49599 - DNA, 50 bp, Enterococcus faecium
  source 1..50: mol_type = genomic DNA
tgtgttccgatgttagtgacaacatatgtcgagactgtggtaagactaca

SEQ ID NO: 49600 - DNA, 40 bp, Enterococcus faecium; identical to SEQ ID NO: 49585
  source 1..40: mol_type = genomic DNA

SEQ ID NO: 49601 - protein, 618 aa, Enterococcus gallinarum; identical to SEQ ID NO: 11111

SEQ ID NO: 49602 - DNA, 50 bp, Enterococcus gallinarum; identical to SEQ ID NO: 11112
  source 1..50: mol_type = genomic DNA

SEQ ID NO: 49603 - DNA, 40 bp, Enterococcus gallinarum
  source 1..40: mol_type = genomic DNA
cggtcattgaagtcctcttgatgtcgatcattgtctatgc

SEQ ID NO: 49604 - DNA, 50 bp, Enterococcus gallinarum; identical to SEQ ID NO: 19274
  source 1..50: mol_type = genomic DNA

SEQ ID NO: 49605 - DNA, 40 bp, Enterococcus gallinarum
  source 1..40: mol_type = genomic DNA
ttatccttgaaatactcttaatgtctctcattgtttttgc

SEQ ID NO: 49606 - protein, 620 aa, Enterococcus gallinarum
MAGIKEEKKIYLVGIYCRLSKDDGTDNESASIATQKSILADYVKKQGWHIAKTYVDDGYSGTNFQRPSFQNMIKDIENGLINCVITKDLSRLGRNYLDCGLYLEVFFPEHNVRYIAVNDGVDTLNKSAMDITPFRNILNEMYSADVSVKIKSAYRARFQQGKFMGTTAPYGYVKDPADHNHLLIDDKVAHVVREIFDLALAGNGIAKIRKHINKQHILRPAAYAVEQGATGYERHFEGNEENRYIWSENSVRGILRSPIYAGNLAGYKRIAANMKSKKRPSKLPEEWEVIPDTHEGIVTQEEFDTVQQLITSRRLPENKGGFENIFAGVIKCADCGYAMRAMSANRRKRPDIIDCVQYSCNNYGRYGNIMCTAHSIEARDLFNAVLADINRFADMAVNDEKAVRAIEKRLTDTDQSRAKALEKEQRKLNKRLAELDRLFSSLYEDKVMERITERNFEMMSGKYQKEQLEIEARLKEVTETLNDSYEKSQGVRDFLSLIRNYQGIKELDATIINALIDKILVSEREKLTDGTVRQEIKIYYKFIGFVGELHITPTKRWTALKPKNCTVCGVEYVPRSGISKYCPICAKKIQREKSNESKRRSRARDKQACIELSAKNDRLM

SEQ ID NO: 49607 - DNA, 50 bp, Enterococcus gallinarum; identical to SEQ ID NO: 11112
  source 1..50: mol_type = genomic DNA

SEQ ID NO: 49608 - DNA, 40 bp, Enterococcus gallinarum; identical to SEQ ID NO: 49603
  source 1..40: mol_type = genomic DNA

SEQ ID NO: 49609 - DNA, 50 bp, Enterococcus gallinarum; identical to SEQ ID NO: 19274
  source 1..50: mol_type = genomic DNA

SEQ ID NO: 49610 - DNA, 40 bp, Enterococcus gallinarum; identical to SEQ ID NO: 49605
  source 1..40: mol_type = genomic DNA

SEQ ID NO: 49611 - protein, 501 aa, Dorea longicatena
MKQPYNTTIYNTALYLRLSRDDELQGESGSIQTQRMMLRQYAAEHGLTVVDEYIDDGWSGTNFERPSFQRMIDDIEDGKINCVVTKDLSRLGRNYILTGQYTEIYFPSKGVRYIAINDNVDTINGESELAPFLNILNEMHARQTSKKVKAAMHTRFANGAHYGAYAPLGYVKDPDKKGHLLIDPETRWIVEKIFDLAVHGRGAASITRILVEEKVPTPGWLNYERYGTFANIYAGAPAEKAYAWTIAQVKSILKEETYIGHSVHNKQSNISFKNKKKVRKPQEEWYRVENTHEAIISEEVFQKVQELIASRRRRQKNGTTQIFSGLVKCADCGWSLAYGVNSQNKNPYAHYHCSKYGQGLRQCSMHYIRYDVLYAYVLARLQYWSMMVQKDEDKLLKRLLNASDRERNSAKKKQAAELKKAEKRKAEVDGLFAKMYEDWSAGRITEYNFNMLSEKYQNEQKELETKIRQLHETMEAAVQTAADAEKWIALMKQYVNPVELT

SEQ ID NO: 49612 - DNA, 50 bp, Dorea longicatena
  source 1..50: mol_type = genomic DNA
aacagtatgtcaaccctgtggagctgaccgaagcggaattttattccctc

SEQ ID NO: 49613 - DNA, 40 bp, Dorea longicatena
  source 1..40: mol_type = genomic DNA
gcgccacagacaaaggagctgaccgccgaacttctgaaca

SEQ ID NO: 49614 - DNA, 50 bp, Dorea longicatena
  source 1..50: mol_type = genomic DNA
aacagtatgtcaaccctgtggagcaaaccgaagcggaattttattccctc

SEQ ID NO: 49615 - DNA, 40 bp, Dorea longicatena; identical to SEQ ID NO: 18210
  source 1..40: mol_type = genomic DNA

SEQ ID NO: 49616 - protein, 535 aa, Sphingomonas paucimobilis
MTVPLRAALYLRVSTARQAEHDVSIPDQRKQGEAYCLSRGLELVDTFVEAGASATNDRRPEFQRMIEAGTSKPAPFDVVVVHSFSRFFRDHFELEFYVRKLAKNGVKLLSITQEMGDDPMHVMMRQIMALFDEYQSKENAKHVLRALKENARQGFWNGSLPPIGYRVVDAEQRGAKMKKKLEIDPIHADTVRLAFKLALEGDGTSGPMGVKSITKHLNERRIFTRDGGRWGIGTVHRMLTRPTYFGRHEFNKRGKSKELKPAEEVIAVEVPAIIDQPTFDAVQAHLKARNPKVAHPQVVGGPTLLTGLIHCGKCGGAMTIRTGKGGRYRYYTCSMKARQGASACEGMTVAMERLDDLVANYLADRLLDPDRLEDVLAEVLDRRQERSERRREHIAELNRRSAETELRLKRLYDAIESGVADLDDPALKDRIVALKATRDQARADAERASALLLNSAQQAITPATLRKFASTARRRIRTEGGGYRRDHLRALAQRVEVDRGEVRIMGSKSNLLRVLAANGVATAANGVPIVVPKWR

SEQ ID NO: 49617 - DNA, 50 bp, Sphingomonas paucimobilis
  source 1..50: mol_type = genomic DNA
tgcccatcgttgttccgaagtggcgggccacgcccgatgaagatgagcac

SEQ ID NO: 49618 - DNA, 40 bp, Sphingomonas paucimobilis
  source 1..40: mol_type = genomic DNA
aaaatcaacgaaatctggcggagcgggagggattcgaacc

SEQ ID NO: 49619 - DNA, 50 bp, Sphingomonas paucimobilis
  source 1..50: mol_type = genomic DNA
tgcccatcgttgttccgaagtggcgtgccacgcccgatgaagatgagcac

SEQ ID NO: 49620 - DNA, 40 bp, Sphingomonas paucimobilis
  source 1..40: mol_type = genomic DNA
aaaatcaaatgaatctgaggtagcaggagggactcaactc

SEQ ID NO: 49621 - protein, 543 aa, Ruminococcus albus
MKDKITALYCRLSNDDDLQGESNSITNQKAMLLDFAKKNGFHNTEFYVDDGWSGTNFDRPDFQRMVRDMENGKIGTVITKDLSRLGRDYLITGQYIEMIFPDHNVRYIAINDNVDTQKSENDMMVFRNVFNDFYARDTSKKIKAVFKAKGMSGKPLSPIAPYGYKKSEHDKDQWVIDEETAPVVRKIFRLCIDGYGPMKIANILTDEKILRPTAYNELRSTGQITCEKPYRWNCKSVVGILERQEYLGKIVNFKTRQKSYKCHKTLTNPVEDRMIFENTHEPIISQQDFDLVQEIRNNRRRKQKTNEINPFSGMVYCADCGKLMYICRHSKEGKSTEHFKCGSYSYDSKVCSAHYIRTVVLEQVVLAEMNSILDTVTKNEEEFVKTTIDSRNSEYMSEVKSAKKLLTKSEKRITELDRLFTRLYEDNVLGKISDSRFEVMSKNYENEQEQLKVKVAELTKFIEDKEQKCSDIHDFIELVKKIKHIDELTPNNLREMIERIIVHEPDKSSGHRQQEIEIIFRFNVVKSRIVLDGRDFDRRKKAA

SEQ ID NO: 49622 - DNA, 50 bp, Ruminococcus albus
  source 1..50: mol_type = genomic DNA
ttcgtgctttatcgctagtgaacattatctgggtagcgataaagaagtat

SEQ ID NO: 49623 - DNA, 40 bp, Ruminococcus albus
  source 1..40: mol_type = genomic DNA
aatgccaaggaggagagcttttggtcaagcttttcgcgaa

SEQ ID NO: 49624 - DNA, 50 bp, Ruminococcus albus
  source 1..50: mol_type = genomic DNA
ttcgtgctttatcgctagtgaacagaatctgggtagcgataaagaagtat

SEQ ID NO: 49625 - DNA, 40 bp, Ruminococcus albus
  source 1..40: mol_type = genomic DNA
atggccaaagaggagagaggagggtcaatcttttcataaa

SEQ ID NO: 49626 - protein, 492 aa, Faecalibacterium prausnitzii
MTAVIYARYSSDNQREESIEGQIRECTAYAEKNDITIVKHYIDRAISAKTDNRPQFQQMIKDSDKKLFDIVLVWKLDRFARNRYDSARYKTQLKKNGVKLMSATEIISEGPEGIILESVLEGYAEYYSADLAEKVVRGQTENILKGRCNGGRGTFGYTLDSERKFHIDPLASPFVLESFTKYRDGLTMKEIRDWLNENGIKNPVGGEFTYNSVEHMLKNRRYIGELKFRDVVVPDAIPPIVPLELFDDVQEKIAKNKKAPARRKAEDDYLLTTKLHCGCCGALMFGESGTSRTGEVHRYYKCATAKKKKGCKKKTVRKQWLEDLVVNQTMQLVRDDAAMESIIAKVMELQDRENTNLPLYEKQLRDAESGIQNMLNAIQAGILTSSTKERLEQLEETKRELEARIAEEKLAKPKIKEEFIRFWLMRFRKLDMSLKDQRQALVDTFINSIYLYDDKVLITFNYKEGTQTITFEEAAQAASKENGSDLDCFTAP

SEQ ID NO: 49627 - DNA, 50 bp, Faecalibacterium prausnitzii
  source 1..50: mol_type = genomic DNA
ggttcggatttggattgctttactgcaccaaacaatgaaaatccgaacct

SEQ ID NO: 49628 - DNA, 40 bp, Faecalibacterium prausnitzii
  source 1..40: mol_type = genomic DNA
ggttcgaatcctcccggtcgcaccaaggactgctgcacag

SEQ ID NO: 49629 - DNA, 50 bp, Faecalibacterium prausnitzii
  source 1..50: mol_type = genomic DNA
ggttcggatttggattgctttactccaccaaacaatgaaaatccgaacct

SEQ ID NO: 49630 - DNA, 40 bp, Faecalibacterium prausnitzii
  source 1..40: mol_type = genomic DNA
ggatcaaatcctgcctttgccacccagcattgcagcacag

SEQ ID NO: 49631 - protein, 567 aa, Streptomyces scabiei
MTVPGAMKAGISYLRVSTKEQAEKGGQAEGFSIPAQREANRRKAESLGVVIVAEFIDAGESAKSADRPDLQRMLRYLAENPVDYVFVHKVDRLARNRVDDVEITLAIKKAGATLVSATENIDETPSGMLLHGIMSSIAEFYSRNLATEVHKGMSQKAKTGGTPGKAPLGYLNVVLRTPEGREERTVEVDPERAELISWAFEAFASGTWTLRSLADELETRGLTTKRTPKMPSRPIRPNVLHSILTNPYYRGEVVYRGVIYPGRHTPLTDLVTWQKVQDVLAANLVGERQRDHPHYLKSSVFCGDCGSRLIITNAKNRHGVVYPYFVCLGRHQKTTGCTRKALLITKIEKMVEDHWASVRLAPELRDAIEEGLRSELASHRKEAEDEHRHLVAEKAKLTAQRQKLLEAIYSGAVPMDLIASEQQRITDQLTAIEGRLGAATATFDAIETNLTRALDLARDCHAAYLAADPQLRRLFNQAFFTHLMIDEDGVHSEYAEPFDTLLDGDVLEAGQTARTDRAEGQARLREVLERPASSANKKTPSTLAGGLSVHLPTPVRGVEGSNKTTLV

SEQ ID NO: 49632 - DNA, 50 bp, Streptomyces scabiei
  source 1..50: mol_type = genomic DNA
aggttcgaataaaactactttggtgcgcctccgtgactcgctttcgaacc

SEQ ID NO: 49633 - DNA, 40 bp, Streptomyces scabiei
  source 1..40: mol_type = genomic DNA
tgggcacctcatgcaaggtgcccccggcaggattcgaacc

SEQ ID NO: 49634 - DNA, 50 bp, Streptomyces scabiei; identical to SEQ ID NO: 49632
  source 1..50: mol_type = genomic DNA

SEQ ID NO: 49635 - DNA, 40 bp, Streptomyces scabiei
  source 1..40: mol_type = genomic DNA
tgggaaccttgtgtaaagtgccccagacaagatttgcacc

SEQ ID NO: 49636 - protein, 508 aa, Flavonifractor plautii
MQKYVIALYIRLSIEDYKYDSLSIENQSLVLHEYAASMPEALNAEIMEFIDNGYSGTNFERPQIQKLIELVRANQIDCIIVKDFSRFGRNSIETGYFIERVFPLFHTRFISISDDFDSSKFKGDTGGMDVAFKYLISEYYSRDMSIKTKSAKYAKMQRGEYQSKICPYGYRKSADGRMEPDPEAAAIVQLIFQLATEGINATAITRELFRRSIPTPGQYKAAHGNHTHDISRCHGIWSTSTILRILEDERYTGVYVIGKRAVLEVGGNRSRLKDRESWYIIPDHHPAIIEKAVFDTVQASQLRFSQPNKKKRDYPLKGKAFCGCCGHALSRTMQKTSYYHCRHSEADVESRCHKMRLNAAELEQAVFLTLKKQMEAAAPLAPDGTLRVDASVPERTEYEQQIEALQDGKRALYERYLMGEIDLNTYKAEKAACDELLLKTKNAYAAVLAQAKQKQDEQARQDSRKEASKAIFDADALTTELAELLIDRVLVYPDKRIEIAYKIQDIFA

SEQ ID NO: 49637 - DNA, 50 bp, Flavonifractor plautii; identical to SEQ ID NO: 19472
  source 1..50: mol_type = genomic DNA

SEQ ID NO: 49638 - DNA, 40 bp, Flavonifractor plautii
  source 1..40: mol_type = genomic DNA
caggaagctggcacacgaatgacggagttcgtgaaatcga

SEQ ID NO: 49639 - DNA, 50 bp, Flavonifractor plautii
  source 1..50: mol_type = genomic DNA
tttgtcgtgtgcttgacatacggggacccttacggtataattacgacaaa

SEQ ID NO: 49640 - DNA, 40 bp, Flavonifractor plautii
  source 1..40: mol_type = genomic DNA
cagggagcttgcagacgaagaaaagggtttgtgccattga

SEQ ID NO: 49641 - protein, 496 aa, Enterocloster bolteae
MYEDIKTACLYVRFSSHNQTEQSIEGQTRVCRDFCKRHNIRIVEIYADRATSASKDIEKRVQFLKMIKDSEKGLFDAVIVYKLDRFARSRYDSATYKYRLKRNGVQLISATENISNDPEGIILESVLEGMAEFYSAELSQKINRGMRESAYKHNSIGGAIPLGYKIEDKKLVIDPKTAPIVKEAFEKYADGETVAEICRQFNARGYKTSKGTAFGKSSFTKIFRNERYIGVYTFHDYRAEDAIPAIIDKDLWDRVQLRVGKIKNAPARNKAKVVYLLSGKIFCGHCGSKMNGNCNAGNYCYYQCYGKKNGNVDCKKKNIRKEFIERLVAQDALSLLTDEYIEQIATIACEKNQHEIELDSALPTIRDRIHQVDLSLNHLLKAIESGSAPDMLVKRMGELEKEKKDLQAQAKKESEDIVELDKAQVIYWLEQFRGGSIEDEEFCRMLIDLFVNSVTVWDEDDNTYKVTVAYNLTSLPTKTYRLNKGGTLSDFASNAP

SEQ ID NO: 49642 - DNA, 50 bp, Enterocloster bolteae
  source 1..50: mol_type = genomic DNA
ttgtcggatttcgcttccaatgcaccaggtatgagtgcaaatccaacaat

SEQ ID NO: 49643 - DNA, 40 bp, Enterocloster bolteae
  source 1..40: mol_type = genomic DNA
gatcggattcctgaaaccaccaggaccgcgatggtcataa

SEQ ID NO: 49644 - DNA, 50 bp, Enterocloster bolteae
  source 1..50: mol_type = genomic DNA
ttgtcggatttcgcttccaatgcatgaggtatgagtgcaaatccaacaat

SEQ ID NO: 49645 - DNA, 40 bp, Enterocloster bolteae
  source 1..40: mol_type = genomic DNA
gatgggactgctgataccatgatgactgcactggtaatag

SEQ ID NO: 49646 - protein, 550 aa, Pseudomonas aeruginosa; identical to SEQ ID NO: 11731

SEQ ID NO: 49647 - DNA, 50 bp, Pseudomonas aeruginosa; identical to SEQ ID NO: 11732
  source 1..50: mol_type = genomic DNA

SEQ ID NO: 49648 - DNA, 40 bp, Pseudomonas aeruginosa
  source 1..40: mol_type = genomic DNA
gctcatggttccgatttcctgcatgactggtgcagatagt

SEQ ID NO: 49649 - DNA, 50 bp, Pseudomonas aeruginosa
  source 1..50: mol_type = genomic DNA
ttttatgccgccagtagcatcttgaaccagatcacacttccagcataaat

SEQ ID NO: 49650 - DNA, 40 bp, Pseudomonas aeruginosa
  source 1..40: mol_type = genomic DNA
acccatggtcctgattcccaaattgactggtgaagaaatt

SEQ ID NO: 49651 - protein, 494 aa, Arthrobacter sp YN
MAAKRAAIYARISQDRNGAGLGVQRQEEDCRKLAEAQGLKVVGVFTDNDISAYKKKIRPGYRSMLEAMESGAVDVVVAWHTDRLHRSPLELEEYISVSELHNVTTQTVQAGKLDLSTSTGRMTARIHGAVSRQESEHKADRIRREQEQKAMNGQWTGGARPFGWQFLDRKPVLDEAEAAIIREAHSHVLAGLSLGSFIDSLGERGIKTARGGSWTYATLRQLLLRPRNAGLAEWKGEIVGTSEFPAIVERHVWEATRSVLTDPARRRSTTNKVKYLLAGIALCECLRPVKSGQTSDRKGGKHMIYRCSERGPGHVNKRIEYVDAVAEHDILFQMALTAMMQPTADVDTVRVDELKTSETAYREKLNEAAKLFATDVINGEQFAVMNREIKAKLVEVSDELADMSTAGAKRQVIEIPDYIDWSDAETTSQWRGWSLERKRAWIREHVNVILHRHSRGSARVFDKATVQVSLKSVETAQQAVERWRSLHFGGPKSA

SEQ ID NO: 49652 - DNA, 50 bp, Arthrobacter sp YN
  source 1..50: mol_type = genomic DNA
aattgcgtttcaacacactccgggctccctgcctaagttgaaacgcaata

SEQ ID NO: 49653 - DNA, 40 bp, Arthrobacter sp YN
  source 1..40: mol_type = genomic DNA
catcgccctcaactccgggcttcccggtatgtgcactgtg

SEQ ID NO: 49654 - DNA, 50 bp, Arthrobacter sp YN
  source 1..50: mol_type = genomic DNA
aattgcgtttcaacacactccgggtcccctgcctaagttgaaacgcaata

SEQ ID NO: 49655 - DNA, 40 bp, Arthrobacter sp YN
  source 1..40: mol_type = genomic DNA
cctccccctcagctcagggtcagccagcatgtgaactggg

SEQ ID NO: 49656 - protein, 559 aa, Streptomyces hirsutus
MAANAQVSAGQSPTPFTGSVNAPDTFRPALRGLSAVRLSVLTDETTSPERQRAANEGAAAALGIQLSPEREAVDLGVSASKTTPFERPELGAWLTQRADEFDALCFWRFDRAIRSMADMSALVDWARAHRKMIVFAEGPGGRLVLDFRNGVDLITQLLIQVFAFAAEFEAQSIRERVTGAQAAMRLMPLRWRGSRPAYGYAPAELEGGGWTLTPDPEAVAVIERIIKELHDGKSVSAIAENLNNEGVPSPRDYWALKKGRTTGGKTGGAKGESAQRDRFRWTPAVITRLLRNPNLLGWKMHKGTPVRDDKGAPVLITNDPVLTREEFDAVGALLDARSIDNRERKDTDALLLRVIHCDSCGSRMYLNKQVSKKNQAPVYKCNAHGRGVRCDAPAHVRGDWADEYAEREFLRSVGGLRVTSRRVIPGYDPQPEIEATSAELEAHMKARDLFNNPVSEGIWNKQAAALNARLTELLTREATPERVVMEDTGRTYADTWAHADTAKRRAMLVDAGAHLSVKRGTRGGWRRLDESRVSFELRQGFFAEADDVLNGLTAELAHP

SEQ ID NO: 49657 - DNA, 50 bp, Streptomyces hirsutus
  source 1..50: mol_type = genomic DNA
aactgctagttgtgagtgttcggatctccgaacactccttagatcacgtt

SEQ ID NO: 49658 - DNA, 40 bp, Streptomyces hirsutus
  source 1..40: mol_type = genomic DNA
gaactcgttgccctccgggtcggcgaggaccatccacggc

SEQ ID NO: 49659 - DNA, 50 bp, Streptomyces hirsutus
  source 1..50: mol_type = genomic DNA
aactgctagttgtgagtgttcggagctccgaacactccttagatcacgtt

SEQ ID NO: 49660 - DNA, 40 bp, Streptomyces hirsutus
  source 1..40: mol_type = genomic DNA
agactcggagccctcccgggcgggcgggaccacccacgcc

SEQ ID NO: 49661 - protein, 562 aa, Faecalibacterium prausnitzii
MASQKYNILYGRLSQEDERQGESNSIHNQKLFLEKYAADNGFENTLFLSDDGYSGTNFERPAWKKIVEMIENGEVETLIVKDLSRLGREYLQVGQLTELYFPEKGVRFIAVNDSVDSLVESSNDFNPIRNWANELHAKDTSKKVRAIKKMQAERGERLGGRPPYGYRKKSPDSKELIPDEEAAAVVRRIFDLCASGKGPNQIARILAADQVLTPTNYYYRKTGKSHKGLDTTRPYAWCSSTVTGILDSKVYLGHMPGLRASSLSYKNKKIVRRPESEQVLVEHTHEPLISQEQWDIVQDVRKHKKRIPKHMDEPNLFAGLVFCVDCGKPMVLHRASSMSKSSYNFKCYTYGKRGKAECSPHHIREEELIQIVLDDLRRVTHFARMKERQFAEYINQKNTLELRREIDWVQKELNTMRRRNGELSALFKRLYEDNVLGRVTNEQFRMLSADYNAEQKELESAIPAKEEQLERLKAAVANVDAFIEKAKQYTAIDHLTPELLRLFIQRIEVGERTKKYSRSAGQSIRIVYRDIGTLDSPMQAGETAPRMAPPITSKEELIRMLA

SEQ ID NO: 49662 - DNA, 50 bp, Faecalibacterium prausnitzii
  source 1..50: mol_type = genomic DNA
ttgtgtccctatgaacgctatcagaaggggtaagccccataggtacacaa

SEQ ID NO: 49663 - DNA, 40 bp, Faecalibacterium prausnitzii
  source 1..40: mol_type = genomic DNA
gaaaaacctcgcaaaaccgaaaggttctgcgaggtttttg

SEQ ID NO: 49664 - DNA, 50 bp, Faecalibacterium prausnitzii
  source 1..50: mol_type = genomic DNA
ttgtgtccctatgaacgctatcagtcggggtaagccccataggtacacaa

SEQ ID NO: 49665 - DNA, 40 bp, Faecalibacterium prausnitzii
  source 1..40: mol_type = genomic DNA
gaacaacctagaacaaccgtcaggtccggccaagtcttgg

SEQ ID NO: 49666 - protein, 517 aa, Mycobacterium avium
MAENRTARALIVTRLSRVTDATTSPERQLASCRELITSRGYEEVGLAEDLDVSGAVDPFDRKKRPQLASWLHDHQHEFDVLVAYRVDRFTRSLRKLQELVHWCEDNGKTMVSATEPHFDTTSPFAAVVIALMGTVAEMELEAIRERTKSAAQHNIKAGRYRGSVPPWGYRPDKSTGEWRLVPDPDQVTVIHEVAQRVISGDSLNSIAHDLTRRGIKTPKGNDWSGTPLKRSLMSEAMLGLVTDRSGKARRGDDGSPLQRAEPVLDRETWTQVRETLSSRSQGSRPKSQGSLLTRVIFCGVCGRPAYKFNGGSHSQFPRYRCQSATKAEKCGNRTIRADEVTKLVETGVLSMLGDSERMVKVWEAGSDNANELAELDELLADLTDQIGTGQFKRGTPQRERLDERIRLLAARREELASQPLKPSGWHWTSTGEQFGPWWEEQTVEARNTWLRSAGVRVEFDHKQVRIEYGDLQTMLVGLSAGDTAKTMEETFALMAAKGIQGITINTDGTAVITPKET

SEQ ID NO: 49667 - DNA, 50 bp, Mycobacterium avium
  source 1..50: mol_type = genomic DNA
cttaccgcttcgacgacagccgtctcaattggtgaagtggtaccatcaat

SEQ ID NO: 49668 - DNA, 40 bp, Mycobacterium avium
  source 1..40: mol_type = genomic DNA
cttgtcgacaaccgccgtctcggtggtgagcaccatccgc

SEQ ID NO: 49669 - DNA, 50 bp, Mycobacterium avium
  source 1..50: mol_type = genomic DNA
cttaccgcttcgacgacagccgtctgaattggtgaagtggtaccatcaat

SEQ ID NO: 49670 - DNA, 40 bp, Mycobacterium avium
  source 1..40: mol_type = genomic DNA
cttggggactacctgcctctgggtggggaggaccacctgc

SEQ ID NO: 49671 - protein, 497 aa, Oscillibacter sp
MNAIYARQSVDRADSISIESQIEFCQYEMRGEQYKVYTDRGYSGKNTDRPAFAEMMNDIESGVIGKVVVYKLDRISRSILDFSNMMEKFGKHRVEFVSTTEKFDTSSPMGRAMLNICIVFAQLERETIQKRVADAYYSRSQKSFYMGGRVPYGFRLIPTTIEGIKTSMYEINAEEAEQVRLIYELYSKPECSYGDIIRYFQAHGILKNGKPWGRTRLADVLRNPIYVRADLSVYEFYRDQGAIMANDPSDFIGTNGCYYYKGQDSVGRKQMNLEGNHLVLAPHEGIIPSDLWLKCRAKCLEAQQIKPYQKAKNTWLAGKIKCGICGYALVDKHYSTTRSRYLLCSNKMNSKACEGPGTIYTDEFEQIIYNEMRKKMAQFKTLRRCKGNYINPELTALNVQLTQVETEIGSLMDRLSAADDTLFRYISGRVKELDGKKQELMKRISELKLHKEADYTEIYNHLTMWDELSFDDKRQTVDQLIRVIYATSDSIKIEWRI

SEQ ID NO: 49672 - DNA, 50 bp, Oscillibacter sp
  source 1..50: mol_type = genomic DNA
ttactccatcttgtacgcttcggcgaagcaaagcgtacaagatggaggct

SEQ ID NO: 49673 - DNA, 40 bp, Oscillibacter sp
  source 1..40: mol_type = genomic DNA
gcatttccagcgcttcggtgaagggctgcggctggctaag

SEQ ID NO: 49674 - DNA, 50 bp, Oscillibacter sp
  source 1..50: mol_type = genomic DNA
ttactccatcttgtacgcttcggcgtagcaaagcgtacaagatggaggct

SEQ ID NO: 49675 - DNA, 40 bp, Oscillibacter sp
  source 1..40: mol_type = genomic DNA
gtatttccagtgtctgtgtgtagtgctgcagctgtctgag

SEQ ID NO: 49676 - protein, 547 aa, Lachnospira eligens; identical to SEQ ID NO: 11466

SEQ ID NO: 49677 - DNA, 50 bp, Lachnospira eligens; identical to SEQ ID NO: 11112
  source 1..50: mol_type = genomic DNA

SEQ ID NO: 49678 - DNA, 40 bp, Lachnospira eligens
  source 1..40: mol_type = genomic DNA
tgaccgtattctggtaattgaggatggacaggtggtggat

SEQ ID NO: 49679 - DNA, 50 bp, Lachnospira eligens; identical to SEQ ID NO: 41484
  source 1..50: mol_type = genomic DNA

SEQ ID NO: 49680 - DNA, 40 bp, Lachnospira eligens
  source 1..40: mol_type = genomic DNA
tgaccctattctgttggtaactgatagacaggtagtgact

SEQ ID NO: 49681 - protein, 618 aa, Roseburia inulinivorans; identical to SEQ ID NO: 11111

SEQ ID NO: 49682 - DNA, 50 bp, Roseburia inulinivorans; identical to SEQ ID NO: 11112
  source 1..50: mol_type = genomic DNA

SEQ ID NO: 49683 - DNA, 40 bp, Roseburia inulinivorans; identical to SEQ ID NO: 49678
  source 1..40: mol_type = genomic DNA

SEQ ID NO: 49684 - DNA, 50 bp, Roseburia inulinivorans; identical to SEQ ID NO: 41484
  source 1..50: mol_type = genomic DNA

SEQ ID NO: 49685 - DNA, 40 bp, Roseburia inulinivorans; identical to SEQ ID NO: 49680
  source 1..40: mol_type = genomic DNA

SEQ ID NO: 49686 - protein, 559 aa, Streptococcus pyogenes
MSKEKIKVYLYTRVSTSIQIDGYSLEAQKSRMKAFALYNDYEIVGEYEDAGKSGKSIEGRIQFTRMMEDIKSGKDGVSFVLVFKLSRFARNAADVLSTLQIMQDFGVNLICVEDGIDSSKDAGKLMISVLSAVAEIERENIRVQTMEGRIQKAREGKWNGGFAPYGYQLIDGKLLINEEEAIAIRTIFDQYVNTSIGANGLSKYLENHGIRKIPRQNGKNPLFDAGLIRKILKNPVYNGKIAFGRRTLEKVHGTRNEYRQVEQDDYLVAEGIHEAIIPDELWQAAQVKLKAQAKKYEHVNKGKNMRTHLLSGIVKCPICGAGMFGNKSIKYKKDGTKYKDFYYYGCKHRLMNRGHKCTYNKQIREELLDDAVAEVIIKLVSNPKFASMMQEKINMKVDTSAIENEIDNYQKELRKSHSTKFKLIEEIDNLDVDDKHYKRRKQDLDDRLYRMYDKIEELEGQLIEAKAKKETIEAEKLTGDNIYKVLIYFDKLYKVMNDVERRQLIEALISEIQIYEEKQPNGQWLKSITFKLPIIDEDLNISLDNDEQVECVSLLEKRS

SEQ ID NO: 49687 - DNA, 50 bp, Streptococcus pyogenes
  source 1..50: mol_type = genomic DNA
ctggaccttttgactcccgcaaacgcatcacgtggagacggtagcactat

SEQ ID NO: 49688 - DNA, 40 bp, Streptococcus pyogenes
  source 1..40: mol_type = genomic DNA
tagatttatttccccagacgcatcacgtcgagtgcgtagt

SEQ ID NO: 49689 - DNA, 50 bp, Streptococcus pyogenes; identical to SEQ ID NO: 49687
  source 1..50: mol_type = genomic DNA

SEQ ID NO: 49690 - DNA, 40 bp, Streptococcus pyogenes
  source 1..40: mol_type = genomic DNA
aagctttatttccccagaagcaacacttagaatacgtaag

SEQ ID NO: 49691 - protein, 559 aa, Streptococcus pyogenes
MSKEKIKVYLYTRVSTSIQIEGYSLEAQKSRMKAFAIYNDYEIVGEYEDAGKSGKSIEGRIQFNRMMEDIKSGKDGVSFVLVFKLSRFARNAADVLSTLQIMQDYGVNLICVEDGIDSSKDAGKLMISVLSAVAEIERENIRIQTMEGRIQKAREGKWNGGFAPYGYKLEDGKLFINEEEAIAIRTIFDQYVNTTIGANGISKYLENHGIRKIPRQNGKNPLFDAGLIRKILKNPVYNGKIAFGRRTLEKVHGTRNEYKQVEQDEYLISEGIHEAIVSDEVWQAAQVKLKSQAKKYEHVNKGKDTRTHLLSGIVKCPICGVGMFGNKCIKKKKDGTKYKDFYYYGCKHRQMIRGHKCTFRKQIREELLDDAVAEVIVKIVSNPKFASMMQEKINMKVDTSEIETEIDNYQKELRKCHSTKFKLIEEIDNLDVEDKHYKRRKQDLDDRLYRMYDKIDELESSLIDAKAKKQTIEAEKLTGDNIYKVLIYFDKLYKVMNDVERRQLITALISEIQVYEEKQPNGQWLKSITFKLPIIEENLNIGLDNDEHVECVSLLEKRS

SEQ ID NO: 49692 - DNA, 50 bp, Streptococcus pyogenes
  source 1..50: mol_type = genomic DNA
ctggaccttttgactcccgcaaacgcatcacgtggagacggtagcattat

SEQ ID NO: 49693 - DNA, 40 bp, Streptococcus pyogenes; identical to SEQ ID NO: 49688
  source 1..40: mol_type = genomic DNA

SEQ ID NO: 49694 - DNA, 50 bp, Streptococcus pyogenes; identical to SEQ ID NO: 49692
  source 1..50: mol_type = genomic DNA

SEQ ID NO: 49695 - DNA, 40 bp, Streptococcus pyogenes; identical to SEQ ID NO: 49690
  source 1..40: mol_type = genomic DNA

SEQ ID NO: 49696 - protein, 506 aa, Escherichia fergusonii; identical to SEQ ID NO: 23231

SEQ ID NO: 49697 - DNA, 50 bp, Escherichia fergusonii; identical to SEQ ID NO: 36192
  source 1..50: mol_type = genomic DNA

SEQ ID NO: 49698 - DNA, 40 bp, Escherichia fergusonii; identical to SEQ ID NO: 30133
  source 1..40: mol_type = genomic DNA

SEQ ID NO: 49699 - DNA, 50 bp, Escherichia fergusonii
  source 1..50: mol_type = genomic DNA
aaaccgaatagactttattcaaggaccattgtattgtagctattcggcat

SEQ ID NO: 49700 - DNA, 40 bp, Escherichia fergusonii
  source 1..40: mol_type = genomic DNA
gccaccaggtcattccagcaccatttaaaagataatcctt

SEQ ID NO: 49701 - protein, 530 aa, Brucella anthropi
MRKAAIYARFSTELQSPRSIDDQIALCSKFAQANGFQVVGTYNDKAKSGSSMLERDGLLRLLNDAKNGQFDAVIVEALDRVSRDQEDMAAIYKRLKFLGIDIIAVHDGKADTIQIGIRGLIGAIYLEDLKHKVRRGMSGRVRDGLSAGGKAYGYKPVLGKPGELVIDEEEAVVVRRVFREYADGKNPREIALGLNRDGFKPPRGLVWNPSTLIGSKKRTNGILRNPLYGGVLIWNRVTMVRDPETGKRVSRNNPESEWQRKNVPELRIVDEETAAMVAARVEERTFETTIERSPKRPRMLSGLLKCGKCGGGMTLDGYNNGKPRIRCVRTRETGTCDHTRKYQVEAIEFSVVEAMREQLSDPDLLKAYIDSYIQERRRLATEINRNRATIERNLSKAQGELDRMLTLCIKGLMTDEEFGERRGALDEEIAHLKADLLVAPTVDNVELHPAAIENYKKDMDELSARLAEFQKEPHSALVSSLRKVVAEVTVHPSPSNMTPIIEVKGWLASLIGEDVENGYRPKWANKVVAE

SEQ ID NO: 49702 - DNA, 50 bp, Brucella anthropi
  source 1..50: mol_type = genomic DNA
atgggctaataaagtggtagcggaggtccgttgcaccgataatagcccaa

SEQ ID NO: 49703 - DNA, 40 bp, Brucella anthropi
  source 1..40: mol_type = genomic DNA
ggagaacgatggtagcggaggagggattcgaacccccgac

SEQ ID NO: 49704 - DNA, 50 bp, Brucella anthropi
  source 1..50: mol_type = genomic DNA
atgggctaataaagtggtagcggaactccgttgcaccgataatagcccaa

SEQ ID NO: 49705 - DNA, 40 bp, Brucella anthropi; identical to SEQ ID NO: 18375
  source 1..40: mol_type = genomic DNA

SEQ ID NO: 49706 - protein, 465 aa, Mycobacteroides abscessus
MLVFVYARISKDRTGAGLGIERQIDECGLLAESLGWTVVRTFSDNDISAYSGKTRPAYEAMLAALEAGEAQGVIVWHTDRLHRRPIELEGFIDLCERKKIEVRAVKAGTIDLSTPSGRMIARMLGAAARHEVEHMIERAKSQKKQAALDGKYRGGRRPFGYEPDGLRLREAEADAIRTGVEGVLSGVSLRQIARDWNAAGLRTSSGNNEFSSLEVRKILLRPRNAGIVLHEDQRIGQGQWEAIVDTDTFAALESVLRDPGRAKHISYIRKYQGSGVYLCGRAECGAVMRISSQSIAKGTQERQKTYVCSSSKHLGRLVEYVDEYVDEHVIRRLLEPDARQVFVSAEADLTALHAQREGLRSRLDELSMLFAAGDIDGPQLKRGSAELKNKLAVIDAELTSARSSSALAELLGADDVEAAWKVIPPDIRGKIIDTLMTVTILPIGRGRQRDGSYFDPSKIQITWKS

SEQ ID NO: 49707 - DNA, 50 bp, Mycobacteroides abscessus
  source 1..50: mol_type = genomic DNA
aaacggcttagttagaggtttgacaggtcattattcgacttgataccctt

SEQ ID NO: 49708 - DNA, 40 bp, Mycobacteroides abscessus
  source 1..40: mol_type = genomic DNA
cacagcggtggcaagcgcgaggtcgtacaccgaccccatc

SEQ ID NO: 49709 - DNA, 50 bp, Mycobacteroides abscessus
  source 1..50: mol_type = genomic DNA
aaacggcttagttagaggtttgaccagtcattattcgacttgataccctt

SEQ ID NO: 49710 - DNA, 40 bp, Mycobacteroides abscessus
  source 1..40: mol_type = genomic DNA
cacagccgccgccaacgcgcaggcgcacaccgaagccgtc

SEQ ID NO: 49711 - protein, 468 aa, Mycobacteroides abscessus
MQAVIYTRISKDRAGSELGVDRQREDCQKLADELGWTVVETFSDNDISAFSGKSRPAYEAMLAALEAGKAQAVIAWHTDRLHRRPIELEGFIELCERKKIEVRAVRAGHLDFSTPAGRTNARVLGAMARYEIEHLIERAKSAKKQAALEGKFRGGRRAFGYESDGLRLRELEAEAIRTATQRVLSGVSLRQIARDWNAAGLRTAFGGKEFTSREVRTILLRPRNAGIVLHEGQHVGTGQWDAIIDAETFAAIEALLCDPARSNHISRIRKYQGSGVYLCGKCGARMGSASQVGSRRKADWRKVYTCSKVKHLGRVAEYVDEYVSEHVIARLNCPDARQVILGAEADLTALHAQREGLRARLDELTALFADSSIDGLQLKRGTSELHAKLAVVDAGLASVRSSSAVAAILAEEDVRAAWKAAPPEVRGKVIDTLMTVTILPAPPGRQPNGSYFDPTKIQIEWKTAQEAN

SEQ ID NO: 49712 - DNA, 50 bp, Mycobacteroides abscessus
  source 1..50: mol_type = genomic DNA
cacagttctagtcaacgtaatgacaggtcatatgggtgtctagtacgctg

SEQ ID NO: 49713 - DNA, 40 bp, Mycobacteroides abscessus; identical to SEQ ID NO: 49708
  source 1..40: mol_type = genomic DNA

SEQ ID NO: 49714 - DNA, 50 bp, Mycobacteroides abscessus
  source 1..50: mol_type = genomic DNA
cacagttctagtcaacgtaatgaccagtcatatgggtgtctagtacgctg

SEQ ID NO: 49715 - DNA, 40 bp, Mycobacteroides abscessus; identical to SEQ ID NO: 49710
  source 1..40: mol_type = genomic DNA

SEQ ID NO: 49716 - protein, 462 aa, Mycobacteroides abscessus
MLAVIYTRISKDRAGSELGVDRQRDDCQTLADELGWTVVETFSDNDISAFAGKKRPAYEAMLTALEAGRAQAVIAWHTDRLHRRPMELEGFIELCERKKIEVRAVRAGHLDFSTPAGRTNARVLGAMARYEIEHLIERAKSAKKQAALDGKFRGGRRAFGFESDGLRLCEAEAEAIRTATQRVLSGVSLRQIARDWNAAGLRTAFGGKEFTSREVRTILLRPRNAGIVLHEGQHVGQGQWHAIIDAETFAAMEALLRDPARSNHISRIRKYQGSGVYLCGKCGARMGSASQVGSKRKTDWRKVYTCSQVKHLARVTEYVDEYVSEHVIARLSSPDARQVILGAEADVTALHAQREGLRARLNELSDMFTEGSIDGEQMRRSTAGLQTKLAGVDAELAAIRSSSAVAAILAEDDVRAAWTATPPEVRGKVIDTLMTVTILPVPPGRQPDGSYFDPTKIQIEWK

SEQ ID NO: 49717 - DNA, 50 bp, Mycobacteroides abscessus
  source 1..50: mol_type = genomic DNA
cacagttctaatcaacgtaatgacaggtcatatagttgtctagtacgctg

SEQ ID NO: 49718 - DNA, 40 bp, Mycobacteroides abscessus; identical to SEQ ID NO: 49708
  source 1..40: mol_type = genomic DNA

SEQ ID NO: 49719 - DNA, 50 bp, Mycobacteroides abscessus
  source 1..50: mol_type = genomic DNA
cacagttctaatcaacgtaatgaccagtcatatagttgtctagtacgctg

SEQ ID NO: 49720 - DNA, 40 bp, Mycobacteroides abscessus; identical to SEQ ID NO: 49710
  source 1..40: mol_type = genomic DNA

SEQ ID NO: 49721 - protein, 468 aa, Mycobacteroides abscessus
MQAVIYTRISKDRAGSELGVDRQREDCQKLADELGWTVVETFSDNDISAFSGKSRPAYEAMLAALEAGKAQAVIAWHTDRLHRRPIELEGFIELCERKKIEVRAVRAGHLDFSTPAGRTNARVLGAMARYEIEHLIERAKSAKKQAALEGKFRGGRRAFGYESDGLRLRELEAEAIRTATQRVLSGVSLRQIARDWNAAGLRTAFGGKEFTSREVRTILLRPRNAGIVLHEGQHVGTGQWDAIIDAETFAAIEALLCDPARSNHISRIRKYQGSGVYLCGKCGARMGSASQVGSRRKADWRKVYTCSKVKHLGRVAEYVDEYVSEHVIARLNCPDARQVILGAEADLTALHAQREGLRARLDELTALFADSSIDGLQLKRGTSELHAKLAVVDAELASVRSSSAVAAILAEEDVRAAWKAAPPEVRGKVIDTLMTVTILPAPPGRQPNGSYFDPTKIQIEWKTAQEAN

SEQ ID NO: 49722 - DNA, 50 bp, Mycobacteroides abscessus; identical to SEQ ID NO: 49712
  source 1..50: mol_type = genomic DNA

SEQ ID NO: 49723 - DNA, 40 bp, Mycobacteroides abscessus; identical to SEQ ID NO: 49708
  source 1..40: mol_type = genomic DNA

SEQ ID NO: 49724 - DNA, 50 bp, Mycobacteroides abscessus; identical to SEQ ID NO: 49714
  source 1..50: mol_type = genomic DNA

SEQ ID NO: 49725 - DNA, 40 bp, Mycobacteroides abscessus; identical to SEQ ID NO: 49710
  source 1..40: mol_type = genomic DNA

SEQ ID NO: 49726 - protein, 465 aa, Mycobacteroides abscessus
MLAVIYTRISKDRAGAGLGVERQREDCLRLAESLGWTVAETFSDNDISAFSGKKRPAYEAMLAALEADRAQAVIAWHTDRLHRRPMELEGFIDLCERKKIDVRAVKAGTVDLSTPGGRMIARMLGAAARHEVEHMIERARSAKKQAALDGRFRGGRRAFGYEPDGLRLRESEAAAIRAATERVLSGVSLRQIARDWNGAGLRTAFGGKEFTSREVRTILLRPRNAGIATHEGQHVGQGQWDAIIGTETFAGIEALLRDPARSNHISRIRKYQGSGVYLCGKCGAPMRSASQVGSKRAADWRKVYTCSQTKHLGRVAEYVDEYVSEHVIARLTVPDACRVILGAEADVTALHAKREGLRSRLDELTALFADGSIDGPQLKRGTSELHAKLATVDAELASVHSSSAVASILAEDDIRAAWEAAPPDVRGKVIDTLMTVTILPTTRGRQPNGTYFDPTRIHIEWKSAQ

SEQ ID NO: 49727 - DNA, 50 bp, Mycobacteroides abscessus
  source 1..50: mol_type = genomic DNA
cacagcgctaaccaacgtaatgacaggtcatatagttgtctagtacgcta

SEQ ID NO: 49728 - DNA, 40 bp, Mycobacteroides abscessus; identical to SEQ ID NO: 49708
  source 1..40: mol_type = genomic DNA

SEQ ID NO: 49729 - DNA, 50 bp, Mycobacteroides abscessus
  source 1..50: mol_type = genomic DNA
cacagcgctaaccaacgtaatgaccagtcatatagttgtctagtacgcta

SEQ ID NO: 49730 - DNA, 40 bp, Mycobacteroides abscessus; identical to SEQ ID NO: 49710
  source 1..40: mol_type = genomic DNA

SEQ ID NO: 49731 - protein, 462 aa, Mycobacteroides abscessus
MLAVIYTRISKDRAGSELGVERQREDCQKLADELGWTVVETFSDNDISAYSGKTRPAYEAMLAALEAGRAQAVIAWHTDRLHRRPIELEGFIELCERKKIEVRAVRAGHLDFSTPAGRTNARVLGAMARYEIEHLIERAKSAKKQAALDGKFRGGRRAFGFESDGLRLREAEAEAIRTATQRVLGGVSLRQIARDWNAAGLRTAFGGKEFTSREVRTILLRPRNAGIVLHEGQHVGKGQWDAIIDAETFAAIEVLLRDPARSKHISRIRKYQGSGVYLCGKCGARMGSASQVGSKRKADWRKVYACSKVKHLARVAEYVDEYVSEHVIARLSTPDARQVILGAEADVTALNNQRNVLRARLNDLSDMFTEGSIDGEQMRLSTAGLRAKLAPIDAELAAIRSSSALATILTQDDVRAAWTAAPPEVRGKVIDTLMTVTILPVPPGRQPDGSYFDPTKIQIEWK

SEQ ID NO: 49732 - DNA, 50 bp, Mycobacteroides abscessus
  source 1..50: mol_type = genomic DNA
cacagttctaatcaacataatgacaggtcatatagtcgtctagtacgctg

SEQ ID NO: 49733 - DNA, 40 bp, Mycobacteroides abscessus; identical to SEQ ID NO: 49708
  source 1..40: mol_type = genomic DNA

SEQ ID NO: 49734 - DNA, 50 bp, Mycobacteroides abscessus
  source 1..50: mol_type = genomic DNA
cacagttctaatcaacataatgaccagtcatatagtcgtctagtacgctg

SEQ ID NO: 49735 - DNA, 40 bp, Mycobacteroides abscessus; identical to SEQ ID NO: 49710
  source 1..40: mol_type = genomic DNA

SEQ ID NO: 49736 - protein, 462 aa, Mycobacteroides abscessus
MQVVIYTRISKDRAGSELGVERQREDCQKLADELGWTVVETFSDNDISAFSGKTRPAYEAMLAALEAGRAQAVIAWHTDRLHRRPMELEGFIELCERKKIEVRAVRAGHLDFSTPAGRTNARVLGAMARYEIEHLIERAKSAKKQAALDGKFRGGRRAFGFESDGLRLREPEAEAIRSATQRVLSGVSLRQIARDWNAAGLRTAFGGKEFTSREVRAILLRPRNAGIVLHEGQHVGQGQWDTIIDAETFAAIEALLRDPARSQHISRIRKHQGSGVYVCGKCGARMGSASQVGSKRKADWRKVYACSKVKHLARVAEYVDEYVSEHVIARLSTPDARQVILGAETDVSALHNQREGLRARLNDLSDMFTEGSIDGEQMRRSTAGLQAKLAGVDAELAAIRSSSAVAAILAEDDVRAAWTAAPPEVRGKVIDTLMTVTILPVPPGRQPDGSYFDPTKIQIEWK

SEQ ID NO: 49737 - DNA, 50 bp, Mycobacteroides abscessus; identical to SEQ ID NO: 49732
  source 1..50: mol_type = genomic DNA

SEQ ID NO: 49738 - DNA, 40 bp, Mycobacteroides abscessus; identical to SEQ ID NO: 49708
  source 1..40: mol_type = genomic DNA

SEQ ID NO: 49739 - DNA, 50 bp, Mycobacteroides abscessus; identical to SEQ ID NO: 49734
  source 1..50: mol_type = genomic DNA

SEQ ID NO: 49740 - DNA, 40 bp, Mycobacteroides abscessus; identical to SEQ ID NO: 49710
  source 1..40: mol_type = genomic DNA

SEQ ID NO: 49741 - protein, 468 aa, Mycobacteroides abscessus
MQAVIYTRISKDRAGNELGVDRQREDCQKLADELGWTVVETFSDNDISAFSGKSRPAYEAMLAALEAGKAQAVIAWHTDRLHRRPIELEGFIELCERKKIEVRAVRAGHLDFSTPAGRTNARVLGAMARYEIEHLIERAKSAKKQAALEGKFRGGRRAFGYESDGLRLRELEAEAIRTATQRVLSGVSLRQIARDWNAAGLRTAFGGKEFTSREVRTILLRPRNAGIVLHEGQHVGKGQWDAIIDAETFAAIEALLCDPARSNHISRIRKYQGSGVYLCGKCGARMGSASQVGSRRKADWRKIYTCSKVKHLGRVAEYVDEYVSEHVIARLNSPDARQVILGAEADLTALHAQREGLRARLDELTALFADSSIDGLQLKRGTSELHAKLAAVDAELASVRSSSAVAAILAEEDVRAAWKAAPPEVRGKVIDTLMTVTILPAPPGRQPNGSYFDPTKIQIEWKTAQEAN

SEQ ID NO: 49742 - DNA, 50 bp, Mycobacteroides abscessus; identical to SEQ ID NO: 49712
  source 1..50: mol_type = genomic DNA

SEQ ID NO: 49743 - DNA, 40 bp, Mycobacteroides abscessus; identical to SEQ ID NO: 49708
  source 1..40: mol_type = genomic DNA

SEQ ID NO: 49744 - DNA, 50 bp, Mycobacteroides abscessus; identical to SEQ ID NO: 49714
  source 1..50: mol_type = genomic DNA

SEQ ID NO: 49745 - DNA, 40 bp, Mycobacteroides abscessus; identical to SEQ ID NO: 49710
  source 1..40: mol_type = genomic DNA

SEQ ID NO: 49746 - protein, 467 aa, Mycobacteroides abscessus
MLVVIYTRISKDRAGSELGVERQREDCQKLADELGWTVVETFSDNDISAFSGKTRPAYEAMLAALEAGRAHAVIAWHTDRLHRRPMELEGFIELCERKKIEVRAVRAGHLDFSTPAGRTNARVLGAMSRYEIEHLIERAKSAKKQAALEGKFRGGRRAFGFESDGLRLREAEAEAIRTATQRVLSGVSLRQIARDWNAAGLRTAFGGKEFTSREVRSILLRPRNAGIVLHEGQHVGQGQWDAIIDGETFAAIEVLLRDPARSKHISRIRKYQGSGVYVCGKCGARMGSASQVGSRRKSDWRKVYTCSKVKHLARVAEYVDEYVSEHVIARLSTPDARQVILGAEADVTALNNQRNVLRARLNDLSDMFTEGSIDGEQMRRSTAGLQAKLAGVDAELAAIRSSSALATILTQDDVRAAWTEAPPEVRGKVIDTLMTVTILPVPPGRQPDGSYFDPTKIQIEWKDGAAG

SEQ ID NO: 49747 - DNA, 50 bp, Mycobacteroides abscessus
  source 1..50: mol_type = genomic DNA
cacagttctagtcaacgtaatgacaggtcatatagtcgtctagtacgctg

SEQ ID NO: 49748 - DNA, 40 bp, Mycobacteroides abscessus; identical to SEQ ID NO: 49708
  source 1..40: mol_type = genomic DNA

SEQ ID NO: 49749 - DNA, 50 bp, Mycobacteroides abscessus
  source 1..50: mol_type = genomic DNA
cacagttctagtcaacgtaatgaccagtcatatagtcgtctagtacgctg

SEQ ID NO: 49750 - DNA, 40 bp, Mycobacteroides abscessus; identical to SEQ ID NO: 49710
  source 1..40: mol_type = genomic DNA

SEQ ID NO: 49751 - protein, 528 aa, Salmonella enterica
MKVPVWSYARVSTLNQVDGFGIQRQVNTINQFIQYLVLDHRLPYVLDTENITQMVAEGKSAFKGKNWNPKTKLGQYRKMVMDGVVPDSVLIVENIDRLTRLDPFQAVEIISGLINRGTTILEIETGMTYSRYIPESITVLTMQINRANGESKRKSVMMKKSHQNRYGNVSKVRPRWFDVVEVDGIKQYRTNNTAKAIQRMYNDYVNGIGAAQIVRTYGDTDNGKPWTLVTVLRALSDKRVADDARYPSIIDKALYERVQAMKLSPSKGNTHQKYMLNLFAGMSRCPLCGQAIITKRNSHGGLFTVCLGKRTDKTCTARSIAYNALERPLLNAIVGLDFSEVYGQEESNVLTLRDQWIQNERDIAAFRERLTKASRHEKFAILDELEVMNREQDELTIRLKSVDAPKDITLTYDDDKLDMNVEYRIELNNRMKKLIQRIDIVREDVSKTNYKIFCSIKYWTELLTHLVIIDVDVQRIGRGGTNQLTTTLRSVSSLDLEGNIKGNPDMEALEYWQSVVSKATQKAIESLT

SEQ ID NO: 49752 - DNA, 50 bp, Salmonella enterica; identical to SEQ ID NO: 47537
  source 1..50: mol_type = genomic DNA

SEQ ID NO: 49753 - DNA, 40 bp, Salmonella enterica
  source 1..40: mol_type = genomic DNA
cggccccatcagcagtatggaacagtcggtggtgccgccg

SEQ ID NO: 49754 - DNA, 50 bp, Salmonella enterica; identical to SEQ ID NO: 47537
  source 1..50: mol_type = genomic DNA

SEQ ID NO: 49755 - DNA, 40 bp, Salmonella enterica
  source 1..40: mol_type = genomic DNA
cggccccattggctgccgggaacaggtggtggggccggcg

SEQ ID NO: 49756 - protein, 537 aa, Dorea formicigenerans
MLKQQTKLRVRLYARLSKDDGDADKESNSITNQLQMLRYNAKEKGFEVIGEYVDDGYSGTTFNRPALNRMIKDAMDDPEPSGIMVKDMSRFGRNNAMFMYYVEEIFPNNDILFIALNDDVDTRFDENEMMPFKSIMNEYYARDTSKKIRSVKKTTALSGGFCGSFAPYGYVVDPENKRKLLVDPDTAPIVKRIFELSKQGNSVHQIARTLCEDGVLIPRAYRAMKNGTLETSTGFKFPTDWVAKNVKMILENQVYLGHMVSHKTQTKSFKNKKPVAVPKEEWIIVRNTHEAIIDEETFELVQKFISVKKQPNKTGRPNIFVGLVKCPDCGRNMAFSNPNGREPRFRCRTYVRNSNLCTTHAISYEALQQIVMSDIQKHIKNMEALGDQFIQEMHELSEKGGSKKIKQFEKDLEVAEKRIAEIDSVIMKLFEQNALGKISDERFEKMSSAYESEQKELAQKRDELRTKIRAEEKKTQSTNQFLETIRKYETVTELNRSMLVELIDSIYVYQAEGTGKDRKQRVEINYRFLAGSQCGIA

SEQ ID NO: 49757 - DNA, 50 bp, Dorea formicigenerans; identical to SEQ ID NO: 18217
  source 1..50: mol_type = genomic DNA

SEQ ID NO: 49758 - DNA, 40 bp, Dorea formicigenerans
  source 1..40: mol_type = genomic DNA
aggaatatctggcttgccagaaggcaatgcaggtatcccg

SEQ ID NO: 49759 - DNA, 50 bp, Dorea formicigenerans
  source 1..50: mol_type = genomic DNA
cggggtctcaatgtggtatcgcctactggaaaggtaacattgagatacca

SEQ ID NO: 49760 - DNA, 40 bp, Dorea formicigenerans
  source 1..40: mol_type = genomic DNA
acgctaatgtggattgccaacaggcaatgcaggcaatcag

SEQ ID NO: 49761 - protein, 511 aa, Ruegeria arenilitoris
MSNLDTKIAAVIYVRVSSSKQIKEGDGLESQLTICREFALKNNLDVEKEFRDIASGRLDQRKGMSSLLSYLKRSKGHTKAVIIDDVSRLARGMKAYLRIKEEIESAGGKLVSPRLRFGESADEILFEMMQAVFSQHFSQKNAETNKSRTRGRMLNGYYSFSRLPVGYLYVRSDNRGRKKVVRDEPVASILSELLSGFAAGRFETVGEAKSFLENDPTFMRYIGKSRLTYSYVSAILRRPIYAGRYSNLKWNIPLTTGKHSPLISYEEHHKILKRLDGKVVARVRQDVSEDFPLRGFVLCEACGNFMTANWSGGRSKHYPYYICRKHGCGRAGKSIRREQIEGEFESLLRQIQPEPGFVKVFSQMLRDAWELRRLKDRQSRRERKKRISQINSEIEKTTDRYVDTELEVVSSALERKLEKLHNEKAHEEHKLREFDLNSPDFSDAFEPAMRILSRPFDIWKKSTLEWRKAMLRMIFAAPAVYSHKQGFRTVNLTLPFRALEDLKASESGLVP

SEQ ID NO: 49762 - DNA, 50 bp, Ruegeria arenilitoris
  source 1..50: mol_type = genomic DNA
caaagcttcggagtctggtttggtgccccacacggaatgcataaaatatg

SEQ ID NO: 49763 - DNA, 40 bp, Ruegeria arenilitoris
  source 1..40: mol_type = genomic DNA
atttcatgagcttcatggtgcccccacacggactcgaacc

SEQ ID NO: 49764 - DNA, 50 bp, Ruegeria arenilitoris
  source 1..50: mol_type = genomic DNA
caaagcttcggagtctggtttggtaacccacacggaatgcataaaatatg

SEQ ID NO: 49765 - DNA, 40 bp, Ruegeria arenilitoris
  source 1..40: mol_type = genomic DNA
agttcattagcttcatggtaaatctacacggtcacacagc

SEQ ID NO: 49766 - protein, 497 aa, Arthrobacter alpinus
MASRDPNNPRIAVYARQSADEEQGITQQIDDCRAEAKYKGWRIVAEYRDNDTSASKLRGSGTQWAAMLKAFDAGEFDTVLANDVDRLTRNLSDVLELSVPRRTIRVLTVRGGIDTAVDDFMFKQLVLLAEREVKLKAARAKRYALERRATGHPTAGMVPHGYRWVAKQDRDEQGTRFVIDPDEAQDVRQIFKEFLAGAPLGQVARDLNTSGRSTRRGAPWRASTIRRVLLNPVYAALLAPAQPTGEFDSTKIRIEECVPGAWAPVVDLDQLLATRGRLIGVKPNHQGTARKWLLAGLAVCGVCREFVRSAAGETHPTAKVDGSGKAPTKRYHAYRCVRGHFMRNGDIIDAYVAEVCIARLSQRDAMALLASRPDTADIAVLHSRRLELQGRDGAIAFLIASGKMSPKAAEGALDDLASELRTVNDEIAEAVRHDPLADLAGVDDVRAWWDHSTLARRRAVVEMLMTVVIKKVGHGNRITTLPAAEETVGIEPRHGVA

SEQ ID NO: 49767 - DNA, 50 bp, Arthrobacter alpinus
  source 1..50: mol_type = genomic DNA
atatgccattagtcgccaacggtggccaccgttggcgactaatgacatat

SEQ ID NO: 49768 - DNA, 40 bp, Arthrobacter alpinus
  source 1..40: mol_type = genomic DNA
atacgccatagccacactggcggcagtagggtttgccggc

SEQ ID NO: 49769 - DNA, 50 bp, Arthrobacter alpinus
  source 1..50: mol_type = genomic DNA
atatgccattagtcgccaacggtgatcaccgttggcgactaatgacatat

SEQ ID NO: 49770 - DNA, 40 bp, Arthrobacter alpinus
  source 1..40: mol_type = genomic DNA
agacggcatagccactaagatcacagaagggtttgcagcc

SEQ ID NO: 49771 - protein, 509 aa, Burkholderia gladioli
MSKPRAYSYLRFSTPEQLKGDSYRRQTTMALEYATRKGLALDQDLTFEDLGVSAFRGTNAEAGRLAEFLEAVRAGLVPRGSYLLVEALDRLSRLSPRKAVRVLEDIVEEGITVVTLNDGREYTSANLDDDPTSLLIAIVLFMRANEESATKSRRLSAAWEGKRQRVEDRPLTAITPAWVSLNEASGKLELVPERAAIVQRIFDMYAAGIGYALIAETFNREGIPCFGRARHWHRTYIRKILVNDAVIGIFTPHRIVHEGGKKIRLPLEKVPGYFPLVISEDLFTKAQSQLNGNAGPAPKHRGAVISNLIAGLARCPICGSTMTRVMKGAGPKSGKPKLVCTKAKAGAGCQYHTVPLDSVETAVISNASYVTGTVPSGRDGLDSDLDAAEVRIEATQDEIENLLRALAVTPSTAIAERIKDLEVSLEALRTERDGLADQLMAANGPLLAKRVEELRQALEAAPLDRAKANAALRVLLSSVTVDYDSGKLLFQWKHGGETEVIYSMPREVR

SEQ ID NO: 49772 - DNA, 50 bp, Burkholderia gladioli; identical to SEQ ID NO: 35767
  source 1..50: mol_type = genomic DNA

SEQ ID NO: 49773 - DNA, 40 bp, Burkholderia gladioli
  source 1..40: mol_type = genomic DNA
cgcgggcggccatcacctgctgatgatcggcccgcccggc

SEQ ID NO: 49774 - DNA, 50 bp, Burkholderia gladioli
  source 1..50: mol_type = genomic DNA
ttggggtcttgtgaaaacaacatgaggatagtattctcaacggacccgat

SEQ ID NO: 49775 - DNA, 40 bp, Burkholderia gladioli
  source 1..40: mol_type = genomic DNA
tgcgggcggccagcgcctgaggcgccccgccccgccccgc

SEQ ID NO: 49776 - protein, 502 aa, Gemmiger sp
MSSVDKTAVIYARYSSHGQTEQSIDGQIAAAQKYAEGKGYTIIHIYADRAMTGRNDDREQFQKMLSDTATHQFGVILLWKIDRFGRNREEIAFNRYRCKKNGVRVERVAEDVPDGPEGVILDSVLEGMAEYYSLQLAQNVRRGQRESAKKSQSNGGTRMIGYKVNPDTKRYEIDPDTAPFITEVFRRYAGGQTMAEIAAWLNAQGLRATRGGMFTVNSLHRLLKNEKYTGVYIFRDIRNEGGMPALIDRATFDKVQEMLKVNRRAPSRVWSRAEYLLTDKLFCGHCGAPMAGVSGHGHTGVKHNYYTCLNRKRKKSCTKKSVRQDVLEPLVLKSIRNLLQDDATLKYIADRVWAEYERSDTSGDTIRALDRQIADVDRALSNVMKAIEMGIINEMTKARMDELTEQKQALSAARADAGLARGFKLTRNMVLYFLRKMAAMDISDRDSQKRLIKTFVNAIYLYDDHFDIAFNYTENGKVIVKMQEIDDASTGGAFGCCAQCPT

SEQ ID NO: 49777 - DNA, 50 bp, Gemmiger sp
  source 1..50: mol_type = genomic DNA
gttcggatgctgtgcgcagtgtcccaccatagtacgaacatccgaacccc

SEQ ID NO: 49778 - DNA, 40 bp, Gemmiger sp
  source 1..40: mol_type = genomic DNA
gttcgactcccgtcagctccaccaaaataaaagcacccgc

SEQ ID NO: 49779 - DNA, 50 bp, Gemmiger sp
  source 1..50: mol_type = genomic DNA
gttcggatgctgtgcgcagtgtcctcccatagtacgaacatccgaacccc

SEQ ID NO: 49780 - DNA, 40 bp, Gemmiger sp
  source 1..40: mol_type = genomic DNA
attctactcctgtctgctctcctaaattaaaaaaaccctt

SEQ ID NO: 49781 - protein, 538 aa, Roseburia inulinivorans
MIRQATQNLITALYPRLSHEDELQGESNSISNQKRILEAYAKQNGFTNLRWYTDDGYSGANFQRPGFQAMLADIEAGKVGTVIVKDMSRLGRNYLQVGFYTEMLFPQKGVRFIAVNDNVDSENGGMDNDFTPLRNLFNEWLVRDTSKKIKAVKRSKGMSGKPVTSKPVYGYLMDEDENYIIDEEAAPVVRQIYQLCLAGNGPTKIARMLTEQQIPTPGTLEYRRTGSTRRYHPGYECKWATNTVVHLLENREYTGCLVNFKTEKPSYKVKHSVENPIEKQAIFPDHHEPIIDTETWERVQELRKQRKRPNRYDEVGLFSGMLFCADCGHVLYQQRYQNKDRKQDCYICGSYKKRTRDCTAHFIRTDLLTAGVLSNLRQVTEYAAKHESRFVKLLIQQNEIGGKRKTAAATKQLEQAQERIAEVSRIIKRLYEDNVNGKISDERFMELSADYEQEQRELKERTAALQAELDKSQAATVNAEKFMGIVRKHLAFEELTPTLLREMVEKIVVHECSYDENGTRRQDIEIYYSFVGKIDLPE

SEQ ID NO: 49782 - DNA, 50 bp, Roseburia inulinivorans
  source 1..50: mol_type = genomic DNA
ttacttctttatcgcacatcaataaatgctcatgtgccataaagtaacac

SEQ ID NO: 49783 - DNA, 40 bp, Roseburia inulinivorans
  source 1..40: mol_type = genomic DNA
ccgttacaatcctcgacataatattcatatcatcaatcac

SEQ ID NO: 49784 - DNA, 50 bp, Roseburia inulinivorans
  source 1..50: mol_type = genomic DNA
ttacttctttatcgcacatcaatagatgctcatgtgccataaagtaacac

SEQ ID NO: 49785 - DNA, 40 bp, Roseburia inulinivorans
  source 1..40: mol_type = genomic DNA
tctttagcatccctgatatgatattgatatgatgaatcac

SEQ ID NO: 49786 - protein, 659 aa, Pseudomonas moraviensis
MTRTDEARSMAKADEAPARKVLYKYIRFSSIQQAKGSSFARQNERLEKYAAENGFEVDDSLDLKDFAKSGFHGINKEVDQGLGRFMLAIEKGLIPTDGSAYLAVEQFDRLSREDIFKAQKTLNDILEKNVNVITLMDGRIYTQKSLSNFMEVLYSLFLMEQAHQESLKKSDRIKGAYTNKVKNLKALAKEQRQAMIEWEKHKTGDKPVLEPLINQIQFSSQVPYWIDQKVEVVSGRKFRRFVINEEKAGIIRYALSLLNDDNGYMNVAATLNKEGVPRLDFVSNKKRSTRKDIWTNRAVNEFVNSDAIFGDLSLYDNFYADKEFEYDGVKVSKKVGKRTHVENIPNYYPAVIDKKLVMGLRARANAKKKGRVAGRTTNTNLFQNLLFCGKCGDSMHLIQSKRTTNKGTYQRFYLVCYAARHKACDAKMIAYQELERELVKYLVMPINEAHLGDTSKVINEARNEKILELEGEIKGVEDQIDAYRQEMKNNKNLKPSIALTFLSELESDKEFKIHQLKELQLQKDKTIEYLESENVSSFDINTEEGRIAFKVAVKQRYAGFFVFTEDHAVMVFERTGAAEIFKVEIQNRRGKVMEPNRTADTITLFQEKLKYLKKLSENYKEGKLYELVKAYKVNDIDVFEEEYINRGLPQPLSYQRDFD

SEQ ID NO: 49787 - DNA, 50 bp, Pseudomonas moraviensis
  source 1..50: mol_type = genomic DNA
ggttgtcaaattgtccagagcgggctatagttatgggcaattaagcaacc

SEQ ID NO: 49788 - DNA, 40 bp, Pseudomonas moraviensis
  source 1..40: mol_type = genomic DNA
cggctgctatcagagcgagctgccattgctcgaacagatc

SEQ ID NO: 49789 - DNA, 50 bp, Pseudomonas moraviensis
  source 1..50: mol_type = genomic DNA
ggttgtcaaattgtccagagcggggtatagttatgggcaattaagcaacc

SEQ ID NO: 49790 - DNA, 40 bp, Pseudomonas moraviensis
  source 1..40: mol_type = genomic DNA
agactgatatcagagcttggtgtcattccttgaacaaatt

SEQ ID NO: 49791 - protein, 485 aa, Amedibacillus dolichus
MKGVIYARYSSDNQREESIEGQLRECKDYAERNGITILGTYIDRALSAKTDNRPEFQKMIKDSAKGLFDVVLVWKLDRFARNRYDSARYKNLLKKNGVKVISARENISEGSEGIILEAMLEGYAEYYSAELSEKVIRGLTDNALKCKYNGGTVPMGYYIDEQQFYQIDPKTAPVVLEMFTKYSEGATMQELVNLLNSRGMRSIRGGKITLNIMNHLLKNRRYMGEYSYRDVVKEDGIPAIVPKELFERVQERLAKNKKAPARHKAEDDYLLTTKLYCGKCGSFMVGESGTSHTMKVHRYYRCVNTKKKKLCDKKAVKKDWIEDLVVNYTMKAIMNDEVMERLIDTLMELQKKESTDLPLLKKQLAETEKGINNMLNAIQAGIFTPSTKQRLDELEETKSQLEVSILQEEMHNPLLTREQIAFFIYRFRKFDVTKREQRQRLIDSFVNAVYLYEDKIILTFNYKDGSKTITLADVEGSDLSSFGAP

SEQ ID NO: 49792 - DNA, 50 bp, Amedibacillus dolichus; identical to SEQ ID NO: 43637
  source 1..50: mol_type = genomic DNA

SEQ ID NO: 49793 - DNA, 40 bp, Amedibacillus dolichus
  source 1..40: mol_type = genomic DNA
agttcaaatctcatcgactgcaccatagtgtatattcatc

SEQ ID NO: 49794 - DNA, 50 bp, Amedibacillus dolichus
  source 1..50: mol_type = genomic DNA
ggttcggatttatcctcattcggtctaccagaccatgataatccgaaccc

SEQ ID NO: 49795 - DNA, 40 bp, Amedibacillus dolichus
  source 1..40: mol_type = genomic DNA
tttcaaacactcatcaactctaccatagtctatcttcatt

SEQ ID NO: 49796 - protein, 526 aa, Mycobacteroides chelonae
MKQQLRAVVGSRVSHLDDDKATTRKVSHKAQTEEGERWAKSQGYEVVGAFEDLGVSVGKTTPFERPDLGKWLAPERLHEWDVLVFSKIDRAFRSTSDCVDFARWTKENRKILAFSGDGVVLDYLHPKGESLDQMMSEFFIYVGSFFAAIELNRFRTRATDRLSYLRMTDRVSHGVPPLGFRTVPHPSGQGKGLERDPEGYALLHEIKDKLLHENYSMTALVKWLHDPRCLANKETEPTTGRSRSVHVANCACRQTNAANARGGDKWWTATTLRRVLTSERTQGIRMSGGKPVLDTQGIPIRMAEPTFTDDEWELIQQAVNQRSTSGRARYMTENPFAGVVYCVCGYAVSLHRRKSSSGKEHTYVRCGQGCRGAWKLADVNELLDSGFLGRYGDEEMTRQVFVPGEDRSEEMTGIDRSLTRLRWESDNNLVDDEQLYQARMEALLTRKREIGQVVVPARWERQGTGKTYRQLWADPGTDRRQVMREARYRLVLHFVPNGSSSSFVTHAEFQDMWQSEPVVAQPKKEG

SEQ ID NO: 49797 - DNA, 50 bp, Mycobacteroides chelonae
  source 1..50: mol_type = genomic DNA
gttgttgtatgtgcagccttcacgttgtactgtgccatacatgaaacaac

SEQ ID NO: 49798 - DNA, 40 bp, Mycobacteroides chelonae
  source 1..40: mol_type = genomic DNA
gtgcccggtggctttcacgttgtactgcgccacttcgatc

SEQ ID NO: 49799 - DNA, 50 bp, Mycobacteroides chelonae
  source 1..50: mol_type = genomic DNA
gttgttgtatgtgcagccttcacgatgtactgtgccatacatgaaacaac

SEQ ID NO: 49800 - DNA, 40 bp, Mycobacteroides chelonae
  source 1..40: mol_type = genomic DNA
gtgccagcttactttcttgatctactgggacacttcgacc

SEQ ID NO: 49801 - protein, 542 aa, Dorea formicigenerans
MIYQKGSNLFNVAIYIRLSREDGDKEESDSVGNQRKLLTEYVNKHDDFILYDVYIDDGFTGTNFNRPDFHRMIADIEDNKVNCVVVKDLSRFGRDYIDTGRYLERIFPELNVRFISVTDNIDSMKQAYDMLLPIKNIFNEQYARDISNKVQATVKSKQKAGEFIGAFTSYGYKKSPANKNKLVIDEYASEVVKRVFTMYAQGIGKQSIAKILNAEGILCPSEYKKLNGENYKNCNRLEKTSYWTYSTIKVMLQNEIYIGNMVQGKKHQRMRSKQRLVEKENWIRVENTHEPIIDRQLWDKVQKLLTKKHRDIDLETNKNIFAGFIKCGDCGRAMMKNFWRRADGSKSYSFYCGTYKRSGKDYCTPHTLPFQVLNDIVLGDLKQIIRNVENLQELVKSQSFTATKIRKSTDIELIKLKAELERVKKLKKSIYEDYKDELISKEEFLSYREDYQQKETLYSKQIETLEEKKKESVTEDVFETPWLRRLLELKDIEELDRDIIVEMIDQITVYENHKLKISYNFGNELEHLFSSVYCEDLEKKAI

SEQ ID NO: 49802 - DNA, 50 bp, Dorea formicigenerans; identical to SEQ ID NO: 43037
  source 1..50: mol_type = genomic DNA

SEQ ID NO: 49803 - DNA, 40 bp, Dorea formicigenerans
  source 1..40: mol_type = genomic DNA
ctgggtatcatcattcccccatgccgcatcaaatgagagc

SEQ ID NO: 49804 - DNA, 50 bp, Dorea formicigenerans; identical to SEQ ID NO: 43037
  source 1..50: mol_type = genomic DNA

SEQ ID NO: 49805 - DNA, 40 bp, Dorea formicigenerans; identical to SEQ ID NO: 18400
  source 1..40: mol_type = genomic DNA

SEQ ID NO: 49806 - protein, 559 aa, Bacillus subtilis
MLILKGDQKLSTDNIMHLIGKINALIYARVSTTDQANKGFSIESQIERCKERAISKFGYKESEIIALVEPGGMGDDPNRPALNHALYLLEKGLGKKFIVLHPDRLTRDNTLQGVVSRRIWGMGVDIEFIEFEVNPHDPESMLMYNIQGSIAQYNKAKIHANSKRGRLAKAKKGEFPSFKRLYGYKFNTVTDLPEYNEEEKEILLEMKDMLLNKKMSSNEIAKELSRRGVAAPNGKTWYQATVSRMLQNEDYTGDFYYGKSKVVQINGKKKQVPTNKDEWILIKIPPMWDKATREQIIERLKSNFKGRSRATKDYLLKNKAKCGRCGGACGSGITSKTKSGVYKYYSCRAKTAKGYQNGKKVVSCEGKKWRVDIVDEVFWNWFIKLLKNPEKFLESFLEEASDQKKIDELKAKASRLEKQLGEIDEEIANYVILFGKGKIKESMFDQLSQPLEQNKEHIENEIKIINSQLAANKQTEDKKQKMIEYIGSFSKMIKNEITIEEKRQFLDFFIEKVTLFDDDHMEVVWKSSSLNNENSHVDFLNGEQGGEFINSHKRLNHIQ

SEQ ID NO: 49807 - DNA, 50 bp, Bacillus subtilis; identical to SEQ ID NO: 46272
  source 1..50: mol_type = genomic DNA

SEQ ID NO: 49808 - DNA, 40 bp, Bacillus subtilis; identical to SEQ ID NO: 25918
  source 1..40: mol_type = genomic DNA

SEQ ID NO: 49809 - DNA, 50 bp, Bacillus subtilis; identical to SEQ ID NO: 46274
  source 1..50: mol_type = genomic DNA

SEQ ID NO: 49810 - DNA, 40 bp, Bacillus subtilis
  source 1..40: mol_type = genomic DNA
agagacggacacaggagtcaggcatatggaggtcaaaatg

SEQ ID NO: 49811 - protein, 487 aa, Bacillus subtilis
MGDDPNRPALNHALYLLEKGLGKKFIVLHPDRLTRDNTLQGVVSRRIWGMGVDIEFIEFEVNPHDPESMLMYNIQGSIAQYNKAKIHANSKRGRLAKAKKGEFPSFKRLYGYKFNTVTDLPEYNEEEKEILLEMKDMLLNKKMSSNEIAKELSRRGVAAPNGKTWYQATVSRMLQNEDYTGDFYYGKSKVVQINGKKKQVPTNKDEWILIKIPPMWDKATREQIIERLKSNFKGRSRATKDYLLKNKAKCGRCGGACGSGITSKTKSGVYKYYSCRAKTAKGYQNGKKVVSCEGKNWRVDIVDEVFWNWFIKLLKNPEKFLESFLEEASDQKKIDELKAKASRLEKQLGEIDEEIANYVILFGKGKIKESMFDQLSQPLEQNKEHIENEIKIINSQLAANKQTEDKKQKMIEYIGSFSKMIKNEITIEEKRQFLDFFIEKVTLFDDDHMEVVWKSSSLNNENSHVDFLNGEQGGEFINSHKRLNHIQ

SEQ ID NO: 49812 - DNA, 50 bp, Bacillus subtilis; identical to SEQ ID NO: 46272
  source 1..50: mol_type = genomic DNA

SEQ ID NO: 49813 - DNA, 40 bp, Bacillus subtilis; identical to SEQ ID NO: 25918
  source 1..40: mol_type = genomic DNA

SEQ ID NO: 49814 - DNA, 50 bp, Bacillus subtilis; identical to SEQ ID NO: 46274
  source 1..50: mol_type = genomic DNA

SEQ ID NO: 49815 - DNA, 40 bp, Bacillus subtilis; identical to SEQ ID NO: 49810
  source 1..40: mol_type = genomic DNA

SEQ ID NO: 49816 - protein, 559 aa, Bacillus subtilis; identical to SEQ ID NO: 46271

SEQ ID NO: 49817 - DNA, 50 bp, Bacillus subtilis; identical to SEQ ID NO: 46272
  source 1..50: mol_type = genomic DNA

SEQ ID NO: 49818 - DNA, 40 bp, Bacillus subtilis; identical to SEQ ID NO: 25918
  source 1..40: mol_type = genomic DNA

SEQ ID NO: 49819 - DNA, 50 bp, Bacillus subtilis; identical to SEQ ID NO: 46274
  source 1..50: mol_type = genomic DNA

SEQ ID NO: 49820 - DNA, 40 bp, Bacillus subtilis; identical to SEQ ID NO: 49810
  source 1..40: mol_type = genomic DNA

SEQ ID NO: 49821 - protein, 540 aa, Salmonella enterica; identical to SEQ ID NO: 32621

SEQ ID NO: 49822 - DNA, 50 bp, Salmonella enterica
  source 1..50: mol_type = genomic DNA
gtgtacatactttactaactacgagcagttatgatattatgtacgccaca

SEQ ID NO: 49823 - DNA, 40 bp, Salmonella enterica
  source 1..40: mol_type = genomic DNA
gccccattagtagcatggaacagtcggtggtgccgccgcc

SEQ ID NO: 49824 - DNA, 50 bp, Salmonella enterica; identical to SEQ ID NO: 49822
  source 1..50: mol_type = genomic DNA

SEQ ID NO: 49825 - DNA, 40 bp, Salmonella enterica
  source 1..40: mol_type = genomic DNA
gccccattgccagcacccagcagtcttgggtgccgcctcc

SEQ ID NO: 49826 - protein, 500 aa, Lentzea guizhouensis
MPPRSLRAKTLRACLYLRISQDSTGEGLGVERQEAECRALCERRNWAVADVITENNRSATKGRRPGFDRLLELIASHEIDVIVIWAIDRLTRQIIEMEEIINACEMHGVKLATVCGDLDLSTVDGRQNARILASVARAEIERKSQRAASKFQQSAEAGKPSGGVRAFGYTKDGLHLEPEEAALVAEAYDRFNSGATLGEICRLFNERNASTARGNTWKTSSMRALLLNPRNAALRGVRWLARDEDGRPVLNEHGQQQRSQFHEIVGKAVWPAAVDEAVWRAAVSKLKDPVRRKHYKGCTRKHLLSGIAVCAVDGCGLVLRNKTNNKSRNLFCPALTHVCRRADAVEDFVEAVILERLRQPDAIDLVQVRAQGVDLAALRDEGAAMRERLRDMARLEALGQRTRDEVEAARDAVNERLGEIDRIVTDAGRADIVARFVGTGRDPVEVWEDPGTTLAMRQALITTLATIRVGSGRNGRPPKYSADEPPPRVFVDFRKREAQS

SEQ ID NO: 49827 - DNA, 50 bp, Lentzea guizhouensis
  source 1..50: mol_type = genomic DNA
cctgagtttcggcgtgagcatggatctcggtactcacgcagagtaccttg

SEQ ID NO: 49828 - DNA, 40 bp, Lentzea guizhouensis
  source 1..40: mol_type = genomic DNA
caaggtgccgcaccacggttcgcggtactcgctgcccgcg

SEQ ID NO: 49829 - DNA, 50 bp, Lentzea guizhouensis
  source 1..50: mol_type = genomic DNA
cctgagtttcggcgtgagcatggaagtcggtactcacgcagagtaccttg

SEQ ID NO: 49830 - DNA, 40 bp, Lentzea guizhouensis
  source 1..40: mol_type = genomic DNA
cctggtgccgcagcagggcagcccgcactcgctgccgccg

SEQ ID NO: 49831 - protein, 620 aa, Roseburia faecis
MKPKKLGNGKITALYERLSRDDDLTGDSNSIINQKKMLEDYAKANGFTNCVHFTDDGWSGGSFDRPSWKRMIEGIGKGEIAAVLVKDLSRVGRDYLQVGFYTEVMFREKGVRFVAITNGVDSDKRESSEFAPFLNIMNEWYIRDCSRKITSVLRARGMSGKHTSNHCIYGYKKDPNDKDHWIIDEEAAEVVRRIYRMAIEGKGPYEIARILATEKVERPSYYLAQRGMGNHQSNYNAADPYTWRGGTVADILSKQEYMGHTVNFRTYKESYKDKRVKMTPKEDLVIFENTQEAIIDKETWERVQTLRKTIRRTDSIGKANPLTGLMFCADCGAKMYNHRGKAGNARDWAGRPNGKKRPDRDEYNCSRYDLGNQHYDKYCTTHLIRTAVVNELLLEAIKGVCDYALSSEAEFMAQVCSASEARQEKAARAIRQRKQRNEKRTDELTRLIRKLYEDNVSGRLSDTIFEQMLSDFEAELSDLTEIISQDQQELERISRETINAEKFLSLVRKYTDFSELTPAMINEFVEKILVHQAQGKGASRTQEIEIFFNFVGKVDIPHKEVKLTEEEKAALAEQERRRAKKAEYNRRYMEKKRRQWKAQQEQEQAKQLPPAAEQKGEHIA

SEQ ID NO: 49832 - DNA, 50 bp, Roseburia faecis
  source 1..50: mol_type = genomic DNA
aaaccaccttgacaaaatgtatcagaagatatatgctgtgaaagggggat

SEQ ID NO: 49833 - DNA, 40 bp, Roseburia faecis
  source 1..40: mol_type = genomic DNA
gccgccaaaacattacactgaggacagcctgctgtccgcc

SEQ ID NO: 49834 - DNA, 50 bp, Roseburia faecis
  source 1..50: mol_type = genomic DNA
aaaccaccttgacaaaatgtatcatgagatatatgctgtgaaagggggat

SEQ ID NO: 49835 - DNA, 40 bp, Roseburia faecis
  source 1..40: mol_type = genomic DNA
gaccccatagcattgctcctgggacgggctgctgtctgcc

SEQ ID NO: 49836 - protein, 510 aa, Planobispora rosea
MTQNKRGKKAEPQLRAGVYARLSETYDAAESVPTQLENGARHAARRGDRLVASFKDDGVSGYKEISRDGFMQLIAAIERGELDVVIVRDIDRLTRNLDDWNQFERACVRNGVILSAYTGGDLDLSTPEGAYYGGMETLRARRESAVKSARVREAVERNARKGRRPGAGKRRFGYRNIYDNPHETDRKRRVIRIELDPAEPDLIREAATRLLDHGESLGGIVRDWQSRNIPTVTGSRWDPNTLRGILTSAFIAGLREWEGEKYPGDWPAIIDIDTHERLRRLFSDPGRKADVTRRQKHLLSGILLCSKCEKKMYFRGEKAPRANSYACAWGMRGGCGGTRIKADSLEEYVTGAVLDALESPRIQEALRKGTDKAEEKQRILILKQIKKAKERKEEARLDYGGEIIDREEWLDIRAQVNSRITELQREYDRLSGKVVILGDIPPGDEVRDAWEGWTIERKRAAIRSVLIDIKIRPVPEDMRSNLPSLHADAAQKIELELKRLRQRVDFNWRV

SEQ ID NO: 49837 - DNA, 50 bp, Planobispora rosea
  source 1..50: mol_type = genomic DNA
aggggacaattacctagcaacgtcttcccgtcactaggtttttctcccat

SEQ ID NO: 49838 - DNA, 40 bp, Planobispora rosea
  source 1..40: mol_type = genomic DNA
gggcggcatcaacgacgacttcccgttcctgctcggccac

SEQ ID NO: 49839 - DNA, 50 bp, Planobispora rosea
  source 1..50: mol_type = genomic DNA
aggggacaattacctagcaacgtcgtcccgtcactaggtttttctcccat

SEQ ID NO: 49840 - DNA, 40 bp, Planobispora rosea
  source 1..40: mol_type = genomic DNA
gggtgccatcaaccacggcgtcccgcagcttctcggcaaa

SEQ ID NO: 49841 - protein, 508 aa, Blautia argi
  SITE 276: note = misc_feature - Xaa can be any naturally occurring amino acid
MQETMNAVIYARYSSHNQTEQSIEGQLRDCYTFAERQGLHVVGEYIDRAITGRTDERPDFQRMISDAQKHQFQRVIVWKFDRFSRDRYDSAIYKHKLKQHGVKVLSAMENVGEGEVGIILEALLEASAEQYSLDLSRKVLRGQRESRIKGTFLGGHVPTGFKVENMRLVADERTAPTIRYMFEQYAQGVPKKQIIADLNARGIRNSQGKPLTLSSIQTVLRNKKYIGIYEHGGEAVTGGCDALIDEDTFYKVQMRLDAVKRAPAASKAKENYLLQXGKAFCGYCGSNMVGECGRGRMGTVYHYYSCSKRKKHHACDKKNEKKDFIEWYVVEQTVQYVLTPERIQYIAAEIIEQYKKDCGNDRIKEYEKQLNRISAEISRLVDTLAVCPPAARQPIFDKMEQLDAEKTETELDLAKLRVSANVQLSKETIVEWLQQFCNGDALDMDFREKIIDTFINSVYLYDDKVVIYYNIKGGKQVSYIEMLDNTKEPPFAENGSSTGVRISNPIAG

SEQ ID NO: 49842 - DNA, 50 bp, Blautia argi
  source 1..50: mol_type = genomic DNA
tgttcggatttcaaatccgatagcagggcaatcaatattaaatccgaaca

SEQ ID NO: 49843 - DNA, 40 bp, Blautia argi
  source 1..40: mol_type = genomic DNA
caatactgaactttttagcaggggatgagggattcgaacc

SEQ ID NO: 49844 - DNA, 50 bp, Blautia argi
  source 1..50: mol_type = genomic DNA
tgttcggatttcaaatccgatagcatggcaatcaatattaaatccgaaca

SEQ ID NO: 49845 - DNA, 40 bp, Blautia argi
  source 1..40: mol_type = genomic DNA
aaaaattaaaatttttagcatgtgatgatggatttgaaat

SEQ ID NO: 49846 - protein, 479 aa, Brachybacterium massiliense
MVGSMTRQRCPRERAVIYKRQSTAREESISLELQETACRDYATQHGYDIVAVEADPGISGRTFARPGVRAVMAMVERGEVDVILLWKWSRWSRNRLDWYVAADKAQQAGGRIESATEPIDTSTSIGRLSRGMMIEIAAFESERAGDQWREAHERRVRQGKPHHGKNRFGYRYDAEQKLHIPDPVTGPILADLYQRYVNGESIYRLVQWLNEHQIPTVEHGSKRGAPSWAESTLRGILDNPFPTGRFVYRGETVDGAHEPVVSLELWEAYRARRERRATRPRAEVSPYLLSGIVRCKACGTVLTGSKATGGNRYYRCATGFTRGTHTGGYIRCSTVESEVKAELRRRANRLDRAADGVLDSGGVARQEGPSVASLEARRKRATKAMANLALQVAEGVPKDVVDEAMAELVVKRDRLDAQIAEARASVAAPAPDQDQVLSLLEDWDVLSVALRREMLGRLFTVTVDFAGDRSVKVKPLHGV

SEQ ID NO: 49847 - DNA, 50 bp, Brachybacterium massiliense
  source 1..50: mol_type = genomic DNA
gtgtagcgtttgcgcggcttcgcgaacaccagtgctcgcgaacgctacgt

SEQ ID NO: 49848 - DNA, 40 bp, Brachybacterium massiliense
  source 1..40: mol_type = genomic DNA
ctcgatgcgccggctggtgaaggaggcgctgcggatgagg

SEQ ID NO: 49849 - DNA, 50 bp, Brachybacterium massiliense
  source 1..50: mol_type = genomic DNA
gtgtagcgtttgcgcggcttcgcgatcaccagtgctcgcgaacgctacgt

SEQ ID NO: 49850 - DNA, 40 bp, Brachybacterium massiliense
  source 1..40: mol_type = genomic DNA
ctggaacagccagctggtgatggaggtggtgaggagtagg

SEQ ID NO: 49851 - protein, 540 aa, Agathobaculum butyriciproducens; identical to SEQ ID NO: 12686

SEQ ID NO: 49852 - DNA, 50 bp, Agathobaculum butyriciproducens; identical to SEQ ID NO: 3657
  source 1..50: mol_type = genomic DNA

SEQ ID NO: 49853 - DNA, 40 bp, Agathobaculum butyriciproducens
  source 1..40: mol_type = genomic DNA
ggtatccaaatgggagcgcggcggcggtgctcccgatatc

SEQ ID NO: 49854 - DNA, 50 bp, Agathobaculum butyriciproducens; identical to SEQ ID NO: 39854
  source 1..50: mol_type = genomic DNA

SEQ ID NO: 49855 - DNA, 40 bp, Agathobaculum butyriciproducens
  source 1..40: mol_type = genomic DNA
gggggccaaatgggaggtcgacgccagagctccggaaatc

SEQ ID NO: 49856 - protein, 546 aa, Blautia producta
MGECMKHQKVSNLFNVAIYIRLSREDGDKEESDSVGNQRKLLTEYVAKKEDFILYDIYVDDGYSGTNFNRPSFQKMIADIEDGKVNCVVVKDLSRFGRDYIDTGRYLERYFPELGVRFISVTDSIDSMKQAYDMLLPIKNIFNEQYARDISKKIQATVKSKQKAGEFIGAFTSYGYKKSPVDKNKLVIDDYAADVVRRIFSLYIQGYGKQRIAKLLNSEGILCPAEYKKVNGENYKNCNRLESTTYWSYSTINSILHREMYVGNMVQGTKHQRMRSKQKKMPKEEWIIVENTHEPIIDKETWEKAQSLLQKRTRELGLETNKNIFAGFVKCGDCGRAMTKNMWRRADGSKTYSLYCGTYKRNGKQYCTPHTLPMAVLEDIVLGDLKAIVDSVDNLKELVQSQSFTASKVKRIADTELSKIKAELERVKRLKKSIYEDYREELISKEEFLSYREDYLKKEELYSKQIEALEEKKKDNVTEDVFETPWIKRLLELKDIETLDRDIVVEMISEIKVYENRKIKITYNFGNELEHLFSSVYSVESEEKAI

SEQ ID NO: 49857 - DNA, 50 bp, Blautia producta; identical to SEQ ID NO: 43457
  source 1..50: mol_type = genomic DNA

SEQ ID NO: 49858 - DNA, 40 bp, Blautia producta
  source 1..40: mol_type = genomic DNA
tctttacagggatgttccacaagccgtcaaaggatctgga

SEQ ID NO: 49859 - DNA, 50 bp, Blautia producta
  source 1..50: mol_type = genomic DNA
catttgcgcaattaacaccctgcaactggaggaacacggttgcgcaagta

SEQ ID NO: 49860 - DNA, 40 bp, Blautia producta
  source 1..40: mol_type = genomic DNA
tccatataggggtgtcccaacagcaggcaaaggagctagg

SEQ ID NO: 49861 - protein, 490 aa, Glutamicibacter protophormiae
MRASIYARLSQDKRKGTSEEGSSVKAQVEACTAFIEAKGWTLDKTYVDNDISATSGALRPQFEQMLTDSPANVVAFKSDRLSRDVMDTLRLKASGITGWLCDGGKLDFSSSDSTMLTLFRSVIDSTEQTKKSERQKLATQRDAKAGKYRGSIRPFGQERTGAWVEPEASAVREATEKLISGEWTFFKVATEWNARGLKTPQTGKQGGREWTSGTVSQYFKRPRLKGYQEYDGTLYKLADWKPLLSEEEFEHIQLIRESRKTGERGKQGYRHQPHLLSGWIECGICGRKLNTAYRGKPKNTRAYSCPTPGHVTRAAEPIEKMLVSRVLVPLFSPSSQEVLSPHGATEAAELRRQQMTLMQEHREWLNEAIEAGLRPTLLAQREAKHEKELAALKESIAELEADSVFAGISWIEHARDIMEFEPIAWENWNSLSTERQRLLIQALYKNVQVMPQGIGTGRTFQPKNIKVEISPLLEELEAEAMQWMLLAAFR

SEQ ID NO: 49862 - DNA, 50 bp, Glutamicibacter protophormiae
  source 1..50: mol_type = genomic DNA
atatagcattcacatatctttgcccagcagaagatattcaactaccctat

SEQ ID NO: 49863 - DNA, 40 bp, Glutamicibacter protophormiae
  source 1..40: mol_type = genomic DNA
catgagcgtgatcatgacccatccgggcacgtcgccacgc

SEQ ID NO: 49864 - DNA, 50 bp, Glutamicibacter protophormiae
  source 1..50: mol_type = genomic DNA
atatagcattcacatatctttgccaagcagaagatattcaactaccctat

SEQ ID NO: 49865 - DNA, 40 bp, Glutamicibacter protophormiae
  source 1..40: mol_type = genomic DNA
gttcagcttgattaggacgaacccgggcacttagccacgc

SEQ ID NO: 49866 - protein, 542 aa, Pseudomonas lactis
MTKKCFPYVRFSSTRQEDGSTRTRQNELIDAFVTKHGLEVDRHLEDAGTSAHRGKNASAEGVLGQFLRQVRMGEIDKGSYLLIENFDRLSRDKIVRSNKIFSDLLYAGIKIVILDKNKIYDADNLDFGDWISALVEFERANAESERKSDFSSKAWKFNREKMRNGEIVTKKVPTWLKVENNAFVIDQVKVERINTLFKLSLSKGLQEATREYNDLYSEKLAIHQTQYLLSNRKLIGEHSPQKIHYDEGGQLKRKDEGDAIPNYYPAVVDEKLFYQVQEVIKSRRPFAGRYSNQRYNVFRDLIYCKWCGGTIRYMNKGERDYFICTNSMTGKCDLNSHFGQLSIRGKKLFGMFFAFTDGLNVSALLEENTQAEELKTQIMKMEANRDQITSRLDDFKIDVKNMIMSGKTIPSTYNELIAELESNRTHIDREIESETKKLDLIYMSEKSFSGLKSNDISEIIYDRSDEAIEKRVRYNSELKKIIKHIRIDYLENALEIEFFNGVQRFIDQDGNTGDQIIGFEPPEFEPEDEERFDLKAGYQSQE

SEQ ID NO: 49867 - DNA, 50 bp, Pseudomonas lactis
  source 1..50: mol_type = genomic DNA
ttggaacctatcgctgaacatattcagacatgttacgctatacgttccat

SEQ ID NO: 49868 - DNA, 40 bp, Pseudomonas lactis
  source 1..40: mol_type = genomic DNA
ccgtgcatagcagtagatgcaaccatgttcacaaccgcga

SEQ ID NO: 49869 - DNA, 50 bp, Pseudomonas lactis; identical to SEQ ID NO: 49867
  source 1..50: mol_type = genomic DNA

SEQ ID NO: 49870 - DNA, 40 bp, Pseudomonas lactis
  source 1..40: mol_type = genomic DNA
ccgtgactagccttagattcaaccatgtcctcagcagaga

SEQ ID NO: 49871 - protein, 562 aa, Pseudomonas fluorescens
MPRKCYPYIRFSSKKQELGTSYARQSDIETFLERHNLVVDTTLEDLGVSAFRGKNATQGQLGGFIDLVQSGLVEPNSILLIENFDRLSRQKIIKSTRIFIDLLSQGIDIAILDTGKIYTRENLISSDFFNVIIEFDRANKESERKSDFTSAAWNIYRKEMRSLKIPKTRKTPSWIAVEGSIRNKDPEKSDARFVIIENEARKIRKMFELALTNGLSETARLLNDWLEPTDKKYSIHQVQYILKNRKVIGEHQPMKFQENEQGEMKLFAEGSTIENYYPAIISKEMFDEVQEKTTGRKPFAGKFNKTRLNVFQGFIYCYHCNGTIRYMDKSSEERPNKHYYICTNSMTGKCTLSHRLSYDASEAMQNFFEKTEKLNMTEVFNNDEKILDLNKQIKTIESTIHKKEKQGSNLKRQIRDAVEKNRDIPEFLTELLLENEQESKALAVEQQQLIETKNQHIEQQEISKSFSQENIHALLNDRSEDGVRKRIQINNHLRKIVKQIHFFWRKKPGGKRGIGIPTMLVEFQNGIKRFVLEDDFTLDSDFSNVSIFEQVMQETHELYLKK

SEQ ID NO: 49872 - DNA, 50 bp, Pseudomonas fluorescens
  source 1..50: mol_type = genomic DNA
gagtgtcttatagcgtgacataggcagccgtgttactctaaaagacacca

SEQ ID NO: 49873 - DNA, 40 bp, Pseudomonas fluorescens; identical to SEQ ID NO: 49868
  source 1..40: mol_type = genomic DNA

SEQ ID NO: 49874 - DNA, 50 bp, Pseudomonas fluorescens; identical to SEQ ID NO: 49872
  source 1..50: mol_type = genomic DNA

SEQ ID NO: 49875 - DNA, 40 bp, Pseudomonas fluorescens; identical to SEQ ID NO: 49870
  source 1..40: mol_type = genomic DNA

SEQ ID NO: 49876 - protein, 462 aa, Geobacillus thermocatenulatus
MLIYTDEGYSGEFLERPGLEKLRDDVRKGLIEAVIVYDPDRLARNLMHQLLIDDELRKNNVELIFVNGEYENTPEGKLFFSLRGAIAEFEKAKIRERTMAGRLRKAKEGKIVKDDKIYGYDYDKQTGQLVINEEEAEIVRFIFDSFIRQDRFKGINGIALYLTEKKVPTKTGKTVWHRQVVRQILMNETYMGKRPQNKWNTEGMIANRYRKDQKVPMTLRPKEEWIYVDVPAIVTEEQFRRAQILLEQSRRRYAKTTKHKYLLSGLLRCAQCGNTMTGRYTKNWGKYYREYTDIKNTAGAKYRGCGMTVRADEIEKVVWSHLMDIFNNPDRLHDFQPERTDGNFEKAELDRLAKEIERARKGRKRLLNLVTISDDIDLEEIKEEIRRLQQREKDLTEQYAQLEQQLRALQDTKPSEHILREAIDFFMRHKDELSFETKQAIVRKAIKEIRVLDKDDIEIILF

SEQ ID NO: 49877 - DNA, 50 bp, Geobacillus thermocatenulatus
  source 1..50: mol_type = genomic DNA
ccgcacactaatgacattaaaaacgaaatcctaatgtcgttagtgtgcgg

SEQ ID NO: 49878 - DNA, 40 bp, Geobacillus thermocatenulatus
  source 1..40: mol_type = genomic DNA
ggctcgatgtattgagaacgaaatcctgatgcatttgcgt

SEQ ID NO: 49879 - DNA, 50 bp, Geobacillus thermocatenulatus
  source 1..50: mol_type = genomic DNA
ccgcacactaatgacattaaaaaccgaatcctaatgtcgttagtgtgcgg

SEQ ID NO: 49880 - DNA, 40 bp, Geobacillus thermocatenulatus
  source 1..40: mol_type = genomic DNA
ggctccccgcagagaaaaccgagtccagatgcatttgggt

SEQ ID NO: 49881 - protein, 479 aa, Veillonella seminalis; identical to SEQ ID NO: 47396

SEQ ID NO: 49882 - DNA, 50 bp, Veillonella seminalis
  source 1..50: mol_type = genomic DNA
acaagttttgatgtcacttccacgtgcatggtagtgacatcaaaacatat

SEQ ID NO: 49883 - DNA, 40 bp, Veillonella seminalis
  source 1..40: mol_type = genomic DNA
caaacaaatagtctccacatgcgcggtcatcgggaacata

SEQ ID NO: 49884 - DNA, 50 bp, Veillonella seminalis
  source 1..50: mol_type = genomic DNA
acaagttttgatgtcacttccacgtacatggtagtgacatcaaaacatat

SEQ ID NO: 49885 - DNA, 40 bp, Veillonella seminalis
  source 1..40: mol_type = genomic DNA
caaacaaatcctctccacttaaacagccatcaggatcatc

SEQ ID NO: 49886 - protein, 517 aa, Nocardia farcinica
MPLNPKDFPDLEAWIYGRNSQDKNKGLSVPQQVRWGRGECERFGWTVGKVITDTDIGATRHTVKQRPGYQELTAGLGERAPEGRRRVLVTRSSSRANRQLLDFATLREMCARLGVYWYSGGQLYDMDNPQDRRILAQEAVDNEYGPEQNRFDSMQQLRQNFLDGKPHGKEAFGYEMVYKRGRAVDRIPSPTKAPIVSEMARRALELEKASSIARWLTEQEVPIPSADIGLPCRKCSVTKGRRVLEAVDRRTCPCDKSWMTRWEHGTVRNVLTSPTIAGLRAHKDRTTGVTEVVPATWEAIISIEDHRRLVALLTDPARSTHTRGTAPRWLLPGIPQCGKCGGRINSKSGGQARARGYECERFCVYRTAQLVDDLVEETVLRRLEDPDLLAALTRTDEDAAAAAKEAERLRAAYDQWISQAIEEDLSPAEIKQYKTRKMPAIKAAEARAQAALPMPHVVAAAGPDARAKWHDDEQTPLAAKRDIIRSLLSITIHPAGKRRTFGGPADLDSIEIQRLVA

SEQ ID NO: 49887 - DNA, 50 bp, Nocardia farcinica
  source 1..50: mol_type = genomic DNA
tgctctctgaaaggtgcattgaccgtggagaacttcagttagggggtgca

SEQ ID NO: 49888 - DNA, 40 bp, Nocardia farcinica
  source 1..40: mol_type = genomic DNA
cgcgccggagaacttcaccgtcgtccagtagccgacggcg

SEQ ID NO: 49889 - DNA, 50 bp, Nocardia farcinica
  source 1..50: mol_type = genomic DNA
tgctctctgaaaggtgcattgacctgggagaacttcagttagggggtgca

SEQ ID NO: 49890 - DNA, 40 bp, Nocardia farcinica
  source 1..40: mol_type = genomic DNA
ggcgacggagcactgcacctgcctccagccgccggctgtg

SEQ ID NO: 49891 - protein, 512 aa, Kocuria indica
MTAVTYQRVSTKEQATNGGRDEGFSIPAQREANRRKADTLDANVVAEFVDAGESARSAKRPELQRMLDYIAAHQVTYCIVHKVGRLARNRLDDVDIHRRLIDAGVQLVSATENIDGTPSGMLLHGIMSSIAEFYSRNLAAEVTKGMTQKVAAGGTPSRAPIGYRNVRKCDAHGCEYRTVEIDPGRAPLIRWVFDTYAKGEHTVPGLLAEVTARGLATVPTPKRPSGPVGRSTFFKLLRNPYYIGQVRYQGALHPGAHEPIVDPETWQQVQTLLDTRATAGERRRKHDHYLKGTLYCGTCNARLQLDYARNKQGIRYAYYICTGRATKRTMCTRKAVPVGIAEQLVTDCYQQIAITEQTYTQLAERVEAAFDERLAERSQAIDDLTTTKRRLEAEADKLLEAHFADAIDLPTLKRHQDRIRIALADVSKRLDAERHDHEGPRQHLATALRLLADCASMYELTDALGKRLANQAFYHRIEITEDEEAAIQLNEPFAALAPASSDVRCSSTSDLV

SEQ ID NO: 49892 - DNA, 50 bp, Kocuria indica
  source 1..50: mol_type = genomic DNA
aggtgttctagtacgtctgatttggtgggcgccggtggactcagcccgaa

SEQ ID NO: 49893 - DNA, 40 bp, Kocuria indica
  source 1..40: mol_type = genomic DNA
ccccggggggttctcggatgtggagcctaggagattcgaa

SEQ ID NO: 49894 - DNA, 50 bp, Kocuria indica
  source 1..50: mol_type = genomic DNA
aggtgttctagtacgtctgatttggggggcgccggtggactcagcccgaa

SEQ ID NO: 49895 - DNA, 40 bp, Kocuria indica
  source 1..40: mol_type = genomic DNA
ccccggggggacctcggatggggagcctgtgggaccgtca

SEQ ID NO: 49896 - protein, 517 aa, Arthrobacter alpinus
MKSMIVREYLRVSKDSKGTGKSPDQQHDENVKAFERQGWLLHQEPPYRDTDRSASRFARKGREDFKRLITDLEEDTFNADVLAIWESSRGSRRVGEWVDLVDLCKERSVCIWVTTHGRLYDPANARDRRSLLEDAVDAEYESDKSSERIQRDVRAAAEGGRPHGKNMYGYHRVYDQKSGELERIEPHSEQAPIIQEAAQRILEGQSFYAVAKDFNERGIPPRRPTRMQHRTNIGWTPPAVKQMLTMPAYAGKRQHRGEILDNVEVMWPALIEYESWQKLQAIMSPPERKRTNDWPAKYLLTGIAICGVCGAPTRIGKQNAGRRKDKATGEPLPRPIDEHGNELPYPHYYTYVCVGVPGKTGFHVAMRQEHLDEVVTELVLTRIAGPDFMAVAGVRGHGVDAERHAVLAEIIGYHEYLDSVRKEAAEKLRFDLLLDQEARIGPKIKDAQKKLERLTEMDPLVLKLARSGASRQAWDALELSVQRRIVRSVVTPRINRVSGDAKGKRGVNRDRVVAVWR

SEQ ID NO: 49897 - DNA, 50 bp, Arthrobacter alpinus
  source 1..50: mol_type = genomic DNA
ccatctactttttcaacagtctctggtgatacggtcagtcaaggaggtgg

SEQ ID NO: 49898 - DNA, 40 bp, Arthrobacter alpinus
  source 1..40: mol_type = genomic DNA
acacctcacagccgtcagtggggccaactgcactctggtg

SEQ ID NO: 49899 - DNA, 50 bp, Arthrobacter alpinus
  source 1..50: mol_type = genomic DNA
ccatctactttttcaacagtctctgctgatacggtcagtcaaggaggtgg

SEQ ID NO: 49900 - DNA, 40 bp, Arthrobacter alpinus
  source 1..40: mol_type = genomic DNA
acggctcaccgccgtccgtgcgtccatctgcactgtgaca

SEQ ID NO: 49901 - protein, 507 aa, Roseburia hominis
MLFLKKYKYNDNNLAICYYRFSSHAQNEASIDQQREQAKFFAQTHDLKIIKEYSDEAISGTTDNRPGFQQMLSEVAKLKPSTLIVWKVDRLGRDRTNIAIAKDTLRRAGCRVKYVAETVANEDTPESQFTEAMLESMAEFYSAQLRVNVMRGMRYNAEHALYNGHKTLGYAVDGEKHYVIDEETAPVVRRIFEQYASGVPMQQIMNELNDAGIKTTRGNEFTINSLRHILHNRAYIGEYHYNDIVIPDGMPSIIPCELFKTAQERFELNRRIKCHKSSTMAKNVSESRFWLTGKLYCGKCGESMHGLSGTSKTGATHYYYACNNHRKHKCTLKNIPQHQMELNVISILKTFLNDSENLASLAVDIANYHKSRNDNSAFIASLEEMLKQNEKQITNIVNAIANGAMSSALTDKLQQLEIEKGSLTDAIEVEQAKARLIVDEHSVKEYFKQYANANLDDAEIRDSVLNYFVDKIYVYDDKITVTGCFSGEPTEIPFTEFSEFDCETVSS

SEQ ID NO: 49902 - DNA, 50 bp, Roseburia hominis
  source 1..50: mol_type = genomic DNA
agttcgactgcgaaacagtcagctccacttatcaactatgtgacgaaccc

SEQ ID NO: 49903 - DNA, 40 bp, Roseburia hominis
  source 1..40: mol_type = genomic DNA
ggttcgattcccgtctggtccatcttaaaaagcgccatgc

SEQ ID NO: 49904 - DNA, 50 bp, Roseburia hominis
  source 1..50: mol_type = genomic DNA
agttcgactgcgaaacagtcagcttaacttatcaactatgtgacgaaccc

SEQ ID NO: 49905 - DNA, 40 bp, Roseburia hominis
  source 1..40: mol_type = genomic DNA
ggtgggattcctgtacggctaatattagtaatcgccatgc

SEQ ID NO: 49906 - protein, 476 aa, Clavibacter michiganensis
MADPAPTRVAIYARQSEDVSEGIERQLSRCRALIDARGYALVREYLDNDTSAAKRRGPSTAWAKMLDELAAGAADVVVAVDLDRLLRDTRDLIAIMDTGARVLTVDGEIDLTTADGEFRATMLAGIARFEIRRKSERQLRANLDRASRGRPTPGRRRFGYDSDGITPREHEAVHVRRMFQHVADGGSIRSLVRSLVDDGVDPAPGRAWTPTRVRYILTNPHYSGSVTHLGRVMPSDSIVPLVDADLAAEVRAILADAARRTTPGPSRRYLLSGLATCGVCGAGMHFMRTYRCSASTAHPSITRDRLEGRIREEIARALIGGGSTLFPVRTETGAVGRLMAEHARNADAVTALLADRDEGLVPAQSARERLIALRGEREEIERQLDEARVSKSAASALVDVAQTLLSSLPPEGTPYDDVAAAILARFDELDLDRQREIVAALLYVQVDPGRDTRRRVHVEHLLAPALNPREQVDADE

SEQ ID NO: 49907 - DNA, 50 bp, Clavibacter michiganensis
  source 1..50: mol_type = genomic DNA
cgccgtgcatatgacgctgggttgcgcaggcggacctatcgttatatgca

SEQ ID NO: 49908 - DNA, 40 bp, Clavibacter michiganensis
  source 1..40: mol_type = genomic DNA
cgccgcgatgaggcggttgcgcaggaggaacctccagcgc

SEQ ID NO: 49909 - DNA, 50 bp, Clavibacter michiganensis
  source 1..50: mol_type = genomic DNA
cgccgtgcatatgacgctgggttgtccaggcggacctatcgttatatgca

SEQ ID NO: 49910 - DNA, 40 bp, Clavibacter michiganensis
  source 1..40: mol_type = genomic DNA
ggccacgaggtggggggtgtccagcagtatcctccagggc
